United States Patent Application Publication US 2013/0034624 A1 - sequence listing, part 18

SEQ ID NO: 53750 - DNA, 994 bp, Bovine  19866881285506
  misc_feature (1)..(1): n is a, c, g, or t
ntttggtagaactggaaaaggggaaagtcacctgtttcaattgatggatttttaaatgtgaaaaaaaaaagaaataattttctcagtaggatatatgaaatcattccatgttctttttgaattatgtaaatcatgctgaaagtggatagtaatttcaaagagcatttttatgccctacaaattagtttattactcagaagcacacgaatgatgacttttaaaaatagagttatgtattcaagaagcagaaaatgctggtgtgtggagaatgcgtggaccaacagtgagtggctagtcataaagccgattgctagaattatcctcaggtggatccaattagctgcatctgacaggacgtcagacactgctgggatgcccatgttcgtgtgtcttatgtcccctttggaagccagaagatgtctcagtgaggctccacccacagcagccatgacagtgtgccctacccctctcccaattcacaccagcatgaactaactgaactgtgattgaactttcctgctcaggcaagtacatttttaacacaatctaccctgtttaagcctaatttgcatttcattttacaatcttgccattcaacacaagcccttaaagatagattttagggcagcagctaatctgaaacgtacatgactctcattctgctaaccaaagatatgctttctgtttctgaaatatccttaggagaattaaacagctggacatctttatttgactgtatgtttctgaattgtcttctcttacagtaaaaaaaaaaagctactagtgtatttcttgaaaatgtttaaacttttaattttataaagagaattagttatcctttcaacaacatataaccgagagatacgaccaatattgcccatctccaagaaacagtgttttcactgaaagactcaacaatagtgcatttttgcagacttggttatgacagattatatgtgaaggcaagtttcttgtcaagtagagcataacatgc

SEQ ID NO: 53751 - DNA, 2457 bp, Bovine  19866881641062
  misc_feature (1)..(1): n is a, c, g, or t
nacagcatattaaaaagcgagacattactttgccacaaaggtccgtctagtcaggctatggtttttccagtggtcatgtatggatgtgaaagatggactgtgaagaaagctgagtggtgaagaattgatccttttgaattgtggtgttggagaagactcttgagagctccttggactacaaggagatccaaccagtccatcctaaaggacatcagtcctgggtgttcattggaaggactgatgttgaagctgaaagtccaatactttggccacctgatgcgaagagctgactcatttgaaaaaaacccagatgctgggtaagattgaggggtaggaggagaaggggatgacagaggatgagatggttggatggcatcaccaactcaatggacatggatctgggtggactccaggagttggtgatggagagggaggcctggcatgctgcggttcatggggtcgcaaagagttggacacaactgggtgactgaactgaactgtattagtcataattgttcctaaatccctcccttcctccttcacatttctcctcactaaaatctcagttttacactttctttgacagagcaacttagctcgtgatttgtctactctttatcattacagttttccattgatagccaaccctccacaacgaaaataacccatcataaggtttctgttatgtatgtatacacataaacatgggcttccctggtagcttagctggtaaagaatccgcttgcaatatgggagacctgggtttgatccctgtgttgggcagatccctggaggagggcatgacaacccactcttgtattcttgcctggagaatccccatggacagaggagccttgggggctatagtccatggggtcacagagaatccctgtgtccctcacttgaagggtcccttagtctttaatgactgacagactaagtacagcacagcacagacacacacagaaagacatagacacacacacacatataaaattctctttttcctcccatgtctactgtgtgtgtgtgtgcggaggtggggggggggttgtaacctttagtagagatgctctatagaacaaagtagactaagttaggttttcaataacaccagctgttcagaaaggttccctactttctcagtaccaatttgttgtttgatttgcatattttagtatttttaattggacatataatataggcatttagtaaatatgttaaaatattcaaagtattgagattagattcagcttgctgatttgcttaagtaatctaagtctgtagagcagttttcctctggaaatcatttgtcctccatggtttttttatttcattgtgatatatatttatcacatataacatatatcattttttaacttttaattaatatccataagtgtaagtatcatttcctggccagccattgttatattggaaaactgttggatcttggtggggcgcagacccatgcatactctgagatagctacctttcagatattaatttcactcatttgtaaaatgaaatatcactgtaggacctgtctacgtcattgtcctgaagatcagatgcagtagtaattcaaaggattttgaaaagtgataatttaagatatcgttgtcaaaataatttcttatatttaaatgtaattaaaccagttagataataccattggcaaaacattaaatattttcttgatatatgttcaataaaaaataaatataagcttcatttgagatgctctagtcaatccctatgactttaaacgtgattttgtgaggaaactctagtactatctcaactgtacttccgagaagtataatcatagttttataaaatttattctgttaccaatatcataattgtctgattgtatattgctaatgggataccacttaaacacaaatgctagtctacatctactaatattattactaatggtgatctcatatcagtaaaatatacaccaattacacagaaaacatttttaaacacaggagtggttttctaattcagttttatggttcttgtaaagttaaatgggcaaagtaagcaaacacataaatgtcaggaaagtaaattatctttatgtcatttcatttccactaaaataaaatttattttactagaagcagaggtagagacatcattttaaaaatgagttggaaaatttctaagttctcctttaactttagaaatgaacattttcttcacatggatctgcatttctttttaatgattgcagattctgaagcagtcctatttaagaagctcttctttgaaagtaattgtaaatggcagcactattacagtcttttttgaaatagaagtacctgttgactctgataactctagctggccttttcctggggctacccactgtccatacacagtccttgccaaaccatttttatgagatagtcggcttcatacaaggagacttcttttatctaa

SEQ ID NO: 53752 - DNA, 937 bp, Bovine  19866881885791
  misc_feature (1)..(1): n is a, c, g, or t
nacagagtcggacacgactgaaggcacttagcagcagcagcagcagccaatgcagtagacacaagagatgcaagttcaatcctgggtcagcaagatatcttggagaaggaaatggcagcccactccaggtatgcttgcctgaagaattccatggacagaggaagcctggtgggctacagtccatggggtcacaaagagtcggacacagctgagcatgcatgcacctaaggtttaaattcaggatgcattgccatcagaaaagaatgttgatatttttgcatctgtatatcttactccttgtctatttttattcagttcagaaattgagtaggatatgttgatttaatttagaaggcaaaccccagggctattattgtcattaatatttgacaatatgtctttcatctcgcaaataagtgacttttgactccaagatacttttgcttttttcttgaagtatgttgtaaactgttattagattagaaagagccactatactttttcagatctactattccttgaaacatctcaaaataaactacttcttgcaaatacctgtttcaagctctgtttcctagggagattctaagcttacaaatattgtgactgatacagtaatctatactatttgtgtataatatgcatatatacacatgcaattgttaatagaaataaaaagggcaaacctcaagtgatttgaggtttttaatctcttgattattatctcttcctaataatataattataaagaaactctgagaattcttcaacatgctgctgttcatttactgaagcagtttctaatgtgtttcccatcctcacccacaccccctcaacccccttccccgccatcttcacatgaatgggaataaatctacctcagtgcacattgggtaatccatcagtaagattttccagtatgcttcctgacaggtct

SEQ ID NO: 53753 - DNA, 842 bp, Bovine  19866881900506
  misc_feature (1)..(1): n is a, c, g, or t
ncatttattgttgaacaagcaaggactgtgtatcatctgcacctacatcttcccttttcccttcttatgaaagactgtgctattttattttatagtcatatatgtgggaaaatagtaagtgacagggttccaggaattgcatctcttgatacattatctgcattgatggaatgttagtagctcctatactcagaatagaatctatgatggctgggttggactttcctgctgcttttcacttctgtgcataacaaagaagactgcttgaataactttaaattacttagcatgagctaatctcattccttgcaggcaatattaatggcataacatagaatacagtgacacaaaggggagtatactcttgaaatagagaataagatagagaatgatgtaggagggaaaaaaaaatccctgctatattgctgagaaagttaccattttttcctattaaaagagttatttgtgtgattgctaaaaatgatcacaaaagagaataacattttatttcagtgcaaatatgttcacttgtgaacacagataaatatcctgacctcagatgtgtatttctgataggaattcagtgaatgccatttttatcacccttgatcatgctgaaagatttttaaagatttggtagttataaataaatacctaactaatacttgttgagaaactatttgtcaaataccatacaagactccatgtacaacaacacatctctccttttaaggagtttaaagtcaagttcagcaggaggaaagttaattgatcattaaaacatgttcatttaaatggtcttacagaagaaagcactgtgggctcagatagtaaagaatctg

SEQ ID NO: 53754 - DNA, 1189 bp, Bovine  19866881906276
  misc_feature (1)..(1): n is a, c, g, or t
ncctttgcaacagtcacctagaagtggaattgaagagaaattgtcagaccagagtataagttcaaaaatgagggtgaaaaaattgccgacagctaattaccttaaaacatctctctttcattactggacagcaattatgctctgatctttgaaagatgagtttttttaaaaaatggcagaaaataagacaattgaatctcatcattagtctctttacccttcctgaaacggtctgtgtaactgtaggttgacatgtgtgtgtatgtgtgactcatcttacaacatgcctgtgatcatgtaccgtatgccttttggcttctactgggtgggttttacaagaaagaagaggcagggtttcatttttcccagctgtgaagatgcaaaatttttaaattaaaaataacctttcagctgatttcttgcataattgctatcttgttttgctaatactgtggctgaattataacttgctgaggccttggggatttgcatgctggtttatcctctgaatttgcattgacatggttttcagtgaagtgagcaactaaatcctgtggccatgagcctggctggcagtatttgcattggaaatcagtaggagattatgggaacaagggctctgtgcagcctccctaaatagacccaatggtgaaaattttgggtctctcaaaatgctcttctctcctattaagtgtcgacagttgctgagactttaactgcacttcatcaaaggaccgaaatgacaagagaatccatgggggaaatgtacagaccaactaccactctatgacacatattgaatgatatgatcatttgccagaatcttttaaaatatatttttgggaagaaaaatttggggagattctttctgaatgaatacaaactttctaatacaaaacactccctcaaaaccccattgtgtttcctggggccaggagttaatgtataaggccaatgaggaacttagcatctttaactatgttgtcaaacttcaccagcttacaaaatattttaaaggcagtcagtgagacattctgtaaattaaaagtgagtgaacttttttatagactggccttttttttctttctaggcattggttgtatagtgagatttgtacctgctataactaggcattgggggttatgcctgatgctgaagaagcacaaagagctttaactgcaaacaagtt

SEQ ID NO: 53755 - DNA, 1112 bp, Bovine  19866881944958
  misc_feature (1)..(1): n is a, c, g, or t
ncttaaaccctggacccctaaggatgtccctaacagaaattctcgaaactctgtaagtggagagcaatttggtcagatttgcttttaaaggtaagtggctgaacagagtgaacaagccccaacaagataagatgctctgtgctctgtaagtattagttaatggcaatattcaagtgtttttggaagacacatattgtgatgtggtaattaagatccataagtctcagtcactgttgtaataccaatactttttgtatcaagggttggcagttttgagattcttccttcttttctattttcctgttttggaggtttggtccctctgggtctctccattcattgcaattttgtgtggctgagctattactcttgatatggtaactcaggaatcagcagtcctaggtgggcaggtcaagactcagtggagcctgagaacagtacttaaaggaggaaaaccaagggaaagtaatgactataatataacatgtccagcgagggggcttgacctgtcagaatcctatgagctgctgcagacgctccactagctgtgccgaatagtgaagagatcagtcgcccctaccaggctaaatacccttttccaagagatctctattgggaaagaaagtgagtgatttgtctgctgagttaatgcagggcgttcagttgtttggaagtccaggactggatgccaaggaggagaaagagaacgtttaaccctaacgggatctaatgtacattcagaagcacaaaactggttagcacataagatctgaagatcaaaatgctctgggaaagaaggaatgacaggggatctctgtgaacagagttaaactttaagaatcaacacatagctactgtgacaccactgctgaagtaaatttcttacggtcataaggctgccttcaatgcctgtagatcacttatctcaatctgcagttaggcttttcatttaggagattctgtctttcctactacaggagtaaaagccaatgtttgtttctggcttctcttatagccactgaacccaccataggatcaggggcacagtcggtactaagtaaattaataacgttatcatttatgggaggcttgctgtatggtattgaagtgaa

SEQ ID NO: 53756 - DNA, 1284 bp, Bovine  19866882069147
  misc_feature (1)..(1): n is a, c, g, or t
ntttggggggagggtaactttgttggatttgccttgtagatatgaattgctaggctaaaagtgtaaggtctttatagtcaaatgaagttgtataagtaggttgaaaagaggagagagaggaagatggtgagataaagatacaatatgagtagaatcattgctttgggagcacatagatattttttaaaaaatgtatggagaaagcaggatttatctgaaatttcaattctcttttcctttaaagagaatggtcctcttaatgagaaaggtaaatcaaatacttcagaggaaattaatcccaaggattagagagatatttataagagagcaacaggtacctttaatgagttgaaatttcaagagtcagttacatactaaaataatttgtggctaggattactgatacactgtcagcaattcaaggtattatcaaatgccagagataagcaaatatacaaaatcttaataaagtaggaagagattaattctgaacctcataaaccagtaatcttgttgtcagcatctcaaggattcttgaaagactcattaagtaggtgtttggggagtagttgacaaagataatagagatatggataggacaacagaaatcctctcttcagttcaaacaacaataaaacattcatctaaagacattcttttaggtacagtgtgagtaaaaaagagaaaataacaagatttttcccttagtgattttcccttagtgattttctagttgggatgatcataatgactttgtcagggctctccagataaacagaagcaataggaaattatatatataagattcattataagggattggatcattcaattacagagactgaaaagtcccacaatctgctatcgtcaagtgggacttggcagtataattcagtccaagtcaaaaatctgagagccaggggagtctgaagtcctgaatgcagatgggagaaggcaggagaagataattgttggagatcaagccatcatgcaggagtatctaagctcttcctcttttagcccctttgtttaattcagactcagcacactggatgatgcccctccaaatcagggagaacaaactgcttactgagtctatggattcaaaccatggtccaatggctaggactctgtgcttccaatgcagggggcccaggttccattgctggtcagagaactggatcccacatgtcacaactaaagatttcccaagtagcaatgacgatcaaagatcccacacactgcaactaagacccagtgcagccaaacaaataaattttgatg

SEQ ID NO: 53757 - DNA, 844 bp, Bovine  19866880658625
  misc_feature (1)..(1): n is a, c, g, or t
nctaatgtctgcatctcaatatagctgtgttgttcttatttattatctcacttaatattctgtaagtaagcaatatagcttactttaccaacaaagcaattttattctagagtgatattcatataatagggaatcaggaaagttttagaacatatccttcaggaaagtcaaaggtctacaatatattaagtaagcaatataattagtctgttatttatttttattttttattcaatccaaaatcaacaggcttgaacctccaaaactatattataatctatactaccggaaccaataaggtcaatgaattttgctctaaaaatagtctttttaaagatattatactgctaaagtgctatttatgtaagtttaatttcaaaatgttgtttaacactccagtgttattaatacttaattttattagaacatctaaattagcccaagaaattttaaacccacttgtattacgtctagtagtggtgctgtgatcactgtccctaatctgattttcataagcaacaatatgcaaggtctctaaggaaattattttaaatgaactcaaaaccatgaatttaatttgctttacaattggaagaaattggctcaatattatcttagatgtaaattagcactgttaacttactatctgaaattttgtagatgcccagtatcttgaatttttgaactatagagctctacttttataaatgagtaaatcaagtcatgagggaaacttagctgattttcccaataccatatctaataagtagcaaagctggctcttgaatcaaaatctcttaatttaaaatccaggattttcacataaaaagagggggaaagagaa

SEQ ID NO: 53758 - DNA, 944 bp, Bovine  19866880973871
  misc_feature (1)..(1): n is a, c, g, or t
natataacctgaactattgccacatttatatttatagtgttgatgaagtgcttatactgtaaggctttctataaatttaagtaaacatttgtctggaggaattcacaagctaaagtaacgtctagaattggaattataatatatctaagaatatttatgagacaagaggctgatgaacagtttattaagtaaagcagtatgccagtcatagtttgccatttatacacttagagtttctgagatttatatatatatatatatatgtatgtatctatgaatgtacagcttatcaactttgaaactagcatcaaggggatagaagcttctgattactgaacagtaatgatatatttcataatgaacatatatataagaataataataagcactttgaaaatagctttctttagaattatgacattcacaaaaatcagaattgactgaagagaataaatatattgctttcaaaccagaagaaaaagaaaaataacatttacaaaatttattacgtgagtcagaactgtctgattacacttacaataaatagaatacttgaaacatataatttttaagtaattgtattcacaacagggcttccctggcggctcagaggttaaagcgtctgcccgcaatgcgggagacctgggttagatccctgggtcggaaagattccccggagaaggaaatggcaacctactccagtattcttgcctggagaatcccatggacggaggagcctggtgggctacagtccacggggttgcagagtcggacacgactgagcgacttaaaaaaaaatcacaacattgggaaagaaaactccacagtgcattgaaaatcttctacagtcttaaagtgtagattaatagttatctggataataatttccacacgacttttcccctgaaatattcagattgttaagtaccagtcctgccttctct

SEQ ID NO: 53759 - DNA, 972 bp, Bovine  19866880250713
  misc_feature (1)..(1): n is a, c, g, or t
ntcccttctgctcctagatccctgtgagtttgggttaataatctgagtttaatttttgctaacaagctggtgtggagaaggcaatggcaccccactccagtactcttgcttggaaaatcccatggacggaggagcctggtaggctgcagtccatggggtcgctaagagttggacacgactgagcgacttcactttcacttttcactttcatgcattggagaaggaaatggcaacccactccagtgttcttgcctggagaatcccagggacaggggagcctggtgggctgccgtctatggggtcgcacagagtcggacacgactgaagcaacttagcagcagcagcagcaacaagctggtgatcctttgggttgaatcagctgagttatctcgaggctgtgatcagtgacagaacctccggaaagccttggttccttctgtcttagggcacaagatggccacgcagggcttctggatatgaacggcaagatggtccatgacttgcccttaaccagatatttgcatcatccctttctcctttcaaaggtacatgaccgatggtggacttggcctctacacccgccgcctgaaccggctccctgatgggatggctgtggtgcgagagaccctgcaaagaaatacctccctgggcctcggagacgctgacaggtaagcctgctccacttggggtggcccagatgtggaggtgactccagtggggcctgagaaatgagggcagtcatagtgagagccaacgtgtgctgctttaacctaccagaggctgggaggccttgaagccaggcctgaggttaggagctggcccagcaggtggaagagggctcctgaccggctctcgcatcctgcctctaggtggtggatgatggttctgacagcaagaacccagggagttcaggctgggaaagtttttgttgttgttttactgttgctactgcatctttatcagttcagcagg

SEQ ID NO: 53760 - DNA, 780 bp, Bovine  19866880355323
  misc_feature (1)..(1): n is a, c, g, or t
ntatctcctatgtactaggaattactatccctaaaatacataaggatgttgagaagcagtggggtaagtaacttgcccaagggcacactgctgctaagaccctattaagcagaggccatggttgaaaccacctcatcacctctgagttttggccttgagcctggtacttggcacactggggagaattttcttcatcaccaatagccacttcgcccatcgagtattaagtacactgacaatagcctatacgatgggccctgtattttctccccctcctccttccctttttataggagtagttggctccaagggtagaaagcatcataggagatcccagttctgtactcttcttgaagtttagagagaaagacaaaaacactcattcaattcagagcatagtacaggctgacactaaatttgcaggttcagctgcaggcagctagctgcacccagacagaaactccattcttcagccaacctttccccaaacatggtaccaggaacaatgggatgcggggacgaaaagtgtgtgaatggttcagggcagccccatcaccagtagccagaacatacttaagactatgttcttctaacaatgcccaagagtgtcatgtgcatgcacaaatgtcagaattataaggaaaatatagaatacagtctttatttgcagctcacagtagaatgcaaacatttagctccaagaatggcctctgcattgttctttgtgatgacaaaaggagtgggacaccctgaaaaaccctcagtggggaaagagttcat

SEQ ID NO: 53761 - DNA, 1591 bp, Bovine  19866880356269
  misc_feature (1)..(1): n is a, c, g, or t
ngtggtggggtgctccttaagcagctgagtcgacgtggcaaacaccctcctaccacagggctgctgggcagagtgataggaaattacacacccagagtcttccccagagcttcgaatctcactgtagcagtgataacatatctgccttctccacatggggaagaaagccagtatcagccctgggaatgaggaaaatgttctggtcattgtgtgtgacgccctgcccccttccttccgatctaatgctgcttctcttgttttccacctgcctggccttctagccctctctcttcccctgccgctagccctaagttctgcagaagtactctgccccggaaacaggacaggtaatgacatcgtaggccggggaccccaccgagcctctagcatcctctgccccaccctgtgtcgagcccggatgttttgtgtgaggctgttggcctgtggcttccgcttgtgttcgtggccccgctgtactctgtgacccaacccccaacctgagacatgcccgtgagggtgagttctgctgtccacagagctcgggaagaggtgcactggggccggcccctcttctcccagcttgggaaggaacctcaaacctgccacctggaaaggggcggcaaaagctctcactggcatgtcagcctaccccgtggcatgctccttgctccctggcttcctgcccttttgcctccctcccttccccttccaggcccagacatgatctaccacccaccacgcggcttggccctcacctttgtctcccctctgccccttctccccacgcagctggctctttgccctctccaaggcctttgctgcagtttggctcggtgtctcgcgggctgttgtgttctgggtgcccattttctgtaaagataagaagaacatggggagtactgttggcccccagctgccctgtgggtgggcctcagagatggattattgactttgaatttgtgggggagccatggcttggccaaacataataagcagatgttgtttcatgctaggggaaaaaaaaattagcgaaaaccctcttcaccatgtcaatagcaaaaacgttgctttggtcggactcagagaccaagccttttaaacctcggtctttggaaatccgaacgttgctctgttcggactcagagaccaagcctttaaacctctgtctttggaaatccgaatgctgtgactttgtcagccagcaagttgtaacatgccccaactctgcccaaggctcagcttctagctccacccaatgagggcctcgaaaactgagagggatccggaatccacttgttacagatgaattccaaatatgcagactgctggcctcttgaaaccatccaagtcccttctttcacttgaagtcatcaccggaggcatctgggggtgggccagagtggtgacgggtgcagggagccctaagcgctggcggtaccgatgggcgacgggccgaggaaggcgtgggcactgcttcaaggtgggggcagcccctgggttcggctctgaacctgtggaaaaggaaggagcagtcggggccgagggctcgggcccccaggtgccggggtggaggcgcccaggttagcacggg

SEQ ID NO: 53762 - DNA, 2417 bp, Bovine  19866880359219
  misc_feature (1)..(1): n is a, c, g, or t
nccctgtccgtcacaaactcctggagcttgctcaaactcatgtccatcgattcagtgaggccatgcaaccatctcatcgtctgtcatccccttctcctcctgccttcaatctttcccagcatcagggtcttcgccagtgactcagttctttgcatcaggtggccaaagtattggagtttcagcttcagcatcagtccttccaatgaatattcaggactgatttcctttaggatggactggttggatctccgtgcagtccaagggactttcaagagtcttcttcaatgccacagttctttggtgctcagctttcttcatagtcctactctcacatccatacatgactactggaaaaatcatagctttgactagatggacctctgttggcaaagtaatgtctctgctttttaatatgctgtctagattggttatagcttttcttccaaggagcaagcgtcttttaatttcatggctgcagtcaccaaccacagtgattttggagcccaagaaaataaagtctgtcactgtttccgttgtttccccatctatttgccatgaagtgatgggaccagatgccatgatcttagttttttgaatgttgagttttaagccaagtttttcactctcctctttcacttacatcaagaggctctttagttcttttttgctttctgccataagggtggtgtcatctgcgtatctcctctagaaaatagcaaatttatctgcccattatggaaagaggtatctttcatcctcctggggacaatcctacaataagttggacttgtcaatttttttaactgttacttattttccaaggaatatcgtaacatactaaaaagccaagagagagggagagagaaacagatgaaatgacctctaatccccgttccacactgtttttattattttttcatggtgtctcttaaagtcagccaacaagcatacacaattataacacacttgttatcatagcttaaaaataattttatattctatcctttcttttcattaaggcaaggagaaaaggggatataaccgagttctatttgcaattccttctgtgcattgaataatagccactaatgcttccagcaaccctctccccacaaatggcacctttcttccaggtccatacagttaaattttgtagtttatggggtttggaattagtttcttgtatagtcactttggttttacaaattttctggcctatcattgtaaaatcaagctgaactcctacctgattggtgccatgttcgtatgaatttgccatgtgatcctttgcattccatcactgctaacatcttcagaattcagaaaggtgatatgaacattctggctctggataaatttgaccagaggccttttcagagtatgttgtacaaacatctaaagaaatactgttttctcccttcaaaatgtcattttccaggttcctgatctcattcctacagaactgcttttgaataacaatgtggccaaagccaatgcttaaggacttcgatgcatgactgaagacaatttttctggccttggaatgtgtagggttagagggtgggggaagggcaggcgtccaatgagtttctttcctcgtactctgaaattgttcgcttcttacctgcccttgcctcaaacctagtttttactgaaaaattcattgctcttaaaagtaaaagagctattaaaagtattcagatgtcagggtatcaggcaaccacttgtattcttggtggttctgtttgctctcaggaaaagtaattccaaataaaagttattgaacagggagtcttgcagcatgatgttggttctcagaacacaaatgagctgctgtgtgtgtgtttatctgtaataatgtcctcaaaatacagggaaactttttaatctttttggttcccttggagaagagaggacctaactaaatttcccgaattcttccacacaaaagtctttttttgttccctaaatacttttgctgttggaaataaagaactcggcagtctaagtccttcagcaaatgtttcaaacacctcgtttgggccaacaccttgtcctgggattggcctgttaacctttcaccctttacccagcctgccatggggcagtgatcctcttagagtcctccccagagaaggctgcaacataggatgatacttaagtctatttaacctggggatttggggaggcggcttttccacaatgcattgttcatcatctccatttgttttctatagttcttccaattaattggccagggctttgaaaacacatgtgatttttaaggccttgtaggctgttcctctattttaagtgggagaaaccagagtaggctcatgatttataaatgtccttatgtttacatactcagaaatagtccataaagaaataggggtcacatgtattacaacagcaca

SEQ ID NO: 53763 - DNA, 2498 bp, Bovine  19866880362006
  misc_feature (1)..(1): n is a, c, g, or t
ntggctgattcatgttgatatatggcagaaaccaacacaatactgtaaagcaattatccttcaattaaaagtaaatacatttaaaacattttttaaaataagtttggaaaaataaataagggggaaaaggcattgtaatgaacacttttaatattccagaaggtaaaatcatggaaatagactctataaatcttgtctctatggaaaaaataaaagaatattctgggcaagggaacagccaagacaaaggcctagaggtgggaaagagctggaaattatgagaacaggaaattatccctagtgcctgctctcaaatagaaaagggtaacatggggtgatttcaggaagcaggcaggagcgaatggcacaagaccccacaagccacaatagtagggggaggggattttattcgacactcaaccggcagtcataggacactttaaacagggagcaaaaggatctaagttttcaaaaggtcactctggccctcgtgagaggaatggacagagagctggggtcaggactggaagcagggagtctagttacctggctgctggaatagtccaggtgcaagaagcttaggccaggggacaggagcggagactgaagggagtgcagaaaaataactgaaaaagcttcggcagactttggcaccaaatcaaaacttcctggatggataaatgatgacttggctgaagttttacctgatttgattggcttttctaaaattgtccatcataaaagtgaagttaaccatatacccaggtaccagttctaagtcagagatgggcagcaaacctcttcaaattgaacaacaatcaattgctgttctataaaggaggcatcaacacaagctcagggcagcgtttccatccggagtaaagaaaaaacagctcaatggaaactgggctgtcaggagctccctgtctgtcttccactgtctcctacctgcccccatgatctgagccaattctcactctgcagtttcaaagttaagagcccgaaacctccccagaacgaactgtaacttccaaggaagaatgtggtttagcattatgcttcagtaaatgcagaaggcaggcagagataagagaattaagggtacctattaaaggagccggaagtcctgaagaaagaagagcctgcacccggccagaggctgagttccatcactgctggcaagtttgcagagaagacctctgcctccaggcttcctcaaagagcagcagaggggtggcagtagggaggaagagttttttccttcatccctctggaagcctaatgtgcatgccagttagaacgtgggtcaccagtagtcctagagaacggtgcttgttcccaaggagtgctcgccctgggagcagaccacagagctgggctagacaccaagaaggggccatgctttctaccacttagaatcaagttcccctggtagtaagggctttgacttccagcaaaccttataaaggaaagtgcagaggctaagggacccatgaagatcactggcacaggagttcctaaagtcagtgacctggacttagatatgtatttggtatggaaacaagcaaaagtaaggttctcctttcaggttttgaattcaatcacctcccactatctggtggctcagatggtaacgaatctacctgcaatgcaggagacctgggttcgaccccaggttgggaagatcccctggaggagggcacggcagcccactccagtgttcttgcctggagaacccccatggacagaggagcctggaaggctacagtccatggggttgcacagagttggacacaactgagcaactaagcagacagccctaccacttaggggtataaatgagtggtgtgtgagaagaacaagtactccggcaggcccagagtggtcgctccctccttgggggcccagcagtggggctgcacagagttggcagaaggggaacatctgcaaggcaaatcctgggtgcctggcacctctactcaagtcagcacaccacaaagccccactggaaatcctcttcgatggggaggcacgactgcctccgtaagagaggggagtcaacgaggccggcagtcatgtaaccagtgggcagcaggactgaagtcagaatgagtcaaccccaagtcccatgtgctttccatccctaccagcccgcaccctcagcccagccacactctcccctgggggactgagtgcctgcccttcagaggtctacagcctgggcttccatcccaagcatgcagcttgcccctggctcttacctagcttagggaaggcgaccagtcccagacgttctcacctgtgaacttctcgaggcaagcgctcaaagcgccctaactctcctactggcagtattcacccacagccatgggacagggtcgctctcctcggcagattaagatgtgtcttagaacagctctcaggctcagtttcttcctgcccagccccaggcctgcagatcactccccacgggctccgcacctgggcaggaagggtaa

SEQ ID NO: 53764 - DNA, 976 bp, Bovine  19866880367467
  misc_feature (1)..(1): n is a, c, g, or t
ntgaacgaccctagtgggaccgcattgtcggggtgaggggcaaacagtggtgcctctctgacatcaccgagcacaaggagctctgtctccagctgtacaaacagcacaggaaatggattttttttccttcatgttattttttgtctattaaaattatgcaaacccagcaaatacaacaattgcttttgttaagtctctgaaatgtctaaccattcatttcccaaataaggaggctgcggtgcctttgatgctgaggatggttaatcccaaatgtggagaactaataaaataatcaaaaaaggcctcagaagtgttgataaatttcaattatctctccgctctctcccaggattgggtgaggcgggatggggctgccttcaagtagtacttgagtccgggctgcattttctcttccccaagcctctaggcaccgacctctctcctttgtggctgaatcgccttagcagggctggggtttggaggtgctgggggccagaggagacaaagcaggcccgcttcacaaagccaagggagccaaagaaagcaaaattgaatctccagcaccctgctcctgagtaaacagacagaactaatgggtctgccatttctcctcccatccaattactgggctccggtacagagaatatggcaacatcagctcacacacattctaatactcttaatcccttccatacatataaacctcacatccactcacatgacttcattaccaaaaccacccaggcaggcggtgtgaaggaatgggcccaccagctgcagaaacctgccttcttcaagatttcatcagctaatgaggggtatgcaaatgaaaagcttatgggattacagcttgtctgacagcggttcgccccgagtgctgcaggactaatacaggtgttagtaaacgggttattaggcccggcctaatttaggcctattcatgctggcttgcactcttagcctcaacgtttgtcct

SEQ ID NO: 53765 - DNA, 996 bp, Bovine  19866880475629
  misc_feature (1)..(1): n is a, c, g, or t
natagagcatgttctatgaaaatttattttcaaattgtgaactcttatattgcttctatgagtcttctgggccctaccccagacaaacatagctattcctgctggaaactatgaaaatgtaatattttccccaccttattaatacctctgctaataaaggtcctgccaaccaagcatgttcttctgaacagttcccctcactgtatttgcaatcccacacttaccccaaggaactggatctgctataaaggaagatgtcagaaaggacccccaagaaagtggcttacctttctcgtggctgcttgatggtgggggtggggaagtgaccggtttagacttgtcatagttgttaaagctctggctccgtcggttgttagcagtggctgaccctccgcgtgtcttggcctcgctgcctgcagcggataccctcgcggtaggacctggaagtctaaaatgcaaaagcaacggagtcatcgcttcagtctcaggaaaacagcagcatctcagaagaaggaactgcagccatgcaagaggtgagagaaaccattcaagacatcggatctgtggtggcttgctagtccaaggactcagtgagaccaccacaaacatctaggctataatgacctcagtccaaaggtaaagtatgggctgttttcctttgagcacagaaagagaaatatacgactatgtttgctgattagaaatacaaagctcaggagttccctggtggcccagtggttaggattctgggctttcaatgccatgctccctagttcaatccctagtcagggaactaagatgccacaagccacacaggatgaccaataataataataaagcaaagctcatcttcgtttttctcctggatgagtaattttaattttcaataggaccaaaccatgtcatctcaaattctatcaagagtggaacataaagcccgggtaagacactaaactggttactttatgtgtgcatttcttctgaaagatattgaaa

SEQ ID NO: 53766 - DNA, 1421 bp, Bovine  19866880480727
  misc_feature (1)..(1): n is a, c, g, or t
ntgttccaatttaaagctaagtagttgtctatttaggaaaatcttccatgtgcaaatacatggaatttgcattttcagtaaaatttcaaaacatctcctaaaatcctgtgttcaaaatatcagaataacaagaactttgcaattctggcaaccacctggaaactcttaccagacagatttatgcagagtgtttttcaacatgtatagatttgtttgattttatgcaaacgagtcattctataaaacgtagcaaggcaagaaattctcctaagctggtcggatgcagctaagaatcgagttaccaagtaacacaaaacaaaaagagatgaaatagagaaattagtccaaagcaaaacaagagaagtgcaggagaaatttggagctggcaatctcctaatgtgaaaggttaatcacaagatttaaaacctgatctcattctctaaggcagctcatgtaattgcatacattgtaaagagatatgagaacagtgggaacaggaaaaaaaaaagaacaacaatcgagcttgatataaactgtaaatttaatgtggaaaaaaagcaaaaacaggcagagaactcagcaaggggtcagctggggaactaagacagtagaaatgactataaataactacttttaaagaaaagacaacctttaatttttggattgatccatagtctaatgggatactccctaaaggctctttagattaattccattcatctgtgttgcctagcggatatttatagggaatctatcatgtgctgatactgtgggtatacagagataaatctaacacagggagaagaaagccatagctccctagagcagatagtaccaactgagagttgagaagaagaaatcactccacaaaagagctggtatttaaactctgcctggaagaatgggcaggacttggccatatgcaggtaggaatggaaagacaggagcagaggcaggagagtctggagtatgtgcttaagtcagaggcaactgcaagtggactggagtgcagctgacagacacagaagcagtgtgggctgcaaacggagatgggtagacatcatgggctctggaggaaattgaccgctttctaatgggaagtgggaaaacactggagtttggggattccaggaatggtctgactctaaaggtgttgaagaagattaatctatgtggggcagtctagaagaggaagaggaaaacatcatctcagcagaatatatttcaggacagcgaaagcacagagatttgtgttttggggctagaaagcactgaaagcatatttataagttacgtatttctaaattttaagacgcacttcttgctaaattggaaatgaagtaagaggtgccatggaggaacatgtaatttatcaagaactcaggcagacccagtgggtggactcaaaccaacttccccag

SEQ ID NO: 53767 - DNA, 1014 bp, Bovine  19866880605552
  misc_feature (1)..(1): n is a, c, g, or t
natctgggcctctttagagcagaagctgtcagttgtgacaaattgagcccaattgaagggggcttttgtgaggtagacaaatgtccatcaggatctcaaatgaccaccaaactcagttcacttctgccttctctctaatttacagcccaggaccctgagcggagggaccccgctatctggtcgcctgaccacagtaaataatagcaactggagaacttttaactgaagatgttttagtaaaagaccaacttgcagaatgggatggcagacagacatttccagtgtccactcacattgttttattaccgaggtgtaaagagatactggaaacatgatcacccttgatgagattatattcagaagtaaacctgaactccagattttggttataggttaaaatttttgatgctgtctttaagaaaacatgttgcttattatccatgttgttcaaatatcttgtatattgttttgtttgtttgctcttaaggaataatttcaaatttttatagtagtattttcttggggagtgctattactgactgcctggatttagttgcttgcaaatttttaaattttttgtttacaaaattatcttcttcagaaacctactcagttatttctgattttttaaagaaagaataagtaatatctaattttaccttaattagtatttctacctgattgtagaaatactaattaaattaaattgtagaaatactaattaaaatccatctattgaagatggatttcactaaaagaaataaatctaggcacttgaaacacctcaaaatctgattattatacaactagtagtgaatggagaggaaggaattaatagaatccattcttaaactgccattattaatttaatgtttacttttgagtgctgtatacctgctaacttccacagaagttttgaggcagattaaagttgtaagacaggttaaaagagaagtgaaaaaatcacatagaggaacagttgagtaattgagatctagagacatagttatttag

SEQ ID NO: 53768 - DNA, 1710 bp, Bovine  19866880617774
  misc_feature (1)..(1): n is a, c, g, or t
ncttggattttccagtcctgagcctgtgtgtttccttttggctaaagctagtttttgagtgggtttctgtcacctgcagcccaaggccacaattgtggaatgaatgctaacaaataaggctgtgtatgtggctcaaacaggaacctgctgcttgtcaccagagaagcaagaccttccttcctactgatgaagaatgctgggtgctttcagaaaacctcccaaccaggagacaaagtttgcatcaaacagcccccaaactacagtcaaaatcagtgccttctggggaagatataagatgctgtgaaggttgagcttagaacagtatttagcaatctcttctttaggtggttcataaaatataggaaaaaggggttttgcagtcatatgcatttgtataagattggatcattcagcctttttaacagttaagaatcaggacattaaagtggtaagtgttagtcagtcatgtccaactccttgtagccccatggactgtagcctatcaggctcttctgtccatggaattttccaggcaagaatactggagtggatagccatttccttctccaggggatcttcccaacccacggatagaacctgggtctcctccactgcaggcggattctttactgtctcagccaccagggaagccccaggacattaaaggacagaggttttagagaacccatatgcctgttcaccacccccaaactcagatgggaataatgattatttggccatgaaatttttccccccacatactctgtgagtctaaagttccagagaatacagtttggcctgaggtgtagcctctctgggtgatgaggcaatcagagggttgagtagcatcttgcgtgggcaggagcgtcagcgcttcttggggtttttctgagtgactcctccctggccacagtgccctgtggcctctcccatctgtagagcaggaccgtgtccaaggcttgccagcaagagtaactcacaggtatcagcagagccccatttcaacattaagattccattatgtcagagtcctaaggctaatgggacctcttgttatgtaatttcagcaataaactaaaattgtttgtttccaatggcggttgaaaatgctgaagactgttgcttaggtaagtgtaactgtggtggcagggggaaaaaaaatacaacccacattcacacacacaaatgaaatcctggccactggtttctatgccaagtcacagaacaaacaatgcaattctggaatctcccctcctgcacgtggccggattacctttgaccgccacggagatggtcgtgttctcccccaccaggtagccgcagggaagcagttcgggggtctcagaggtgttgctgcgcttgacgtccccgatgctgtagccaaggacgctgtcagagttcagccccagctgactcactgggtcaatgtgaatgatgtactcctggaaaaaatcaaataaagaccccgttaaagatgtggggaaaaaatctgtggaagactcacggtttcattgggtgatttatgatcatcttctcctcttccccagctgatgcctgagttgaaactgacctatggaatggggggcagaagagctgactttcaatggagggggcggtgtcctcatatcacaggccctctaaagcacagatttatgtggttagtgatgggagggtggcaaactctcacaagatggtgaacgtgtagtctgg

SEQ ID NO: 53769 - DNA, 2153 bp, Bovine  19866880630391
  misc_feature (1)..(1): n is a, c, g, or t
ntgatttttatacataatatttctcatgtctgctcataatacacgtacacggtaattacaattgctggtatatccatttcacagaagggatacctggaggtcactctgtatatttgacttgatcagagaactaattggtggcagtaccaggatttggactaggtgtctacactggtagttcgccagcctgccttccccagccacctggattcaggcaacaaaatgcatgtgcacttttgacccttgaactgcatgggtctacttacatgcagatgtttttcaatagcattgataaatactacagtacttcatgatccacgggtggttgaattcccagatacagaggaactgcatgtgcagagggcggactacaagttgtactaggatttcccactctgtggagggtcagtgcccctaactctgccttgtttaagggtcaactatcatttgggaagatttggggaccttttcagaaactcacgaagctcctatccaaattgcttacactcaggagaaagaggaagggaacttgccccgggtcgctcagccggcaaactggcagagccagatccagacacacctgccacctccaaagcccagattcaatgacgtcctctcccccaactctgctgatctgggtgttgatcgcagctacccttggtgttcacttgagtcaggtttcatcaataaaaacactggtggagccttcctttagagatagcttaggcaacgcctcccctaggctttaaagggcccgacaaatactttttgagggggtcttgtctaatacataaagaaaatttctttccagaagccaacgtgccagcaccatttggacaggccagcctcatataattccatgaaagaactttgaccccagctaggaggatccacattcttgcttccctggaattggggcccagctatggagcccaggccatcactggggtaactgctggagctccttgggacatctggtcatcaccacgagtgggtagaagttcagagggttccctgaaaggagaactgggaacagggagccccccgcttccaggtgttaggtggggtacactgcctggtgtcaggctctagacggagtctttgataatttctaggaagatactcaaaagcctactttaaaggacaatagtgagcacagagataagaaattatgggggaaagaaaggaagaagggagtatgtttattaaacatcttctatgaggtatagtgttcggtagggtggggaaggggagaccagagtaaggtgaataagaaggacagaatccatgctttcctggatcttagagcctggtgaggaaaacaggcatgactcacaccattacacggaggagggcagggaacgaggaaggaggcaaggggccatctgtctactagagaattccaaagcacagtgacacggtgggaggtagaatatcgtgatcttagactttggggtcaaaaaggctggactcaagaacctcccttgctccttcctatctctgtgccgctatacgagacgcttcacctcccagcttagtttgctcttctgaaaaatggggataagagttcctgcttcccagagtgcttaggaaggttcaatgaaatcatgcacagagggaaagcccgtagcaggaaatctgacccacatatggtgctcactgaatggtggctcttactagttattatctgacgtcttagacttaagtagatccaaagcaagtggggaggaggtctggggtaagtggacgctctgaccgtccattcagcagctggcagtaaaattgcacaggaagaggggactgaaaaatccactgtttcctcagcccttagagaaattaatgatggttgtgatgctccttgagccacgagggaaggttaacttctctctgatgttttctgacttttgagaaggtgaggatatatagcacagaacttctgagggggataaaagggactaaaatatgagtttagatgctggttatgttttccctgtcatgtggccgggccaggcaaagcacgggccctagatgtgtgtgtgctgaggctctgtctggagcctgtcagccttgtccgggctggatttccagtttgggagttgtagatcttaaatatgggtgacagatgtgggagaggcgtatgcaggagatgaaaa

SEQ ID NO: 53770 - DNA, 906 bp, Bovine  19866880693972
  misc_feature (1)..(1): n is a, c, g, or t
ntgttatatagtacagcagttaaaattaagaactatagagttacaatccccagccacttctagctccctgactttggacatattgcttaagcaacataactcctactcctagagttactgtaaaaattaagcaattcaatataagtaaagagtatagaacggcacctagctcatagcaagtgctcaagaaaattctttttttccccaaaaataagatgaataagggcttccctggtggctcagatggtaaagaacctgcatgcaatgagggtgacctgggttgggaagatcccctggaggccggcatggcaacccactccagtattcttgcctggagaattccatggatagaggagcctggtgggctacagtccatggggtcaaaacgaatcagacacgacagtgactaagcccagcacagcacaagatgagtaagctgcttacacgcacagaaaaatagtctagacatcatcaaggtgctgaggctgcctctcactgggtcatatgttatgatgacatttcgcttccccctctactgtttgcttgtctgtattttctatttttccataataaaacatgttaattttttttaataaggaaaagaaaaaatttttaattaaaaaaaaaaaaaatctgatctttattgagaaacagaaaccctcacccaaatgtattttttaaaaaagctgtagaccaggccaagtaattacaaaacctggagtctggagaaaccgcatggtattccctggtcttttctagttcagtgccctaataacaagaaagaatttgcaccccagcacctctgcagagctggggagaggaagagaccagagagacaggaaagcctggtttcattcttagcaatccacttagtttaaaacatcaggaagtttagaggattaaagg

SEQ ID NO: 53771 - DNA, 1391 bp, Bovine  19866880739159
  misc_feature (1)..(1): n is a, c, g, or t
nttcttgagtgtgaggctagttaacttgcagtgagaggacataaaatttattttgaatattattttaaaaattatgatttaatacatttttacaaacctatagaggatgaggtaaattccctcttttccttaaccacttctcctgactcctccctccccccgcctctctctttctctcatacacatgcatacatccataaaatgaatggaatagatttgtaaggaaactggattgtatcacgctggtagcattcaactctggcttccagtctttggtccatttgagaaggcagaggatcctgatttatccctgactcctccactggggaggagtcatctctctgcctaaacaagatcagaattcccagtagcagctgccaagctaaattagcctattcggtcacacagtcacatctctctaaggccccccacctttatcagtggtcagtttttgacaccttgcacctggcaataccaggctggaggctgcagcacatctcagcattccagctctggaagcgcaccaacctctgctcttggccttcacagaaagccagggctatatatgtgcaggcctccatctacatgtccaggtacgtgtgattgcccgaccgtgtgtgttgtttcaccagcagtaaaaaaaaaaatgcagcagggaaatgcaggctttaattagtttgtttgtcctttgacaagatctccccagttgaaaaatttttgtttatctctatggctgagcaggctttgctaaaatcgaaattaactgccttgcttaatggtgcagtagattgtgttttgaacagcttctaccgaaatctccttgaaaggacatttgatctagaaagtctagcctctggcagagttactgcattttggtgtaggtccttttgttcctcctcatgctagttgtaggatgcacacatggagctcaccactgtatctactgggtagtgggtggatggatggacagatgggttgactgacaggtgctcagttgtgtctgaacctttgtggcaccatggactttagcccatcaagctcttctgtccatggaattttccagggaagaaaactggagtggttgccacttcctcctccaggggatcttcctgacccggggatcttcccgacccggggatcttcccgacccagggatcttcctgacccagggatcgagcccacatctcctatattggcaggcagaatctttaccactagtgctgcgtgggaagcccctgactggcaggtagacagttcaattgccatatgacttagatgtcaaattttctgacgtttaagaggaaggaaaacctgtaattggtttcctcccaacacgtttttgctaaacttcgccttatgacagtgtctttggatttcattcaacaaaagca

SEQ ID NO: 53772 - DNA, 2780 bp, Bovine  19866880760083
  misc_feature (1)..(1): n is a, c, g, or t
ncagagggaccaattataaatctcaacaacccaatacaacacaaaaatgaaggaaaacatgttaccttaaaaagttaccttaaggaaaaaaaaaagataccctaaggaagtcacttactaatttcaagtgttttctttcctcctctcctgatattcatttctttattttcccagtagagtcaaaaccctccttacatgcattggtttcaattccaaaaagcatatcaaggttatgatggctcattactcacagcagaaatacacatgaaaatgttcctggtttctccaggaaaggatagaatttcttgttctagagacttttgaaattagcaagacaatggacatgacgatttcagtacctggaaaatggtaaaaatctatgccaagttacaattagtggaaagcaggagaaagttctaaaagtttctgagagctgaaattgctggtattttccagcagaagaggggaataccttcagattagtggtcaacgagctctatccagggaagaagccaaagttgtcactacaagagtaagtccatgcacagaaaactgaataagagctgaaggatgattgcatttgaaacacagaatctggctgctcacaggctctgcagcatccgtggcatccttgcctttgggagggagccgtataactgcagaaaagcagacggggccctttaacccactgacctcttttaatctgcttgttagcctggctgcgggcaggaccagggggcctgtgatcaatgcctctctggggaaaggtcagaggtcagaggcacagtccctcatcatcattattctcaattattcttcattcagagccactttctccccacttttgagggaaggccctgtaagcattttccaggacactgaagggtgatgacccggccctgcacactgtgcttcttttcctccctacctcgctcactgcatctccctgatcaaagaggataacagtgggtagaaactcacagagaggcccctgtaggaagaaatcatggcagtgagcacaggtctgtacacagcacactcacacatacccagctcagcagaaggtcttgctgctccccaggaccgactcacagttttatgacagagcaattcaaggcaaggcctttgccatcagacaagacagaggttctatgagttactaaccttggaatctttttttttttaattaatttattttaattggaggctaattactttacaatattgtggtgggttttgccatacattgacatgaatcagccatgggtgtaattaaccttggaatcttaggcaagtcacttacctaactgaactttaatttcctcatctcaacaacaggtataacagtttctctcgcatagtgctatggcaaggatgaaatggaataaagctcaaagtaaatgatcaatgcatgttagctattaatatgctgaatgtcaattctataattgttttggcagtacaattttctgtatttccttgatgataaatgtaaataatggtcattgcacaaaaactgaaatataaggaaaagtataaaccaaaaaaaaaaaaaaaaaaattcttgataatctacccccagaactgagcactgataacagtgtgactatttctgtcagtgtttcctctgtgcagagacacacacacacactacgggatcatcttgtaattgcagaaacaactgcttgtcaactcaccgggccctgagttcaaagtctgacacacacttctttctaattctcattgtaactctgtgaggcactgtgatacccagttcagtttcagttcagttgctcagtcgtgtccaactctttgcgatcccatggactgcagcatgccaggcctccctgtccatcaccaactcctggagtttacccacactcatgtccattgagtcagtgatgccatctaaccatctcatcctctgtcatccccttctcctcccgccttcaatcttgcccagcatcagggtcttttcaaatgagtcagttcttcgcatcagatggccaaagtattggcgtttcagcttcagcatcagcccttccaatgaatattcaggactgatctcctttagcatggactggttggatctccttgcagtccaagggactctcaagagtcttctccaacaccacagttcaaaagcatcaattcttcggcgctcagctttcttcacagtccaactctcacatccatacgtgaccactggaaaaaccatagcttttactagacggacctctgttgacaaatgtgatacccatttacagatgagcagagcaaggctacagaggctatgcaaccaggtcccaaggccagcagttcctgaacagagctgtggctgcgggcctctctagctggagtgcctacctctctgcctgaggacaggcagcaagggcgctccccgacctccttgcacttttcctctcctcattctttgactctgccgcttctcagaagacacaagctgctccagaagtggcatcattttcttctccctgccctgcccacgttgaaagaatctcaaagaaaggaagcagggtggggagggcagtgatcaggatgtcagaaccacccacatcatgctctaggcctgtgcctacccctcccaggggatgcttcaggcctgagcagtcacctcctctcactttcatcaaaggctccatgaccctgtcagatgggatttggacagagaagactctaccagctactggcttctacccgaggtgggcaggtgcctttctgacatccccctgcggagataatacataaagatgcaagtt

SEQ ID NO: 53773 - DNA, 1862 bp, Bovine  19866880762803
  misc_feature (1)..(1): n is a, c, g, or t
nccttcctcactgggtctatccctgccacatcatctcttttctgcttcagtcccttagcttccaacagtccttttaactgtaggtcccatacccttcactggggacttttaagaaacctctgaacacaacctacctgaagatgaaaaagaaaaaggctagttggaaatagattgggtattttatcttcttagatagctttggagacattcagacaactgcttggtgtcacctcgggtcacttgcctggaaggttgcccacagcctctatagattccatctcatgttgtgctccagtcatgtctgactctttgcaaccccatgacctgtagtgtgccaggatcctctgtccataggattctccaggcaagaattctggaatgagtagtcatttcctcctccagggaatcttcctgatctgaggattgaaactgcatctcttgcaagtctcatgcattacaggctgattctttaccactgagccacgaggcaaagagtcttaaaaagccttctcaacaaatgtcaataaaaaagcattagccctgatattaagcagttaattttaacttgtcccattaaccaggaaaagaattcaggtaacagtgtaaagtgtttttaaatcagtgagtttgtattactatgttgttaaaaataaatgatcttatttatttattatttggctctgctgggtgttcactgctctgcaggcttttctctagttccagcgagcaggtgctactctctagttatggtgtacaggcttcttagaggagccttctcttgttgtggagcacaggctcttgagctttcaggctttagcagttgaggcacgtgggctcagtagtcacggctcccaggctcctgagcacaggcttagcgattgtggcacatgggctttggttcagacatgtgagatcttcctggacaagtgattgaaccagtgtctctggtgctggcaggcagactttttatcacggagtcctattttattgactcatagttgcattttaaaaatgaaaaccttaggatgtctgtatctgtatgtttctgtatgtctctttatgtgtatgttgtagatgtgtagtgttatcctatctgcaggtggtatcaccaaattaatcataaaacccattaggggagtttcatttaattggctaaaagataaacgagcacttatataaattaaatacttctaggacagttggaaatatagaaacaacctccatttttttaagttcacatggtctgagataatctgtgataaataaagctagttttaaaatcgtcaggaaaataagaaaacaggtatgtctccaaacttgttagcattaagtgtaatgaagacatatatattttttctacccaggtaagctaagcttatgatgcctctgtgagatgtggaaaattgtaaagctataaatccaacctaaaagcaaagtgcacagtaaaaataaattgctcaatgcatgccaaaagcagcagttaaaaaaataaaaaaaaaaggaagaactatatgtttaacttttaggttcctggcttctatgatatttttgataacttgccttatttgttaacaggaaaagtaactgaggatgataacttgctttgtttaatgtctcatgaaattttcatgggtttttcaagcataattgttaagaacaagttaattaaatagatataagtgggataacagtttataaatgagcttttcaaccataattatgttttacatctattgaaagtcatctgaaaaatcttttgatgacttgaaaccttaaagctctaccaaattaagttaaataatgaatattcattggatatctagatcatttctaaataagatgaaatactgcaacattaattt

SEQ ID NO: 53774 - DNA, 718 bp, Bovine  19866880779727
  misc_feature (1)..(1): n is a, c, g, or t
ngtaaagagtcccctgcaatgcaggagacacaagagatgtgggtttgatccctgggctgggaagatcccctggagaaggaaaatggcaacccactccagtattctttttttaccccagtattcttgcccagggaaatcccatggatagaggagcctggtgggctacagtccatggggttttaaaaagagttggacacaacttagagacaaaacaaaaaacaaatcaccctgatgaaggatccccaatgacatctgggtacaggtctaaaaccttcctaaaactggtctcaatagcgcctacactggctcaaagcttgatgcaaagtatgggggaaaggggtggggtctcctgtctaaacttaacaacaacacagggcagggattaaaacacactgaaacccctctctctgctcttcagtgctgtttcagcctcttgccataaactccaagggaaggagtactttgcagacgaactcacttcagagcacataaagccacagcccctgccccagtaccactgaggtgaatcatctgcagctcatggatctctttcagctcaaatcctttggtggtttttagtgccttgaaggcctaagtgtcaggcactacagggaaacacagaagactcaggtatcacttaaaaacaagcccgagctcacccctgggagatgctgaaacaacctcatgtgctgagagcagcaccacctgcaactccacg

SEQ ID NO: 53775 - DNA, 3847 bp, Bovine  19866880854080
  misc_feature (1)..(1): n is a, c, g, or t
nttatacaatacatagcaatttctatgtgaaactttgcttttaatggggaagaaacaatagtctaggaagtggaagcacaggtagagaaggttcattacattctactgtaataaacattctcgatccacttagtaccctggcttgatttaattattacatggggaatttcctgcaaaaggtaatttcaaactttgaagactattatatggtagagacaaaaaattattttttgctgaaatactagcctagatatttaaagttatctgcttatgatattgcacatttctgaaaaccactttttcctttttatttatatagggctattttcttctctttgagtctatgttagattctgtcctttatgcaaagaacaaatacttggcaaaaggaggatcgggtgagtataaaattctagttttagtaatctaattttagtctggcagaaccaaatgaacctttggatttcaaataaactatgcatgactgagaaagttcccaatagagatgaaagatgtttccattagaggaagctttaagacatttgtttagtgtactgttggtagtagaacattgtattaatataagatatgcaggactcccaagttaatgctattctcatgaacacttgagtcttttgatttgtttgtttttatgacatttagttgttgtttttccccaaaagaatgtttcatactaggttggaaatcattcactttggtagcaaattttccatgacttcactaaatgtataaacctgtcttctctgtgatttaacagtaacatttaaatattggtttctgttaaatttataaagcaccgcataccagtcagtatttttaaatagatcccaataaatgtggaaggcttccttttcatgtctgtagtgaactttcactcacattatctgcatacttggtgagattgtgttttataggctttctgctgtaaacagctgtatacaaatagagtgtcctcaggattatgttttgctcatctttggctctctactgagctctacagctcctggactatagatagatcataatacatgtttattgcattgaatcattaaaactgagttgaatagcatctgtctcccttcactcacctttccctggaccttccctttctcaaagctttagaattagtaagtcatttctgtggtcagagtatagttgataaaactgctatataaaagtagatgaaaaggaggatacattttgaactgatatcataaaagcacttgagcatacgtatgcctcctgcgcattcgtgttctatgaaattactttggcagtaaaaatcagtaaggccaaaacagaaagtgcacagaaaattctccaggacaattgaggtctttttataatagcatttaagtggattgcctttcttttgcagaatgctctcattttatcgctgtattttctgtaaccattgcaagatatgtttctgatctgtgacatgaatatggctagaatgttttagatatattttaccctgtaataattggctatatcttgtaataattggcagtggtttttttatgacaactatatttaatgactagaaactaatattatctacttttgtctgctgctgctaagtcacttcagtcgtgtccgactctctgcgaccccatagacagcaacccaccaggcttcccgatccctgggattctccaggcaagaacactggagtgggttgccatttccttctccaatgcatgaaagtgaaaagtgaaagtgaagtcactcagtcgtgtccgactctgtatgaccccatggactgctgcctaccaggctcctccgtccatgggattttccaggcaagagtactggagtggggtgccgttgccttctccgctacttttgtctactagcagccaaataatacagtctacctttatttattgtattacatataatcgtcacaacagccctttgagattttagaaacatagatgtcctggatggtacatttaaatatccaagccttgaacttgtttttctaaacacagatctgccagactctagtattcatgttctattgactgttccttgttgtttctttactaaagtgcattttattgaatctcattcttgccttgaagttgtttcaggggaagattcagaaaactgtttccatacctccctgagtggtattcattgatcttactgagggactgacagcagtttaatacatttaaattgaattcttgatgaaattcattaagaacttacagccatgtgaataaagaggttgtagctgaaacagtggcagagctattttccatcatcggagggataaagtagagacacataaatctatctctttccatatttttatatagctgcttttagcactcagatattctaggggtgtattaaagagaggtcagcattcaactgcatcagtggtgctattgaatgttacttgtcaacagaattaaaaaagtaggaaaagacagaaatgagtaacatgaagtggtttagcctattttgtgtatttgagcatgctttgatgaatatcattggtcatctagatgctcattcttttattgcaaataagagttttacgtttttcttaatgaaagatttagtaagctattagtagtgtaaagatttaagaaagaataactgaattatgagaaatagactattgaagactatataagcatgaagggaccacaatttatttttacaggaatcttagttcaatttgtgtctcactttatatataatggcaaggccttcataaaacatagtcagccaatagcttaagtagtcactctcctaatcaccaagtaatccacagtactttagaggtgttcattttctgctgttatcactaataaaacttcgtggggattccctggcagtccggtggttaggctgacgcggtgcattcactgccttgttcccttgttcagtcctcggttggggaactaagattccacatgccatgtggtgaggccaaataaaataattaaaaataaaataattttttttaagttttgtaaagttactgaaagtgggtttactactttctgcttattatcagtttaccaattgtatatcagaaacgtagtgtttttacattcaaccaaccaaaaactcaggaggaacaccaggcaaatgttagatcatgaccagtgcatatttttacaagaaattaagcaaagaatcggacatgactgagcaactgaactgaactgaatttgaaaaccaatgtatattttaggattgaagcatagatataaatgttttatacactaaaagtgtcaaaatacctacacagatttatctttaataggaatttatgtaattcattatttcattgttcaagggttggctgttttatgtcatttaaaaatgacaactcacatcatagcattataagtacatttagtactacaaaggtaatgttaaaatgatactgttgattaaaattgaatggtgaggcttatggtcatcagtcctgtctgtgtcttgattgtggtggtgattgtataactggagtatttatcaaatcacataggattatacaccgaaaagggcaaagagagtgagttttactgcatataaattttacctcagtagaattgacttaaaaaaaaatgaagcagtattacctccgtcaggtcaaatgaatcatgatataatatgatttctagctgttttgaaaaataaagctatgtactaactttatgcccacttctgtaatttttgttagtattatcaatgtatctctctataactaaaaaataattgggtgattaagaagtggaaaggaaagggaagaaccaagtaaatacactgtttatcattactcgtgataggagattag

SEQ ID NO: 53776 - DNA, 828 bp, Bovine  19866880883472
  misc_feature (1)..(1): n is a, c, g, or t
nattgaatcctgctctaccactgctgaaactctgtgacactgaagcccgttatttagcttcccgaagccttgaagcactacaatgaatttcgtttctaaccttctgcagttagatttctctttgaggttttatctaattaatggcaaacgtctgatgaagacacacagtttcagacaacgttcagatgtcatatcagcctcaaagatcccagcacttgggaaccgtgaaatgactacagttttcacccagatgtttgcttgacttagtggaagcagccttgatgcatgagtattctataaatcagtgtgaaggctctttgaggaaagttcttgtaaaagtttacagcaagtttatttagtaagactgatgtggaagtaaattctagtttcggaaaacccacggcctttgtttttaaaatgacgctggacctcagcttggtcgaagagctgttttttgatgtctccagctccttgtcactcctggatatgaacgcatgcgcacctgtataccattagggtttccctaaggcggggctgacgttacgtgatttccatggagtttactaaggaactaagggcacacgcctttggcctctgtgtgcgtgtactcactaaaccctcctatttcacttagcatgtgccaggcatgtccaagtactttataagaaaccgcctgacctcaccacttcattttattagactgataaattggaattcagctgtggttagtggaaaaggaattaaaagtaacagacgtagatgtctcttactaagatttggtctgtgaagccgatccatctactcatcttcccaaacttcagcgcgcca

SEQ ID NO: 53777 - DNA, 898 bp, Bovine  19866880898456
  misc_feature (1)..(1): n is a, c, g, or t
ncgccttgcgctgcacgtcggagaacacggctcgacgcagcatgcccctgcgaggcttgccgcgggcggccagtggccaggagaaggtccccgggatgggcacgacgctggaggacgctgcggaggccaggagtgctaggtgagtgagtgggcggtgtcctgccccgtccgcccctcctttgcggcttcctttggttttcctttctgatccttcgtctctttaaagctctcctttttctccccctggagaataggctacgaacctacaaacctgcgagagtgaaaggcgctttccgcccaaataactttccctttcaaccgtgcaaacccggattaggtaaaaccacggaaacacagaaaacaacccccacaatagcctgtttcgtttttccattcaacggtctcagggaaaccaaacctgcgtgcatcagctaatatagcaggagaaaaaaaaaataagttacaaaagtaaaaatagccagccgaggccccttgggtttcccccctaagcttttagcacattggtggcttttgcattctttggatgaaaatgaggtgctttactgatttgttaggagaaaatccgctttggatttttttatttttggaaaaatccaatcagtattcatcttttttatattaatctttcctcccctcatccgcaaaacgtaaagaattcggcccgaatacatgaaaagtggcagctaattagcacattgactgcttcccaatgggtattggcatgataaaaggagggggtaggggggtggggcagagtttcgctttaagggaggaaaaaaaaaaaaaaaaaccccaaaagaaacagagactctaatgaagcgtgaatggtaattgtgtagtaatgaactaacagaaaaagactgaggacaagcagcga

SEQ ID NO: 53778 - DNA, 1005 bp, Bovine  19866880906904
  misc_feature (1)..(1): n is a, c, g, or t
ncaaggggcatgcttatagcctggtgtgggagcgtaatctgctttgagggccttctccagcccagagttccaaaagtctgcttacaattagcttccagcttcagttcctccatcagaaaggctaggaatgtgttgagttctagcctctgatcagaaaaagctctaggagaaggtggagacagggtcagcagagattaagtgccaaaaaggtcagctggtctgttgccacttccctgacaccagccccacactacctcccccgctagctttccgcctctcctgactgggacagtcacatccgtcaggtcggcctgtccccaaaagtccctgctgactaactgccaagaaaatacagcgtgcccctgctccctcctaccaggagagggaggggggaaaaaaggagcagggaaggcaggaagccaggagaatcggattggcccttgctgatttccttaaaagagactgcatggctagggcctgtcacccagccgaattgggtgatgcgagctcggtctggaaaggtagaagtcatcaattctgttcaagccacccccacacccgcaccccccagtcacccgggctaccggcaccggggatctactacccaggaaggaggggcttagctttgggcagccattccaaggcagccacccccgccccatcgctacagccagccgagacgctaggagtctccggttgcctgcctccgccggtgcacccggcagtcctactgcagtcccagcaccgtgcctggaatgctgtcagcccaaaggatggggcaggcccgagtatctccaagccgaggggggccggtgcactgccacccctagacctcttttcctggatcttgcatccaagccagggggggagtggagcccagcgaggtctcggaccattcctcggcagggacagaatctctgcagaaccgacagacacacagccgctgcagcagacactgtcttcttggggccaagccccttgacatgcagaacctgacatctccag

SEQ ID NO: 53779 - DNA, 2237 bp, Bovine  19866880923337
  misc_feature (1)..(1): n is a, c, g, or t
ntgaaattctaagagcatcttacagcagatgcctgtaacaatctgtcggtgaaacttaaaagagtaaaagacgacctcggaagagtccaggcatgacagttggagagttagaatctcggggttccaatcctgtcttttgccaggtaccagccttgtagtatggtcagtccttcccccatctctgcctgtcagtatcctcgatcgtgttgacctacatctttgtcttttcagcatcgtgatctgccttgggagcccagctgagatgccctgttctcctctgaggctgcttctccttggtctgcagttctctacagcagtggtgctcagcccgccagggagttttaaagcccccatccacaagtgcttcccatgatccccaacgcatttcgcccacatcgttacactgaatacgcacaatgttcgctcgttgcacaggtgtttatccagcacttactctgcaccaggcaccttccaggtgcttgggataagatggacaacagggcaggcacagctcctgtcttcaaggagctcatggtacaagtgatatcacacccagtttacaggtgaggagactgagactcagaaaaggctaaatagtgggaagcggcagaggtgggattcagccccagcctatgctgtttcactcccattgtcacagacctttcttttccccctctcccagactccttggaggtgggctctgggtttccagtgcccggctccctgtctttctctgagttgctcaataaccaaggctggcttagctgaactccacaacccctggtgacctactctgtaaaatgcacagaaacaggtctgcattgccctctctcggggcggatgtgaagaccccaggccacacgtgggcatctggaagggcctctgagcaagctggagccaaatgtaacttggaggccataccctctgcaggaaattcaatctccctggctccaccactgcgttggtcagccctgccccaggcctcagtgcacatcggcgccttcccacaaagcctccagaaggtctcattacatgcccagcacatcccgcaaacgctgcgctcaggagcccatgcgctcgggtttcctgggctgtgtgcgagctccctgccaccaggtcaggggggccccggggacagcgggcaggggccctggcaggccggccgagtcttccaggccctcccaggtctccacctgggcagagagttctcggtttccagatgggatcactgtcaggagggaaagcgacaccggctatttcctggaagggaaataactgctgaggcgatgcattaagtgaatagcctaccccaacgctacttgagttttagtttaaaataaaaaaccaaacaacttgaaaccagatcaataccactgcctggagagagtcagggagaagcaaaggaagccgggaaggggacaagcattgatttgcttcctccccggggcagctcaaacactggatgatctgagcatgcagttagcccgtgtcccaggtcctgtccgctcccagctttctagtgagctggcctgactcagccctttcctgaccggcatcctgcgtgagaagggcacagagtgaaggaaggtggtaaatctgagcccttcatcggtgctgcgtgacttcaaattactgaccccacctctgttgagtgtcaagtttcacatctataagctgggtataattatccctaccccaaagcaccactgacaggtaaaataataggagtgaggacataataagtattcaataaaaggtagacgataatgataatcatcatcaccgcttttttaagagggacataatgaaagtctagcttcacaaagcttagtcctgtggctcttctcagagctagggaatgttctagaaggtagatatgactgacggacgctgtgcacagggcaacaagaggggagtaagagcaggattcctaaaagagaaatggaggggacgtgtggcaaagaggttcgatgaatgaaaagactgtggaaatcagacaaaatttaaattaaaaaattctaattttgccatctgcagctcctattaaatctgccttctcttgaacagtcctccttccacgctttcccagcattctcctacttaacgacagtaaacacactccataaattaaaaaaatatagtagagaggtaattaatgctgagccatctaattccgaatttctaatcatgctctgcttacattaaaatgagatttcaggcatgtacaacaatcaatt

SEQ ID NO: 53780 - DNA, 1946 bp, Bovine  19866880934334
  misc_feature (1)..(1): n is a, c, g, or t
nttggagagactgtatacgttggattaggtggggttttttgcgagtataaatgtaaaggatcatatggaggtctttgcaagtaaacgtgataaacacaatgacatttcaatgaaggcagcagtgaatgctgacatgctggtcagcaacacatcatcaatagctcaagtcatggtcccggaatatcagagacacatttagaaagtgcttctgggaggaagctcctgctttcaaaagagacaggccaacaaacatataaggtagtcattcacatctctggtcacagacagagaaactgagcccctaggagtgtattcaatctgcttaaaatcacacaaatagaaaatggcagagcagggatttgaacccatgtctttctgactttcaagtttgcattgctttccatgaccttattcttgaggtgaccaaggatagatgaaggaactcttagaacctcagaatttggaagagaacataagctttctctaattgtgggttctcaaacttatgtgattagactcatgcttgaccagctacatggaaagtttattaaagctactgaggaagataaagagacagattcacccatcatcagaggggctggtcctttgggagcagaggcaggattagaggtgagcaggagaccaacgtagagctccaggtctgagtcaggctgatctcttaactcctccactcctagctgggataaactcccaaattttctgaatctcagtttttccacctgtagaatggcagcattctggctttggatggagtgtgcactttgagtcaaaaaggccttgattagagtcacatctttgctagtgatcttggctaaatcccttgggtcctcatctctaaaacaggcatcctaagaaccccttctcatcttgctacaatgaaatgagatggaaccctcagcagagagcctggctcctaataaacgtttcataaacaacaactgctcttactcaaggctaagtgctcagggcttaagagcttgggcgctggagtgacccttccagaactcatcaactccaccacttactgcctgtgggatgctgaataagttccttaaccctctgtggcttgtttcactcattctgcaaaatgggggtaataagattatcgaccttagggggttatggtgaagattaaataacacatgcttatcaattgcctagcctagtctggcgggtggtgatcattccttaaaggctacccactgttacttccctatcgggtgaaacttactaagagttggccaacagaagataggtctacacctacctgagtgagggagggagctccctgtctgtggcagtgctcaggctaaaggaccatctgtccagggtgggtggaagggattcccacatgaggtcagtggcaggccctgctgacccgtaagaccgatgtgtcctgtgactctgatgttccaactctgtttgagttaatagagaagacactgacccatcagaccaacaaatcagaagtggaaaaattacttcctggcttagtttttaaaaatcaaagcccctttccagccaaaggtaatcacagactgatccacagtaaggcagaagcatatttcaattgaaaaatggcatcttcctagccgttgccatatggagccagaacaccaggtggcccagggctgagaccaatcacagggtccaattggaactaaataaaatgaccccctggaggaagtggctccagtgaggcccacaaatccccatgacatgtcattttggcttgtcccacgtcagcctgggcctcatgctctgcctgacgcctgaggctctctcctttcgctccggtgggacaaagagatgaggggcctcagctgtgagtacaccccgagtgtgaagggggagcccctgacacagcagaggagtcctggcctcagccggctgctgtagagaacctcggggacagccagtcccca

SEQ ID NO: 53781 - DNA, 1645 bp, Bovine  19866880957880
  misc_feature (1)..(1): n is a, c, g, or t
nctcaatcagaacggtgagtttgcaagctaagggttaactgacttcatgtttattgaactgcaccagagataaaagttcaggcacccacctctggccccaggccccattctgggatggttattcacacacaattgacttcttagagttccttcctgcagaggaccactaatgactcaaaggtttaaaaaaaaaaaaggtttgttttcttcaagctcattagaagataaaaaccattcatccaactacacaatggagagcagaacatttacctttgaagaaaataacaataacaaccaccattgttcccatttttagacacccaaatatcagacttggggcttccctggtagctcaggtggtaaagaatccacaggcaatgcaggagaccctcctttgattcttgggttgagaaagatcccctggatcccctggagaagggacaggctacccactccagtattcttgggcttcctcggagactcagatggtaaagaatctgcctgcagtgtgggagacctgggttcaacccctgggttgggacgatccccctggaggagggcatggcaatccactccagtattcttgcctggagaatccccgtggacagagcagccttgtggactatagtccatggggtcgcaaagagtcagacgcaactcagcgacaatgcacacagcacatatcagaccttggtgccagatcctgtttctgaattctcatttcatctgttcacacctggggaaaggggctataaaactcttttacagaagaagaaaattgattcggagattagtaagtgacaaggctagaattcgaaccaagactcacctgagagccaactctttcccaaagagcacagcctcccaccatgaaaggactctctgcacagtgtcaacgtacaacaaacgggtaaatcagcaaatgatgaaacacaaaacaaactaacgaggtgtcagctaatgacgcggccgtggtttcgaggattctgcagaaaagctgagggcccatccttgagggtagcagaggctctctgaatgtccaggtgcactccgtggctcctcctgcctgggacagtagctgttgcctcatccagtgctcccaggaggtttcagctcttccagcccctccagcccctcccccacctggcacaggggtacttgggttgaaccacagctagcttgggtggtcctcacagttcatttgaaaagtgagcctcagatctgaagacccaagacagacccaataaaggctgacctttgacccatgtgggggaatgctccctccacaagctaaaaaggggcagctgttttggagccacgaggacatgccggcccttaccatagccacctgccaccaaagctgtagaaagcatcccctgtgatgcgccacattttccctgcctgggatataacttctttttttcttgagaacttttcggtctggttgtctatcactagccagcccagaccaggacccaaacttcctgtgctggatcttagagcagcatctcaggtgtaacttggagggaaaactctgggctcgcccacagcagtctggttggagaaagattccaggcaaggattagggagctggagtcctgacagtgcagtgaaggtgcataatgtccgctcacgttacagcaca

SEQ ID NO: 53782 - DNA, 987 bp, Bovine  19866881022195
  misc_feature (1)..(1): n is a, c, g, or t
ncctcccacactcctctccctccaaggccacgttcgtttgcttgcttacttaatcccacaccctctgcaccttcccagggcccctttgtgtctgggatggagtggagcatctctgcctcctaaacccaattttccaaatgaacaccaaacacagacgagcccagatgattgacagtgtgacagcatcgtgtttggggccgacggatgaaatgaacaggaggtaagagggaaaacatgagaaaggatgaattttcagtggcttcctccagccaaatagtttgcaatttcattggaaaggatcctcatggggaaagagaccaaagaacttgggaggaaaaagcaaattacagtctcagcagtgtggctttgtcctttgacaagttggtcatgaaggaaggataggatgcttgggacagggctgagagctgggagagtggacttggtcacctcgaaatgcgggtggcccgagtcacagcccttgggccaggccccaaagattccccacccacttcctttatccctgaagctgcagaagcagtgagaggagagggcgtctggccagagccccccgtgagggtccacagcgggagaagctttaagagaacacacttggaatggagaagaatttttaacaagaatttttgttaaaaacaaaaaaagaaaagaaagctgaccatgaaagaacatattattcagagctgattaaagaaaaatcagccagcatatttgccttgtgaggcacccagtttgctaagggttcaagttcttccaataagaggcaggattacctagttgtcaaaagcttggccatggagccaaattgcccgggagggaatccccagctacaccactgatgggcttgggtgacctcagcaaatcacataaactttccgagcctcagtttccccacctgcaaatcagggctgatgataagaactgcgcttacttgagggagttgtctgtgaggatgaccatgagtaaatatgt

SEQ ID NO: 53783 - DNA, 2390 bp, Bovine  19866881134050
  misc_feature (1)..(1): n is a, c, g, or t
ngagaagagagagcacttagaattcccctggaaaagcccgtttctttggaaatgggccacagatgacgtaaccccgccatatcccattacccggtacttggcgaatctctgtatgaaacttgttttggtgaaacttgagcctggagaagccaactaaagtatattactttctcactgttgaatgcctcctagacttgggctaacatttaatctaaagagtaaggtgatatttcctgagataacaatgagttcatgttttgaaatgaagtgaactgggtttattacattgattggctgttttttcaagttctaactgcagtagtaaatggtctctccacaaagtaatgtctggctgccgtatggggaaaagtgaggagctatagacatgggagagttcagtcttcagaagttgtcccactgcctctctagttaggggactattccagattgaactaggttttggtttaaagaggcccatatttgaacacacagatttctgacccaggacaacgtggggacagctattgagttactttgtatttcctgaatccatgctgcatgccctctgctctctcaccttcttaagttgcttctcactcagtgaaggttggctgcacatcttctttatacaaggtaaagaagagaagagttctcagatagcaaattagtcaaaaaagagaaagcatgtatataatcagataatgctaggaatctggaggttggtgtgtgtgtatgtgtgttcagctgcgtccaactcttcgtgaccccaatgactatagccctccaggtgcctctgtccatgggattctccgggaaagaatactggagcaagctgccatttcctactccagaggatcctactgacccagggaccgaacctgagtctcttgcgtatcctgcattggcaggagggttctttaccatggtatcacctgggaagtttggtgcattatcctttaacttagttcctggaagtgttctatattataagaatgtacagattgatacacagctatagactttttcaaggagaaaatagaggtttcaaggctgtgtatggtgcagttccgagatgtttcagatgctgagcactgttgattatatctccagagtagccactgtggatgaagacactgtggataaagaatccccttttcatgcccccaccttgcttttggcttgcctggactctgcagatgcttgcagggtgcctgctgttgaggcttcaacatctttgccttccccacaaccagcatagcacccggcacacaaacctgttcaatgaatggagcaactatgaagtcaccagttttctttctttctttctttctttctttttttaatgataaggcaatggctattttttagtttaaaaattctgttttatagtggatttacaatgttgtattaattttttctgtacagcagagtgattcagttatacatatgtacattgtttttcctatcctttttcattatggtttattataagatgttgaatgtatttcccttgctatacagtaggaccttgttgtttatctgttctatatgtaatagtttacatcttctaattcaaaactcccagtccttccctacccccgtaaagcggtgtggaatcacgtgaaatgtggtgttgcgtactataaggttagtgaaataactggagggaatctgagctgcagaggttcctgggttctctctggtggttcccagcgagtctgggtcctggctgcagttccttttcctgccacttgaggtcccctccaggttcagtgtgggttgacttttttggggtgccgtagctgcaagagagtggccgttattccaggaggtttctgatgtcatggctcccagtggctccccaggcgtattgggcctgggaagcatgagcggtgtggatacggggctctgccttggcctccccagagggtagtctttccccatctccttccttcccctccatcctcctccttatacacgtgcacaaaagatgagacctttacctacccttgttggagaatagagttctggactgaagcctggagcaaatcaccaggccctttaaatgggaattcaagtcatcctgaggttcagttatcttcatggttttactgtgtgtccctgctgggagttggtggttttggggctcagctctttggagttcattcaccttgtactgtgtgtgaggtatagtttcgctctgggagtagagggggtgtaggtttggaagaggcccttttgattctgctccttggtgtcacctgcacaagaagacaagctgcaggtcgtgctgcctggccctctgaatttccctggcccaagactgtcagctggaaccgtggtcttacacctgctccaggtcgtgaacatgctgtctgtcccaggggcca

SEQ ID NO: 53784 - DNA, 2782 bp, Bovine  19866881139936
  misc_feature (1)..(1): n is a, c, g, or t
nctgttaatagagttctctttcctgtagtctcaatatctataacttatgaatattgtatgactaccctgttatataaatgtaacttaatatgtcaataattctctttaataaaagtgctagcaagtaatatttttataagtagaatatccagttaaaattcacaattttcttcaatcactgtggggattgggaatattgtttcagaaatacacatatatctttctccaaagaagacatacaagtggccagcaggcacatgaaaaaatgctcagtatcattaattattagagaaatgaaaatcataaccacaatgaagtacacctcacacagatcagaatggccattatcaaaaagtttacaaataaaaatactggagaaggtatggagaaaaaggaactctactacactgttggtgggaatgaaattggtgcagctcctatggagaatagtatgaaaattccttaggaaactaaaaatagggttaccatacgatccagctattccactcttgggctaataaatctggagaaaattctaatttgaaaagatacgtgtaccccagtgtttatagcagcactatttataatagccaagtcatggaagcaacctaaatgtccattgacagataaatggaaaaagaaaaaactgtgtgtgtgtgtgtatacacacaatgggatattagccataaaaaagaaagaaagaataatgctatttgcagcagtatggatgaacctagagattatcatagtaactgaagtaagtcagataaagacagctaatcatgatattatgtgtgcagtctaaaagaaatggggcaagtgaacttacttataaacagcagtgactcatagaaaacaaacttatggttaccagagaggaaagggggaatgtgataaatagggagttttggactgacatatacacactactgtatatacgatagatacaccacaggggcctcctgtataatgcaaggtatgtgcatgcacacgcccagtcacgtcagactcttggcagccctatagactgtagcctgccaggctcctctgccatgggattttccaggcaagaatcctggaatgggttcattttctcctccagtggtctttctgacccagagattgaacctgcatctccagcgttgacaggagtattctttaccactgagctacctcggaagcccataacacaaggaactatattcagtatcttgtaataatctgtaatggaaaagaatatgaaaaagaatttgggattagattttataggcttgtttagtttttggaataatcttttatttttatctttaaatccatattattgcctgtttgtcactagactttctacagactagctttttatttttgctttcccctagtctcacttttttaactagttagttctgcctaagagtgtatcagtaattgagttatttgaactgaaaaaaaaaatgagtcaggagaagcaccttattctgaaggtatcacatgaacaggcattttaaaataatgttcctatttcagtgaataatgttaatggctcttttagttccagatttgatccagtgtgttcctttagtagtaattaatttttgaagtgtaaatgcaaattttaattttaaaaaatgaatgtcaatttgggaagaagagtgctccatgagcatcatgggagaaagtatggagtataattctcttccagatggcacccctacaggtgaggcagcagcctgtgaaattacagtctgaatcacactgcagacaagcagggcatttggagcaaagccttctgatatcagtaataaatgacttggttcagaaccaaggacaattcccaggaaattaaagcccattctgtcacgtagggagcctatagtaaaatgaagtttagcaaagtggaaagttgcgagaaaggacaataattgcaagcagtccatatatgaatcttttcatctgctaatatacttaactagacattttaatttatctcacagttaagttttgtttctacatatatttatggattttctaaagtaatatttttcacagtgaatgctggctaacagccacttgccaactaagctttcactctgaaatattatcaatcaggtacctgttgtaaatctaatcttgtttaatatgtgctgggtattttttatttcagaacacttgagtccttaattacaaatgtagtataatataatacaaatgtgtgtgataagtcatgtctgactctttgcaattccatggactgtagccactgagcttctatgtccatgggattttccaggcaagaatactggacactgctgccatttcctcctccaggggatcttcctgacccagggatcaaacctgcatcttctgtattggcagggggattctttaccactgagccacctgggaagtcccataatataatatgaataccaagtcttacttttactcaggttaaatcagcaagaagcaacagagaatagttactcagaacttggcctctatagtcagatagacaagtattcaaattctgactcattcaactgtttctttaactgtgagctgtttttttttaagtcttatgattttaggttatttaacatttctaagccttagtttccttgtcagctgaatgaaaataataacatgtgctttagggatgaattaaataagatattccataaaggacacttaatattactgtgatgatatttaccactattaacatttgaaaattaattttagaaagcaaaacagcatttaaaaataactagttttcgttcaagtg

SEQ ID NO: 53785 - DNA, 1361 bp, Bovine  19866881143738
  misc_feature (1)..(1): n is a, c, g, or t
nccccaggaacaacggacaactcctcctggataaacaagcatccacgctaccacctcgtacccccgctcttaacccatcatcctcgttcaatgggctctattcgacaaggtattctattttgtttgtaggaatcaaggactgaaaaacagttcaaaatcaggcctggctggggctgttcattcaaagctgccctttcacacaatcagtcgctgagagcccctgcgagcaacacccctgaagtagccaccctttaaaggacgtccttcccttgggacgctacccgcccccccacctccgcttcatctccctccctggcttcttctgaactctttttaaaacacacaagaagcaaatagcagcacaggtttccctaggctttcgtgacctgaagctcagtcaaaatgaacctaacactttataccatacctttgtactaaactcgtgttgacaaccactaaattcttcccattgctctgcatggaaacttgcaaaaaaaacccaaaaaaacattcatttctctccctgccccccaaccccaaactctgcccgtttaaaaagcttggctaaacaatccaccaggtggggggaaagcttttctatgtgggcagctaagtttctggagcccataccttggaaattagattaacaggcgaaatgtgaatagcaaggaccaaaacgcctcccctcccttcatgctttctaccatttagagcacttaacccagagcaaaatatcttgaatggtgacagtaaaaaaaatatatggatttgtgaattgttctatgctgaaaatggaaatgagagaggatgaaaacaagccagctttattttttagaaagcaacaccaagcgattgtcgcacttggttttttgagagaggggcagaagttatacatgatcataaatttgcactgttggtatgttgatcagctttgcagttaattggcttcaatactctctaattcctttcaaactttgtaagctagaggacagtgaccccacagtaattcttatcttcctgaattgaggaagttagggctaacttctgtaaccacgatccctctacaggctctgattttgagaaatcctttaagacatattctaactaaacacatgtatcaagaagctactcactttgagaaataagcagtaagaattgaagcaaatgaacattccctcagaacacttacctacaaggaaaattatttggttttgccaaataccatttatacttttttccaaagcaactttctttctgtttataccaaaggagaacatctctgttttcacataaaatagacttccatttctttttttccagttttttttttttttaatatttatgtatttatttggatgctc

SEQ ID NO: 53786 - DNA, 1788 bp, Bovine  19866881286093
  misc_feature (1)..(1): n is a, c, g, or t
ntcctgattctgagccccgtcctgctcgtcttccgaccagtggaccgaccgaggagcgcggatgactttgggattttgcccagtgtggctgacctgctggtgacggtggccccgctggctgtgatcatggccagaccagcggcagagccactctgcttcttgaacccaaagctgttggcgttggcggtgggcgtcctggagctgctggggaggggtttcttggattcatcaccactgctgcggccggcatctgatggggagcgcttcacctgggcggctttgggtgacagccttcctttctcagacacttttgcatcgtctgtttttcctgcgacagaaatcagcaaagttagcctccatattaagaagccagctcagtcaactcagactatttaaaattctcccctactccaaagaactactttgctttctcctgggggaaagcagtccccttgggagacagaggagagagctttttataaagataatctcatctacgactgtcaccatgagcctttaggagatgtcagtgattttcctcatttgcaaagcagtctacatttacccagaataaagcaaagccagccaatcactgacacatctgggaaggagaccttgtcttttactgaccattctccctctatccattaaaaagctatccctaacattttcagtgggtatcctgccttcctgcaaaaactctgcccttgtttatacacatccttaaatcacgggcaatactgactcagcatatcaacagctcataaccacgtgcccttgaatagtcttcactgggtaccttaactcagagcctgaccatgcttcaaccaattgaacacgtctcagcagctgaaccgtcctcagactttaagaggctctcatgctcacaaatttccacttggaaaaaggcaaagatatgaatctttctgaaagctggatatgagcagagtccaaaccctaagaagtaatacctgaacatttacagggacttgaaaacatcaagccctgctagcgtgactgctttcccggttttgaaactgacaagtgcgcaagcgagaaagcgcgagcctctgactcaccggttccgggggtcttgagcgtgcctgtcggggcagccggcttcgtccttggcatggtgatgccgacctgagccgtcatgcctcgccgccacgagcctgtctgtgagatgacggggttcttcttgcctgacgtgcttttgtcggactcatcagacacgtcagacgggttccgcctccacttcgacccgggctccatctttatgccgctgtctgagcccccgtctgacttcttgacatcctcgctggaccacagggaactcctctccacctgtgagtgtttctcggcgtcagtctgtgaaggagaccctctgaatcagtctttctcaaaccccaggctagggagcccctcactccagagcaaaaaggcccatgccctggacaagttagggggaaaataacacatgcccactttaaaatgtttaagcctttgtactggttatcttgttaggaagcctgatctcttgggtccaaggaaagtgaagaatatgaatatgtctgagaagggaggggggaggagagtaaaaggagccagaggaaaaagagagggagagttccacgcaggagaaccagaggacggggctgtggcaagaactgaggcccccagctctgcccttggcgacgtgcctcctctaactccagcagcccgagctctctgcagctcccagtccccagcccaggtcccctttgttctgtcagctcctgagcacca

SEQ ID NO: 53787 - DNA, 1347 bp, Bovine  19866881306665
  misc_feature (1)..(1): n is a, c, g, or t
ntgaaaaactagataccatagattctaggtgggatactttttgaagcatgtcatcaatatgttcttattcaagtagagataaaagaaactcagctaagaaaattgctaccaggctgactgacagaacagctgtgggtgaagtgtgggatctcttaaaaaggcctgtctcgaggataagttttgactcacgttttgggagagctaaggtgactttgatgggcactggaatgaattacagcatgtgaaattccttaactaaaaaggtattggctttaaaaaatgagaaggtggtaccaggttttctgtgggtctttgcaatcaggatttttgctcaaataaatttctcacctctctgtgtccactttggttggcctttcccagactgtccctgagtcctggttcagctgatgcttttgcaaatggttttgtgctgtaaaggatagctattccagatgtatattcgggtttcagaaggattaaaaagattaaaaagagaagccaaaaagagcagccaagagacctcagcaatcttctgagacgatcgctttcaacctgagtttttggagcctgagagttctgtagatgtatcttgggtgggatgggagacagccctgtggatggagggatgctgagggtctgggctcagggtctctaccggcatcaaccagaagagctcaatgtaatctttcttatacattcaagttccaactctgctggaaaaaaatactgtttcgtgtttaaagcccacaaagctagtccatcatcatcatcatcatctcatcgtgttttacaatagttgatgttgagtgttttgcatttgtcagacactgttaaaagcactttatgtgcattatctcatttaatactcacagcacctttgaaaggtaggcaccattatcatgcccttaacataggagaaaacttaggcccagcacttaagtaatttgccaaagcatacacaccacaagagatggagcccggctttgaacgcacacagctgccccttgagcctgaacaattttccaccacgaggtacagacgatgtgaggcccagggagaggcagggactggccctagatcccacggtgggctcagggcagaccattccctctcagggccttcttcctcctgatggatctccttccctcctccctctccagcctgcagtatactttctagaagaaactcacaagcagctttaaatagaccatcccttggttaccaagcatctgtgctctcatgaagggagcctctgaaggagatggagctgtgatgagagatccgctttggagcccctcttttgaatgtgcctggggtgcccacctggcctgagtctcacttcccacc

SEQ ID NO: 53788 - DNA, 1128 bp, Bovine  19866881342658
  misc_feature (1)..(1): n is a, c, g, or t
ncgggcctggagcacagagccgttgcctcaccagcttgtaatgaggtgcgtctccatcctgattaggggaacaatcctcactcagaaagactcaagggaaggaagtgacagcgtcgtggggacagggcataacctcatctcccaaggaggggctggcttctggggagctggtgacttggaggtcacagcccaagagggtacccatccccctggaggaggctaagcagaccccactggggcaagtctgggtcagagcaggagacaggctgggccagcccctgcctctgtctgtaagcctgtgaggcagctgctcacaggctctggtttgccaagaggggcaagcaaggaaaccaacattctctggacaccttctgggcaccaggctaggtgccagtcctatgacatcatcactatcatcaacattgtcctattaaatcaaatgttagggcaccatttttttttttccaaaactgtggattgcagtccgttcctgggtaatgaaaacagcttagtgggcgacaaatagcatttttaaaataacgtgataaaaaatacagaaaatttcagtgtgcattgcacagagcaaggattggtattgtggaagtttcatttcttaatgtgtctgtgagtgtttggaagctggatcgtaatggggaaggaaacagagctcatttcttaaagtagttgtagggatagaatgggttaatgttttaagtgcttaacgcactgtaacagaggctgccagcacccacccaagtccccttggagagagttcaggctctccatacgtgccttcctgaatctctctctttctttttctggttgtaggaatatgcttagctcaagtgcaaagcaggtaaaaaagcagagcagaattactgccccaggagtgaccctcagcctaggaggactgggagatggtgggtaagcactgcagcctcctcattgctcagcgcaatgattctggggtgtgtccgccaccatctctctgagccccagatgcccacagagcaactcccttcctgtctcccttcctctctctctctgcttcctggaatctgctcccaaggaaacttcttgcacctatatcctggtcttggtgtctcatttgcaaacaactaactcatg

SEQ ID NO: 53789 - DNA, 1544 bp, Bovine  19866881348851
  misc_feature (1)..(1): n is a, c, g, or t
ntcagtgtgatcagatgcaacagacgagaatcctggtcctagaggagtcagcagtcgtgtagggagcgattattgatgacacagcagaagtctaggggaggcgggaaccagggagaacatctggcgtgggcagttggcacagggactgactcttagttggggctcattttcagcatcatctctgagctgtagggcacccctcctgggcagccttgccatgctgtgtttctgaaaagtgacctatttgggggtggtggagggaggttcatggggcggccttgaattcttggtagggttactcgtaacagactttcttcctttgtaaagttattgtttggccaagcttcacagagtaatgcatgtgataaattccacaaagcgggtgccaaggaaatgttgtctctctttgctgagaaagctttctggggaaaagcacagaccatgtgaaggagactggagcaaaatgccttgccatgtgacagacagacagtgtgaaccaaagccgattgttctttgcaatgacctggaatcttcaagtttggatgagacagggtttggctaagaccagagtgtcacagtggaattttgttcagactttacactccatttaaaccaggaaaccatagtcctctctcaagaatgaagcagtttttccaagatccccttgaaaaccttccaaaccaaaaaaatatatgtatattatatatatatgtgactatatagttaaaccccacagaccacagtcacagagagctgggagaggatggcagtgggcagagggggaggatatgatttctaaagacattaccgtctctctagcccaaatctgtcttagtcctaaatctgtgggccccaaatctgtttctcacaggtatgaaatgggaataattaggagattttcaagggtctgttggaggtctccgaagatttttgaagtgaagttttattggctgctgacaactttttaaaaagaggtggttttgtatctctcaaaacagttcagggtgcaggtcaagaaaacaaccacaaaaagatttgcctgttcaggtgttaaatttttcttctagtcctttcggtcccccaaatacaactgcgtctcttttaacagtgatcacgggcctcctgtttggcagttaatatgtccagtctctctcctggtttcacaggtcaggtttgctttgacctcacatctagtgcttgggtcctggagagagggctcgcatgattatttctgcagaccacatgctcaccatgtcattcagagataatcagcttcagctttgtgactttctgaacttgggcttttttttttttttctttctttcttttttctgttttcggtccaagaaatgtccaagcttgctcttctggatcaccctgcacctcagctcctatcattgaaatcaacagaaccttttctaaattgaactgtcttttctaacattgcagttcatcactactcttatgatctcccagtttgtgctgatttgccaggtagcagaaggacagacctcagtaatcaaataaggaacccagtctggaag

SEQ ID NO: 53790 - DNA, 1236 bp, Bovine  19866881362218
  misc_feature (1)..(1): n is a, c, g, or t
nttatgttacagaaaacagggcagagtgattcaaaccctgctgtcaatccagagtaaaggagagaaaaatgccagctattccacagctgtccaggagaatcctggaggagctgctttcatgacaactctgatgagcagaaacaagccaacttccagagcaggagttaaaccaaataaacctgaaggatatcagtttaggaggagagtcttaaaatagcagccaggaatgcatggtttcccttggacaactcaaattacatgacttgtccctgtcttaaataaaactatgcactcaaagtgtctgcttcatctaagtttccctctgagatgccaataaattttcagctcatggaagccagtctggaggcaaatatgctgggtgagcaaatgcacaacgtgatggtccttgcaaaggcaggcagggtacagggagaaggaagaaacagcctggatccccagaaaaccatcctagggttaggaagagacacagccacagggtcatgttccccaggggaggatttccagttaaactaatgggatggtgttcatgaggatgggcatttaaagtggactctccagaaagggaaccctcctacactgttggtgggaatgtcaactgatgcagtcactacagaaaatagtatagaggttccttagaaaactaaaaatacagctaccatatgatccagcaattccacttctggccaaatatctggaaaagtttatctggaaaactctaatttcaaaagatacatgcgcccccaatgttcacaggggcactagtcactataaccaagacacggaagcaacctaagtatctatcaatcgctgaagggataaagaagatgtggcatatacatataatgggtcataaaaaagaatgaaatattgtcactggtagcaacatactcgaaccttgagaattatcacactaagtgaagtaagtcatacagagagagacaagtattacatgatatcacttatatgtagaatctaaaaaataatacaaataagctaattcacaaaacagaaacagactcacagaaaacaaacttatggttaccaaaggggaaatgtcgggggagggctaaatcaagaggacgggattaacagatacacgttactatacataaaataaacaccaaggttctactggagagcatagggaactatattaaatatcttaatgcaggcaatgcaggttcgatccctgggttgagaagatcccctggagaa

SEQ ID NO: 53791 - DNA, 1074 bp, Bovine  19866881408258
  misc_feature (1)..(1): n is a, c, g, or t
nttcatcccagaaagtgcccttgtaaggagaaagcaaaaccagttctttctctctgggtttagggctcgttttccttttgtttctggagtcaccacccacctttcacctccccactaagactagggtgttcatatcacaccccccccaccttacctctacttcctcagacagcaaatgaggaccttcccagcactaaactctcagggttttaacaagacactggtattcaacaagtggtgaatgcaaagccccagcataggaggtggtatctgaacagtgacctctgagcagtggctttggtgacggccagcatcccaggagatggctgtgtccctgggcatcctgcctggctcgtggctggcgatggcaagctcggggtgcagactgctccgtgctgaggaatcagtgtgctgtgaggcatctaattagccatcatcttcccaggagacagctcagttgtgtaattgttatttctatattttacacaccctccatcagcaagagagactcgggccaacccttcaccagctccattgtttgcttgccttccagctgtgccaattgccctcttctcatctttccacggctcccacccaccagggaacatgcctgctggcgggcagggtaggggtgcagggaatggctttcacatgtgtctttaaagacccatctccaagaccagcacactgagagcaactgtgttggctggatttcctgtctggcttcggaggttgggggtcgtccgtgacggcataccctccatgtgccatctgttcataggcagagacgtgatgtggtgtgaaagatactgggtttgccatcaaacaggagccatcattttctagcaatttaatttacctctctaagctttggcttccttatcagttaaatcaagaccccgataccttgtatcatgaggctattgcaggcttctatcattcaacacatatttattgggttcccctggatgaaagaatgtttgtgatagggctttgcaaactgaaaattttgctgtctagataggagttattttcatcattgcagtctggcgttgattatcggaggagctttta

SEQ ID NO: 53792 - DNA, 982 bp, Bovine  19866881451610
  misc_feature (1)..(1): n is a, c, g, or t
ntgctgctaagttgcttcagtcatgtctgactctgtgcaacaccgtagatagcagcccaccaggctccaccatccctgggattctccaggcaagaacagtgcagtgggttgccatttccttctccaatgcatgaaagtgaaaagtgagagtgaagttgctcagtcgtgtccaactctttgcaacaccatggactacaagcccaccacgctcctctgtccttgggattttctaggcaagagtactggagtgggtcttctttgctgctgctgctgctaagtctcttcagtcgtgtccgattctgtgcgaccccatagacggcagcctactaggctcccccatccctgggattctccaggcaagaatactggagtgggttgccattgccttctccaggggatcttcccgacacagggatcaaacccaggtctcccacattgcaggcaggcgctttaacctctgagccaccagggaagcccaaaatattactttgagccccttttttggtggggttgggggtgcggcaagaatactggagtgggttgccattcccttctccaggagaccttcctgacccagggattgaacccgggtctcccgcattataggcagatgctttaccatctgagccaccagggaagtcaaaggtatataaatgatccttaaaatgacttctcaggattacagttatccatccttcactttaatgagcatcaacgagctgggtattgattggaacccaatgacttataacttcggccatcacgagtgtccaactggaagatacctggagtggccttgattctcaaaagccatatatttattcttccagtgttgtatatcaaaatccaaggtcagagtgctagcctaccataatttccagtgtatgaaggagtgccaggtgtcaaggagctttcttttttttccaccttcaggacatacatttatatacacacaaggaaggggcagctgcctcagaatagg

SEQ ID NO: 53793 - DNA, 2074 bp, Bovine  19866881490532
  misc_feature (1)..(1): n is a, c, g, or t
ntttcttctttttcatttatctcctcaccagctcagcacaggattccgaagtccaggcttttggagtctgtcaaatgaacggtgccattaatgtgattaacacagctactgtcacgtttattaggcatcattgaatctctgggcttctgattctaataatacactcttctaaaccaggcgcttgcacactgctgtgggccgaatacagcctgcctgtttttgaatagcccttgagctacgaatgtttttatatttttaagtggttaaaaattttcaaagaggaagaatgtgtcatgacacatgaggatgtaagaaattcaaatttctgtatccataagtaaaattttattgaaatattctcattactttatctattattaatggctacatttgcacaatgatggcagagctgtgtaattacagttgtaaatctgcaaatatttactgtcttatcctatagagggaaagtttgccagcccctgttgtcacctctactgttttctttgatgtctagaaggggacttgtgaagtgatgaggtcccagatggttcagggaacccagagtataggctctgtttggataccgagtggctatggggccttgggtatgccagttagctcctgtggaccacggcctccttgtctgtgctgagagggagatgaccactgcagctcctttggcctgcaaaattctttgacttttaaaacacagagaaaagagtgctccgaatggaaaaaaaaatgtgtgagaacatggagattgactcaggaatctctgtaagattttgtttttctctccagagctcctttgctcaccaagaccttgcttcctactctgtacatgaagtacagatgtgctctccaggacaggaacaaatggggtctcaggtcataccgtccattgttggtcagcatctctttgttttctagtctgatttgtagggttggattgaaaagggagtggaggagaaagaatctgaagcagaaatatggccaagtgggaccctttgcgggatgatagatcctcctttcttggaaaagattcttcttgaccttgcgtcattcccgctgcttgcttgtcctatcagtcagaattgaagtactgtgtcaggatgaattattcctaaggcacagtgttcccagtgtgcaggcgttggcagattagaaagaatacttagtagctttggattgtcataagacttaaagagtaattagagaatttatctccttagatgtttgtggagctcacaaagctctctctgctgtgtcatataagtatattgtgcttattcttttgagctggtactggaaaaggaaatttatagtggcaatttatttaatcaattcctttttctagaaggactctgattcctttcttagggtaaaacacactgactgtggatcgtaaagacacaataatataatggacttaatgctctcagaagagacgtcttttttttcctgctatatggttagggaaactaaatatgatttttctgaaaattgtgtttctgggatatggagtagcgtgttttggtttctttttctattgcgtttttatttgagttgctagagaacaagaaagggtgttaataattagattttaaagatagctcccttcggtctataaacagcatcttcctcactccagagaaaaccagttgtgtgtcggtgtctctgactccgtcgctgggatccacgtttagtttggtttccaagtccttgaaagccgttgacccctttgcttttgagtttcattcaccagctaaaaggccacgcatcagggtgggggaagtgaaattcaaagtttgtgggcttggaaaaatgcgtatttataatcagcttgagggctcagaggatttgtgaaatcgttttggattaacagccattgattgctaataaaacagtatttcgctttgtccagagaacagcggtggagaaaggtatgggcaccttgtcaacagggcccattgagcagggctgatgggccaagcgtgggggtcgcagcagcagcagcgtgggtgctcgtcccgcaaggagcccttgtcagccctttgccaggcgggtgacagga

SEQ ID NO: 53794 - DNA, 910 bp, Bovine  19866881606248
  misc_feature (1)..(1): n is a, c, g, or t
ntggtagctgctgctgctgctaagtcgtgtcagctgtgtccgattctgtgcgaccccacagacggcagcccaccaggatcccccatccctgggattctccaggcaaaaatgctggagtgcgttgccatttccttctccatcaagtagtagcgtaagaggttttccttccttttcccacgtacatactttccaaaattataacttcagcttaaaaactggaaactagaaacaaattagttgtcttcacttaagtgatgtcactttttttctttccaggacaatgtctgtcatagatattccttccaagtaaaaatgttacattaaaaagtggccagatcagcttgcaactgtgtcacacaaatgcttttgtggagacagatatttttattgccatatgcaataaaagtgctttattagtatatcatatagaatgttaacaagatgagtactcaagggtcaagatttaatgaaatgttttttttttttaatcaaggacattttaaatcgagtatgtggcagtgaagaatacaatgactattagtatagtttggtgccttgatctgtgccagagccagcaattttacgcgactgcttttgtaccatcggtgtaaatatgaatacagtgaaaaaggcaaacaccttagtactattgcaaaaacagtttcatttcctggacttcctctaagaggttttcaggggtcatgaggggtccgctgaccacactttgagaaccagtgatggaggtaaaacatgatggcagcttggactagcatggcgtagtgagatctgttttggttctggacatattttgaaggtagattatgtaagacttgctgcctaacttggatgcagagggaaagaaacgggtcaaggatgtctctcagttttctgtcctatagatggaggaaaa

SEQ ID NO: 53795 - DNA, 1224 bp, Bovine  19866881890405
  misc_feature (1)..(1): n is a, c, g, or t
ncgagacagccttgggcagtgtttggcgtatgtcatttcttctttatgatagccttatgaatgggaaagttagggctcagagagatgacaagactcataagtcacactgtttatgggtgtgacagggcctaaggactggaccctcccttcccggacagccagtgaagcctctgctctccctgcaccccagcctgtgcagggggcctcgttgggtggtttctgagctggctgctttgcaaggccagaaggcccatccctcctcacctgcccgcccgtgtaggcggctcttggcatgtgtgctgagtcaggcggcccaagcagctttccacgctcagaggtggcgagctaattaagggctccagagctgccagcggatgtgctagtagacgttgtctgagaagtttgccgagagccacggcctggtgcggggctccctccacgttggtccccaggaggctggggtgtgggaccagccaagaccacccatcatgcatatgaagggtgttatatcagacaggagttagaacccggttagacctgggttcttaaagcctggctctgccactggttcgggtgagttccccaaacaccctgaatctccctgctgataaaattgccgcagtaatcaatgcctgcctccaaaatttgtggggatgatacataaggctatatgtgacatgctgtccgcaggtacaaaataaatgttcttttatatttactcattatgaactaagcccacttatctataaaatgagaggtttctttcagtagacatggtctggcacataaaagcgggtgaatagaggttcgtcccttcccctccttcagccccaagagctaggcctaagacccctggccctgccctcgaggttttccataggctggtgattcatgaaccagcttcccagagcagttgggctgggggctgggtttcattttggaactattgtgtcaaaagttccattccccatctccctttccttggactattactaagccattaaaaagaacaaatttgagtcagttctagcatggtggatgaacctagaaccttttatacagaatgaagtcagaaagagagaaacaaatatcatatattaacacatatatattgaatctagaaaaatggtactgaggaacttagttggagggaaggaatggagacacagatacagagaacagacttgtagacacagctggggaaggaaagagtgggatgaacag

SEQ ID NO: 53796 - DNA, 2889 bp, Bovine  19866880672526
  misc_feature (1)..(1): n is a, c, g, or t
ntatggcttgaattcgtgctcctgaactcgtactgatatacacatgcatctgagcaaactcagcgatagtggaggacacaggagcctggcaggccgcagtccgtggggtcacaaagagtcagacacgactccgcaactgaacaacaacacggctgatttattttgctgtacagtagaaattaacacaacaattgtaaagcaactgtactccagtaaaaatcaattacaaagaatcgtcaatggccaattgtttaaccaattggttaaccactttttcgaaacctccaaaaaaaaaaaaaacctcagaaggacaaggttcagaaagcttccatttttgtgaagcacatggagacttgggagcattcagagagtgcagggaagcctcacagactttatttacccctttccctgcacatctcttcatctgggggttcctgagttatatccttctataataaaccagtcatctactaaataaaatgtttctctgagttctgtgagccactctagccaatggtccaacccaaggagggggcctggaaacttccaatttacagtcagggcacaggtaagcccctgggcccatgactagcatctgagttggaggagggggcatggagatgcaatcttgtaggacagaacccttagcctgtggaatctgatgtgatctctgggtacatagtgttggaattgagttaattttttagacacactgccagtgtcttaaaactgctggcattgtgtagggaaacacacacacataacacattgggcttggtctcaagacaccggaagggtatcccctccattctttaggagttcggctacttcttccctacgcttctatcttccttagcacttctatcacgaccagccatcctggacttttttgtcctatcacttcactggttgagaaaaccagcaagattactagtctaaggcaatgcacccttttaatcactaaggctctgaatagggaggcatttgtggctaagagagtctcagatcaacatagactctaccaacctctgatacattattcctgctgggatccgttttctgataagtagctggagtcagtacctccctcccttaaagttttgaaagagggggaaacccttgcgtttaatatttcagatggaaatcaaagtcaagggaattttcagaaagtgtaagtagtcctgagttggccttcattctaaagtaagaaacccaccgaaatgaaaagcaaaattaacgagccccatggcagtgtttgcagcattaaagagggtgtcaagaggaccagatgtctcactagatgtagctcacatttccactgcaaacttctaaaagagaactcttcaaacaggaggccaggtaatgcccagtggaaggcactttaattgcacagtgattagataaaagctttaagtgtaaaggacaaaatgtgaatttaagtgagaaaataaatgatacatttcaactataaaagaagagttttcccatgtattttttttaagtcggtgacaatgagtaacaaattgaccagatacatggattctatgggatacatttaaaagaataatacagcaatttattttagtcttaagattgtcaatttcagaccccacatattccgtatattgctcctaaactgatcttctcaagagcaagccacagccgggcaccataccttctcttctttcccaccttccttgcacaattgcccttgcccgcctgccccttcaaatcttatttcagggcattgtccccaaggtgtgaacactttgaggcaccaaagagacaacatgaaatgtgtgtgtgctaagcctctgttaatcaagacttgggtctgcttctcagtggcatgttttgcatgatttcaaggtagtgaaagtttcacatggacctttgatatttgatagctcagcatgacagcttgaaaggagagggtgggatgcactgagagagtagcgtgggcatatacacactactatgtgtgaaacagatcgctcgcggagctgctgtagagagcagagggctcaactcagcgctctgcgaggacctggatgggtgcggtggaggggaaggaaggaggctcaagagggagggggtacatgtatgcatacagctgattcacttccctgtgcagcagagactaacacagcagtatacagcaattacagcccaagttaaaaaataaaaatttctaaaacacacattgtatcttggaattccagaaaaacatctacttctgcttcactgactatgctaaagcctttgactgcagacgacaacttactgtggaaaattcttaaagagatgggaataccagaccacctgcttcctgggaaacctgtatgcaggtcaagaggcaacagttagaaccagacacagaacaatgaactggttcaaaattgggaaaggagcacgtcaaggctgtgtattgtcaccctgcttatttaacttacatgcagagtacatcatgtgaaatgccaggctggataaagcacaagctggaatcaagattgccaggagaaatatcaataacctcagatatgcacatgacatcatcctaatggcaaaaagctaaaaactcaagagcctcttgatgaaggtcaaagagaagagtgaaaacctggcttaaaactcagcattcaaaacactaagatcatggtatctggtcctgtcacttcacggtaaataaatggaaacagtaacaggctttattttcttgggctccaaaatcactgcagatggcgactacagccatgaaattaaaagatgcttgctccttggaagaaaagctatgaccaacctagacaacgcattaaaaagcagagacatcactttgccaacaaaggtctgtctggtcaaaactatgattttcccaatagttatgtatgg

SEQ ID NO: 53797 - DNA, 1425 bp, Bovine  19866881286706
  misc_feature (1)..(1): n is a, c, g, or t
ntgggagacacactattttcccgtgtccagtattaaagctatctattattttggtaagaaatgcctaaattgaaattccaaagggcattatgaacttgaattaaaaaggtaatggattttttaataagttctgggtcaagatgtattatccaactattttccatagggcatagaatatactatctatccttttaataataccagccctggtcttccttccagcgccagctgcggctgcccggctgttacagcctctcccaccatccccaacaatgaacgaataactagacggcccacggagcattctaaatagaactgtctccaggacagcctgtgaccggcagagacaggttcgatccagatctggactccctgctttgggagaagcgcagatcgatattgttggggagtaagtcgtagagggaaatactgggatgaattaagtaaatcgtgaaacaaatgggtcacatgcttccatgcaactttattctacctgagggctctgactcagaactcggcggaggctaattctgtgtattctctgattcaaagggctttcggaaaaacaacctgaattatacaaaccacttactagcaatgaaatactatgtctgcaaatcctcaaaggctgcaaggaacttaaccaagcactggaaaagcggtctgcatatttgaaattgtagtcgagatttcttctttttttcctcatttatggtttggctccagagccaaagttacgtcttgaaaccttccttgctgtcactgctgactgcctgactctgctgtgctctataaacctgcctcttctctgcgcctgccgggtaactccctactgcacaccccagacactgtcttacatctctgctgggtcctggggtgacgtggaagcaatgtctacatggcgcagtggagggaaagagggcagtgcgcttactgactgccagacagcggacagcagcccagagcagtgcttcttactctccgtgaaaaagtaaactatgaggagctgatgaagaggcaggaaaactgctgcattttaagtctgtataccctatggtcagggacagattaatacatgctgatgccgttactatcttcatggctgcattcatttagataatattttagtgcaggagtttatagtgcattttgatattggatgggcttcgctggtggctcagagggtaaagcatctgcctgcaatgcgggagacccgggttcgatccctgggtcaggaagagcccctggagaaggaaatggcaacccattccagtattcttgcctggagaatcccatggacggaggagcctggtaggctacagtccacggggtcgcaaagaatcggacacaactgagcaacttcacttttgatattggaagccttaaattcattggtataatcatcttctggttttctggtatctt

SEQ ID NO: 53798 - DNA, 914 bp, Bovine  19866881460380
  misc_feature (1)..(1): n is a, c, g, or t
ncggaaaaggacagcccacagcacagcccagatgtcagcacccagccctgcagtggccgctgcgtggagagttcagggagcttacatttaacacgtgtgcatttcactgtatttaatgtttaagccctcgaatcctttgtgtctatgaaaagtcacagaaaacccaatggacaatattaatcagagcacatcattttagtggtagctgtgcccactcccagggctcggctgcatcccgagagccttagccgtgccccgtggtctcgaggtaagaaatacagttggctcagcagcatttgttaatttatgtaagaaggaaaatgaatcacatagaaacatatggaaatgtccaaatgccaatttttttttttttaggttagcttgttgtgtcctcattttccttctaacctggggtttatgctatcaactattaacactaaacagattctaccttatactcagttttcaaatacatataaatttaaaagatatatatgcatgcatgtacatatataatttcagactaagtaaaatgagtgttttctttggatagaaaaccaacaaaggacgggaaatcctgacttcaggatattgcagttaagggttgggaacattcaggcaggagttactgccatccagaggtgggaagccacgagctgccatagcctattccaattttactataaaagaagccaagaaaaacgagtgcattgttgcagtctggctcattaaatcatcagagaatgggaaactgagacccagaatcaggcgtcacgggaccctgaggtcccactgtcgtcgtgaacgggaaaacgtaacctggattcctcaaagctactcacagggaaaggggacacagctctctgtgatataaggccaaccatttcggcagactcctcgatgtgcaaaagcat

SEQ ID NO: 53799 - DNA, 4634 bp, Bovine  19866880359862
  misc_feature (1)..(1): n is a, c, g, or t
ncatgactactggaaaaacctagctttgactagatggacctttgttggcaaagtaacgtctctgctttttaatatgctgtctaggttggtcaaagcttttcttccaaggagcatgcatcttataatttcatggttgcagtcaccatctgcagtgattttggagcccaagaaaatacaaagtctctcactgtttccattgtttaacagcctcatcttttcggatttgaaatagctcaactggaattccatcacctccacttgctttgttcatagtgatgcttcctaaggcctacttgactaaacccagaaaatactgtgttgataaagatgtggaaaaactggaattccttactaatgatagcaatataaaatagagtagccactatggaaaacagtacagtgtttcctcaaaaaaactaaaaatagaattcttatatgattcaacaattccaatttatgggtatttatacagaggaacagagaaggcaatggcacccccctgcagtactcttgccaggaaaatcccaaggatggaggagcctggcgggctacagtccatggggttgctaagagtcagacacgactgagactgagtgacttcactttcacttttcacttttctgcattggagaaggaaatggcaacccactccagtgttcttgcctggagaatcccagggacgggggagcctgatgggctgccatctatggggtcgcacagagtcggacacgactgaagtgacttagcagcagcagcagcatacagaggaactgaaatcaggatcttgaagagatatttgccctctcatgtacattgcagcattatacaaaataggcaggacatgaatgcaacttaatgtccactgacagatgaatggatttttagaaagtgcacaccctggaatattattcagtcataaaaaaattgtaatatactacaaaacgagtgaactttaaagacattatgttaagtgaaataaggacagagagaacaaatattgcatgatttcactaatataaagtatctaaagtagctaaactcatagaagcagaaaataaaacactggttgccatgtactgagtgggaaaagtggagagaagctctgcaatgtgcatcaagtttcagtcatgggggatgtaaatgttctagagagccactgtacactgtgctcccactgatcaatactgtattttcacttaaaattttgttaagagggtggtttcatatagtgtgtgtttttttaccacaataaaaaagcattaacactaagattttagaaagacatttgacctgtacagcattaactttccccccaaaattaggaagtactgaattttcaagtttgtaaaagagagctgtcatgtcactttatcaacacaaaatatgatctttcacatatttggaaaattatcagggccacacaatcgggctgtgtcagtggaaatcatgaaaggggaaaaaagtgaacactggcagcactgtgttccctccagaaaatggaaagaatccttctcttcatctatcacattattctctttgactttctagttgcatctgggatgaaagagaactatttataatacaaggattatttgtgccaattatctagttaatatacagcaaaggccatggttttttgttcttgcctaaccaatcatttggaagaatgtacttagcagatagttatagtctgtaagaaaaaaagggtttctgctggtaaattagaactaattgagggaaaataagcctatctgtcataaaccacaaataatggttggagcaataatgtttattatcataatttttacatggtaatatattaactgatgaattatactgaagcagagtatatcatttatcctcaatagctcccttgtgccaaaagagctacatatagaacttcctttattccatagttaagagatgttgaatagaaccagcaaacaaggcagaggatgcatagaaatcgagtatctttaatctctgattaacacttcagtctgtatttggaacatgccacttctatactttccaaaggatttacagaagtataaataaattgagaacaaagaaaggaataatttttttttgccactctgtgcagtatgtgggatcctagttccctgaccaagatcaaacccacaccccttgcactggaagcaggaatgatatttagaattcttgcttgtgtttgtcctttctatgtttcctttctgtctgtaaccaacttccctataatagaagcagtgttgagcatgggaaaatggcagccgtgactcatgattatgtaaattggtatcaatgtggtcctgggctgcccatcaggcagagaccaaggttgaccctgagcaagggcctgagcttatattgctggagttcagcatcactacttgaactcctgtttgtccgatcccatttgttctataggaaggctgcaagggtgaacagttagtatagatacttgaatgattaaggtaaatttatgatcacccaataaagttattggaaaggtaaagaatagtctctggccctgctatgtatttactccagatataaaagcctgagaagaatgagtaaagacatgagtaaagacaccattctagaaagtcattcttaacttaaaaagagtaggatgaattgattcagtttctcctaagtgtgacaaggcagcatccttccttaagcattggactgttcttcaaacacttcctacccatgggggttaggataccaagaaagttaaaaactgagtttttaatgttcagtgctatcttaggcttaagatagaatgtcaaatttgtgatctacagcagagacatatctttcaagaaggttgggttgtaagtacatcacataaggtaaaaatgcagcaggtcaaaattgcatttgggaaagttctatactggatctaaacatgtttcaaaacatccaacacaaccaaatttttctctcttgaaacatagttcttttatttttctgattgaacactagattatgtaagtggcttgcatttgggacattgcaatttttaaataaagtattttaaacactagcgtgtctctgtatggtgaatattcctgactgagagaacaagactttgctacccatcttctcaaacaaagaggaacatactcactgagtggaagtcaatcagaagagcttgtggtatttcagttgatcatttatttgttctcatcttcatcctcaagctaccattcattcacacaatcttgacttctatctttttggctcaccttttctcctccctcttctttagcagagcacaaacaggagaattttgcatacattaaatatccctctgatgtgattctactgtaatagtcaaggcagacataatcaatcattcacaacacgatttttctctcatttgaccaagactggacctcaaagttcttcccaacacagcacttcagacggccactacaggtaaccagtacaaattctctgacattccatataatgtttttaaacaacttagatttcattactgtttttagtttcattttatatatgattttaagaaagaaagcactagatgagaggcttactagacctcacagtgaattctgatattatgacccattagattgtgtgttggagaagactcttgagagtcccttggactgcaaggagatcaaaccagtccatcctaaaggaaatcaaccctgaatattcattggaaggactgatgctgaaactccacttctgacttgaagagccaactcgttggaaaagaccctgatactggaaaagattgaaggcaaaagaagagggtagtaaaggatgagatggttagatagcatcaccaactcgatggacatgaatttgagtaaactccaggagatagcagaggacagaggagcctagtccacagggtcactaagagtccgatatgacgtagtgactgaacaacagcaacagattacagcaggggtcggacaattaaggcctattgatcaaatccacctcatcacctgtttttgtatagcctgagatataaaaatggattttacacatttaaatcaccaaaaaatcaaataataataatattttgtgaaaggtaaaattgtatgtaactaatatttgtactcataaataaagtttcattggaaaatagtcactgttatttgtttacatttttgtctatgactgttttacactacagagttgcagttgtatcagagagtatacgtcccacaaaatctaaaataattactaattgatcctttgtaaaaaaaaatatgtaaactaaagtatgatgagaacattgtgggttgaatgtcaagtcaaagaattggtattaacagcagaggtgataaaataagagcaagcaacataacatgactgcatgtatttgtcaaaaagtcatcttatgacatactttaaaagggtgaattttattataaattttttgttacatttattattttgcaataaaaatttgccatgagaaaagaataccaaacataaaaataaaaaatacctggaatttattggggtatttgacatgaatacagagaatttgacatgaaattaggtgctctaaaagaggccactgaaatgtagatttaacatgagatttatattttataatccagctaagaaataagttc

SEQ ID NO: 53800 - DNA, 1461 bp, Bovine  19866880507756
  misc_feature (1)..(1): n is a, c, g, or t
naaacttagcatgaccagaaggaagaccagaatgatgggagtggggggtaggggaaggacgaggtcatgaaggaagcagcagcaggttcaggcgaggccttgaaatccatggcgactactttgtgtccttttctggatattacagccattggaggcttttaagtatgggagtaccctgatgttttcagaactagtaataacatggagaattggtcatttgaccttccaacaaagcctaggccatttcaccccaatggagaacttcaagtaatgtaactttccctaaagttgtattgagaaagttaaatctcgtctctaaacgcagacttttttgtcacatgcttgttctgttttgcattcaacccagaggtcttcatactcacctctcagacttcaacattacctgtgatctggagctcactgtggtctccttgccgaggaccacagtaggaactagtaaaatttaattttagtcagtgcctagaatttgactttcaaggccttgttgagatcactttaattggggagtccacagaactaaggcgtcctttgtttatatatagctcagggaatggagggatctatttttttttcaattttactctttaccatgctgggcatttccgaacttttgtcagctctttctttaagaatcatgattacttgtttttcaggagtgattcttctgatcacgatttaaaacaacctttccccacattatggcagaagtcagttcttgatgtgagcctactctacaccattcatcaaatatatcaggcaatttcagtgatgacagttctatgcaaacagtattcaagcagtaatgatttccaaatattgataccaagtgcccattttctaaggaaaatggatgataattttctactacttaccattcacacatgcgtgagaatttacattcttcctttttattagtctatgattgatgtaaagtgcagcttctcatggtatgtacctgagagagaatgtatttcaataagtaatttacaacttgctaaagataagctgtctttacaaaatatttttatttaatagcaccttaaaccaattcatgaagctaaaactgaaaaagtaattcacaaactctatcttccccatgcaaataaagaaaaaacaaatagcaacagcaaaataccaatcagttttaactttttaaacattcagttcagttcagttgctcagtcgtgtccgactctttgtgactccatggactgactgcaactcaccagctcagactcatgtccatcgagtcggtgatgccatccaaccatctcatcctctgtcatcccttttcctagggccttcaatctttcccagcatcagggtcttttcaaatgagtcagctctttacatcaggtggccaaagtattggagtttcagctttagcatcagtctttctgatgaatatccaggactgatttcctttaggattgactgatt

SEQ ID NO: 53801 - DNA, 2364 bp, Bovine  19866881366506
  misc_feature (1)..(1): n is a, c, g, or t
ntttaagccactgtaccaacacagcaatggcctacctctggcttttcagggcagaaaaaatgtccaacttaatatgttgaagccactctttattcagttacagctgaatccagttcccagtacacaaatggagaaagaggatgttatctttgcataattatacaatcatttttaattcttccacaagaaaaaccagccatttttagattttaagaggcacatcatttcagaacaatacattttacccatcttctggctcactgcattcaacctttagccaaaatgtcaagtatcaaagtacagatagtattacattataattctttatttacatctgtttatagactctaaattatttaagggcaggacctatgtcttatttatcctttcacctttagaacctaaaacatctcttggcacttattaaaaggtcaggaaataagtgtttaatttatttagactagcaggagaataagctctttaaacctagggtggaagctgttgccacaggataaaaatcagtgctcagatacatgataagacaggcaagcagaaaggagtcaggatatagggccagctctctgtcactaaaccagtgtctcagtcttttcatacagagaacactgtgcatctctacaaggatgaaaatgccttcagcatccgggggcggtgggggtgcttggaggagaaacgtgcaaaaaatgaagccctgatagatgctttagcaaatactcctctatgttcagcattttctgcctgtaattacttttcaccaaagacagcaatcatattaaaaaaaaaaaatagctctcctagttgcttcacttaaaatggatggtgactttataaagcacaagtggcaaaaagccaaacaacaacctgctttattgaatcttattttctcctgtgcagattactcacgcattagtttgcctggaactgagaaatgtggttttctctgacccatggggtctgagaccaacaggaaccagcaccagctcaaaatcagtttcttctcaggcctgcccatgaaggttagataagttattaatgcatgaaacacccaactcctgagtcattcacaaccgaagttgcctaagtgtgaggaggttgtacttctgcctaaagccttgaaagatcatttttggaatgggtattgttgtgatagatagaactcagtgggaatgggcaattttgacattgtaaattaccttgtaattttatatactggaggccattctttcaaatccacaggcctataatcccgagaaaggtcattcttagtgtggagtctggagtattttgaaaaaaaataggaaaggcagggttgaaaagcccatttgtcctgcaagttgggggaataaatttataacaaggattttttaaatgaaggttgaatttgcaaccattcatttgaacaggcatgcctagaccacctgataaataatacatttgcattgtgcttatgaaatatgcaaatgtagtccaatttgcaaataaatgccttgaagaattcttttaaaacttcagaggttacctaatcctagtagttgccctattcgtatttgtgaggtttttgttttattttgtgacagctgccataaattcaattaaactgtatggcaaatgaagttttggtggtagctgttttttttttctcctgaaggaagaaaatgatcaagaggttggaaagatgggaagcaatgagcacatttgcaaacagggaaatcaaacaatgccgcatcaaaataggaaggaaggaaatccagccagctaagcaggtacagccggatttggtacccttgtccttcactccctttatccacaggctttttttgcttgggaaaaaaaaaaaaagtataagcaattaggatctgcaaagttagaagctaaaataattcactgacagcaaacagaaacagaaagcaaatctcagaatgtgcaggcatgaaaaatactgcaagggatggtcattcaaaatgtgtttcaggccatttggagaggcgtgactgagaacactgccctaagtcaagttcattaacgcctcctccacgaggttttaactttctatcatataaaaaaaatatctaaatgtttaattttctgagtttccacaggactcaaattctgaattctcttattctaagactcatagctcagtcagtaaagaatctgcctgcaatgcaggagacccaggttcaattcctgagtcaggaagatcccctgaagaaggaaatggcaacccactccagtattcttgcctggagaatcccatggaccagaggagcctgaacaggctgcagtccatggggtcacaagagccagacacaacttagtgactaaaccaccaccaccaccatgaaa

SEQ ID NO: 53802 - DNA, 618 bp, Bovine  19866881730817
  misc_feature (1)..(1): n is a, c, g, or t
ntgaaacaaagacagcatagtgttccgccctggagagagatgactgttaaaaggagccacccgtaaagccatgggtctcaggaatattaaagtacagtgcaatgaaatgggtctctgtccttgcttaatctagattgagttctagttttttaatacgaaacccagacaataggaccatttatcatttaggtgaagccaaaagctgggttgagtagccggtgacagagggctaacacagacagattctgtgctccactacggctgttttttcctgccagcactcacgccgaggcagtaacttggttctgagttatttgctgtacaaatttaaagccacaacacaagaatagaggctaaacccaagggaaatggcctttcaccagcccgtgtgctctgatggcatacgaaaatctggaacgaggaagttgatgcaaggattacacaactttaccaaaactttcactgagattgcagagacagagagatagagaatattaaaggaaaggaccaattgccaaaacaaatgatttagatttgggagttggtttggttacaacccaggaaatagtaataattttggaaatcttactgctggaaggtaagcacaagacatcatca

SEQ ID NO: 53803 - DNA, 705 bp, Bovine  19866882013420
  misc_feature (1)..(1): n is a, c, g, or t
ntgaagctgaggagccctgctggaaagcaagcttctaagcagaaacagagaagaacagaaaagtgtaaatctccacagatgcagacagacttgtgggtgaacagcccatttaaaggcatgaagtttgcattaaaatataaaatactctgcaggccaaacagagctcctcgcaggctgcatgtgcagtgaggactctctggggaagtcttggctgaatgaacaagtcttggtccgtgcctcaagagcaacaagtggaacattttctcccctgttacctcctgaaagatttactattatggcctctcagagtcaagggaaaacttgaattaaaagtgtttcccagagaaagcattaagcctgatcactcaaatgccttttcttgcaaagggtggcctaaaggtcagaaaactgtctcaccaccaggttcatgttgccttaaaatcctctaatgttctcatctgaccaaagggaaatagggctactgagtactggggcgtgcggccagaatggacactgttgtcagagaaatccttatgaaatatggttgttgttatcttagcatattattgcttttcctactgttcatggtttaattaaagcccagaactgcacaggagaaaagcagacaaggcaaatttccttttgaggaactggaaacacatcctggatttacattggaatgctttctttttacaaaggctttaa

SEQ ID NO: 53804 - DNA, 1484 bp, Bovine  19866880429808
  misc_feature (1)..(1): n is a, c, g, or t
nccacatgttacatgcatctcgtgccctgggactaacaacgatgcatgtgcattctcgatgtgcctcacagtccaactgagcagagtctttccagttcattaacgaaaggggaactggggatacttgcccatttttttccaatatgaggactcagtgccatcacagaagggcaacattcatctactatattcatctaccattcaaaaacgtatgaatctgcacaatttgcatgttctgagataaataaccattggcggtccttgtgcattacatatgcttgcacatgagaaaaatacacacgccagagtaacctgcagtgggctacaggtgagaaaagacagacgtgagggagaaaccagacactgcaaacagcggcccgccaactgcagctaaggtttactgtttactatgggccgagcactgggctaagggtgtggctagcactatcatttgttcctcgcagtgaagtaggtactttcattatacttcttttaaaaaattgaggctcagaaatgacttgcacaatcttcaactggtaggcaacgggaaagcctcaccttgaaagcccagtccgcctgactctaaagcaaggcccatccgtgaagctcaacactgtactgcccccaccccaagcagggaggatctgtgccctgggatccaaggtgaccgtttcctcaggaggacggagggaagggggagaaggcacttctttctctctatctctctctctggagaaaggaaacaggagaaggaggaaaggacttcctctacacgcacccccacccccacatacacaaatacacgtacagcccttgagaaattttcggaagcaggcttctaatcaattatttagaaaggatatgatcctaatgagtgaatgaatcataacctaccatagcctatggcactgagctcctgggaggagaggtcctaaaataatcaggaccatagcaaagataacagtctacagaggaatactgccaatcgcttcggataatttccttacatttttactttaaaggagaatgaagtcacgaaacatcaggaagcccagacaaagacatctttggcacagtaagttacacggtctttaatgaaacatactgactgagtgccagttatgcaccacaggcaccacggaccaaagagtaagcagatctcaacacacaccaccagcagaaagcattgccaggaagaataaccctcagggggaatgcaaacgcttgttattttgataacaacctacgaaaaaatattctaattctaaaaatcttctaggtcatttatcaatccttcttagtattctatctcatgatgaacagacacacaggtaagtggagtttatacactgaactgtctcctttcttcagactcatataatagcaaaattttggtttttaaaaactaaactcattttatacttagaaattagcaaataaactggtatattcaatcaataaaattccaaatttcaccatgtaga

SEQ ID NO: 53805 - DNA, 1463 bp, Bovine  19866880588363
  misc_feature (1)..(1): n is a, c, g, or t
ntctactttggacagcagagaaagaggccaaaaaccaaggaaaggaaatgaggaaaggtagaggggcaggaggagaattaggataacacagtgccatgaaccagaaaagcaatgtctcccagttgggtggagtgctcagtatcagcaggggccagaaacatcgaatggccgagacagagcatttggatctggctcctacgtgatcagtaggacaaggtgtttcaaaaagatgaggagagcagagcagggagccacaaaaagcaagaaagaggcagccactaacaggctgagtacatatgtgtgtgccaggcatcatgataggaattttgtatggatttatcatctttaatcctcacaaacatcccttaaaagtaagtgctatgaataatttgtatccagcgcatttttcgtataacttaatgaaagaagcataccttttaaaaaaaaaaacaaaaaacctctcatacatattttgatgtggctatggagatttgagagcaagcatgtagctggaaactgctatcagggaaaataatacaaactgagaggggctgaatatggaatggtctggctgggtgactaaagcacatgatcaaaatgtttgtaatggcaaacggatttgtgtgtgtgtgtgtgtgtgtgtgtcctgtctgtctgtttctctggctcccacaagaactgcttgggagaaaaacatgcttatgtggtcaattagtcccagtgcaaactcatactattagcaacaatttttgaaggctgatttttttgcatagcagaaggcaatggcaacccactccagtactcttgcctggaaaatgccatggatggaggagcctggtaggccacagtccatggggttgcaaagagtcgggcatgactgagcgacttcactttcacttttcactttcatacattggagaaggaaatggcaacccacgccagtgttcttgcctggagaatcccagggacaggggagcctggtgggctgccatctatggggttgcacaaagtcagacacgactgaggcgacttagcagcagcatcataacagagaatatgaaagaaaacaaatatgaaagggtgaaaatattgctaatccaccaggtcacacatgatagtgatgtaaatacttcctgtcccactgaatttccctcctcaaaaaatagccacagaaggaagagcagctctccagggttccaggaccatgaaatgaatctgtattcctatgagtctttaaatatttatacacagcaagtaaaatctgattgtttattttttaaatttaccttagcatgaggtttaatttaatttaacctcaatgaagaaaatggccgtgacttcatacatatctatcaaataaataaatgcgtcaatttaacctaaaagacacttgtacttttagcaactctcaatcttatttgatcaaaataaacaacaaaaacaggaaacagtataatggctta

SEQ ID NO: 53806 - DNA, 2204 bp, Bovine  19866880590828
  misc_feature (1)..(1): n is a, c, g, or t
nttttcgattagggcctaatggattcattttcactttattaccactgtacagatcctatttttacagaaaatcgcattctgaaatactgggagttcagacttcatatcttttggatatggagaggcaaaattcaacccaaaacagtagctctgttctatgaatggaaacaaatttatcacagagcccagaatgatgcaaccatcactaatttgttctttttttttttttttaatctatgtaatcagctaggaaatgaaaatagatttttcttacaataattctcagaggaaaacaaggatggggaagaagggaagggggagagtggtaaggtctctccttggcgtttcctttgttgtgctgtggctatgtgtctgatgtccagagaggagcctgggtgcacatgccagcttctcttacctaataaccagctgaggccacagcagcacttctctctgtgtgaggagaagcatttctttggagcggacagatcctttcttttctggagtctttctgtgggccttgcccacccctgagcagtggactttcatttcccagggtcatgggttcagagatgcatacagtgtgtgggaggtcggggagggcaggaaagatgctgtgaggggagaaggaagggaagtggtccaaagataacaatatttaaggcatcatttcctgtacaaaaatggacaaccaggcatgataccaaaggaagtgaaaaccaaaataaatattagccgccctctgcctttggagtgcttgtgtgtacatgcaggtgacatcttagtgagctgtttgagataattaccctgagtaagagaggccctgttgattttaagtgaaggatagctcagagttaataggaggaataccctgagcatcagttgcttatcttctgcattattctccagtagagggtgactcagtgccctggaaaagttgatggaccagcagcattcaaggacaacagggagggaagagataaggaaggacagttgtccttgtgaacactggcagtagatttggcacgagagccccttcttctctattactggagctgtttagaagaaaaagtatgggccgtcttcacagaaatgggttttacatagaggacatacagagactatggtcatcttgaggaaaagaattcattgttagtccttggtgactctctgtggcttaccccccgttccttaatttaggttagggatgtataaatggtgcccctagatgtgcttctagctagaggacccagcaatgcctgttgcttacctcctgtgaagatgtaagggagcagatgctccagggacaacggcaacaggaagtcaagggaccatgttgttatgagcggggccttgtctgactttccagtgtaaagctctttgataaagtgggctggacacgtggcgttgcctgaagacaggtcagtgtacaccctggtgtttaccattcctgccacaggcaaaatgtaatggtctcctttactttcatcgttaaggctgcttctcagaaagggagagttaggtgaaacaaagtgagattgtgtttaataagtaaaggtatgttcatttaaggactagaagattaaacacaacagtataaagtgatgcaactgtgtcttgatataacgtgtttgaggcaggtctgagggaacaactcaaacgatgtgagtcagcttcgagcagttcacgttagattgggggtggtctccaaatgtagtagaattgagcttgtgatagagttgaggtcctggttattctaaactgtgttcaggctttaattataattctttcagcttgcgatatgggaccgaggcaggacatgtagagcttgggaaggggccaggaggcgtaacagcaatgaggttccatatgcacgatgagaggaaagacagcaggacggcttggagaagtgaaggctggcaggggctcagttagttgttttaagtatatgaaggtctattgcaagaatcatggtgaacagatattttcactcttcactaaagacaggactaaacaaggaatgccgttaccttttagcccaaggtactttaaatgagaatttagggaaaccatcttaactgaacatgtgggaacatgggattattttaataaagggatccagagcattgactttcagataatttacggcaagtgcagaaacacacttgaactggatctaatcttgatgattttctttgatttga

SEQ ID NO: 53807 - DNA, 723 bp, Bovine  19866880641293
  misc_feature (1)..(1): n is a, c, g, or t
ntgagtatgttcagtgctatctgtctccctgccgagagaatagctccaggagccctttgagtcttagctcctcaaaccttagcatgaccatgatcacagagcagatgctctgttgcttcattctttggtgttgagcacccacagctgagactgttttgagactggttgtccaatcctccacggaaactagacctattctgcttgggccagaaagttctcttttgtggttgcatcccacattacttagcttgcttcttcagaccaccccataaatcttgtgcactagagcctttgcagaaaaaatgtgaggccataaccagagaaactggaccctctggccacagttgtgtgaaactcaggaagagcagggttgactttgcctttctctggtgaaaatagtttgaggtttagccacagattgccttcagggcagtcgtttctcttggtgagacaccagcatgtcagaaccttttcctacccttctcctcgctgtggttgcatgattgcaccctgccattctatctcgctaacatatttacagcccccaaaaatgggtctaacattttttttccttagaagagactaaggggtactaagggttggaatgaaaaatgactctaaaatggttaagaggtgtttagaaaatgcagccacagtgtaagatgaaactgtacattgagaaaatcaggtctctttttaattgttgacagctttaaatcctac

SEQ ID NO: 53808 - DNA, 745 bp, Bovine  19866880666630
  misc_feature (1)..(1): n is a, c, g, or t
ngctcctctctaaggaaatacagaaaggaaatggactgaagctgcatcctgggaaacttcgttggacatagaattcccttggtgagagtgttagataccaggccacgttcccatgggactgtgtggaatttcctctaacggtcttgaaaaaggaagacttcttattttaggggtgattctgatgtgggtttgcttgaagacaggtctccagtctgatctgaagttcataataccacccataagtagttcagaagactgagaagggtcttggctcttggtcagctggtcatccagatggtttcctgtgttaagcactagcaaggaggctgggagagaatgtggctgcgtgtgtctgaaaggagactgagaagtctctcccacaaaagcctgaatgctggaacactagtgagtggagtagcgtgccaaggaccacaaccctactgtgagttcaaacacccatgtctaatgatccaactactttctttcaaccagaagtgtagagaagacatgaaggagggatcagagtccacagccgtgctctcctgcctcctgctactaggtcagcacccccaagggccatccagcatctgccacatgccaggtgccaggtcctgtcctggtgggggtattaagagggtgacataccatgccaaacatctgatgacaaataatgagttaactaggtaaaaagtactttgaaagggcaaaatggtgtgattaggaggaaaagtagaaaagaaggctg

SEQ ID NO: 53809 - DNA, 1928 bp, Bovine  19866880671338
  misc_feature (1)..(1): n is a, c, g, or t
nagacagaggactcatgaggtaggagtgtggaatgagggaaggaaaatatgacacaataaaaggaaaatggagtaaatgatcagaggtcttttcagctctgcaaataactgtggtcctcagatacagagaacaaactagcaggtaccagaggggagatgagtgagaggagggacaaaataggtgaagggaattaagacatacaagtggccaaataagttgtagggatgttatgtacggcacaagaaatatagtcaatattttataataactttgtatggtgtgtagtctataaaaaaatcactgtgttgtacacctgaaacaaaattaatattttaagtcaattatacatcaattaaaaaaataactgtgacccccatcaaacaataataaaactacaataataataacccaactctgtgtgccagatagtgtgttaagcactatatagtaattaattcatttcatcttcacaactacatcatgagggagggatattctcattatcccatttagcagatgagaaaaccaaggcacaaataggttaagtactttgtccccagttacagagccaggaaccaaaccacacagtctaatgctttgccctcaagaacaaagctataggaaacatggaggtactgcagccgccagagagcttctgttggccatcagaagggacgagaccctcctgcaaggccttagtgagctcctgcctagggttaaatgaggtcgaatgattaagagctctgtgaaacctaaagtgctttataaagatgagggctcagaacaccactctaggcaaacagtcagttcaaaaacaggaatccaatgacgaccagtgtgactgtggtttacattctatagcagtgggtgtccacattttttttgcctaaaaatatccaagagatggaaaggcaatgagttttgcattttgcagaggaacacaaaaagcactaatcataaaaaataaggataaatttggactttgccaaaataaaagaacgtccagttgtcaaaagatactaagagagtaaaagatactactgggggagtaagagaaggtgtctgtaatttttatctccaatgagacaaacatccagaatatgcaaagaatgtcaacaaataagaaaaaaaagaactaacaacccaattaataaaatggatgaaagaccttcataaaacaggacacacaaagggccacaaacataagaaacagaagggaacgtgatggcacatcagggaaatgcagttaagaccacagtgaaataaacacctttctgaatggaaagcattcaaaagaccacccaaataacaagtactggcaagaatgcagtacttggaactctcatccactgctgatgggagagcaaagtgataaaaccactttggaaatatctattaaaattaaacctatgccttatgatctagcagttcttcctctagttatatacccaagagaaatgagcacatatctaccaaaaaacacatttgagaatactcaggtttattcacaatagccaggttttgcaacaagaagacaaatattcattcacaagacaataagctgttgtatatttaaaataatggaacaccacaagcaataaaaaagaccaactactgttacatgcaacaacatgaataaatctcatagaaataataatgagggaaagaagctagatgcaaaagactaccgacagtgggatttcatttatacaatgttcaaattcttgaaaagtcctgtgctgggagaaaccagaacagtgatttcgtcttagagaagaagtatgggcagtgattgggaaggtgcccaagaaaacctgccagagtgacagaagtgttctataacttgacctaggtggtcacacaggtatgtgggaggatgtgtctgtgtgtgcacagtcattaagatatagacttaagatttatgcat

SEQ ID NO: 53810 - DNA, 1421 bp, Bovine  19866880697186
  misc_feature (1)..(1): n is a, c, g, or t
ntaaaatagtcactctatctttagccactccattctcaaattcagatcctttgtaagtagttgtttccataaatcatgtcaaagaaactatttttgcaaggtatggccctcagttaatcatagtgcacccgatcctttagaacacaggtcctttggaaagttgatgctaccacttgctgaaagcatgttcctctagttttgagtccatctgaacacaacatatcggcaacaggaaggctagtttaaagttattctccttatgccccgtgcagtttcaaagtggcgcatgagcctgtttcttttcctggatatggcctatcagggaatttgggctattccttgtggcaacataacctctcaagtaaacacagcacttggccctgtacttctggagatgagggcaggaggtgagttgggggtaggcccagagtgaaaaacgtcctggaagattttctgtgattttccagaacaccaaattcacgtatctgtgctccttatctgccggtggtttctggtggggaattgagctaatgagtgcagagctctctgtgacctgccttgtaatgagccctaagtaaatattaactatttctacttttcactcatctcgctgctattctggaaggacatatgaccctaggctttggggcgaaaccaccaggagtttgccccctaccctgagcaattgcaaaacacaccgacagtctgtcatcttctgaggagcagcttgcagaatgagttggctctaggcaactcatttcttgagctcgtctctgcccacacgtaccacattttacccagaaagcaacagctgtaccccagtggaaattcccccagggcgctcactgcctctgctaatgggcagagcacaccagtgctctgagcttccctctcccgctcccagtgtccagcacaggcacccagataccagtggaagccctgaggctccacagcagtaaccctgcccctcgcagacatcaaaacaagcctttctttgtggtctctataagcaggcagagattctgactggggagatggtagaaggcaattggggaaggactccattttcttagtttcaagagaattttgggtaactcgtagttcctgaagactgtttgttctgtctcttttccccgaggaagcccacatcatttgacgttacctttgctcctggtccagttagcgggtaaggcattcagattctgaaagcttcacggagggaaaggggttaagggaaaacagcatatgtgtgcacactctgatggcctgaatattacattatctgttccaacaaataaacgttagaccagatcagtctatcaaatacagagacaacattgatctttcaggacaatttgccagctccaaaacgccagctgtcccttcttgcccgttgggagtaggagaatgcttctttttca

SEQ ID NO: 53811 - DNA, 1724 bp, Bovine  19866880753921
  misc_feature (1)..(1): n is a, c, g, or t
natggaagagaatgtgaaaaagaatatggataactgaatcactttgctatacagtataaattaacattgtaaatcaactatacttcaatgaaataaattttttaaagttatattgttgtttggaagtagaatgactagtgacctgtattttattcttgccatatattttatattctgattcattgtctctctctcccccaacccccgccactccctccctctccccacctatctctgtctacttctattttacttgtataatgagaaaaaattgataaggttataaagcattgaaggagtagatttgaaggagtgaagcagtggaggtggtgacttggtggggcaggagcttgttatttgtgttgaggtctgacagatgaagacatctttccctaagtactacacaagaggtagattcatcttgactttaggattctttcagcttctctgtccagccataaacccttttggtgacactgcctggtatttgcaaataggaagattctaagtaggtagaatttttagtgaccatgctagctgtgtgagaacagtgtgtgctctgggaacaaacatgttgcataatcaccagcccagagaaggttaactgcacaaaaatacctgcttcggaataaggcttggtgtcaactcagtcactgtgacaacctaccagtgacctgggctacagacacctccttgccccagctgtcaccatgttgtgcagtcaacaattactaaacagctattcttatttcagtgatgttctcttattccaatgtcagtaagcttatttacaaaagtaaaggatgtatgctgtttcatttgcacagaggaaaggatccataattcaacattcctattgttgcaagtattttgccctttaggtcatttaactttcaaagcaatgcatgaagtaaaatatgaccatcccatcttacagatgaagaaactgaacttcataaagcttcataaataagtcattatatagcagttttccaggagatgatctgattaaaaaaaaaaaaaaccttttaaaaaatagatgaacttaagaaaagtattggtatgaaatactgtggatattgaaaatgaagcttgggagaggacaccatttcttttgagaattcactttgttttcatgaagtagacctgaaaccctatatggtcacctggttttagaaaaggaaccagagatcaaattgccaacatccactggatcatggaaaaatgaagagggttccagaaaaacatctatttctgctttattgactatgccaaagcctttgactgtgtgaatcacaataaactgtggaaaattctgaaagagataggaataccggaccacctgacctgcctcttgagaaatttgtatttctcaagcaacagttagaactggacatggaacaacagactggttccaaataggaaaaggagtacgtcaaggctgtatattgtcaccctgcttattgaacttttatgcagagtacagcatgagaaacgctgggctggaagaagcacaaacttggaatcaagatatgcatatctgacaacctcagatatgcagatgacaccacccttttggcagaatgtgaagaggaactaaaaagcctcttgatgaaagtgaaagaggagagtgaaaaagttggcttaaagctcaacattcagaaaacgaagatcatggcatccggtcccaccacttcatgggaaatagatgagggaacagtgga

SEQ ID NO: 53812 - DNA, 1965 bp, Bovine  19866880787229
  misc_feature (1)..(1): n is a, c, g, or t
ncattgcctgggctgaaaccttccgattttagccaatagattaagatactgtactctgtattgactagaaatacaatttgtcatttaaagatttgaaccagccttttgaattgtgacttttgaaagggaattttctctttgctttataccatcctatacttagggcatttgcatctgaaccattagtgttccctgggtcatgtatgcaaaccagcatctaaggtcattttgtttgatttggtttcattttcctggtgactttcctagctgccaaaggtgggcctcttggtctgagggcagtagttgatggtccttcaacaccttcttcaggtgactgtcgtgaaacagcattccaaattcccaattccagccagtgctgcctggttcccagggacaacagcctgcagcctgaaaataatgtattgggattatcacccacaatcagcctgaaacaaccatgactgccaccctacactccatgcactgtcttacatttggagctttatacctactttaatctctgcccggaacaatcttccctacacccctcctgtgtcagattagtttctatttatttatcaagtcttagcttgtgtgtcagcttctccaagtaacccttctgtgcctctacaagttgggaatttctattgcgtacccaccgtgacattctctagttacccctgttatgtgtcctcattttacatagctcaggtgcacgaactcaggaccatggtttagttatagaacatcagtcctccaacaatacagttgccatggtatatgaactgtgaatagttatgcgcaggataaacttcccagctgggttttcagtccagagatcacttcgtgaataacagattcacatcagtaacaaattatgttactgttatgatgatcagtaacaaattatgtcacttttgaagtgacatggtgagcggtcattgcacttctgttattcacttaacacacaaacagcaaaagcagtacttgtgttgccccttgtctcctggtgataaacccatatggcaatttatgaatatggataattgaaagaggagattagccagaaaaagataaagtgcagcaaagaaatgaagagtgattatcctagaagtcaaacgtaaatcaaatgtaaatgtagttatagaagaaatagctggccgtggactgtatgacatctttcccattggacatggtctagatttgcagccagaggaacttggtgaaggcaaatttattgacataaataagcaaagtgttcatgacagaagggaagatgatgtcccaggagaagtgattctgcaaaccatttcacgtggaaggaactctcagagatacttcacaatgatataaaaagagcaaagggtaaactgttagaagctgatccgattttaaagggaatatgatcatttgccaagacagagagagtatgtttgttctgtgttgttatatgatgaaaagagaaggcaagctctgttcgaatgactctcgagaagttttttatactaagtctcaaagtttctaatgttttaaattagagtactgactaaataatagtcttactatttttttttttcatttccttgtacgtttataactaatagtaagagaattttaaaggtcatggagcagtcacacttttctcattgattccaatggtcacttttccgatttcagtttgcagggcaatttttatggtcctgcactactgtacagagtgagcactgctgtagtatagttagtttctatacacacactcacagataatattttgaattggatgagtgagggaatgagtgaattctatataaatacgagggatgaaagagaatattcccttcctcccttgccaattccttcccatctgaatgcatggcccatattccaaggagtaggtccactcttgtgctcaaattaattctgcagccctaatcatggccctgaagctaagggtcagcacttcaa

SEQ ID NO: 53813 - DNA, 1594 bp, Bovine  19866880805085
  misc_feature (1)..(1): n is a, c, g, or t
nggttattttacggtctcttctattaagggatgtaaaatttccttttcaatgaatttatttaagtcatacaaggtgaatctaaagaaaagatttttttttagttagaggagaattgctttataatgctgtgttggtttctgccacacaacaactcaaaatcagtcataattatatatatatatatatatatatatatatatatatatatatccccttcctcttgagcctccctgcccccctcccaattccacccctctaggtcatcacagagccccagactgggcaccctgtgttatatagcagctacccactagctatctattactgtatatgtgtcaatgatactaaagaaaatattaaagaaataataatctgggtcagaggtcagcaaactggcctgcatgccaaatctgttgcactgcccgtctttgtatagttcatgaactacaaatgtttttaataaatgtagaagccgctctgtaacatagggagcccagtctgggggaagggagtggagcataaaacatgaagaatattttgtgatacgtgacaaatacacgaaattcaaactgcaggctccagaaaccaacccttgaattgcacacatccgtgtttattgatttacgttttacctacagcagcctcctgccacagtggcggagttaagtagttgcaacagagaccaaatagcccacaatgtttaaagtatttattacttgatcctttacagaaaaagttttctgacccctggttaaggtggttggctgacatggccaagatcttgtgatggtaccagagtgagtcaatccctcgtcagaactctaggaggttctcatcatttgtttccaccagtttacaggtgagaaggaaaccatggctcagagaggtttagtgacttgcacaaggtcacacagccagtcagcagaaagtcagaatttgaaccaaggtcagactccaaaggggcatttggtgggcagggttgaacatcacgtatgctttgctgatctttcttgccacccattcattttcttcatgtgcctcaaatacacctagtactttctttcaaacctctatacctttgttcagacacctcttcttcctgttaactccagcaggatagcccctcctccaggaagtctctgctatggcccatccctcctggacccagggcagacctccctcctctcccctcccaacactggtacctgcgtgtcggtggatttttcatcattattcttttttctttttttcgcctcattgcacagcatatgggatcttagttccccgaccagggattgaatctgtgcctcctgcattggaaggcagagtcttaatcactgggctgccagagaagttcccatcgtcatttcttgatgacatggctcatctgcacagctcaggaaacgccctggagggtggagatggtgtcaagcacagagtcctaataatttagcagaacaagacaggccttcctcgccttgcacctcgtctctggtcacctcacctctcccctgcttctgctttctgctcctgcaggactgaaccacctgtaattccccaaacccttcgagttagctcaggcctctctgccta

SEQ ID NO: 53814 - DNA, 1421 bp, Bovine  19866880819650
  misc_feature (1)..(1): n is a, c, g, or t
nttttgcagcatcatccttgaccctgaactttattcttcccacatcttccttgcctcctcccatcttcccaagtgtcttaactctttggcctaaccctgccttgttcaagagcgttattcacatattaatcacttcctagccttgtttcatacctccttttcatttaaggctttctagaatccccgtgtgtccaaatgaaaatacagagaaaagagacgtggaatgagatggttatgtgtggacaaagccaactggccaaggttccttaatttttcttgccaagacctccatcacctgccacgggctgtgcagctataagctggcctcttggtttcccagcctgtgtcactgtgtatctgcttgccgggtgtcctgacctctcagctttccttcccacaattttccaaagtgaaggaggcagtcgcactttaatgaaatctctgccatctctttgaaacactctggttccctcctctcgtggccactgagtcacgctttccctgcacatctcttctcagagctttcctgacacaggagatgaaggagggtacttggcactttccactttctgaatactactccccacttcattgagaaattaaaatcacaaggtggacacacctcctaactggcagaatcactgtactgaaaaatgcccattttctttctttttttctgattaagcttcttctcactctgcctctatccttcagaatctctcttctttactgcatggctgtctcaactcagtctaacttcccacaaagccccctttaacataatttccacttcccatctatgtaaacttttactgaaggttcattattatttattttcagtgtttgatcaaagcgttaaccctgctcagtacaggtttcctttgctcggagtccctcagagtaaagacctgtctgctttgtacatttactccatccgagggtcatgaggacacagtggatatgtgctgagggaatgaatgacccgtggccaatgctgggcttctgcctccatttaggatatgagcaccgtgaagcatctgttcgtttgacacacctctgtggtaccctaccatgtgccagaccctatgtcaagcatgctgggtatgaataaaacaagagtctctgatctctttttttttaatttttaattggaagataatagctttacaacattgtgttggcttctgccacacaagaacatgaatcaaccataagtatatatttgtcctctccctcttgaccatccccctaccccatcccactcctccaggttgtcagagtattagggtgagctccctgggttacacagtaactccccattagctatctattttatatatggtaatgtatatgtttcgatgctactctctcaatttgtcccaccctgtccttcccctgctgtggtcactgctatcctgaag

SEQ ID NO: 53815 - DNA, 983 bp, Bovine  19866880839213
  misc_feature (1)..(1): n is a, c, g, or t
nacacatttgacccctcagaccctctgaacaggggaccagatctgacttttggctccactccaacatctaatgatttggtggggctcagggaatccccagtgacatcacagtagaacccagacacctcatatcaaacatacacaccactgccagaaatactaaagcagaagggagagatttttgttcttagatagtcaaggagagtcttttctccaaagtcataccgccatttatcaacaccatctgagagcagcgctggcaggaaagcccagaagagatagtcagcctttggctcaaatcgctcctactctcctgtttctataaggtctggagaatgactttacccctcgcagttaccgcagccacgtctgcatgatacgcagagcaagagcagcataattaatgatgtgtaagactacgattgtgaactaggatttcacaaatcaagcccagtggaaatacaacctggagaatcggttaacttgaaattgagcccttgtctgttgggagtttattgcccctgccccgtgtggcccttcccgtcatggagtgagaagggccctgactggccctggggaccaggcctctcgctgcttacaggaatctgggaacagttgaacattggcagcctgtctgatctcacagcagatatgttaggtcaacagagaagtcctcttaaactcttgaaatcagactcctttaggcaggctgttgccctcacaactccccccttctccacaccctagaccctctgtaccttgttacctctgcgtctgagtgtgtcatgtctgaagagaaccttggagaagggggtacagcccttagctattctccctattctcccttctcctgtccctgagtaaggaagataccagaaatgtgagatgggtgcttactgtgctggtcgctcctgtccttcgtcccatccactgtgccatctgggaggattctcaggaagtagcccccgttgctgcagtagagg

SEQ ID NO: 53816 - DNA, 2421 bp, Bovine  19866880894716
  misc_feature (1)..(1): n is a, c, g, or t
natgactacaaaggctgacaaacacccttggcatatgtgaggaactgagagaaagccaataaggactttctccgagtttagagaagtggacagggaccaagtcaagcagcatcttaaaagccataagatagactttgttttaggagcatgaagaagccagcgctgggaggagagaggggcggtttcaaacagaggaaaacggattacaggggaacatcaagtaccgcactcctagtatgtgcctgctaccgtactagcagagaacaagacaaacagggttccctaactttactgtttacactctagttggggagacacagataaccatcaaaataattttgagtttttactagacagaggtctttttcagatgagtcactagtggcttcttggaggaggtgtaactgagtgagacgtgaaggagaaaagaccaggcttcatggttagaagaaatatgacaagaggcatatgaaatatgtactgcaatcaaactctttgcattctattaattctgttaattttcagttaataggcactgcatgtgcttgaccaggcccgctctccacacatcctttcaggtgtccacttcaaagacagatggcaccttgaccatccattgccaaaaaaggactgctcaatctgccgtgccatggcttaagaagatttaagttttttgattaaatttaattaaaaatatgtaggttatatgtaagcttaaacacctttgaatctcttaagtacttgctgctcatttcagaatctgaccatgtttactttagaagttaaaaccatgttgacaatgtctatagtcactgtctaaaaagaaagttgaagtcattaattggaataaaagtgtgaatagagttatgaaacaccaacatatcttctttcataaaattaatctgactcagtatttatttgggagggtactcaaatttagatttaaaccatcatagcataacctggtatttcttacataaagtaggagttacagaaattttttctcagtgttcaactttatggatggcttacagaacaatagtttttaagtgggcattctatttcccattcttgtctccttatgccattgggataaccttttatttttttcttaagtccaaggtcactttttgtcaaaaaattaaaaaacagatcttattttaaaccatgaagagacacagtttcaggctctgtgtgtcatttaaaaagttaggaaacttgagagatctacttgaaaattgtagttgtgatcgttaactgttgagaaccctaactgaaaattcattttgtagtacctttagtcggaagaatattcagtcacataacattggtcagaggcagatttttgggtatcagaaagcctagagtcaagttttatttctgaccctctacctaactgtaaacattatcacacacagttgtctttagaatgcagtgctatgaaaaaaaattctttgattttcaactgggtaagatttaaaactgtgttgtctaactgctcatattcaaatactaccataaaagcttgatttaaatgaatgactgataatagattctataggaataaattctaaatacttaaggaaagctttccaaaattcagatcagagggaattcacgttaattgcaataggtagatgagttaatagaacgctttgcaaaatcaaacagaaaagtacttttttgcagaacaagaattacttctgtttaactcaaacacttgatatttgtcttccacaggcagagaatggctttaccctgcatgtatgaccaatgtaaacatatgctatatgtttcctctgagttaaacaggcttcaggtatcttacgaagagtatctctgtatgaaaaccttactgctcctctcttcaggttggtggaacacctattctcttctaaaattgacttctgaaatatgtcaaaaacataaaacatagaagtctagaaataaaggtttgtttgtatacaaagcactaaataattatacctctactatttcctggtactttagattttcttaaatgtaaaattttagaaaggttaagattaataagatagataagtatcatggagaaatggagaggtatatgaaccacatggcaggaaggaggaagtcactgctgatctggaatatctatagccttcttccttcctacaactttttacacttccactacagaagacacagagaaggcatgccagcttgaatgatttttctatacaacactgttcagttcactcactcagtcgtgtctgactctttgtgaccccatggactgcagcacaccaggcttccctgtccatcaccaactcctggagcttgctcaaactcagttacttagtcaaaaattttagttatacaatgactaataatacactaaatccaatgacatatttcttatactatgtataagaaattatg

SEQ ID NO: 53817 - DNA, 783 bp, Bovine  19866880949925
  misc_feature (1)..(1): n is a, c, g, or t
nacacacacgcagggggctgacagtctgcgacttggagacttcggccggggctggcgttatctggtggaagtgggcgtgtcggagaaaagaactcaacaggtctggacacatttctctcttaacctcgcacttttttcccctctcgcctccctcggccccgggtttgttctttagcgcttgacatcacttcgcgcctgaaggtttgaagtagccccttttagaaaaaagaccctcccgaaccattgtagttttgtggtgcaatttttgacaagtgctagtttgacgttttgggattgcagacttgacgattgcagccgtgtaatgccgcttaagaccccttggcatggttcgttaacgccgattactgtgacagggttatttgcaacctaaacggggggataaagtcgtttgaggtatcttttcgttttatgaagttttgttttggtttcgagtttgaaggcagctgtcaaagcggcgtggaaattcattaggctccatttgataccttatgtttagagatcgttatcagataaatacagcagaggggcggggacaaaagcagtttacccttgagatttgtagaggcgggtgcctaccactgtctaccatcatcacattccacttttagagaggaccagtgaagtttgagcatcttaaagtctccgtacaggaaaagttttctttctttgaacgggatttgaatataatgtcgcaaataatgcttatcaaagactctgcctgcctcttaaaacatcttgattgtcaataacctatcaacctaa

SEQ ID NO: 53818 - DNA, 1068 bp, Bovine  19866880955151
  misc_feature (1)..(1): n is a, c, g, or t
ncaactcaatggaaatgagtctgagcgaactccaggggataatgaaggacagagaagcctggtgtgctacagtccatggggtcacaaagagtcggatacgactgagtgactgagcaacaaagatgcatttaaaatgcttgcaacagtgcgttacacacaatgctaacacacagtgcaaattctgtgatagtaataattctgttattattagtagtgctattatcatcatcattgaacgaagagggagtaattccagaggaaaaggattgtcagtcgcttccacccactgccaaaggttctggaggtctcactttttgtccctcctgctggaggtggatgtgaggatgtgaatgtggaatctgagaagagggaaccgaagcctggccccttcccattgcccagacagggacgaacggggcccaggtcaacagcctcttcctggagacagcctggaacagtgtcggcttctttgatttaatctcttccctgtctgcaggccaccaaaagttcaaagagttcttatttttctattgtaattctttagaaggacggttaattccttctgggacattcaggacatttattcgttttttttgaaaagcaaaattggcaacactgaccgaaggataaggtgaaaagtacttaagagccagtattctaagaaggcctttctctgtagcagaggtttgagatcagaaaggaggaaacttttcttgagccagaaagtatcatttataggtgtccttgatggaatcagtgctcagaacacagttttaaaatctgcttatgacagtgttgcttttcctcctgcgtttcatctggcctgggatttgtggaatttgcacaggatgcctgtgggtattcagtttccagtggccgagcagaaatgaagaggaggaggaagcagagtcagaagacctaggttttggacttgctagttagcacactccagtattcttgcctggagaatcccttggacagaggagcctggtgggctacagtccaccggactgcaaagactgaagcacttagcaggcagttagcacagggaaacctacagctgtgccc

SEQ ID NO: 53819 - DNA, 2447 bp, Bovine  19866880987900
  misc_feature (1)..(1): n is a, c, g, or t
ntactagagtagggtgccattgccttctcccaggtagtcccattacaaagactgcaaatcaaaaattcccagggaataggaagatgtcagaaaagtcacataatctttttggcctctttaactttcccacttatgatagacaggtagtcataaagaaatcattctcggttttaagaaaaccaacattagaagacttgctagttaatggagtagatggcagatgctacagtctcagtcttggagacaatagtgcctggtaagaagtatggctcactgcaggggagaatgtacctattgaacagtaaaggtgacacagtctccaaatagatttgagattctggctcagatcagtctgaagagaactgacttccagcagtggggtacttataaaggacagaggatggcaggccattgtgagggccatgagctagggacaatatgatccccacaagactgggttttaggagccagatcccctagtctgtgagcccgtatgtctcagccagtacctgacagtgtagtgatgttgcccaactaggaggaaggtctcaactggcctgcctctttataaggatctctcttaatattcacccaaattatagagatgggcaagagggaaagcaaatttcattcatctcgagaagactgtcagaaatgtcctctccaggtgattgtaagcaccttgttcctgcaggaagaagcctgtagtagggtcaaacattcctctgctagattaaatcctaatgctcttagaatggttaatatcagaagaacttgttgaatgcctatggttggtcttagcctcttgggtgcctatgattagaatcttgatagagtcacgtgggatgcctcaatcttgagattaggaccaggctgcactcaactttgcttttcttttttgtaattttggtctttaagctgaagcatcacagaactctggaaaaggaacagaatgaaggtaggattataaagaaagacaaaaggaactaaaggacattgagagaggagatttcaaaaagagtgtgaggtgattgtagttttaaaatagatgtgaagaaaaattccagactgcattatttacttctaaataggacaatagctgggtcatttttaattaagaggtctgaaacattttacatataagaaaatgtacagttttgtggtctgtatcatacaggtttcagacttgtctggttttctcttggcagagttataaaggcaagtataaattgaaagctattttaataatctttatggtgtagtattatatattagatgaaattcattgttttgtaccccatattcatttcccacagcataccactgcttttacattagatgtctaccctgtagggaaaaatgggcctaaaatataaagctagccctttctttttacagacatcctgtaattagcttaagttttcatctcttcacagcaagatcctgctgcacaaaagttctcttttctcaacatgttttttgccagatgtttccacacaaaaaagtgtaaaggcaaaggttttttgtgcattggtgcatatgacttcgtccttaatgactgcctcaaaatgctccccctccttaattaagagaattagttcctcctccccccacctccaacccccccaagccctccccacccaccagttcctgtgtcaagagtatctattgtctcttgtcttcacaacctctcagcatttcagccatgtgtgactgtcctgtgtgtcctcagagggaatcaaacttagctccactcatactcatcctgtctgtttaaaatccaaaataaacacttaagctctttgactgacaaaaattcattcatggcaaattagcatgtgagatgactattctctctccagatagccgtacagttttgtctgattaagggatgagtctacactctgtgataagtttgcatccatattagcagtcaggctctattttatttcagataataaggttttcagctttactagagaaatacttttgtgtgttctaaaatattttccatgcttatgatcttacctatctctgctattatccatgctgaattttgtaaggtcagtagtggagataaccttagaaaatctgatttggcccctttatttggtatctagcaaaacagagggagttgccccaatcatacatctgattagtaaagacatcttgactctcattctctactccacatctgttaataacagatggtactgaattttcatgtggaaacccaaaacaaaataacaaaattccttcatcttttattaatatcagttacattggcactgaggatgatgcctacatacactcccaaccagtggcaagtcaatgttttgctccaactatgtcatgagttgggctaacgtagccacactttcatttaatacacttggaatacaacacaattgtaagctcccaagagcaagagaaaagtcttcacagtt

SEQ ID NO: 53820 - DNA, 1217 bp, Bovine  19866881081167
  misc_feature (1)..(1): n is a, c, g, or t
nttctgtgtacaaccatagcaggacaattcccaaggaatattttttataaatgaaactttcatttatttttgtggtctgtccatcacagagctcctttataaaactgagacacataaatatatatgactaccctgtagatatcaagaaggtacaaaattcccagctggacccataaggctagttaagtacctactttgggtgtttgttgtgcttttagaactggtagaatctcaccttcatggagacaaatgggaaaatcaatagaaattgaatgtgctacaaacggagttagaacaacagctacgagtgtgggcattaagagaccccagaacagtatctttggtgtcagacagcccactgtatgctcattctattattttacttccgaagagtatcgatgattaagatgtgttttattggctgacaccttgccaaagcatttctccagagaagataaccacagcctctcaattgctttcataagaatagcccactaaaacaatttttttaaaaatgaaaaagaattgcccaccatctataggttcacccacccaataaaagttgttgctacagtcaaaggaggaagcctgatgtggtggagtccacgttctgtttatttagtcatcctacctttatgacttgggaatatctactgagatatgcatccatcagtcaccatggcagggctccaacagccccctgtgtcacagaaggacacatcttgaatctagagaatgaaaacctcctgaaacttgtgaataaaccctctgtgagctcatccacagcattcatgtcaaagaaatagaaatagcaactagaacccatcactgggcaagctcagaagggctgtctagccaacaagttctgaacaaggaagttaggggaagaggaaaatctatgcttcatacatatatatgaaaatcatctcctctgctactagctttgaaatcaaaataataaaataacagcaagtcttggaggacagaaagatgagaggaattttatttgtaatttataaacaatagtgtctgccttcagcaactaatttcaagagaatcactttcagagtccatagtggaataacacttaacttggatattgctcactataaatattaatctgatggtccacaaaagtccataagggatgaaagctattttaacccaactaaacaactcaatcaatagttgtaaatatctgtgcacctagttctctg

SEQ ID NO: 53821 - DNA, 1108 bp, Bovine  19866881087662
  misc_feature (1)..(1): n is a, c, g, or t
ntcaagattaaagctgtggtgactttttctcaacccaaaggctgccttctgcctttctgggctttcctctttccttccagactctccttcgtattcttcttaagttggtatcttgatctaacctgctattgactgtgtgtgtgtgcacacatgtgggtgaggaagatagacatgtattatcattgaaagtttaccattgaattgaaacatgacattgaattatgtttgagggaaactaaagaattcttatttagtaagaaagaagtggataagtgacagccaactcacatactgttaaactgagtaaaaagaaaagaaagaatatacatgtcacaatgatgaattttcacagaagatgatagatttgcactgaagagcagtaggatgtttacacggaagaaactagtaagctatttgtattcaattaggttttctaaactcaagaacatttaaacctcagacttcacatttttaaatctaaattaaaaattttaaatctatagataattgtaagcccaccgtgactcatgatacttgtctcttacaaaatgtaggcaccgaggtcttatgatgctgtgtcatattatggaactttaggaaatgggtaagcaaaagatggacatctacaggtgctaaaggttcagggagaccaagaaggactaatgcctcctctttcataatacagttctttctgtccacccacctcccatacctcccctttcactcccgactccccccacaactctgatcccaaactaaaatgaaggagtagagttgtgacataagcgtctgtcactgaaattagagcaggggactttttgcaattataccttggagtataatttcctagaggatggaaacatttaagatttggtaataggagtcaaagaggaaggaacaatggtttatgacttttttactttcaactgagagtattgtttgtggtctgcactttggcacacccagccagcaaggatggcaaatggtataatttaaggggcaccaaagggcctaaagtatgacaacaattcagtgtctgaaattcccgccattaacctcaccatctaagggcctagtggagacatgctcatgatgttttagtattagt

SEQ ID NO: 53822 - DNA, 879 bp, Bovine  19866881101646
  misc_feature (1)..(1): n is a, c, g, or t
naatctgaaccaatgttcccatttaaaggtctgttccccccttgaagagttctacaatgttctaccagggtaaatgtactttcacacaccaggccacctcactccggtaattaccaccagacttgacgtttgcatggctctaaccaagccagcaaaagtctatgaatcccaaaaccaatagcagaggtcataagagaggtggcaagaggtagacacagcggacgtgggaaattctgcaacaggacctccctctgaaaatgaaacactctctggatttttgttcctagaagtcatccttcacaggactcacaccctcttcaattggccatctcctttgctccagccagaggaatctgtcacttagcaactactctccaacaaaatactaaggaaaactgggaaaccaaaaccaggaagccaagatgaagtcaggcttctgaaaactcttgctccctagcattcatgggataagcttcaagcagagcaacactttccatcagacctgggctcaaagcaagagaagctctgcagaggcgccctcacccgatgtcactgaagagttaccctgaaccactcagaccagggcaaagaatattaaacatcaaggactcaatcaatacactgcagaaaccacaggatcccccagctctcacccaatctgtcctcaattgcagtgtaagcatggtgccaatgaggtcctggatttggcccagtgtatcttccagcctaggcaactgacttaacactacaaaaactgacaccacttattacatcctcagaacccttccttaaagcctcacctaaagtcagtccctctctatcaactgtgatttgtttctttcctggcttagagttactttgcctcgttgttttcttttt

SEQ ID NO: 53823 - DNA, 1630 bp, Bovine  19866881132226
  misc_feature (1)..(1): n is a, c, g, or t
ntaattcaccctgagccatctttcacatctcaactgcgttactcaaagatgtcctactcaacccttccctgaccacatgtcccattaaaactctcatggtgctgcctgcctctcctccatggtgctggtcaaagtttaaactctatttttatttgtgccctttaccagtcaatgtctggctctcccccagactgtggctccatgagagcagaagcttgaaagtgctgccttgtatgtaattctatcattgcacttaccatgctgaactgaaatgatttgtttattcatctgtctcatcccttggtctaatgagtttcctaagggcagtatccaggtctttttctaacacagaactcagctcagtaattacttggtgaattgaattgaatgactgggatttaattgaacagaataacttggggaagggcacctgaaagttcagaactttggatggagcaagtccacatatactctatcagaatcaccccctgtggaaatctggagtgatgtttgagagaaggttagtgtttttaaaaagccaggttcacttataatttggatagcaaactaggaggatctatgactttccttaagaagcatcatattatggttataaatccaagagaagtgaagacgacatggtgtctgcctgtccgaggttcatctgaagtttagtaaaaatcagagcataaataacaagtggaatctcatggaagttgtgctgggatttggctcctcaagccctcagccttgcgtcatttccttatctgtcctggatgaccttgcctggctcacttcccagtgcggttattgctgtctttgactccataaatgttgtggtctggttgcaaggaagtattctcatctttggagctgatcctttccatgacctgatgccccctagtctggcagatggtccctagggattacttgaatgagactgagagaggcagaaagggaaaaggggcttcccttttgcccagaggatgagcagggccaggggcaagctgcccattagaggctggtgctgacccagcagggtttatgaagaaagtgccaggtgactgtgggctctcgcatccagacaggacctggcctcagctctgcccaccctggctccaaaggaaacaggcagtttttcagaaaagctgttttcattcatcatgcctcctccttcctatcaaaacagattatgagcgtgtactttggaggattgaacagcaccctttaagaagttagaagccatttctgagttgagaggattaacctagttaaatttaatagtagtggcacatcatagattagcaggtaatttgaaagaacatgattgaggctccagtaacccattatgatgtgcatagtttttcaactattttgcaataacaataccacctgggttatcacctgtgagggattaaagtaacactatccttcttatccccgtgtgaaaacctctggcacatagcaggtgctcagcagtatttgttaaaggaatagaagaaatatgaggctgttctaaagttctgagaactttctaaaatggggacagaaacccacagtttttaatagactttgcccaaatgcattgggtaatggcacatacagctgcttggctgttctccttgggttt

SEQ ID NO: 53824 - DNA, 1429 bp, Bovine  19866881135783
  misc_feature (1)..(1): n is a, c, g, or t
ncttacttcgtatgataatctccagttgaatccatattgctacagatcacatcatttcattcctttttatgggtgggtagtattccattctatacatctgccacatcttcttatctgttcttctgtcaatggatatttaggttgtttcgatttcttttgactattgtgaacagggaacattggtatcatctgtcttggtatcacttcgaggcttcccatttctttggcagattttccctgacaaagagacaagagggccactaacagttctcatggtttcaaatccagaaagaaaaaaatctctcatcacaacagtccaatacagaaattggttctcagacttcactgggtcccgggcccattcctggatcaacacatcacttgggcttggtggcttggatgatctcataggtctgtctagggtcacaggttcatcactggacgcagggttggtgtctgtctaccccgaatcctgggacctgagattaggggagggctgggttctaaagaaaaactgaggtcctgttaccagaataaggggtaatggctgccaaacagctatctcccttggggtagaaaagacgaagagcatttgagcctgagtgaacctggcggggtgggggggggggggcacaaatgggagtctgcaccccacacttgaatgtggacagagaaggtgcccaataaatactgacaaagaaatgaatgaatgttggttccaaccgtcatagaatgatgaagacggggaccctctggagcacaggatacataaaggaacattgaagaaaagatgctagagccataactgggaagcaccctttgaagtgccatgctgtttttttcaggccatgagtttttgaaggttttttgatcaggggtgttccatggtcaaaatttgaaagaaaaaaacctggaaaattttaaagtgctatactaagtgagagcattatttttttgtggacctggagtgctctccttgcctgtgaaggttttcgcttgatctgaaagtccttgagaaaagaaaaccatgaacatgtcactgggaagagtagcagcaggctatcctatcagagcctgattagatataccctccccctttcagggcctcgaagtatgtagccccacccatatgaaggtgaaagaactccaagatactggagtttctcagactcacatctgtgggatggttgaacaggtctgggtgtggcctctggggtgtgtgaacatctttcttaaccacggagcacctgatagaatgcaattctgtatcatgattaggcatgatttatgggcattccttattacatctgactggggggtcctcgatgagaatttcagggtgaaatatctcaacactgatgcatccccaggatgagtcaaatcatcaagtgagactgaatcaactggggaggaagagtaggacagaggg

SEQ ID NO: 53825 - DNA, 993 bp, Bovine  19866881201912
  misc_feature (1)..(1): n is a, c, g, or t
ngaagattcccacagaactgaagaaagagatgccagcaagcacataaaacaaaaccttctctataccaagtgaccaggaaaatgagctacaaacatggtcactgttggtcacagccaggtgtcccttttcagccccagcacatccccacgcctggagctaacacaggtgaaagcagaattcccagtgactcttctcttttcccatatgtggacaagctgagaacacattctaccaaaaactgtgcttggagagaggcatttccccaagtcacacgtggcattttaaactgagttctattgcttaatttgtaagaaaagcaagtgacgtctgcttgttcaaggccattctacagcctgaactctgtattatgacataggcaaaaggaaacagaccgtgttcaaatacacttgactaatttctgtgatgtgcaatcttgcctatagcttctgggtggcaagtgactatgtcaggggaggtgtgccaagactcacagagaaacaacagggccaatcttcatcctgtcccactgatgaagacaccgcgagaggagggaagtgtccagtggatgctcagtcagcaaatggagagaggggccctatcctccgtgggggaggaactgtcctaatacattccaagaacctctcttggtctcatccattcaagcctaagacatggaggggaagggttggagggctgaagtcaccaccagtgtcctgcattctctcaaacatggctgagaagactcggaaaacctctcacctctccagatgatgatatgcccaccacccacatcagtcacaacacagctcacaatctgcattctgagtacacatctgcatgttttcctaaggccactgtccctaaaactgtatatcttaaatgaggccatagccagcactgactctggagaatttatttttccaaccagagcactaaagctaataaattttcagggtgatttttaaaatgaaatcaaaaagaacaaagaaagg

SEQ ID NO: 53826 - DNA, 1337 bp, Bovine  19866881245596
  misc_feature (1)..(1): n is a, c, g, or t
naccccttccccgcccctggccctacctcaacctctgccgctcctggattacgttttagctccatcactgaccggctatgtaactaaccctgggttagtcataacgtctctaacatctcacctaatgtaagtcatcatcctctgggtgaggagacccacctaagctgtagggctgccaggagacccactgagacacacagggtaagcgctctgtaggctgtcagcttctgttctaggcagggctgggctagccttccttaatacattagtcctcccgaaacaggacccaggaagggaagcacaattacctgtactgagagagggagatgtgaagggactgaccaaagcgcacacgacctctaagacgcggatctgcaactctaccaagccctctgaactgaggcccctggggcacagtgcactggtccaccccattaagatcaactcctctctgttacctgggacaatgcagagaacatcaaaaagagaacacccgaaagccactgcttcttggctactgccacccagacagggtgctggcctcttgtataggcgatcacgctggacatgcagctgcacagacacttctttctgctgccttcgttctgatgcgtgcaggaatctcacacacgcatttcagtacaaggagagaaggcagggaggctggtgttggcgctgggtgcatgccaagcttcgtggcaccctgctcatataaccccactgtttcatgttcaggcagcgcgagacacagcaaggagccaagcagaggcaataatatttacttttcagaaacatctgttgctagaaaggcagaacgctggccagagcagagggaaggcgtgactggcagcctctggggaggacaaggatctgctttacagagtaagtaggctctgccgctgagtgaggagaccaggcagcgaagggacgaggaagcagcatggaagtcggggccctgacaggctgctccgaaagctgctgctcactagcgaaccaaaggaaactgcccttctcttcctggagatgccacagcagatactaactccccagagattaagagagcaagccaagtataatcctttctttcactgaaacaggtaggtatatcctaacttcttaagttagtttatataagttttaccagtaatagcacaagacaagccatttccttttgctcctggggtaaaacaacacatatgagcacatgaacacacaggcttacacacgtgtacataatgaagaactcaagtacctcacagtatgtttatttatcggtgcatctgatcttccaaagttagcaagactggatataactatgcttaaaatgctctgctact

SEQ ID NO: 53827 - DNA, 3320 bp, Bovine  19866881261600
  misc_feature (1)..(1): n is a, c, g, or t
naggccaggtagagattagcttaggaagagcaggcgggggtgataaaataattgtgtgtaatgaaggatttttaagtgaaatctttagtctgagcttcataattagacaggcagcactgaaagccagatcttgttcaggcggtcctagactttgagtttggggatgacagatgcagagtgcgccaaagcatttgttcagctagaccaagtgttcatcccttccagttggagttgagagagtgccaaaagttagctgaggagccccagccctgatgtagctggtaaggacaacgtaggaagcagacctcttagccaaaagaatgccctaaaattcaggttcgatggaaactatctttggttgttgagattctctcttattttttaaaatcatattataacctttttaatgtttaaatagttttggctgcactggtcccttttacacaaggaaactttcaacctcttagagttgatagattgttcatcaaggattttcacaaagaagcaagagtcttcattccagtctttgattgtcagagctgactctggggttccaaacagtggcaacgcagcttccactgaccggacatgaggttgttgatctttgttgaaagaatctttttctttccagactatctggaaaaaataattgtacatctgggtacagccattcaaagaactagaaggcttccagccccctctggtattgctaaaatgacataaaccccctatctatcattatttagaattttgactttggaggaaatgaacctaggcctccatttttattttttgtttatcatactgcaatttttgccagtatacctaaatccacacctgtgaccttagtgtagagctccacaatgagaaaattctgcccttgagttgtcttcaccttggacattactttagggtttattagcttggagattgagccaatcttccttgttttaatcaaggtatttcctgcccttcccagcacttcaggctgctgctgagatgcttccagtgtaaattctcttctgtagtctccatccacactgggagtcttcctccttcctgggggtcttcatacgacttgttttagtcagtacagaggggactgctgggcataattggttccttccatgctcagacatccatgaatacctggagccacaaagctgtgggtcatgttctctctctctctttttctctgtctctatctctccatctctcaaatatgtgttgactgcatctctttggtatagctcctgcagtacagcctttagagtttgtcctgctgggtcatgttccattcagtttcccaaggactagatacagtgttcaccaggatcagtgacattgtgacccacgtttgatatcagagggcccaaataaacagagaataaagatttacgcagaattaagagtacagtcactcattcttaagagttcagaccttgctagtaatgaggggcctccgaggcttcaagaagttaatctgctctcttacacacattcaaattaaggctttgcaaagctgccctattgtttcattgtggggaaccagagctgttgccacttgtgctataagagcttggttctttcattggaattaaaggaatttgccttttggcaactgtaaaaggatgagaatctaactgttgggtttgtttgaaaatcagtttagtgccggaaggcctgtctgatggagttcaggaggtagcattctaatccctctgtttactcacgcccaggttcagtgtctgctagcccctgagagctcccgtaccatccttcccaggctctttctgttccagccactatagctttctttgagttcttcaaacacaccctcctctgaccatcgggcctgggactgttacctcttcaagagtattcttccttcatagaatgaatgcctgtacattctttagaacagtgagtgcttctaaagcgggaatgacttaggaagcttattaaaatgcagattctccttcagcagttcttggaagagcctgggatctggcatttctgacaagttccaggtaaagttggtgcaactggtcctctggaactcttctttccatcttcagtttagtaaagtcttctgtttttcatgcttctgaggttgtaacctttccttcatagaggactctcaactactgtaccatttctttaatgtgagccattatctgatgaatgtttatcatctactaaagtacgaaccctgcaagagtgcagagttcagggaccacctgttggtttgctcacgccttcgttcccaggacctatcacagtatggcatatagggtgcattgtgtcatcctggcttttgacagaatggttaaatttattagtctgagatgcataagattataaaacccgggatgcatgattttacccatgcatgattttttaaatgtacgttggtcatttgaaaaaatattgattaaaatcttccagtttgggcatatttcatcgtacaatatatttttttaaaatagtgtttattagtatcactaccgatagcatttttcaggtagtccttaagtattgggaacctatcagactcatggtggcaaatccaaattttctaaaattatacttactgcttgaaagaatgaattttatcattataccaaatactgtcagttgttttccttgcagtgacagactcaacttggttcatttctgagaaaaatgtctgccaaatacccgaagtctgagtaaccacagtctcttcagttgttctttcaagctaaaatggtgtttcatgagaaaagaggttagtttagttgcagctcaaataattgcacaactgctctccctcacgtcagttctggtatgtaatagaagtacttcgtgcctgtttcctattcattacaatctaaaaaatatttgtttgggggagaatggatgtatgtatatgtatggctgagtcccttcactgtccacctgaaaccgtcacaacattgttaatcaactgtaccccaatacaagagagaaagttaaatatatatataaaattttaaaaacgtgtgctaagtaaacagtcagggtttaatcaaattaataatcgttactactttctctagggtattttttgtttgtttttttctttaacatgtgagtctgtggtggtaaaagagtacagtgattactggtacagcttggtgccactgctagattagtgctaaggcatgaacatttttacatacacttgttattgcatctcatggaagccttgaaaaggtcctggagatccttcaggagtccatggaccacacttgaaaacccctgttaacagcttaaaccaaaatcaccttctattaaat

SEQ ID NO: 53828 - DNA, 913 bp, Bovine  19866881303298
  misc_feature (1)..(1): n is a, c, g, or t
natttcatgaagataaatttggggacgctgaatgagagcatgttatttgggttagttgaacagatccagatataattatgtatatttataatgctgattagagacctagaaacctatttaggataggtcaggaaacggggtatgacatctcagtctttactagtataatctctggaaataatatattttgggcataattaaatggcacctggatcagatgggttatatctccctccctccagctgaacaacccacaaagttgttaaatggagtgatactatgaaaatacagtacgcctcttcagccttcttctgaagtgtatctctttcgcctttttcatcacataaactaattcttaaaaaaaaaattaaacaatccaaaaacaaacttgtattttttccgattataccagtaacatgccaattagatataacttagaaattacagatgaataaaaggaaaatgcaaatcacgccaatagtactgattagagatactcattttggttttattgtcttttctactcaggttatgatcatctttccttatgattatacactctctgagattgtttttagtggttatgtagtatttcaggtatgctctgtcaagacttactaatggcctactttttcatgttcgttaaccaatctataatgaatgttcttacagctatgccatcattagctccttaagagtatttacataggttgccccgtttcttttcctgtctttgagattcagttctcatctctctgcttgttcccttcttttcctacaggttgagcagaaccttggagacagaaagtggatgtcttttttgagtggcacagaatgaagagtctcatatattgaatgcatatgatttcattcatttgaacataataactagtaacatgtttaccactactta

SEQ ID NO: 53829 - DNA, 793 bp, Bovine  19866881307392
  misc_feature (1)..(1): n is a, c, g, or t
ntgaatgtcctcaatatgtaagcacattacattaaaagatgagttagttggagatagtgcccttaaaacaagagtctgcagaaatataaaaatacattagtatatataaatatatatatatacatatatgtttaaaaatgggtgaaggtggtcaacaggtacaaacttgataagtcccagggatataaagtacagtatggtgacttcaaagaagttaaaagaaaaaataagaaaatatagtccttctatataatcatacatattaatatataaaatatgccataactgtaaaccaagaccaaaaagtctggatgctacaggatgaagtgctgctgaattccccaagaggatgatcaaggaagggtttgtgatcaaattgacacttgaacctgggtcttgcgagatctgtcaggtttaggcagaaaggactgggatgttctgggcaagagggacagtagggaaaggctcagaggcagaaatgtaatccaagcacatgtggggagcagctcataattgactctgtctgaacatatgcttttcatctacagtattatagttgttttgcttcttatgtcaatatgattttttacttctttaggcgctaaagctgggaaagcctagtaaatgttgtcttcccattccagaattctgtgctagctggatcccagtggagcatcatctactgattaatcttgtgtaattgacttgcctgagacgttccctactttcatcacagttttgcttcacagtcaaatagacctcaccatctggaagtctcttttttttttttttt

SEQ ID NO: 53830 - DNA, 1956 bp, Bovine  19866881364915
  misc_feature (1)..(1): n is a, c, g, or t
nctttcaacaacagacaagactgctgaagctttgagagtttacactgttctgcccaaggtcactcagctggtacagggcccagccaaaggcctgaatccaaaggccaaactgaattaatagcagagaatgaatgagactctaccgagggaaccctgtagacttggtgtaaaatttggttgcttatttatgtccctatttgactgttttccacatttgaggaactgaggcacaaaaggatatacaataggtcttatatcaaccaaagattagctttagttctgaaagtaataataaaataacattatgctcccaatcctcaacagaaagcaaaatagctggatttgagggttttgtgagctaaccagcactggaaaaagtatgattgatacttcagcttttagtttatacttcccctatcagatttttgccaactttcctggtggctcagtggtaaagaatctgcctaccaatgcaggagatggtgggttctatccatgggtcgggaagatcttctggagaaggaaatgacaacccgctctagtattcttgcctgggaaatcccatgtatataggagcctggcaggctacagtccctgaggtcacaaaagagtcagatacaacttagcgactaaacaacaacagtcagatttttaaaagcttcaattcctcataagctcaagccaaagcatgaatgtgcataaaagatggaaggaaaagagcttccaaatgtcacaagttcagaatcatctgatgctgtccaaaggcttaaccaaactttcacattggctaaattttctagcaagtgaaagtggaagtgaagtcattcagtcatatccaattctttatgaccccgtgggctgtagcctactaggcttctccatccatgggattttccaggcaagagtactagagtaggttgccatttcctcctccaagggatcttcccaatccagggatcaaacccaggtctccggcactacagacagatgctttaccttctgagccaccagagaattttctaggggtacttgaaatttctgtttcctgagagaggaaaccctctgctggtccctaggtctgaggatcctacaaaatggtttttagtttcccaagcattttttgagcatttccttcatactagacatgtatggtgatggaaattttccaccgtggtggaaaaaacataattcctgttctctagtaatttataatcagggaacagaacatgacatggacaagtgagttcaattgccactctatctgaaatgctgtgacacatttaatattctttccagtgatactttgaactaagcaggcaccttccatttaaggcaatagcgcacagtgggaggaagggttggaaacagatggggacatagtgatagtaaatgattaagtgattctattgcccattagtcccattacttaacctcattaaattctgttttcccctctgtaaaatggggataataatatgactttgaaggaccattataaggattaaatgaggtaatgcatataaagcatccaacattatgcctggtttacacaaagtactcaatgaccgttagaatcataataatggagatgtcagcagaagacaagagacagtagtaattgtaacaatgagatggggtggaaagaaaatagaggctaaagagaggaaagagttcaaccactaaagctctttcctctgcagtagtcacaccttaaaatgcatattagaatgcaatttccaacattcttttaagtagttaaagtataggccttttcttaaatttgtgggtaaaggttgagatacagctgaaggggaaatgatttaaactgaaaccaagatcttcctttttcccttgtcttttccttccctgaggtccagaacaatgaacctcctttagataaaagagtatgtacccaaagcctgtttccatttaggatatttcagcagaacagttaat

SEQ ID NO: 53831 - DNA, 1535 bp, Bovine  19866881763592
  misc_feature (1)..(1): n is a, c, g, or t
nttaaagagctgtctatgcagagaatgagggccagatttagctagaggatggtttccttaagatttcaaagaagaggaaagaagccttcatggaagcctgagcaaagagacagagaagaatcgtggcccatccatggtcacagtcagagaacaaggagggcacagccttggattctgtgtacactgacctgtctcctaccctacaagctacagagctggattcagcagctgggagcaggaagcatggagaggaagtaagctgcaatgatgctgccaagcagaccctaacatgtgccatcttgagaggcagacttactgtgtaagaagacttaaaatcaaaatccagatggcaattttttgatttttttaacttcctatacagaagtcacattttccagtacatcttaattctatttagtgtgtgttcgtgtgtgtgtcatggccaaatgtcattaacaatggccagacacgaaaatgaagagagtcattaggctaggacaggctcggcagctgcaccagctccatgctcttgaggggaaggtagagtgggcaggagccattgctgggctgcatctaagtgctctgcagcctctagggacctgcacacatgtggaagcacaaatctgggctgacagcaacatcacattcaatcaagccctagtctgacccagagagccactgacttggtacagaaaacgcttgaatagttgacctgaaaaccaaatagacgctaatttgcattagaatttgaatttgcatgttgtttatttcacttaggtgcagagaaaggaactgtagcgtatgctcacatagctccacattcttctaatttcaaactaggttcgttagccaagcataaaacaactaaccacgaggcaggaaggagtgagagggttaatcaagagggcactttggcatcagacagcctgagtctgattgctggccctgctacgtactttggcatgaaacctggggaaatgtgcttagttttccagagcttttctttttctgtaaaatggggataatacaaccacttcacaagttgccgtgagaaattaaatgaaataaatttttagcttggtgcctgatgcacgtgtgctatcctatggactgcaacctgccagggcttcattggtgactcagatggtaaaaaatctgcctgcagtgcaggaggctcaggtttgatccttgggtcaggaagatgccttggagaagggcatggcaacccattccagtattcctgcctggagaatcccgtggacagaggagcctgacaggctacggttcatagggtcgcaaagagtaggacatagctgaagtgacttagctcacacgcagcctgacatatagcaagtgcttaagtaatgtatgattacaactaagtaggactgattcttattgtagtaacgatctttattactacctttgaagtcctgcccccctatagaacatcaaagcatactgttaaattaattaaacaaggaagtcattaaaatgagatggttctaatgccatgatgtggcggcatatgaatg

SEQ ID NO: 53832 - DNA, 1342 bp, Bovine  19866881973873
  misc_feature (1)..(1): n is a, c, g, or t
ntaattattaattttattgacaatcatcattgcctctcttcactccttccccagatagtgcaatgggtggcctgacaattccagcagaggagtggcaattcatgagtgctggagccggatgcacctgcttggggagctgattgctaagttttcaggaattctgtaagtcagttgttcatcatggccaagattcaaaactaaaccatttagaaacttacaattaaacaaaatacttaaaaaaccaaggtaataaatgctcaaaactttacttcttaattgctttaccattatctatgctttaaagttgtttctgtccatcctttataatgcatatcccatataatggtgtgatacaacatctcttcccaactctgcattcagaaatattatctcagtagtttgaaatctatcatgatggagtatgtacactatagaaattggaaaacactgcaaatcagagcttgacttattgtgttattgtataaacctgagaaaatgatagaagaaaatttagcaataaagattgaacgtcaatgtgtgttcattcatgaataacacaaaaaattgatgaaatatttttccagtacttgaaaactatctgatcaacagagaagcactcacatcattgccaaagtgtagtcctcacatcattgccaaagtgtagtccaaacataatctttgttgttttactttcatcttgctcattaatgtaaaaaaaaagtcatcaacattcatgtttgaacttcagtggcatgagtgacttctttgctgaactgaatattaaccaaatatgatctgcttttgccaaacataattgaattgcatctgtaggctgactgtgggtacaagagtttagcaaaaaccattgaaaccaatctgaaaatcaatgggctatatagaatttactctaaaaagtgttgtgtattttattattttttggtaaactgtatgctatgcattctttgtatcagtaaaactgtataacagatacagagatactccctcgcagcagctgttacacatttatcagcacactgattatggatgtaatctaatttactatttgaaagctcattccacctgtcatgtggagcctgcgttgtaggagctaaggcaggaagcagggggaacagtgaggaggcgggctcacaggattcgaggacatacacagatttgctctggggtggtgccagtggaggtgggaagctatggctggacaggggaagcattttggaggcaaaggaaggcaaaccagtcatgtggcagctccatggaagagacagacgtgtgcaggaactacccgtgctaaaggaagattgtcggcaaagactgagaaggctca

SEQ ID NO: 53833 - DNA, 2453 bp, Bovine  19866880595502
  misc_feature (1)..(1): n is a, c, g, or t
ntatctggaacaatacaacctcattgaatcttggtagaattgagactttgaaaccctataaatacccatcattattgatgtggcacagatattaggtttatttagtctgctcacgtcattgctttgtttctgtggatggtataagaaccctcaagacttctttctgtaaggcttttcctgacctctatttcctggacactatttctccttaatattttaatcttctttttaaaatatattttattttatttatttaatttatttacttgtctgcgccaggtcttagctgtggcatgaaggatccagtttcttgaccagggatcaaacccaggccgcctgcactgggagtacagagtcctagccactggaccaccagggaagtcccaaggttttaaccttctaaatcacgtattttctaagaagttttcaaaaatctaaacttgggattggcctcctacatttgggagctgaggatgtttcaagttgacaaagggttcatatccacatgagttaattcacactttgacctttccaggagcctggagtctgagcttccatcccagggagcagacacctccatacactttgcagttggcattgacccgaaacacccacagatctgtctgggcctgtaagtaattttcttttatttttaaaattgtactcttggcacagctaatctgaaggtgccacatacaaaaaataatctgaagagcacaaaacaattctagcaaaaaatatttatataaggcaggaattgaaaaactgttacatatcttctgaattcaatattggttcccaggaaacacaaaaactgtgtaataaccttatcattcattatcatagtctttgtattatacaatttgtattatttttgattattccacttttaatgtcagcatcataaacattgcacatgctttgaaaatattttaatgtgtatattttacattatatggaaatttatctgcattttttccattgtctgttctttccaaacttgatgttcatttactattccatttcattagttcataagtgtttggcaaatcaaatcacaccttctaattgattggcttataacaggaaaattttttactgtttagccttttgtcccttgatttttccgaatatattccctcatcacattatttaagtattttgagattaatgatcaattcaaagagataagtcatgccagcagtacatctttttcattacaattttacatatctcactgatttaacaattttctgatcagcctgaaaatctttgttgatcaaattgcttatttgctgactaaattatgcacaagcctcagtctatttatccggctattaactgaaggattgtggtgtgtttgctgtgcaaattaccatgatgttatgaacaatcagcatacatatgcaccactatctgtggattcaaaattatttcatagtaagaatttaaaagattttgttgttgtttcctttttcttgatttgaaaagtttatcaggtgaagggattcagaacatccagccccaaatatgccactttggcatattgattattttgagtgaaagtacttgagaaacagcagatgtatgaagactgttggacctccccctttctatctaaaagcagtttgcaaaatttccaatgagaaaggagccttccctgtatcaggaagagaacatttttatcaccagactgggagttatggctgaattggacctgtataagcttcctaataacctttatcttccactaatttcatttaatttctagtcactgtcccacaacttactgcccctagaccaagccccatcatttattgttttttgtgtaaaaaggcatataagctttggggatagatggctttttcaggtttttattttccatctgaagactcctataaatgtaaaaaaaaattaaataaatatgtatgtttttcttctgttaatctgtctttcctttccttatcacttcagtcgtgtccgactctgtgcgaccccatagatggcagcctactaggctcccccatccctgggattctccaggcaagaatactggagtgggttgccatttctttctccaatgcatgaaagtgaaaagtgaagtcgatcagtagtctctgactcttcacgacccccatggacttcagcctaccaggatcctccacccatgggattttccaggcaagagtactggagtgggttgccattgccttctccggttaatctgtcttgctgctgctgctgctgctgctaagtcgcttcagttgtgtctgactctgtgcgaccccatagacggcagcccaccaggctccccgtccctgggattctccaggcaagaacactggagtgggttgccattttatgtcagtttaattcttaggccagccacagaactaagaaggtcaaagaagttttcctcccacatgaagcgaagtcacacacacacacacaca

SEQ ID NO: 53834 - DNA, 1498 bp, Bovine  19866880624774
  misc_feature (1)..(1): n is a, c, g, or t
nactgttatggggttctcaaggcaagtatcctgaagtggtttgccattcccttctccagtggcctacattctgtcagacctttccaccatgacccattcatcttgggtggccccacatggcatggcttagattcattgccttagacaaggctgtggtccatgtgatcagattggctagtttctgtgattgtgctttcagtctgtctgccctctgatgccctctctccacacctaccttcttacttgggtttagtctaccttggacgtggggtatgtcttcatgtctgctccagcaaagcgcagccactgctccttaccttggatgtggggtatctcctctgggctgctcctgcgccgtgcagcagcagtaatgcttttagtaccattactctatttttgatgtatgaaattaaaaatgtgatagtgcttagcaaatagaggaatcaatcagctcatccaatcagcagatgtttgagtgtctacacattgctgttgttcagttgataagtcatgtagtctccaacttttgcaaccccattaattgtagcattccacgcttccctatccttctctgtcttccagagtttgctcaaattcatatccattgagtcagtgatgccatccaaccatctcatcctctgttgtccctttccctttttcctttcatcagggtcttcctatgagtcagctcttcatataaggtggccaaaatattggagcttcagcttcagcaaccattctttcaatgaatatttagggttgatttcctttaggactgactagtttgatcttcttgcagtcaagggactctcaagagtcttcttcagcaccacaatttgaaagcacagtctaaaacataaagatattgaaactcaataataagtttttaagatgcttagaactgttacacagggctggacatagagtaacagctcaaaaataatttgagttgcattttgatgaattaaatggaatggaatatctgtttgttggtttgtttgttgagagcaatgcagtatcatatactggaagagaaagagcttggaagttggttctttgaagaagtcacaggttcaaatccttacccacttacataattataaccttgggaaaaatcataaaacagagataatatactatatttatctaggctgttgtgatgataaataagtaggtaaatcatctaatatgttagaaagcatcaattcttcagcattcaatcttctttatggttcaagtctcacatctatacatgacaactggaaaaaaccacagctttgactataagaatctgttggcaaagtgttttctctgctttttaatatgctatctaggattgtcatagcttttcttccaaggagcaagtgtcttttaatttcatggctgcaatcaccatccacagtgattttggagcacaataaaataaaatctgtcactgtttgcacttttttccccatctagttgccatgaactgatgggatcaaatgccatgatctta

SEQ ID NO: 53835 - DNA, 792 bp, Bovine  19866880683472
  misc_feature (1)..(1): n is a, c, g, or t
naaaaattgcatgtggaaaaaacttttcttcctccctgccctggtcagaaacacatgtgtaatcttccctttaatcatccctttgcttcttgtcatgggttgaattgtatacctctaaaattcagacactcaaattttaactcctagtaccacagactgtggtcaggttaaagtgaggtcagtagggtgggccctaatccgatatggtatgcattcatgtaaagggaaattcagagacagaaaaataaactaggagaatgccatgtgacgccacagggagaagatggccacataccagctaaggagagaagcctggagaatatcattccattaaggccctcagaaggagccaaccttgttaataccttggttttagactcatagcctccagaaccatgagtctgtcggttccaggaaatgaatacactcctccagacatttttctccaaatatccttcatccctgttcttccaacatctcccagtatagaaaaaaatgacttcacatatgtatattatacatcttacattttcatttgccttctttgaacatcagtgtataattttgcctcacaaagttagatgtcatatggggaaaacctctacaattttcaaactcatgataatcaagttctataatcaacaaaaaagaagtgtacaaaagaaaaccaatgctgaggactcccataaagcaagtacaaaggcagaagacaaaattggctgtgcactatcattaactagagctctcacagtccttttgtcatcctaagcagctattccagatcttttcact

SEQ ID NO: 53836 - DNA, 894 bp, Bovine  19866880841667
  misc_feature (1)..(1): n is a, c, g, or t
ncatttatgtgcaaggagaggaattgtatctctaggctaaaactatttatcaattttcctgccactaaaacttgccagccagtttgtgagcccgagatacagatgagtaactctgtatagagaactcttctctgtggggaaaatgcactcagggaaattactacccattgatgatattttccctgacgtcctcttcacccttatctgcactttgcacagttactctccaaccaaccctctctaactatcatctatgccctacaatagatctaaaccctctctaaaatcgagaagtggtttcatttttaaaaggaagctcttttactttcatttccacagaattacagaagattgttgttgctgttttttttaagaatttaaacatatattagtaatgtatattttgtggccatgaaaataaatacttgtattattttctttttcatatgtcaaattaaaatgttcattactttctcatctcaaagcttcaggaacaaagcatcgagaaggaaatggtaaatagcaaagtcgccctctaaacagtcagaccatcaggacgggatgagatttattgctaccaggttttcactacttgaatcttgctgaggcctttgtatccctaagggaatctgataaattttagggtttctgatcacacagctactgtctcttggaaaaaataaagaagaatatgtaacagaaaatatcagaggtttttcatctcaagataaaggaggtaagaacagggtctcatttagaattttttgaggtctggaactctgaaagattgtgattcttcacgtgttgttcaaataaagtcaacaccagactgcaaaatgcaaaatacaaaatttacatggcatgtaaattaagagtttctctccagttattttt

SEQ ID NO: 53837 - DNA, 2589 bp, Bovine  19866880885655
  misc_feature (1)..(1): n is a, c, g, or t
ncttagtccgtctgagtcctggtttctttatctatctatgaaaaaggggaggagaagggaacaacagaagatgagatggttggatggcatcaccaattcaatggtcatgagtttgaacaaactctaggagactgtgaaggacagagaagccaggcgtgctacagcccatggggttgtaaagagtcagacatgactgagcaactgaatagcaacatgaaaaaacagaaatataactatttgactcatggtactattgtaaagattagatgagatgatatatgcaaattatctgctacaatgtttggcacaaggtagcccctaagcaaatgtttattccattttttattcaccactcttattcctcattctctttatttttttctataaaatgattgttcattattttctattgtggttttaaacagtctggaagaagagcaaaaggtttcattatacatttctttgggatatgggacaaagtgttcttgctcctttcttcctttatttcttcgtacatcaaacatccactatataaaaggcaaggtactgcaaactatggaataaaaatatgcatggcagagcccttgctctctaagagctcatagaacagcaatcaaggtgggcaagtgacccacaatatgataagatggcactgcagaagcactatttctgtttgcaaaagagaaagttggcaggttgctggctgacagataaaagcaccatgtctgtatccagtctgtcttcagcttcttttgttgtttacttcttcaatatctgatttatttcaaggctcaggctctgatctagctgaccctgtcactgcagaaaccatttgatttttcctatttagtgtgttcaaaagtcactttgtggtagaacctatccttaatgagctgacaaagctggggccagagttccctgagtcacggcacctcatctaggggactcattgcctctggacaagaagtgattacctaaggcaccaactttaggaaaagatgaaaggcatctctttataagcttcccttgatcttgacactgaaggcctagatggcattctcatcaagcttttactagctcatcaccaaccaatcaataggaatttggcagaaagaaagaaggacaggattcttctccttcaagcagggaattaaatccagcagagttaaagaaggacattctcacagtggaaagagcataggactgggagtgaggagacctagctttcaattcagtccttttatgtaaaatgacattatacaattactttgaagttttaaaattctaggctctaacaactgtggaaacaattaaatactgtttagtgatatgcctatcaggaataccaataaagatttaacatttttataactcaagaaaggtttttcttgcaatgtagcattaaattagtctaagaccaactaagatgcaatcttacttttgattaaaggaggtaaaataaatatgtgtctctttcttttaatattactttgatagaaatagaaggggagatgcctacaaaccagagaagaagtcgcaccttctggagaaacagattgactatctgtagccccatctgcgtgtgggtgacttgggttgtaaggtgtgtctcttttgctctgacatcctgccaggaaattaccccactggctgtagatccagggttcacttaactcttctggggtggatgcaaacggccatttgaccctgaatgtctctgaaatacacttctggttataaactcctggaggcaggaactagtcccttaatatatacctattgaatgagtgccagacaccctaaacccatcttagtatctgagaggcagcttagaaggaaggctcagcatgtggtctttggagctggattcctgctctgccactaattaagtgtgtatgttgatgaacctctcagggtttcagttttctcatctgtaaaatgggaatcacaggtacctcattaggttagcataaatattacacgaaacaaaacaagtcagtacctgacacagggctgaggagacacttcactaatcccagacagtataggtggagccgaggtagagcaaaagatgataacaatcgataacttgatagtataggaagaacaggaattgttattttgtttctcagatgaggagactgaatttcagtgaactaaagcagtagcttgtctcagccacacagctaggatgggctaaaccagtgctacatctcgtgtttttaggttcctgtcaggccagtattgtccccatatgtccccgtaatgagctgctaaaaggtggataaatgttatgacttgttcagtaggtcaaagttaaccttggaatacagggtagtcttcctgctgccttcctctcaggtatttcaggtcaaatggtatgtgccatatttaaacaagggactgagtacacttttctttgatagtaaaatggaatatgtctgccagtttctatagaatacaaggctcaggcaccatcaaggagaacttggtgtttacatgaaagatgacattgtttccaaataagagagaccttttacagagatccctgagagtagcaatgatctcctcttagaaaagggctgagaa

SEQ ID NO: 53838 - DNA, 1537 bp, Bovine  19866881067487
  misc_feature (1)..(1): n is a, c, g, or t
nggctgagaaatgacagatgctgaccttttgatcatcattggacatagcccataaatcagttctttaagactaaaaaggaaaaagtagttaatgtccatggagccaaacatgttaggtgatttacatacttatttgtcatcacaacagcctagagagatatattatattatctctgttttatgattttttaccatggttatatattgtgtaagggggttaggatttgaacctgtgacttcttccaaagaagcatctttcaggcttcttctcttcaagtgtatgatactgctttgctcttaacaaacaaaccaacaaattaacaaacaaacagatatttcattccattttcttcatcaaaatgcaactcagaaattatttgttgatatgctactctatgtccagccctgtgctatagttctaagcatcctaaaaccttgttatggagtttaagtatcattatgttttagattgtgcttttgaactgtggtgctggagaagacttgaagggcttccgtggtggctgcctgcaacacagaagacccaggttcaatccctcggtcacgaagattccctggagaagggaacagctacccactccagtaatcttgcctggacagagggagagtcccctggactgcaaggagatcaaaccaatcaacctaaaggaaatcaaccctgaatattcattaaaaggactgatgctgaagctgaagctccaatactttggccacctgatgcaaagagctgactcactggaaaagaccctgaagctgggaaaggttgagggcaggaagagaaaagggcagcagagtattagatggttggatggcatcactgactcagtggacatgagtttgagcaaacccagggagatgatgaaggacagggaagtctggtgtgctgcaatttatgatgttgcggagagttggacaggccttagcgactgaacaacaacagcatttgagggaaagcagtaatttaggttgttcaaagctgctgcctggcatgtctattaggcttgataattattttgtggaggtggaagatagatagataaaaagccaattcatgccaaagaaagacctccatgtacaagatcattggctctttgtagatggtatgaaaaagaacatgagatggcatgtattttattaggataagacactaagggtataatatcaagttctgcgccaaaaccagatactgtacttttagacatccttgtatcactatgaagtaatttagtgctggagcaggggtggctaaatacagcctgcaggccagattaagcccacaaagatgtttagcccgcactcactcccactcagaaaaagcaacagcattcagctgtgggtggatgctgactcaccgactcagagctctgcctgcgccaaccagctgcaggaagacgagagaggccagtgtgaacctggcctcccaaggccctttgactagtatcctccaggacttaatgattcagtcatgcctaccacagatcctagactggcaagctcacccaggagacaggcacatgag

SEQ ID NO: 53839 - DNA, 752 bp, Bovine  19866881493591
  misc_feature (1)..(1): n is a, c, g, or t
ncattcccaaatgaagacacaattaagaactatcctaatgataggaagttctctgtaacaagaaaaaactgttgaaaattaatttgctaattaccatgcactgattattgtaactgaccagtttctaagatgatctatatataaaatttaaaaagggatagtgtttaggtaattgtttagataacttattaatgtagtagattctagggctcaaaggaactaagttgaacatttaatgacttttcacatttgaggaagcaagattaagcaacaacaaaagtggaaaaatatggggggaagtagaataaggaatcaaaagataaaaagtcagcaataaagcttcataaaagagtgactaactacatttcactgtttttcatagtctccctgggagtttgtttgtttaaatgtttggactcttcttgaagttaaaaaaaatacaaaaaacttttaggaaaaatactcaaagtcaactaaccttcctagttaacctggctctggaaattgtacttgacactatgactttatcacatcttaaagggatatgtcaaagctctttaaatcatttccagagggcatggattatttccaagagtgaggtaaagatgtctgtaatcatgtaagcattacttatttagccactgcaaattaagatgatcaaatacctctaaaaagtgggaattatgagtttaagttttatactgacatgcctacacatttccttccttccttcttttctttctttcttcctc

SEQ ID NO: 53840 - DNA, 1295 bp, Bovine  19866881681296
  misc_feature (1)..(1): n is a, c, g, or t
ntggtttttgcttggggttaaaaagtgcttctagaaggggtgaatgttttattgattagccaacccaacaattttttactgtgtataaataattgctaggtgtttcagcaaattcaagttgtaaaagtgactggagtcaacattatttggtaaattactaccaatccttactaaacatttttcatatttcaattaacttttttctgccactaagtactaaacaataaagtaactgtgcagttagataccattttatcatgcctgaacattactattttacaaagagtaataatttttggatgcataagctgtcagttaaataatttcatttacctttaaatgatttgtaagcctctttaagaacatcattaacaaacctcctttaatgattagccaggaaatgtcctcatataattagcaattttcttacaccaagcagaacacttttgtcctaaagaagagggtgggagagctttgaggaggacctacaaaagacaaatctaggccagatagtcccaatggtcacagatgataaatatctggaaccatttaacaaagccccaatgggaagtcagtatcatcatcattttgtaaatgatggaggtggatttcaaacattctttcctgtgtgtaaatgtggaacatctgtgggaacaaatgcctgttcaggctgtgcaaacaaaaatagaaagatttccattctgaaatctctttccggagtatggttggatataagaaagagaagaccagattcttgttatggcactttaaaattggtgttcataaaagataatcaggtttgcccattgtttcaggatggttgtcttaataattttattaatgttcccaagcataagattcacccatgtagatagagacaggttgatgtaatgcttttggcaaagaggtagattatgttactctgctcatttcaaagcctccatgatggtcacagatcagaaagtaatttgaaaaggatgaatctatttcccccttgcttcctgctaaagtagttaagattgctattccagattagtttttattgataaaactcatatgttaactttttccaagtaataattaaaatatttcagttagatttggctcataacaatcttttttggctatcacaatcttagacttaacttccctaattataccaagttaatttatactatctgactgaaaacaatggagggaagtagcggctatagcattttaagtcattttggtttttcccacctctcagatgtttatcatatttttcaatggaccagtgaacacatcacactttg

SEQ ID NO: 53841 - DNA, 1015 bp, Bovine  19866880455799
  misc_feature (1)..(1): n is a, c, g, or t
ncctgaataatgcaaattactggggcttccctgatggttcagtggctaagaatctgccttgcaatgcagagggaacattggttccatccctggtctgggaagatcttacatgctacagggcaactaagcccgtacaccacatctcctgaagcccctgccgttgcagctcctgaagcctgcgtgcttgcatgcaccacgagataagccactacaatgagaagcctgtgcaccacaaggaagagtagcccgcacttgctgcaactagagaaagaccatgtgcagcaacaaagacccagtgcagccaaaaaataaatcaataaaaatttaaaaaataaatctttttttttttttaagtcatgcaaattactgtctgttgtggccagaagaatgtgcctctcagattttctagggcaggaggtaaaattggcctccagtcgtggctgctgacatgctggcagccaggttaatcttcctacaggctgcaccggccagtgaccaggcacgttaggggtttcactcctgggagaaaggggctgttctgatggaggaccttggctcaaaagccccttccagattggttgaaattttcttagaaccacagagcagcccatggcattcctcagcacttttattcctcctcccactccatctcccttccctctctccttcatgggcgccagacctgcctcagggtctgctggctctcctgcctcctcctgctccttccccatcatccctcactggtgtttccccagtacatctcttatccatctcatccctgcttggcatccgcttctcagaggacctgcacaaaatcactatttaactattctgttttgcatgtgcaatttaggaccaaacgtacttcctgacggagaaggcaatggcaccccactccagtactcttgcctggaaaatcccatggacagaggagcctggtaggctgcagtccatggggtcactaagagtcggacatgactgagctacttcactttcacttttcactttcatgcat

SEQ ID NO: 53842 - DNA, 919 bp, Bovine  19866880582153
  misc_feature (1)..(1): n is a, c, g, or t
ntggaagcattttgatattcagaataaatgccatttaactacttaatagtttgttattagggagccatctaaaagactagattgaaatgttggctttttaagtggttttagtaatgttttaaaaaaaaaagttttttgtatattgcccttagcagtgttctccaattttggacgagtttgactttattttaaaattatagttttctgttacctcattactacatttttccaagttattgtttataatcattttcagccataagttatagggttgctaatttctaccaaaagagatgaaagtaaaggaaaaatggaaacatgtaattaaacagtttctttttatttttcctttaattatgcactactctcacaaaagctggattgtaatatgcaagtcattagaaaatcttgaaaaacaattaataagcttacagatgagtgattacagataaatcctagagaaaaacagattacaaaggaaaaaaaattaataatttactagtttcttcattgcctttgtcttattttgtcctcccaacaatggtataagatggtcaatatccccatttcacagaggaggaaataggtaaaaaggatactttgacttatccagaagttctgtaggcaataatcgcacttgatttgaaaccagttttcatgttcttcctcccatatgacactacacaagcctttccagctccagatcttctttactgtagcccaatgagtgtgtgtgcactaagtcacttcagtcgtgtccaactgtgtgccaccctatgaactgtagcccgccaggctcctctgtccatgggattctcctggcaagaacattagaatgggttgccatgccctcctccaggggatctccctgacccagggattgaactcacgtctcttatatctcctgcgttggcaggcg

SEQ ID NO: 53843 - DNA, 1563 bp, Bovine  19866880607732
  misc_feature (1)..(1): n is a, c, g, or t
ncgatgagctatttttactgccggcttggagccatctggtttgctctgtgaaggttcacgacggtatttttcagagcagccagtcacatgtactctttccccaagtccaggctggtgacctggagaggaatgtgtgagacactctagcatctccagccttggtcctctgctgttagttgatactcacggtcctcagggctgaatgctgggcgtagtggctaccaaccagcacttaactcccttttgtacagttagtgctgaagtttgtagggagagctggaactggggtttacaaagcgcctgggaaatggcctggtctttaccatcatggtgggataaggaccaccccggccacccgccccccatcacattttctgccttgtttctgggatcagtgcaccagatgaatgttaaggaactgagtgccttgtcacagtaaaaatgtgctgtggacagacattagaaaaacatccagagcagactcatggggaagaagaacttgtctcactctgctccgacagcctcaggcagggcgctctcacgcttctctaggagcgagcattcctgggagctgcggaggctgtcaccccacaccccaggaaagccttgctaatgatctggactcttttgttggtctttttcgtttaaaaaattgcaactgaagtgtggcctgtcaccatttgtagaagtgtaagtttctttacctttcaacacctttcaattcaatgactatttataaggtgcctggaggacctaccctgtctctgcacctctgacctttcacgtttccagacgacagcacagaggaaagtcctcccccttctctgcaagataaacagagttcttttcattctgccagactgctttaggtcctagggtcttttggtgacagtacctactagaaatgcagaaaaaaaaatcccagtaattaatataggattatacaaatgaaaataatagattttcattgaccaagaacatttttatgcatcatcacatcccccaaagtctttggtgtccagctctagaatggatgctcacagccagacagcactgggttaggacaagcctctgagacttagagggtcaaggtcggctgtgtcctatgtggactacatcgctacacagcggatttttccctttaaggattttctacatattggtccaaactattcctcacccccggtcatattttcttactaattgcttctaccacttattcaatgactcctttcaactaccagccaatggtattgaccctgtccatgaggcaaaccttcacctaaaatcactctatgtggttgttaagaacacaggctgtggagccacatgtcagctccatcacttaggagccgtggacaagtcatgtaatctccctgagcttcagctctctcgtctacaagaaggaataaaaatgataatacctacttcagagggttatgatgaagattaaattaatactggggtctataaaccagtgaatgcatgtgaacttgaatggggggaattagttacatctggcccattagtttttcaaaggttttggtatcattaagcacatca

SEQ ID NO: 53844 - DNA, 1948 bp, Bovine  19866880614544
  misc_feature (1)..(1): n is a, c, g, or t
naaaacttgtgttttatatttcatgatttttaaagactcagacttatagattcactggagccctaatttgtttcgttatttatttgacagaagcagtttaacccatttcccattgttccagtgaggtttctatttttaccaatgggggtgaatcacacttgactatttagggacatgtttagaacatggtttttcaagtcaagacccaagtgaaactttgattcccagaccagagcctagaagctcagcacagggcagccattgtgccctggcctggtgttggctgattgtgttgcacagaatagaggtggttggaagagctccatggaccaaaaatagctcagataataactccttataagataagaggaaataaatggcacttggcttggggttccctccgtccccctgacctggtgaacaagaaaatgcctttgtatcttttggttgttgacattgacgtggtctctgttcacattcaatgacagtaaagacgtgcttgtcctcacacacactgttgttctgtcctgggaaccatgaatgcttttcttatttggcttcaacttctagggcctcattaatagaatagactcttgatgcctgcttaataaaaaatgtcatctctgttggatctacttttgaatttttaaataaaagataaaaataagtaaaactgattagaactttcaccttacatgcaataaagaggttcagtgttcaaattcacattttcagaagtatagaataattgttcttgaaggcctattttatagtttttaaaagtataaactccttaaaactgaacattattcctagtgctccttttttccagtcaggcagaattttaatgtgacatggatgaagtctgtaagtttataaagtcttggtaggattctcaggtttttctctttgaatgtcagaagtttactcacagtcattcctgaaaaatataaaaataaaaatgcttccaccttgagatttttccttaactacattttgattaaaagttgatttctattccaaatagagaaactcatagttctgatcctatttttctactgaaaagaaggaaggtttatatgctttctcctccattggaagacttccataattataaacattttgacccattttttttaataactcatagttctatttttaccttttatgttttctatagagctggaatttattttggtacaaagaataaagtataaacccagttctgtataatggctttccatttgtccaaatacaatgtagcactgatttgaaatattttttttatactaaacttttatgtatactggactctgtgttcctttccattactgtatttattttaattaccacagttttaaccagtgtattttttatgttaccacacccattttaaccactgtagtgtatcatattttatatttattataccatatgttaaaatgtattataaagggatactgttcattttttctattcttttccaaaatgaccctggctactccttgaacctattaataatctatagcctaatctaagtcatctggcctgctccatctcctccaattgattgggatatctatcaatttagatagtactcagccttgaattggagaaggcaccctactccagtactcttgcctggaaaatcccatggatggaggagcctggtgggctgcagtccatggggtcgtgaagagtcggacacaacttcactttcactttcatgcattggagaaggaaatggcaacccactccagtgttcttgcctggagaatcccagggacgggggagcctggtgggctgccatctctggggttgcacagagtcagacacgactgaagtgacttagcagcagcagcagcagccttgaacactgccttgagctgaatcataaagtaattcagtattccttgaatacttcctccttaagtttattcctaagtgc

SEQ ID NO: 53845 - DNA, 2468 bp, Bovine  19866880761406
  misc_feature (1)..(1): n is a, c, g, or t
ntctgttggaatttagacacacattcctccatactactctgtgaacgagcccacccatagggcaaagtgaaagaaagtgaggtcactcagtcatgtctgactctttgcagccccatggactgtagcctaccaggctcctccgtccgtggaattttccagggaagagtactggagtggcttggcatttccttctccaggggatcttgccaacccagggatcgaacccgggtctccctcattgcaggcagatgctttaccatctgagccaccagggaagtcccccatagggcaaagctaaagggaaataaaagttaaactctcccttactgaggctgactctcttccacagtctacctgctttgtttgttttctaagtgctcaaaacaaaaatagatgttttgggttcagagtttttagttgtaatcaggagggatggactgcagtcagttttatacttgccacctcagcactgcaattcctcagggttttacttttgtttttaaagttaatactgtattttctgctccattataattcagtagcaaataattaggcaaaatcactaaaaagtttagaagttcacttgtatttcaagaagatacttataattttgcaaaggagaagtgaatagaggtctttgattagtaaagcaaacattaatggcataccctatgtaccatgtgtaaaataaaataatttcagagtttacctttcaacctagtgagcagtaaacttgcttcaatgaataaagaatcaataaaagatgataataagcatattatttgcaaaaaaggaaaaatttcctcgagtttaaataccattttatttaattaacatattaatgccccttcagaataattaatggcataaacacaatgcaatatttaatccaccctcaagtcaatataactttagtattagtggaaaaactgaattaatgggattcctatattttattagctaatgtgctttttttaagttttaaatcttatttacgaaaaatcctggtaatcaaatacataatttcttttttagtatttctcttagggtggatgatgtagatactcttttgaactctttttaattaaatcgcagataccaccagaccaagaagaagccaggagagtgatggtgttgaatatattttcatttccaagcatttgtttgagacagatgtacaaaataacaagtatgtggaagtttttttaaagaattttcatgaaactactgtttttaagcatgtggccatatatgtggttataagcaattccatttgaagtgaattttcacttttataatatttgaaactgataaaatataattcaattaatggttattactaacctttgcctttaacttttcaataacctagagctgttgtgtatcaggctaagttgaatgtgtagggattattttgaagagtaagggaatgtagctagtgtattcctgtcacgtcttcccaccccactatgctatgctatgctatgctgtgataagtcacttcagtcgtgtccgactctgtgtgaccccatagacggcagcccaccaggctcccccgtccctgggattctccaggcaagaacactggagtgggttgccatttgcttctccagtgcatgaaagtgaaaagtgaaagtgaagacgctcagtcgtgtctgactcttagcgaccccatggaccacagcctaccaagcttctccatcctaggacctggcaaaacttaactgcaccatctggtataccagttctttataaattccctgaaacacatttgttgtcacattgctcctctcctcaaaaacttttagtaactcactgttttctctataaccctattttctccccaccttggccaggccctcagccctgaccatcagtgatttcacttgtccctactaaatgccctttctcattctccatgttgacaattccacatactctccacagcccttcctccagcctatttgtcacaaagaaaatgggctatcaggccagaacccttcaacttctctctcctcttcctctcaacttatctactcactttcctccttcctgcctggctcagaagaagagctttcagtcctcttgccccaggctgacctccccacctgcctgggcctcagcccaatcttgcctgtctctcccaggccttgctctcttgtctgtacttttataatctgaccctctctaagagctacttcctcttcaccaagaatatatccaggtcttctcccgtctgaaaaaagggttccccaaatttcagcccccttatcatgttctcagcatatcttcacttcctcacttttcagtcactcttccacccaagtactctggcatctgtcactgtcacttacttaaatgccttccattaaggtcagcaacgaccaaataatcaaatgtattttgtactctcttgttcattcatgtctaattctttgcaaccccatggactgcagcatgccaggctt

SEQ ID NO: 53846 - DNA, 680 bp, Bovine  19866880838609
  misc_feature (1)..(1): n is a, c, g, or t
ncaatttcttgcaatgatctcctgaaaaatcatcagtttttctccacttctgctcctgctggagcacttcatgcattcttttaaaacaagatcagttttgggacttctgtaagttaagactgctctttctatttaacgaaagtgtttaccataaagttcagtaaaaacaaatccattcatttgctgttatttcttttaaaactatttacccatctctaattctgtatttcttcctaaccctgcttcttatttgtcccatgtttaagcaccagtgagcctctagatacattgcctattgtataaatctagcatgagattccatttgtttcaatattcagtcactttattaaagaatgttatgtaggtaagtacagctgtgtcaaaatatactgctttaatatttttccaaaaaataaaatttatacaaagagaacatttagaagtattctttcaaacgcggtacaggttaagaacgaactctgcataatctcaacatgtctggaatactacttggaaatattctctctgacagaaaccattcctgcttggagaattttaggttgcatagactcaacttaaaaaaataacattaaaatttcaaatccaattttccccttttcagaattatatttttatattcatttttatgtgtgcatactgtatttttttataattttgaa

SEQ ID NO: 53847 - DNA, 1578 bp, Bovine  19866880860094
  misc_feature (1)..(1): n is a, c, g, or t
ntaggtgctgtaacatggccagacccaggatgagatgggctgagtagtgagagatgaaggtggaggaccatggggatcacacacagtcttatccagtaagctatggagactggacttggtgcagttaggaagggtgtaaccaatgggcaggtccttttagaaagttctccctgtgatcaagcccatcttcctgctgtcctgtgcccagaagttacctgaaagccactaaatagtctccacccttgtccttgggtggagaccatgtgttgtttagaccacgtgcttgtgtatgtgtgctcagtcgactttttgccaccccatggactgtagcctgtgaggcttctctgttcatgggattatccccccaagaatactggagtcagttgccatttccttctctaggggatcttcctgagccaggaatcaaatccgagactcctgaccactgaagccacctgagaagtccatgagtgagcactaattaaaggcagtgtcctctctctgtgatcttggaattaggaatcagtggaattaagaattgtctgctgctcccttctaaacggcagtcaagattaagtgggcagtatccatagaatttggtctctggtgagagaggaatggaggagacatacgggggataaagacagctcagggtggctggcttcacaccctgtccttcacgggcagcctgacaccctgctgtgtgcattaccttgcctctcccttgagggcttcagtgattggtaactgcagagaggagagaggggcctgacagctgtgcatttggtctagttggtttcgaaagttcagggtgatggctgtgtcctccagaaaggcctcatggttttaagtgtgtacaggccagagaacttttcagttctctctgtaaagttctcacggctctagggagcctactttctgagataccaggaatcaggatgtggtttgcaaatcttcctcattagacgttagagccatattaagaaaatgctatcttggggggattaaatttcatgtgggaaggaaatataaaagctcccaaatctggaggacattgttttgaaggttctgtttgttcctttgactgctgaaagttaatttcttaaaggattcttatttttgagggaggtgagcttagtagcaaccctgaggtgattgcaggatgggttgtctttttcttttttcaaatagtattttatttttttaacttaatttttattggagtgtagatgctttacaatgttgtattagtttttactgtacagcaaagaaaatcagctatctatatacatatatcccctctttttttggatttccttcacatttaggtcaccatagagccccgagtagagttccctgtgctatacaataggttctcattaattatctattttatgtacatagtatcaatagtgtgtgtgtgtgtgtgtgtgtgtgtgtgtgtatcagtcccagtctcccaattcattccaccaaccccttccccttggtatcgatacatttgttctctacatctgtgtctctatttctgctttgcaagtaagatcatctatgccatttttctaacacatataccca

SEQ ID NO: 53848 - DNA, 667 bp, Bovine  19866880939501
  misc_feature (1)..(1): n is a, c, g, or t
naattcctaaaaaaatgtaccccattttatgtcaggtaacactttgtccctgttctgggtttttaaaaagtagaaactcagagcaaaatacattggaatgcagggaaagttatttgatatagaaaatgtgtagtctagccaagaagtgattactccagaaatcctcatggagaataaaggatttaatgtgagacttgatattttggaaaaacaaactgaggattaataatatccgggtgatgtctcccaaaaacaccaaaggaaacagtgaagacgtcttaaaagaatggcttccagatgcctagtaaatcatgtgtctctaccgaatgagaacatgactagagggggatattacttattttgagaaaagaagcattctttgagtgactagtcgtcttttgcccgtcaactctataatactattaaagatctaaaagccaagagtattacccttttcaaataatgaaatgatggatacattatttgcaatgaaaattagtttaactgcacagtgtgatttatttgtaagaaaataagtaagttagggttttatagtgagatggattgtcttctttagtgactgtaatacatctcggagttttgttaggtggaggaaggatgattgtaaaaagagaggatgggaaaaccaggatggggctcagtgctt

SEQ ID NO: 53849 - DNA, 1377 bp, Bovine  19866880945415
  misc_feature (1)..(1): n is a, c, g, or t
nttatttactgtcaatcagataacctcgggctgtgtttggcagtttacctccacacgtcattgagacgtcatttaaaacaaatgattgcatcgagactagtcaggctttatttactgaagcttatttaaggcagtttctactgaacatgtaccaaaatcagaatattggcatcagatttccttacaaacattgaacatttattttcaagatgtgaatgtatataaaggtacttagaactttcctataagacctggttacctctagaaatgatttttattttaaatgacttctcttctgtttagaaatataattatagaaaacaagcccttatgaaaactatttaatggagcataaatatatatatgttttgaattgtccttttttcttaatagtgtgttgtaaacattttaacacatgccattccttattaggattttttttgaataattgcatatatttttaacatgaaattaatgtaaccagagtttcctcttctgtccagttttttttaacccctagcttctttctatcttcagtttcttccatttttgctctcttattcttcaagggagaaaaacgaagtacacttttattatgtagttgaatctgcaaagggaaatgtttagttaaaataaatgagatttttcagatttggtaatccattgtatttagtaagggatgctatttgtcttattgctaaaggacatcttggattatttatctgtcttttggattccagaatgttacccctcaggggaacttgccaaactatatatcaacgtgaacttttctggggcattacagagtgaataatataaagtgatgccatgttatctaatataaaagccactggtcccataggaatgtttaaatgaaaataaaaaattcagttcctcagatccactagccgtgctcagtccaggaaccccatggccagtgactcagctactgagtcagggcaggtccagcctcagaatgtttctttgtgaaccttggggccacgtctgtacattttacctgtttgtatattagagttttttacatcagtttggttttaaagttttgttcctagtatactgggcttccctcgtggctcagtggtaaagaatccgcctgcaatggaggagatgtcgctttgatccctggctcaggaagatcccctggagaagaaaatggcaacccactccagaattcttatttgggaaatcccatggacagagaagcctggcgggcttcagtccatggagttgcaaagagtgaccacgactgagctactgaataacagccgttttaaatactagtaaaaaaacagaatttcaatatgtttggaaacagtgaacagttcaaaattatttagagtaatttttactttgcta

SEQ ID NO: 53850 - DNA, 763 bp, Bovine  19866881038848
  misc_feature (1)..(1): n is a, c, g, or t
ntagtctttttgatggtgaatatttttatactaatatttactttgataattaaaaagctaatttagaaagctctaatagaattttatagtctgggtttcttcacgaagaatttggcaagctcattttctttattctgtaatgtgaatcagcaatttaaacgcttttaagaattgaagtgagccagtttttcaaatgtttacagtatctgtttttcttgttaatatatgttaaaatatgcttttaaatcactgatcttgctttatagagaatggggtgggaggggaaatgcactaaaaagtgagtttaaacccattgtgtggttcttctgatttctgaaaaatgtaaatgcagtgtattttccgttattaggcagctgtggtccaaatttaaaccacatggcctccttctaggtgtcaggccaatgtaaattttaatcttgctacttttatattttcattttataatctcattacctgaatttaaaaaacccggtcatcatattcattgtttgcagggtgctgttttgtatcctctggctcattggaaggtcaagcaactctaaattgccattatcttcatttgcacttaaggaaattaaggcttaatgaggttaaacaactagatcacagggctagcaggattagagactgagccaaactctagagcccttgcttttagttattatacaatagtgcctttactgcttatttggggataaacattactgaaaacagttatttaaagaatcaatattttttcaag

SEQ ID NO: 53851 - DNA, 2868 bp, Bovine  19866881073152
  misc_feature (1)..(1): n is a, c, g, or t
naccaactgaaatattactttaagtaatgcagcagagcaactctgtcaagacacagggagcagtcaggggtgactctacttgctttgagtgaagtatcacgtgcaggacagagtccctggtcatcccagtgtggtacatgtcccttcaagggaagttctcccctaacatactggaggaagggtgtgcatccactaatgcagaaatatttgtgctggtcctggatctgtctgtcctgggatctagtcctctgtactgcggcagcaatgagcccagcggaccagttcccaagctgggagtggccaggcagatactagcaggagatagggggaggaaggagggagaagccagggtatttctcctgctccctttctgtccctgggaacatctgatcaacagtgggacacttctggttcctctgttattaccttcaccttttgcatcttcagtctggcccagggatggtctgttaacctctgggttgcctccctgtcttgctattgggcatttccgctctgctttcccatgggtgaccagttttctgcatcaggccctctgttttaaatattcaagtgatttctcttccttgaggaggccctgaatgatagagtataactcaaagccttagatcagagcttcagaaggatgggcccagcacatactgtcctactgctcttctgaaggcttttagtctgttacatatttattaagtgctcatgttatttcccctccttgcatgctcaacatctcttctatttatgattgaaagttacacttcagcttataaatggccttttttgttttctagttattatatcttggcatcgtactttccaaacactgttttattatattccacacttaaaaagccacctggatattctccgtttctagtctttttgttaaactatctttaagctcccttgcatgtttttgtaatgggtaatgcagactctgttacaacagaaaagtttcaaaagacttgtgcagctgggaactttttgatgatttcactttataagtcctttggaatgaacgtgggcattaagaagcacaacgaatacaatatcagtttaacaagattcgagtggccttatttttacggagacgttaacgtttctagacattgcaattccaccagtggctttctctataatgtttttaaaaaatggaatttagcagacatataaaatggaaaaaaacagaagagctgtcataaatcttttttactgaagtgttttgtgattgcttcacaaagaaacaagatgagaccgtccaggtgctatttgttaaagtgcggaggtgatgtttcagcatctcaaagcgatataatgaaagaaactaaggaacacaggtcatgtgtgacggcaactcaccagacaaatcaggtccatctggcttctccccaagaaataggaatacacaaggccaaaacaatgaaaagtgcacagcgaggcagaactcgccagaccttttccccgtggcaagtttcagcctgcccctgtcctggccacggtgctgccccgtgtgggtcacaacagggcaacctgagggcagctgtgcagaaatgatctgctatcttgtgtgactacctgctgtgctggccatgtcagctacttgcactacgaatgcatctccccaaagatcacatggctggctcaggacttgggccggaaaggttagcctcacttccccgcctgcagtctgcagctgataaaggcccagcgacttcatggcaggacccactgtactcctccatagacttgctttttctttctaggatctggtttagtgcagaggtccccaagctttttggcactagggaccggttttgtggaagacaatttttccacggacctaggggtggggtggggggatggtttggggatgattcaagtattttatgtttattgtacactttattttgattattattacatcagctccaccttggattgtcaggcattagatcccagaggttggggacctctgggtttagtatatagcttggatttcaccctctgaaaaatccctaaagattgtttaatatcttgactttaatatatatacatggatatttattaatttatgatatatacattgatatacatatctcaagcgctttctggattagcatgttctcactcactcttcaagcagctgtgtaatagtccttcccatggatacactgtttaaaccactgccatattggtggatgaagcttctcaagtggtgcagtggtaaagaatccacctgccaatacaggagatgcagacttgggtttgatccctgggtcaggaacatcccctggagaagggcatggcaacccactccagtagtcttgcctggagaatcccatggacagaggagcctggtgagctacagtccatggggtcacaaagagcctgacatgactgacatgcactcatactgctggatggttcatgtatttccactttttgctatgacaagtgctgttgcaataaatatccatgtacattttcctttggtgatctttggtgatctaattccatagaatgaatttctaactgtgggattttaggccaaaaggtatctatactttaaactctgagagagactgatgtattttcttctcggaatatcatgccagtttacactcacagaaacataatgaagggggctactggtgactccaaaatccatttgtgtcctgagtgctttgatgggatgggtttgataagcaaatttagagggagaatgcaaggcatagttaaaccttcctaaataatttcaagaggaagaaagttaatgggagacgcatggcatttcggaggctaacgatgagagcagtaaggctgcaagaagaaggcgaggggaaggacgaagcg

SEQ ID NO: 53852 - DNA, 3226 bp, Bovine  19866881075427
  misc_feature (1)..(1): n is a, c, g, or t
natgtataataccaacatcctagaagccatttcagaacacatcatcccatttcagaacactttctaatcactaccaccaaaggtaaccactatcttaatttataacagcatagattagttttaactgtttttgtagttatacataatgtatgcatttgtatgtggtttctttctttcatgtaacattatatttataagattcatctgtattgtttcatatagttagttgtaggttgttatgtctctttataatattcagttgtgtaagcatactacaattcatttatccattctccattgagtatttaggaaatttctatttggggtctggtgagcatatgaacaggtttcccaggtaactaagtggtaaagaatctgtctgtcaatgcaagagacacaggttcaatccctaggttgagaagattcccctggagtagaaaatggcaagacacttcagtattcttgcctgggaaatctcatggacagaggagcctggcaggctacagtttatggggcagcaaaaagtcgacacaacagagtatgcttgagcacgtgagcacagtgttttgcttattaatctaagagaggaattgctatatcatagagcacacatataattttagcataagtagatactatcaaaccattttctgatgtgattatacccatttcactcccattagcaatgaatgacagtttcacttgctctatagtttgtcaacacttttttttttaatttgaagatactttattacactcagagttttcccattacttttaattgtaaactcttactagtcaaaaagaaaataaataataaaaacctatatcttcaggaaacttttaacaacatagttttcctttatatgcttgtcaaatttaaattattacaagttagatacattcagtcattacatgataccaggaagatcaaccttaaagatatcaataatgtctatactggtaagtaaaataatgataaaaaatggtatttcaattttacctaaaaaaaaaaaaagcaaacagattccagtttgttaatgatgggaatacagacttatcttcttaatcttggatattaaatatttggacttaaaaaaaataaatattcctgttctctcaaatagtggctgacattgtcttgggagcagactgcctaaagaaccagtctctcctccctcaagagggagccaggggtgcaccaagtacaggatcaaggagccctttgcaacatttatccccaagcccacggagctactactaagtcacttcagtcgtgtccgactctgtgcaaccccatagacggcagcccaccaggctcccccgtccctgggattctccaggcaagaacactggagtgggttgccatttccttctccaatgcatgaaagtgaaaagtgagtcgctcagtcgtgtccaactcttagcaaccccatggactgcagcctaccaggctcctccatccatgggattttccaggcaagagtactggagtggggtgccattgccttctcctagccttactaaattaaagagaacagaatctctttctaagcatcaaggtggctatgtagatgtcaccaagaccacatatgtgtactactgatgaaagatttttcaaattgctgaattgccccttttccattattttaaaaaatacttttcagctctagtgtaaaaagggagagaaattggaaaatatatttttataacacctccatcaccacccccaccaccaaaagggactccatttttatcacacgctgtctacctccacagtaaagaattgaggcaaaaaacaaaaacaaaccatgtgctatttctgaacaaagaattcagactacctaaattataattcatttcctagaaagtcaatgtattggaaatttcgatcagtgttcaaaaagagtattacccaaaccatccaaggaagacttgtactttcttagaccggccacacaaccatgaagtatggcttcagtattagacctggcaaccccaaacctctttttaaactgaattggttgctgtttacttaattaacttagaatttgctgtttggattaggctgtcaggtaacattggttatctaactatttagctgcgagtgtgtatcaggtatgaaatctcacatgtatgaaggaaacccagtaagtcatgctatcaaatgtgcacagagcacacatgtggatctgagaataaacaaaggtcaaaatatttacatggaatgttgacccagatttaaaaaactattttaaattaatgacatctttacatacaatttgttttatgaatagcctcatttgataattaaaaaaatatgcctttcaaatatttcataaatatataaaatttcactacactatttttctttaaacaggacatctaaactctctttagaaatcaacaaaaatatttttttttttctgtttcaaagtcacagatacgatgattctctgattggcagtgtcttactgcatgcaagaatgggacgcatattctcttatacaactatgcacatttctagtattttgagctgtataatttactcgctgaaggtcagtagtatcaaagaaaaatgagagatcccatctagctatttacaatatgagagtctttcttaaacttctttaaaaacagcaagattaggatggtatctggccaatgtaaagaaatattttgatgacagaaataagttaacattacatgaacagttttctaaagtacaatttgtagtgaaatttaaatatggtgatcaactgtacatatttgggaaaatgatcacattttctttaactgtatcagtaacatataaaacctacatttagaataggattcattcttataatctactgggaaaatgcaaagtcagataactggctccagaatttctggtgagtccagaaagaaatgtctgagaatttataaataaaattgtcctttgtaatcagtccttttgggtatgtaatcaccgttctaacaaggaaaggtttttagtttcgtatgtaataattttcaaagcctaccctcccttattaagcatttattgagtcactagtgtatgtactcacaaagccttctcaaactataacatgaaggccactcgctaggacagattttcagtaattcctttaaagagagattcttgagtgcacacactgtgactatactgtctatgtaagagaaaatgttgcacttttaggatagtaagaggaccgccttactg

SEQ ID NO: 53853 - DNA, 995 bp, Bovine  19866881106384
  misc_feature (1)..(1): n is a, c, g, or t
ncctggagaatcccagggacagcagagcctggtgggctgtctatcgggtctcaccgagttggacactaccgaagtgacttagcagcagcagcgtagcactttttctgtagtttgtatgtgtatatgggaaaaggggcttcccaggtggctcattggtaaagaattgcctgccaatgaaggagacacaggagacgcaggttcgatccctgggtcaggaagagcccctggaggaggaaatggcaacctgctccagtattcttgcctggaaaattccatggagagaagagctttggtgggctgcagtccatggggtcacaaaaagtcaaatacgactgagcaactacacgtgtatgtgtacatgtggcaaaagtctctgatcagctttacccaggattaaaaacttgctggttgcaagacaatgcctctgtatgtgtacttaaagcagtttgaatcttgagaatcaaatacttctgagagttataacttctttttctggcacttggaagtttgtggaaatgatgttgtaaaaatttggagtcgagccaaagataaaatcgtttatggagcaatggaccaagacttaggaagtttctacagctgatatagaaaccactttttctcctcttcctaatatggcttgtgatttgacttgagaagattctttttcgacctctgtgctctttccacattttgaatttagttcccagtaaggcccatcagagttgactgttttttagacgatttcatcagggtacagtgttcagggggaggaaatgttgggctgtgggcagtgaggagaggaattaatatcatttttatctgtttagagtatttttaaataggatcaaaatttcttattttggaattttcaaaatgaaatcatttcatttttaacatatacaaagttgagtataaaaactttaagctgaggttctcaaactttaccatgtctcagaatcactgtagggagggaattgttaaaattccagcggctg

SEQ ID NO: 53854 - DNA, 1791 bp, Bovine  19866881223730
  misc_feature (1)..(1): n is a, c, g, or t
ncctggtggcatctggcagttcgtgtgagtggaaagaccgtcacaaagcaacagcaaatgttggagagtgcagtgacctggaaatacattccctatcaaaagaaaattcaaatgtaaaaattagataaacagtgtattggccaactacacatcctcagatttcacccaagtgcctccaggtttctgagagttctgagagtcacacaggttaagcgatttgccttaaacctacaatcaatcaataaaaaacatacaaccgaagatattaaactctagaagcaattcactggcttacctgacagcatagcctgatccaaacgctgaggggtccaaatttgttttccattccagcggttctacaaaaacatagtttgcctcttggggatatttatagataaaactctccacaaacataataatttccttcactatagcctcattgagaggagtaacttccagggtcttagccccatgccccacagcagtccactgcgcagacctggtcagtgccacgcccatgggatcccacgatgctcaaacctgagctcagcacacacacactgcatcagagcagagagagagagacaatagcatccatcttcctagaggaacatttctcattttcaagattttaagctagtacttacccaacccacattctgcttgttcaccttagagacagattttttttttttttaattatccaattgctcttcaagtcaataaaatagttaatgttccctgaaccagctctaagtaaaactgacccaaggacataaggatttcccagtatctgcctgccctggaatgaataacttctttctcattttcagcctaagacagagaattccggtcaaaaaacagaaacataaaagtccaagagcggaaaaaaaagaatcggaggaggcatgccttctggtttgcagctctgctggggccagcgattataagagatgctcttttgagctggatcacacattgtttagaattatgctattaaactgaattttgttattctttgctgtaacatacatctatatctgtgcaatgatggctgatgaaagtttcccaaatgccctcagaattcataaaaaatagaataagaacattaagtaaaatagaattttaattttttttctgacaattcataaggcacatactgatggtattaatcaacatatttgagtaattcaaattccatacttcttgcatatatcctgcccagaatatttttatcataattcataacttgcttaagagaaaatgtgagcatgaatgagaacctttttagcctgtttatctaaattatcagaggattctagcattaaaatgtaaaacagaaattgaaataaatttcactttcgataaaattagcctttaaaagaggtatctgaaaagataacattatctgcacacttaaataagagccaagttaataaataagtcctgatatcactatattatggagctttgtctttttttcagataatctatacttgtttattttctcattggcaattaacactgatcattaaaacctttcacctggaataatagaagaacggtttaaaagttaaataaaaaatataattagcttcccgcttcccataattattacaaaagctcagaaccaagattttatagaaatggtttggagattttactttccttcctgtaaatccagtaacagggacatctagatcagaggtcctcgactgggcagtactggctgctgaacagcagtgaagaagtatcgtacagatgttttattatcaaaacgataggggacat

SEQ ID NO: 53855 - DNA, 1308 bp, Bovine  19866881263957
  misc_feature (1)..(1): n is a, c, g, or t
nttttataaaatctttaatttctaaaacataattgcttcaatacttcgagcagtggtcgtaggttatattcctgctaaaaacataaattatgattaaagctaagcaagaaactggcagccacatcctgacagttggggtgtaataacggcccagaacgaagaaccaggcgacatgcagactaagggccacccctccaggaagacatctcacccagcacaatgctccttcactccttttttttttttaccccccacacccattcaaacttctacaaaacaaagagatttctcataactagagacatctctcataactattcagcttcagtttttcattttggaaaaccagtaaaattctcttaatcaggataattttattcttcacttcccatcaccattaccccaggaacacaaaagaatatattttaatgcattataagccaactgagttccttaaaaaaaaaaatctagaatgatagttaataaaaaataaatttaaaaatacaagtagaaagatagttacgaaacgaaaggtgctttgacaaacgtataactctcggcacctaagtgtaatctatttcagctcttacatgggtgcctttatattttatgcttgaaaatatacgttagcctctttgtatttacatttgagatgactgctcccccacttatatatgaaaaccggttgtatctcatgatttcctgtttttaataggtatcaagtaaaatactctcttaattatgcttgaaactaagcaaactctcgtaaaaagtctggaagacagattttattttgattagccagatgctattgctaagagaggattctcttaccttgttggcaactgcaatgcagagcatcagggaaagagttttgacacttatgatattaccagaatgatcaaggtaatgttcttatttaacatcttggaagcttgcaacttttatcatattatgaaaataaattttagagaatacaagctatgaaacaagtaatagttgatttgaagaaactattaaagtatactctaaaataaaaaccaaccatcctaaaagttaaactcattttgcttaaataattatcaataattaggtcacttgaacagatactgtcatagaatactaaacttccttgctcacaaaactcatctaactgtattgtagttacttgtttaagcgtcctgccttcctgcaacaataaaccccaaagcttatccaaatcaggctttcaccatatgcctgtactacctcagactagtcattagtattcttaataatacggcttcaatgagtttagtagattttaat

SEQ ID NO: 53856 - DNA, 1653 bp, Bovine  19866881277916
  misc_feature (1)..(1): n is a, c, g, or t
ngatgtgactaagcatggtcacattagaacagttgtagatataaggcacatcaatatatcttaaatacatgaagacatggagggtgaaaagttcagaggttttgactgtttaaaatcagagtaaagtgtataatcagagggtgaaataatgtgaagcaaaacagacattttaactgcctcacaatgaatgagttcagtggcaaaataagaccaaaaatggggaacactctgaggttgcttatcttcttttcacctgtatggtttgggccagatttggagatgtggtggtgagaatcaagaatgtaataccccaaagctgacttgctagctgcctcacaccagactttgctctgaatgaatttcagttatttccaaaaatgaaatctcccaaaagatgaagggttttcatcactgaggatatttaaaattatactgcagccactaaagactaaaggttcagagctgaggctatcaggaaggtctgacacacatcagctggaaaatactgaccccaagtttcagatgtgaggtttttggctttatcaataaactcaaatctaaaactgctattgggaagttatcatttccaatgaatgaactagtataaaatcatgtgcttctacaagtgaagtgtcagatatagttactccccctgtattccatcaagcaaaattctaaagagagagccactttcttcaaaataactcaggattcactactagagacaatctagtaagatttgcctttgtaaattttataatacaccaaactatgttaggctatccatggattcttccaagatcaagttctactatgcatatataatatccaaataatatggtaattaaagaaaaaacagtgttgtttcaacatacaacatcaacttactttgagcgctgaagacttcgaggagagacaggttcatgaccttgctgcttgtcagcagttacaggctgctgtgtggccgactgtgaaactggtccttgcttaactactggagtactaacctggaatgtcagaatctggtgagacaggcttctaccacatagacaaacagcagtggaaactagataagagcaaaagttctgccaatgaaaactccccaattatttctgttcagtgatttttttaaaaggtaagaattgtcttaaatgttcacaataagattagtattagcgatacagccacacttaattatgtaaactattgtcatttagggcccaaatcttcagatccctccaagtctagttagtaatcttgaacaatataaaacatggagatttaaagaagaggaatcaaatgagtttccaaaggtcatgtagatagaaggaagttttgaggcttagatctaatttcttcataaaatggcccagggccaattacttaagccaaccagcttaagaaactagttctcctgattttaaaccccattttctttctaatatactgtaacatcttttctgatttactattacttctgtatcaataaaaataaatatattacaccacatcatacaaataaagatgcttaaaattcaatcacaaatgaagagaatgtatagacttgtctatcagagaatgagctatggcccatatgcaatttaactggagtgggcttcaaagagatggcaccctacagaggcagaccaagag

SEQ ID NO: 53857 - DNA, 833 bp, Bovine  19866881338998
  misc_feature (1)..(1): n is a, c, g, or t
ncaggggagcccaaggaaaaaaacctttttaacacagggaagagtactcaatatcttctaggagtctataatggaatatatatatttatgaatcactttgctttacacctgaaattaacacaatgtcataaattaactgtattttaatacattttattttttaaaaaaacctttaaaagtaaaaaaggagaaagaaaattctaccttttatgatttcaaatcaaatgtaattacctgaaggactgcatttgaagtggcacagtatttgcaaggacaacattcaaaatttgcaatctgtgattttgttgacttgttagggtaagcatataaaaccatattctagaggcttcttgatagatttccctgtgatcaccctgggcctctcagtcacagaaaggaataggcatgatcttaggctgggggtggtcataggagagggcgtggctggagagaaacccctgcgcctgtaattcctttattaacgtctttaaagtcctgtgcagggtaaaaatcagacggagctcactctcagggcaggatttccacttcttcccaaaggaatagtactaacaaaagttttttaaataagttctctcaagtagtttaatttttcctctgtataatgaggattttattgtttttctctctgatttgttcatctatttctttctgcgttgctttttcctttctgaagaaaggccagactatttccaatttaagctagcacctcgaggctttttgtaatcttgtagctgctctccttcctcttcttttttccttccccagagcttattacagaaggattgcagctatttcttaattttaaacagttg

SEQ ID NO: 53858 - DNA, 1485 bp, Bovine  19866881544850
  misc_feature (1)..(1): n is a, c, g, or t
ntggtgagactggcattccaggcaaatgcctccagaatatatacgctgaaccactgtacactattcaggagaaaatgagattgtgcaaggtactaaataagaactttattttattttaaagatgatacatatttatcatataaattgtgtagaaaatataaaaaagaaagtacaaaagatcccaaagactaccatgcagaaataacaatcattaaaattattccagggcttcccttgtggctcagtggtaaagaatctgcccgccaatgcaggagacacaggtttgatccctagtccaggaagatcccacatgccacagggcaactaagccagtgcaccacagctactgaacgtgtccctagagccctagagccacaatttctgagcccacttgctacaactactgaagcccatgcccccttgagactgtgtgatgcaacaagggaagccaacacaaagagaagcctgcacaccacaaccctgctcactgcgactcaaaacaggcccgagcagcaacaaagacccagcacagccataaatacaattattttaaaaaattatttcagctatctctttatgcctacagctagataaaaggatgtaaggataggtgagagagatagagaaatggatggatggatggatacatgcatagatagataaaatttctgttttaaatactatctattgatttagaacttgcacacctactcatccactcttccctttttgtcagctgtattattatattactgttatcaatatctataaaatatagatgattcccctaatgaaaattccactgttttgattgatcactgggtactttagtcagtaccctccagtttattcaagggaacaatctggctctgtaagtctgatttggtcaccttgcggttatttataagcacattttactctctcatcacttatgcacaccaattctaaaagatgacactcttccatgacttctcagcattccttctaacactctcaaacaaaacctttcagccttgaggatcacttacatcatactttcgagctccactgcacaagcaccaactgcttttgtgacattgacaagaagagcttggtttatcccgacaagaaggttcacgaggggctggatgccaccacatctccggatgatgactctgttctcgtgttcttggcagcattctcccaacgcaccaaccacgttcacaagcacttcctcgggctggtcagttaaaagtcccaccagggtttcgatggctttgtattcccgaaatctgagttcatcacaaagcaaaagagggtaggaagggaaggaaagaggtgaacagtgttatttctgatataaagttggctgatagcaatcttagtgataatattaatagctaaaatgtactaaatgctaaccatatgctcattcaatcattataacaattctgtgatatgaatactattattaccccctttttcaaaaggctaatctgaagcttg

SEQ ID NO: 53859 - DNA, 1167 bp, Bovine  19866881563897
  misc_feature (1)..(1): n is a, c, g, or t
ngagtggggtgccattgccttctccgatacctgcagtaggtatccacaatgcatgaagacactagtaagacctaacaggaagcagtccagttaaagatgctggctcacgtcttaggcaaggacacctacctgccctgctgtaacaatcaagccaggcctcagcaacactgcatccaaacacaaggacaataaagtatcaagactcaggagagtctcgttcagagtcaaaaacttactaaacagggaaaaaggttttactgtctttaaacacatacatacacacacacacacacatacaagaatttaaaaaagaaaacagaatgagaaatttctaccaacttaaacgtattgtaaacgcccagcatgatccagggctaatcagaaacttgactccctatttgagaaacgttttcaccaaaacttaacagagaatttcgcacactccttccttccctctccaaagcaaacattttaggaattacatctatgccataatacaggtagaaagtatcacaatatatattgtagataatctgaaaattgaagaaaatagataacaaagtatagatcatagatttacctatataaaccagaaagaaatctttgtttaagacagtttattttctattgctttttcaaaactatatttatacaaatataaatgattaatataaatataataataaattaattaaatcaacggaaattaatgacaagatgtgacactcattctcaaaataacatctcaaaaatacagaatacatgaagaagtgaagatatttccccagttccagaaaagtgcctctgtaaaaatataatattctgtacaggacagtagttcctaagagaataaacggctcagagtttgatgacagtcttcccgccgtgaacaattcgctcttctcacagattccagatgctcaagattcctgccatcaggatggaaaaatttactgtgagtctagagaaatttaaaaccaccattcttgtcatttccctcatagcttcattattagaacaagtctggggaagctattaacctacgttaaatgataaaaaagatgttctctgtgtccaatcatattagatgccatacacaaccaaaatatttagaaatcatatagaaaaagacttggggaagagaaagatagagattcaatttttttc

SEQ ID NO: 53860 - DNA, 1243 bp, Bovine  19866880172335
  misc_feature (1)..(1): n is a, c, g, or t
nctagacagcccttgtgttggcaaagtaatgtctctgcttttgaatatgctatctaggttggtcataactttccttccaaggaggaagcgtcttttaatttcatggctgcagtcaccatctgtagtgattttggagcccagaaaaataaagtctgacactgtttccactgtttccccatctatttcccatagagtgatgggaccggatgccatgatcttcgttttctgaatgttgagctttaagccaactttttcactctccactttcactttcatcaagaggcttttgagttcctcttcactttctgccataagggtggtgtcatctgcatatctgaggttattgatattgctcccggcaatcttgattccagcttgtgtttcttccagcccagcgtttctcatgatgtactctgcatagaagttaaataagcagggtgacagtatacagccttgacgttctccttttcctatttggaaccagtctgtttttccatgtccagttctaactgttgctttctgacctgcatacaaatttctcaagaggcaggtcaggtggtctggtatttccatctcttgaagaattttccacagtggatccactgatccacacagtcaaaggctttggcatagtcaataaagcagaaatagatgtttttctggaattctcttgccttttccatgattcagcggatgttggcaatttgatctctggtttctctgccttttctaaaaccagcttgaacatctggaagttcacgattcactctggtatctaggtctacctcattggtcctcttctctcagtctgcagtattaccttctgcagttcatctaagtttcctatctgaacccattaatactaaagacccagatccacctctgtcaccaaaggcagagtaaaaacaaacaaacaaaaaaaaaatcagatttgttgtatctggctggcccttcctctagaatctgacctttttacttatttagaaattcatgtcaattttcttttgtcatcttgaccttatcatttccccccctaatttttttcctgaagcattgccctcaattagaggcacttttccagtctttacagtagctcttataactcagccatacaattttctcttcatctcaattttctctctctgctttgggtccattattcttaaccttttcaaaaatctctgaactataccttacaaacataggtagtttacgtttctctggcattctcagaaaatgtagg

SEQ ID NO: 53861 - DNA, 728 bp, Bovine  19866880804164
  misc_feature (1)..(1): n is a, c, g, or t
nacacacacacacacacacacacacacacacacacacacacagtcttctacttattgtctgcttcaggaaattctatctgatagagcattaccattttaactttaagatttggtccctattaaagatgcaggtgtccatgtgagtgccaatacttgaagccagtatcagccatttacagccagcctctggtctatatttgagagcagtttttgataggctagaagaggaagaagagcatgatggtctggggccagggttgagcaaagggtgtctggttgccagcctgaaggcaaacttctttgtcagtaaatctatagagggcactagtttatccagccaagactgagggagctcagctgttcccagtcctttagtgagctaggggagggcctctgtgaaaagggtcaggtgtttggattctgtgtagaggagaagtgccttcctgagagtcacctgcccagctggacctgaggccctttaggagtcctgtgtttgctcacacccctgactgctcccaggtaaacaaatcttgtttctatctcccagaaaggcagagctccagcactgtggcagcctgttgttatagatactgatatgtgacttatcacagcaattgtcagagcaatggaagaaaaatgcaatttagcaccaactgctcgtaggggttgtgtgagaagagaaagctgctcaagagacctggagagggagctaggctttcggatttata

SEQ ID NO: 53862 - DNA, 3166 bp, Bovine  19866880883188
  misc_feature (1)..(1): n is a, c, g, or t
ncctgcggatctattgagaggccgtcaagtccatgaaacaagtaatgggacaaaaaggtttatgtttagatgccttcacaagcactacagatggtaaaagtggcaggttcccagatggctggctctcaacagaccagtgaaggttactccccctccaaatccagagaacgttttgccaagtaaggacatgaaaatacaaaaaaacaacaacaacaacaagaaaaacctatgcctttttgatctcccattaccatcattttataaaaataaaggtcagcataaagtctagtcattcaaattggatccaattagtgttaggaaaagctcactactttgtaatgaggcacctagggcatttagagatgggacaaatcagcaggcacttagattcataagggaagactgcagagaataattaaatcatgattaaaatgattaaacctcacctccttttggaagccttccctgattgcctcagccagaggcgatacctccttcctgagctcagaccaccttgcttcttccttgtggtatctcttgaagcccacttcatgttacagttataccacttacatgtagaacccttgactcaccctataaaggggaggaacaactgggtatgtgtatgtaacatttgggtatattgtgtaacatttcacaacaattgggtatgttgtgtaacatttcacatctcaggggctttacaggcatttactcttatttgttaaggtgagaaaatttcctccctgccaccctgctaaacttcagacctaaatgttcgactgcccagtgggcatctcaaatgcataacccaaacagaactctttccccccgaagtactcccaaacatacccacacacacacctgctcacgtatgtttctcttttcatttcatattctgtgtgctttcaaggcatttttctagtagtagtcataacggtcacagattagatgtatacagaccttcctatgttttggatactttttaaaagcattttctatgttttgagtaaatccaggaggttggtatcatatttacacccattttacaggttagaaaactgagactcagagaggttaaatagtaataacagaaattaacatctcagtgcctgctgtgtgtcaaaaaactgtagctagtctttatttaagagtaaagagctagggacagacttccctggttattgattgagtccccattctgcagaggtaatggaaaatgagggaaagtcccttggtaggagcagaggctgtggggtgtgtgttgagggggacagatgggctcttgagaagtaagccaggctatgaggcagagaaaaaaagctagtagcactgagcttttagtggctccattaggaacaggcagtggtcggactacaaaagtctttcttaactcccatcatctagcctgttccctgccatggaggctgtcagtaagaaaaaattagatcaggatcaaacaagtcaataccatgtggagttccctgattggttatttgcagatgattttaaattgttgggtgtgtacaaaaatgcaataggtgagactagaaggaaggtcaccttgacatatgcttcacattcagaggttcagaaggcggtacaggcttattgttctcttaagtaattggcagtgagttatctttgtgtttcctaaaggagatcagctgacttcaagctaggagactgacagctgcaaacacttcttcctttagttcatttggaggaaaggaaatctgaagggtgagaatgagtagctgcccccaccctcaacccaggggagaaggtgaggcttgggaagaaaaatcctggctgtggcaggatctgagatgaaaaggcctttcttggtagtttgaaaaagtctactaacctttgagaatcttcttctgctccctcagtgaatggctgcaattggaataggccaaactttcattgcctcagatgtcagttcttcagaaaatagtctagttgtgtataaaagtatatttaaaaagccagcagaaatgatctgagacagaacaagttttgttggtttgttttgtagttgtcaatcaagatgggctctgttgaggagaaaaatgctcagaaaggaaactggtggcaatgcaagctttcccaaagagggagaaacgctcagaaccccttccttctctcaccatggcaggagcttgctgagtcgtgctttcattaaacagttctgctttttaccactgcagcagaaatttgagacgaagaaataggttttggcaagaagtttaggcccagattatggtgggaaatagcacctatattttacatgtagtctttgtctaacacaatttgctatttgctatttgctcagatcactaatccttggtgaatttttttttctgacaaaagatgtatgtttacccaaggattactgagacatttgggactcagctggctggttcctgttcctgagctgggcaaccaatagtgatggcagcacaggagcagacacaaaataagtcaactggcagtcatacctctaatttcaaactatcgctcagcttcactgatttgaactaaatcaagaaaagtgaactagatgctgaaaactctgttttagaacatgtattttaaaaatgtatcattttccatttgcaagtatacccagtagtcagaaagctaaatgggattccctggcagatgttataattctcctgtgttggagttaatgggctctgaaaactgctgctgctgctgctaagtcaggtcagtcgtgtaggactctgtgcgaccttaagatggaagcccattaggctccaccgtccctgggattttccaggcaagaacactggagtgggttgccatttccttctccagtgaataaaagtgaaaagtgaaagtgaagtcgcttagtcttgtccgactcttcacgaccccatggactgcagcccaccaggctcctccgtccatgggatttcccaggcaagagtactggagtgggttgccattgccttctccaggaaacattctgctactgctaagtcgcttcagtcgtgtccaactctgtgcaaccccatagatggcagcccaccaggctcccccgtccctgggattctctaggcaagaatactggagtgggttgccatttccttctccagtgcatgaaagtaaaagtaaagtaagtcactcagtcgtg

SEQ ID NO: 53863 - DNA, 876 bp, Bovine  19866881056214
  misc_feature (1)..(1): n is a, c, g, or t
ntttcacatcagatgagcttttggcataagggcattccacttgattttatatttaaacattaataattcttaatatgtgcatgtctcttaagtaccacaaacactcatggtatatctttagaaaaagaccacaactcagatccaataaactaacaagtataagatacaaatccactctagagtttaaaaatgctagagcaccctggccagctgcctgtatcattccagcaattaactcctttatttcttaataaacattcaatttcttaaagctctcaaaaccacctatcagccccttctctggaccaccatgcagtatatagatgaaaatcctaggccacatatcaacatatgaatagtaatatcgcaagtatacagtaaatctgaattatgcagactttaattcacaaaaaatatatatatatttgtttttttataggtaagttctctcttctgactgacaagctttggttttccttcaaactggaaacaccaagtcctgagcgctgtttgaacagctgtactacagtggatgccgccttggcggttcattttagcaattcctcatcacatctcaggcagtttctttccattgagcctattcctgtccccctcccttcaaaatgatttagtaattaccaaaagggatgaagggccaagccagagcaatcaaatgctattaagtttcattgcatgtgtgtgtgtgtacatgcacacacagataaggttctcacttttacaaacatccccaaaaagtgcaagccacgacccacatctgttggaaaaagcgatgggaagggtctttggaaatagagtagaaatagcatttctctgtactaaagtaatgctcacactaattggggtactcgattccca

SEQ ID NO: 53864 - DNA, 691 bp, Bovine  19866881853171
  misc_feature (1)..(1): n is a, c, g, or t
ntacacacacgctttctgaaaaatcaaacaaaggaaatagaaaagacaagactgatggtttttatagtagagtatgagaagaaggaaggtttgcagggagggtgttgtttccttcctccattctttagccctgatgcctgattttcatgattcccaacctagtttcttttaggattagagaaaatacatcgataaaacatgtctactacagcccagaaggaagatatgaagaatatccacattataatatcacaaggataggaaaaagaggttagaatagagtaggctaaggccttgctacttcacgtgtggtcctcataccagtagcggcatcacccccggtggatgtttataaatacagaatctcagacccttcctcagacctaccaaattagaatctgacatttaagaatatcccccagtgattttttggtatgctaaagtttgagaggctagagcttatcccccaaagcattagaaagtcatttgaaaataaacaattacctataatttatatatatatatatataaaatttccccaggtccacttctctttgtattcagtataaaagccttaagtgtgggcaaaagagttgattgaaaggaaatcaggccataggattgtactgtttacctgggtttggagactcacacaaacctgagttcaaattctggccctacccctcggcct

SEQ ID NO: 53865 - DNA, 1506 bp, Bovine  19866880136732
  misc_feature (1)..(1): n is a, c, g, or t
ntgaacacccaggactgatttcctttaggatggactggttggatctccttgcagtccaagggactctcaggagtcttctccaacaccacagttcaaaagtatcaattcttcggcgctcagctttctttatagtccaactcccacatccatacatgaccacaggaaaaaccatagccttgactagatggacctttgttggcaaagtaatgtctctgcttttgaatatgctgtctaggttggtcataactttccttccaaggagtagtgtcttttaatttcatggctgcagtcaccatccgcagtgattttggagcccagaaaaataaagtcagccactgtttccactgtttccccatctatttgccatgaagtgatgggactggatgccatgatcttagtctactcaccaccaaaagaggtcacctctccctcttgtaggcaagattgtccctagaaaggaaagctgatggagaaactgaagtgggattatgtggacacctcttagaagctggattcaaactcaatcaacaagttcatgcttggtaagaatccctgtgactcttaattttaagcaaaagaagcataaagtgagcttttatttactgaatgtctagtgaaagctcaaaaaaattattttaagtattcacacttgtgagagtcccagatgtgatcatttaatgttcctcatattgacatctgagaaatagattaacgttcatcttcagaatcagtataaacatatgatactttactgtttaaaaaaaagcaatgctttgaaattatttggacagatgtcacactttattttgaatcacgggtatgatataatgaaagaggttttgaagtgatatttatgtagcttaaaaaattcatccattcattcaataaacacttgctgtgcataaagtcgaaatgagaccatctattctgcacagctgatggccgtcccctccgaggggagagggtgggccaaagtcagatgacaccacctcctgggctgccatgagctttgctctgcactcatccaccagagtaagggaacagcaaatcttgagcttaaccactcacagttaaaatatctgcagcttgactaattttcttgtaaaaataagtttcttttctaattaattccatcattgtctgcctcatttcatgtcatctcataaaggataaatacttggctcaagatcactggcctcttatttcccttcaatacctttggaatggaagttccactccagagggacttggatgccattgcatcttaccatatcatagatgggataaatgaatggtgcttcttgcaggagagacgtgctatgaggaagaaagaaatgttctctatttctctgaggagctctcagtccctctgggagtttctgtgaaaatcctagagaggagtccagtgctcgagggtgtggacagtgacgtcctggagagaagcccaggtggaaacagggacagaaacctgctattattacgtctttatctcctgtgaccttacag

SEQ ID NO: 53866 - DNA, 1692 bp, Bovine  19866880687637
  misc_feature (1)..(1): n is a, c, g, or t
nctgtgccaaagagtgacagcaaatgcaggttggccaactctcagggtaagggtgtggtgggcagtggggaggagggggactctgatctagatgtggcctccttgtggtgatgcccccatcatcccagcccttcagtcggctgttggcaggggttggagaacgtcgaaggagagggaggagacccccagctcccatcagcattggctgccggggctgcccacctccactgtggggaagggaaatgggcagtcccttgcaatattccctctcttctgtgaagagaagtgggccatgggggtccccacccatgcacgcaggcagcccagctcgctgcagggtgggagggcatcactgcatctctgcccacacacgggcagagaaccacggccagtgcttgggggacagcccgaccggggctctctggccagtgggggtcctctgtccctggtggggtccaggagggactccagacggtgcttgtggagtaaccagaagtactgctcagacataggcactgccacctaccctctccatggggggccagatgcagctgaccctgcccaggggatcccgccctgggatctgctgcccgggggcccagacatgccatcagttcacagggggacactctatgccctcacccatcaccacgtcccgccacctccagggtcccttgctgccctcatggggcctgatcacattgcacacagacccggccgcggtcaccggggagacgaggttgcagtggctccgggcagagggctgggctctccgcacagagcctgccttagtaggcgggcagcttgagagcacgtctgcacatgcaggaagatgcgcgtccttcgccaggacccggggccagctctgtcggcataactttttaaatcagtgacataagtatctatcatttcactatatatgaattttttaatatttccaatatagatgatgctgaatgtgggattttcatgagatatgattccacttagcctgggggccttttgattcctctgacgttttttttttatcaggtttcatcagctttattggaaaacgggctggggccttattggaagatgggtagaaatttgtcaaacacttagccatgctcagcatccttggctgctcagacataacatgtgcagcaggctttggacatggagagaacctagaatgttctctgctagggaagaatctgtggataagcataaacacagaacaaaatgcttccttacatatatggcaactcatacaggagaatgggagtttggccaaaaaaggcaggtatgattataatgcttctattagaatcaatgaaaaccacaaatattttcaaactggaattagggagaaccgagacaggctgaaaatctttcttaaatgaacaagcataggagagaatttctttctttaaagggaagaggcaggagagacctgagggtgaatggaaattgtgagaccatatctaggtttagaatgtggggtgaagcggggaccagggggtgtggggcaggacagggcgaggtctcagaaaatgcccctggagtgggtttcaggggaccggtcaccagcctcaggcttagagcgtggggtgaagtgggaactggagtggtgagcaggccacagcaaggtctcagaaaatgcccctggggtgggatttgggggaccgggtcactagccttgagcactga

SEQ ID NO: 53867 - DNA, 881 bp, Bovine  19866880732715
  misc_feature (1)..(1): n is a, c, g, or t
natgtttctcatctctaaaaggcagtcgacccctccccccctcagaggtgtgctatcaacggctctgtgatgcttagtgcacagctggaactcagggaatgctaacaaatggtagctacttgtgttaacgttagtaatattaacttcaagggcaatttatgactaactgcaactcaggatcgtctaatatgaactataagtatgctgctgggactgccaacctttctgtgctgggcagcaagagcaggagtggaaaaatacagccaatggaactgacatggcaccaagagagcgggccttcgaacatcactcgttgcatctggaactgtttctccagtcaggctgggattgtctcagatcctcactggtcccacttggctccccaggaagcgggcagaggggccccagggagggatctctcagcagatgagctcccggccatccgacagtagtggatgttggcaacagtttcagcggctcatggagtggatggtacccatggtacccaggactgctgggcaggggacggtgcccagaagcactgcctggtgctggcatcgaggggagtgcctagtttgaagagctccaaccttattaagccctattggaaagtagttagtgcaatgaagtgttgagaattatctagctgacacaggaggtgttgatggccaattgagataatttcaatctttaagggaaatttcagtccttaattaccctgagtcacttcatgttcaagaccagcagatattttccaactttctttttccactaccggcgcacacagaagcaggatgatgataactacaaaacaggcaaaatttgcaatagacgttttctactctgagggtttttttttttcttgttcttatttttagaaa

SEQ ID NO: 53868 - DNA, 842 bp, Bovine  19866880738080
  misc_feature (1)..(1): n is a, c, g, or t
nattcatgcagaatatgatttcttcctgttatgtttgtgaaatggatgcaggatacaatttgtctctagattaactgcacacttctgctctaaagaaaatgaacttgaatgttttgaacataacccatccttgtgtaattatgggcggatggaaagaagggaggatggaaggaaggaaaaagaaaaaagtggagagggagggaggggagaaggaggaaaaaaagagatcgcgtccaccctagggcaatcaagaatttaaacatcagtgtgtatggaaaattacaagggcgcagaggagaaagcagcacagtatgtgtaagttgctgactcctctcctccatttgaagttcaagaatggcatgtctagagactttcagcaaagcatgtaggcacttatgaacaattatgtgccctgtggtttacttgtgtgtctgtaccttcgctgcattatctaatatgagaactaaattgagaaaaccaactaaattaaagctaatcagagcttcatcgaggtacccagctcagcagataatattccagtgctccatgcaattaaattcttcaattattctaagtgttattatgctaatttaaaaggctaggattattagaaaatgtataaagaattatgctcagttatagcgttttatttatgtgatttcacgttaaattatttaaggtatgaaaattataagagttatcagtatgtgacttcagcctgtcccactggggcagtcagccacatcgaaggggaaatttgtcccattttattctcttggggggatagactcacagctgaaggacaatggcttgcacagctcctgtcgagggctcatcacggg

SEQ ID NO: 53869 - DNA, 1831 bp, Bovine  19866880988916
  misc_feature (1)..(1): n is a, c, g, or t
nttgaaaataatgaatgtcagcgctcatgcattgaaaagaccttggcttttgtaattcactaaagcaatttctattcatttagttgagctaaatgcttattgttaaagacaaaagccccagcagtctgacactgagctcattacgtatgttagaaacgcggcaatccaaggccacgccaaatgcaactgagctggggactgggggaggggctgggaagggagggagaaagcgggggtccagggattaaaatgcagaacacaccgttctcctcaatgacttcccatttaggcctgattaaaacttcaaaacaaagctggttggaagcatcagtagaaagatttctgttgttgtcattaagtgatgggggtgatcattaaactccagaaagtttaatggggccccatctcagagacctcccgcagcggggactcaagtcccagctgatcctcaaaactgctggaaatgctagaggccgtgttgacaaacatttgcagaatagccttatgtagccacggtgagttttagaagataaattcacctcttttgtttaaatagcactgacaaagcacaaggataaaattccttgcattgatgtcggccaccgtagctggagaggacacttttgatggccctctgagcccagcatccaaacctcaggtgggccttcgtgcttggtaggaggaagtcctgctcctgcaaggcaacaaaagaaagcctcgtctcctgttatgggcaagacagcctccctgcacttggtggtcttgtcatgatggggaaaaacatgaccatttcttcctggagcagaaagtttcgaagttgggaccaaacatttgcacatgaacttctgcaagacaaaagtggagtagtttctgaggagaaaagctttattttttcagcttattcaaaaacagcacgtgacagctttactctcgagacagaacacgtgaagcccagcaggagaccatccagacgtagtttaagatgccacaaggatcttgacgaggttaccctgcaaaagttttcctttcaacctacaaaatttgaaagctacattttagaaatggcgaaacgtgtcattaaaataggcagagagtacagttccaacccaaagaagtgaaatgagtcggtttgagggatccgatgggtctgtcccagtgagacatctcaaattcagcagcaaacacacccggaagagctctcaccccaaaaccagggagaaaaatagctgcctcctccgcgtgggggagagcggctgtcttatcggtggccgagtgccactgacgggtaccgacagtgacacaggcaatccatcatgtcatcagcgccatcagggacgcggggcctccgctggcccgggatgcgagcccagaggcggacgcttaacccctgtgagcctccagcgcctgcagcctcaacacggccctgccgtgtgtgaggtctctgcagaatgacagcaaatccatgcgggccggcagtctgccgtcatgacgcccgggcacaccaggccgtcgtgacaagcgcgcaggacgcggcctttatcacgcgccttgtagagccatttaaggggtctcagctgagacccggcagcctgccaggcgggagggccggccagcgaccgccgtctccctctccgggaattctccacggggatggctctcagaggcccagagttagcaatcatgtgctgcaaatccacctgatattattgcaatgtgtctccatgttgaccaactctgtagatttatttatttttaatccccagtgcacaaatagtgagacacttgagttaggagatgcttctgtatacgatgtagcattttatcgtgtcat

SEQ ID NO: 53870 - DNA, 1984 bp, Bovine  19866881131865
  misc_feature (1)..(1): n is a, c, g, or t
ntacatgtgtgtatatatatatacaccccatatatatgtaaaatgccctccctgaagccttcagaaaacttcatgggtgacccgtggtttttgcccaactctgttagggacaccaggagaaatgtggtcataagtgtctgccagggcggaataaggactcgctctagcctgcttctcttcccacatgcttgctctctgcggcccacatgtgacgccgtgaggtcaccaccattgcgtcccccgtttcacggcaggagcagtggaggctccgacagcagggggttggagaggatgaagacctagctggctgcctgggcagtgcatgctgagtccgaggcctcctccttccgctcctcagtcttctcatccctagtccagtcccctcaccacagagccttcccgggcacagaaatgactttctgttgcagctgttcttcctaagtcaactgacagtttaaaagtttgcattttcaagatgcacttgaaaatctgcaaatggaaatagaggtgtctcatcactgtttaaaatgataacatttaggggcagggcttggtgagccagatgtcagaacagaacccttttgccaacaagagttggaaggtatgagaaggaggctagaaggtatgagaaggtatgagaatgtttgcaataggaaaagtgtagtgatttgtagaatgttgatttacataacttcagttcagtcgctcagttgtgtccgactctgcgacctcatggactacagcatgccaggcttccctgtccatctccaactcccagagcctactcaaactcatgtccgtttacataaacagtgagtcataaagttatatttatggaaaacagctataagattttaaatagcgataaatgctctccttgatattaaaatccaagtcttaaatttttcatttgcatgaaatgttaagataatataagaaacagagagagccatctgcgagcaaacaaataaaatatgaactgacaggtgagtgcaggaataaaagtaagacatttctgaatccccacgggctggtaacttatctggactcaccttctctgttagcacctccattgctgcacgaacggcagctttcaggcctggacacacgcacagccacgttggggaggttcaaaggagcttattaaagcccggatctaaagggcgggtctggagtccagacgggtgtagaccctggagttgccaccgggcaggtcctcccagcgtccccggcgtgcataccggctcccgtgttatccaattgctgactcacgttccaaaaaaacccaaggctaaccctcctgagctctgcaggtttagtctgatcgctgctgctgtttacacaggaagataaaagatggataccagaaattcacagcgcatttgctgccccgcagcagcgggcaggcccccagaaggcccgctgggacgtttcatagctccgtccagagcccgaattttaagccagggacccccaagctcaggccgcgcggcgcgggtccagggcgagggggcggccgccagcccggccgcactgccggccatgtttacctttattttaaagtcagattgaatgtgaagcactgaaaacaccctttaatcatttagctctaaaattcccccgctggctctccactccttttcagcatgacttttggagtcttttgatctcctgactgctccctatattagaagtctaatcctatatttaaacatatttctacatttcatcaaacagtttgatttaaattttccataacctagatatagccacattaatcgactgcctcgctggctctctggcaggcaggccatccattccgtctttaagaaataaggaggaataaagaacgttgaacgaaaatgacaatgcagtggaaaatactcgagcatttagcatcacaaaaagcgaacatttaaggcccctgcttccaaatgccaccctaattaaaggagcgttccttttcaatggcttttttcacatg

SEQ ID NO: 53871 - DNA, 2164 bp, Bovine  19866881265471
  misc_feature (1)..(1): n is a, c, g, or t
nagggggtgaataatcctagaacttccagaaaagtgcaaagacagttcagggagttcccatacccccttcacccaggtccgctgaagtcagcgtcttcaataactagggggcatttgccaaaactaagtaattaatgcagcaacactgtcagtcaaaaacaggctttagtggattttgccagcttctccatcaacgtcctttttctgacccgggatccagtccaggagcatttagtcggaggtctccaagggctcctacaacctgggacagcttctcagacttttttcatgacttggacagtttgaagggtttcacgcagatattctgtagaatgtgcctctatctgagttgtttgaggttgtgtcctgattagtctggggttgtaggttctagagaggaagagtctaccgtagcatcacatatcaggggcctgcgacatccacgcgataccagaggggatgcctgcctggacctgtgggctcgggtgcctcctctgtagaggtgctgggcttccccctcaagactcctggtctggaaaggaggcacaaattcctgctcaatctccagggggagccatggcaggggaagggttaggtccacttcctggagggggatatttatgtacatgatttggaattcctctgtaaagacatgcccctcctttttctttcattgtaaaatatattcttagatctagtctccttatttaatagatcagtaaaataaacatcttctacacatgctcttaagaaaaattgtttccttctccaggggatcctgactcagggatcaaaccctcatctcctgctctgataggtggattctttaccactgagccaccagggaagcccttagggaaagtgagagaaacctgactcactagcggagaggagcagcgccttgcacacgggcaggctgccgtctgcgtgctccctcgtcccggttccccgccaagcacgcagacgcgctgggccttcagatgccacgtctctgatgaacgcttcgctcagagtgaagggtcatggtcttctccgtcggaaagttgctttataagcctgggaaatcccttttggttctgaaatgcttgttttcctttgtgaccccccgccctgaaaggcagcaacctgctctcgcttctggtttaccttgaccagagtgagtcggctgcaggaacctcgacttgaaatgaaagtcctgtcactgaggtcctatgtcacagctcgagggtctggctgagcgttcacatcagccagttacgtctgtttggaggtcagcacagctgcacagccccccagccgggaggtggattctggagtgttctttgagaggcgtcaatgaagcagaagtgtgcgaagcgtggatcctggtacgggtgatattttaaacaattacagatggtgcggggccggctgtaactgacggcagcgtcagacccagaaaggccttgacaagctccatcctcctatgattaattactgcgcgctgtctcgggcactccgatttcctcccttgcagctcgcagccccagtgaaatctgtagctcgtattacaccacacaacacaggaaatgtcttttcattgccccatccaaggaccacttgcgcctggggaagttgctaggcaggtctccctctgacagtttggacctagagatgacttgacacggggaaccctgaagggacgcaaaataggggcagcccctcttttatttacttctccgaagtggatgatgacttacaagtcgagtcaggccgacggctgtccaacgacagcactgcctctcaggagaagaggcgcctgaaacagcggtggcttcaaggatgaaaactgcagatacatcctgcctctgctcacccgccctcgtttcaccgaggctgtgagacagacaacatggactcgtaccgtcagcccatggagacactgctttctgtacatcattcattttctcccccacgctgtgagaagcctggcgtctccccagcctgtttccatgagggatatcaggccaagggctccagccactcctccgagagtctggcttggtggtcagctgcacggggagcccagtggtcagcagatttctccacttgagaaaatgaacatggagacttcagacctcagcctttgggtacaactttgtgaacattttaataggtgtggctt

SEQ ID NO: 53872 - DNA, 1379 bp, Bovine  19866881323282
  misc_feature (1)..(1): n is a, c, g, or t
ntaaagaatgatttcagaaatcttttgagagagataaataactcaaagtgatgaattattgaatctttaggggatatttatttatcaggcagtcaaaatttaccattttaaagcccattccatttttctttcatattagcgtggttgtcttcaaggtgacatataaccacccaaactgaatatgcaatcaacttgtgccttaatatgagaaaacttgataaatctattacatttaaaaacaaaccttcatagtgttaagtctgaaaaaaataaaagcccaaacaatctgtaatgaacagggaaaatctggcttcattctgacccaaagtattctagatagctttatgattgaatcctacaccaggagaggaagcccttaaaccctcggacttcagactcctactgacaggaaggaggcttctttccaacatcctaagagacgttcttacaatcactcactgactcttgcaccgccaaaagcactactgcccagaccgtagttggatttagctcatgccttgttcaccagccctggcggctcagatggtaaagaatctgccggcaatgcaggagacctgggttcaatccctgggtcaggaagatcccctggacaagagagtgggaacccacaccagtattcttgcctggagaatttcatggacagaggagcctcgtgggctacagtctatagggttgcaaagagtcggatattactgagtgactaatacgcttgttaactataacttgacccattggatgatacaagctcaggtctctaagatgactaagactgtcctctaatgtctcttttgaaggaaaagcttacaaatagtttaatttcccagataaacagtctatcgcttggtttaagtgtctccagtgccttcaactatcttcgccctttggcagcccgcttcccccggccccgggattttcccttccatttttcctcctacatgtggctccccaaactggacacgctactccaggtgtgagataaacagcacagagcataaaaggagaacatcgaggagctcacttgtcttcttctggacactatctacttgaagaaaagactagcctggagaggaaggaaaaagatcacggctcaaaaaacaacaacccacaacagcagccttataatatgtgcctgtgacattagtctaggccaggggttaagtttcccagaaataaaaggggagctaacacaaataaagacgtctcttccctggtccagttgagatatcttctctttaactcaaccattaggaaccaaattccatgctaccacatcccacttgcacacacaaatagaatctctgctaatgagcccagggaagccctctatacctccagcgaaaacaaaacaaagcaaaaag

SEQ ID NO: 53873 - DNA, 1336 bp, Bovine  19866881667130
  misc_feature (1)..(1): n is a, c, g, or t
nttctttttttcctccctaaaattattgggtccaagaaaagtgcagcaattaaagtattaataactatcggaaaacttagctaaaaaaaatacagaaactctatgaatgcaatgctaaaattttctggaaaccttttttattttaaatattaaattgtatttcatgatactggacaggagaaattaaattacactgcatttaatgtaatgtcaacctaaatttcatcagtttttttcaacttcacaaaattattcttaagttcacctgcaagtacatacttgagaattactaggagtgtttttgaagagaaacctaatgaagaagaatttgcaataacagacaaaaaatatgaagttaaaataatcaaagcagtgtatatctgcactgagatgggcaaaaatgtcaatagaacagaatgaagaattcaaagctagtatagcgggtttagggtgtgatagatttgaagttatacattggtatggaaggaaaggattgttaaaagattgcatttaaaagactgcctaaaaatgtgaaaaagatgaatattggttgctactacattattgattttaaaataaatgtttaaaataaaaattttaattaaaaaaagacaaaacagtactattctgcaaggcaatataaatatatattttatctttggttgaatatttattattaaacattataccaaaaatagaaacagttaacaagtttaattgattttattatctaaaaattgtcaaaaattcatagaaaaataatattataatcagtgttaacggatagacagtaaattggcaaagcagttggtgtgacaaacaatagcaccttaatgttctaaagtgttaatagaagaagagttctcagctgctaagtcgtgtccgactcttttcgagcccatggactgcagcacaccaggcttcctctgtccgtggacttttcaggcaagagtactggagtgggttgccacctgggaagcctgtcccttctatatacgtacattgtttaattgtgcctttattatgtttaaagcatttatgttatatgttatgcagcatcacacacataatattatatttatatattatatgacacacatgtattatgctataatatataacatgatatattatgttataatatttataacatatttgctttattataattatatttattatgtaccatgtataatagaatgatgttgaatttctttttagtgcagcttctttttttaacattttattttgtatttggggtatactcaagtaacatgtggtgataatttcaagtgaacagcataggaattcagcagtacgcatacatgtatctatt

SEQ ID NO: 53874 - DNA, 1009 bp, Bovine  19866881707326
  misc_feature (1)..(1): n is a, c, g, or t
ngtgggagcagagatccagtcctccgtcccaacacaatgcatagcttcacaacacaaacaaggctccagatttgactggatttggtagtaaactattctacgtttcaggctccctaattcaacgaagcatatttgacttcatcttttcactctgactttgtcacttacctcactgaaaacatcggcacctccaacggaatctcgaggcttctttgaaaggactggcctctgttgtcaccggctcctgtattaattgtggcctgaactttattgaatttacccaagtgctttgctggagcgtctccaaacactaacaggcaaatgaaattaaacaaaaagggccagctctagttaagagcatcgtgtaagtgctttggagaccgggcgtaattaaggaggctgtaaactaagaatgccaagcacaaatgtcaccctcacctgagtgtgcccggcgaacgggggacacgggcagaattcatcccggagcgggacagcagcagccaggacacaaggctctttaacggaaggtgggcttcccagcaaggctgagcagacgtctggagaattctgagtgtgcctgtcagggctgtggagcgagactcactcatcccctcgcaaggaagccttccagctggacacagggagcctgggactcaggccacgtgtggatgcgtgtccaatggcttcaccctcagttcctggtccagcctgacatcagttttgccaaaagacttggacacaaaccctatagtatgcccctatttccagttgccaccccccgagaactgcctggaggcagaggtgtcagcctgatccgcccaggtcccagttcctaaccaacatttagaacatcgtcaatgctcagatggccagaggatgagtgaaggaggaaataaatagccagaaagctgcaagaaaaaaacatttttatgaaacagaaaataccttggtgatcaaaaattacacccttttctcatacaagtttccctgatcacttggtggtaaaaga

SEQ ID NO: 53875 - DNA, 2367 bp, Bovine  19866880607647
  misc_feature (1)..(1): n is a, c, g, or t
ntacagtcccttctgctctctcatcctgaatggcttcatggcaagttttctcggaagcttgctgttgtctggtatctagcctttcagtttccccaagacccccctcaaggatgaagtttctgccctcaggttgcatttcctgaattggagtgggggtgggggtggggtattgaaactggatccataacctgatcttcttttttttttgaagtatagttgatttacaatgttgtattactagctcgcatggtatcacttatatgtggaatctaaaatacagtaggtaacctgatcttaacaggacagggaatactttccaacatgggctgaaaagtgaaagggtcagtgtttgacatgaaggaggccctgcgtgtgcccatcctccgctgctctgctcaccctctgagaggaaaccaaacatgggggtggggggcagctctggggaccggtgcccactcagccctgctgcctggcatcctggagtcatcttcagttgtccttttccccatgcgccccatcgccacccacctctctagtagcctggctgcctcgccatctaccatgtcactgtactttcatgttttgtgattgtggttggccaccttccttgtttccagcccccttcttctctgcccccatttctcactggtggcttgcaccccctgtcccccactttcctctaggcaccctcatgcatcagagcccttgagatgctgaagctgcgctgtccactctcagtggggagggcatctcccccgcccctccatgtaatgagtccacccagaagggcaagctgtgcagtgcctgtaaaacatgggacccctggtccatgtacccacagtctctgctcctaggagattcggccgtgaccccagaaggaccgggccccagtgaaacatgggacccacgggtccatgtacccacagcccctgctcctgggacactctggctgtgatcccacaaggactggaccccagcaaactgcagacagcaagctgagcttgcaccctccttgctcagcctcccaccttccctttgccttttttgctgagttcaagttctcatgtaggctcccttgggcctcaggatgagttttcccctgggagattcctcaatcactcttaaaaaataagttttagggactttccttggtggtccagtgtaagactttgcaatgccactgcaggggccacgggttcaatccctggtcagggcaataagatcccaatgctgtatagccccccgcccctactcaaaaaagaacattttggaagacctgccttacctggtcatccctggacagatctaaccctcctacatgtgagctcaagtcaggtctacccctctgccctcctgcaacaggtgcatggtgttgatctcccagcccagattgcaggggcgggggggagttgggcacggaggagacatggggaggaggaggagtgtctgtcatccacagacagctgtgctgaggtttggggtcaggactgaagtcaggcatgtacgcccctactgccaagtgggctaggcgtcggccgccttgggccagagcgcccttcatatctgcagccatagtggcttccaagtatcaggtcaccgtggagcctcctgcaggagcagagaacagacggggccaccttggggggcctctggacaacacagactgtcctgagggcctgaggctccggatggggctctgctggtgacaagtttatgttgagcagcatgggaggcagccagtcctccctttgccttttttggagatggagaaataagggctgatgctttggggaaagataaagtggagaatatgcttctcattacacgggcacggagacagatgagaagggtcaggcccgggtctccgcggctgcggcttcagcaccaatttcctgcggcagggcggctccctgaaccacgcactttcccgggaatctgacactgtggactcagggcctgggaatgaggggcccgcggaggccagagtttatctccgcagcttgtttctttccttctctcttaatctctacccaccctcgcggcccctgtgcccctgtttctgttttcctgcgacccaactgtccagacagggctgtccctgccccgctttgtgcactgtctccagagtcctgcggctggacccgccagcccccacctcgttcatctgtccagtctgtgccacggctgcccggcgggcggacgagaatcagaaacctcctggcccggcctcgccccttgggcatcgcggggactcggtgaccatctgctttcaatgaagtgtgggtttcagcatgtagtatggaaacagaaacagaaaaaccattgggggtccctcctgcaaaaaacatcatcacccaccaaaagggg

SEQ ID NO: 53876 - DNA, 1156 bp, Bovine  19866880703202
  misc_feature (1)..(1): n is a, c, g, or t
nctggaaggagactaaccacaccccaatacatcacctgatcttctattgtggcaactaagtgttgtcacaatattttagattatttgcatacttaggataactaaacaaatatatcccttgtcattcatacctcaccaattaaagagagagcatctctggataactacttactgcacacaaactacatttctacaagaattgaatttagccagtactaatactatgatgtttcaagatgtaacaaaagaggggcacaaaaattcagctgtcaaaaatgttaattaaacagaacattctttgatataaattatagcaatattttttggatctgtctcctaaagcaaaggaaataaaagcaagaataaacaaatggggcctaattaaacctaaaaacttttgcacagcaaaggaaaccaaggacaaaacacaaagacaacctactggacaggagaaaatattttcaaatgatactaccaataaggaaagggtgaatattcaaaatataccaacagttcctacagttcttcaacatcaaaaaaataacaacccgattaaaaaatgggcagaagacctcaactgacatttcccccaagaggatatgcaaataggcaacaagcacaggaaaaaatgctcaacatctctaatcactgggaaatgcaaatcaagactacaaggagatatcacctcacacctgtaagaatggttatcatcgaaaagaacacaaataacgaatgctgatgaggatgtgaagataagggaatcctacactgttcgtgggaatgcaaattggtgcagctaccatggaaaacaggatggaggtttctcaaaaaacttaaaagagaaccaccatattcccaagcaactctactcttgggcatatatctgaaaaaaatggaaacaataattcaatgagacacatgcatcccagtgttctcagcagcattatttacaattgccaagaagtggaagcaatctaaccatctgtcaacacatgaatggataaagaagatgtggtacacacacacacacacaaaacggaatactactcagtcataaaaaagaatgaaattttgccatttgcaacaacatggagggtattatgcttttaagtgaaattaagtcagacaaacacaaacactgtagatatcacttata

SEQ ID NO: 53877 - DNA, 1831 bp, Bovine  19866880837356
  misc_feature (1)..(1): n is a, c, g, or t
naaaactccgaaatggctcgtaaagagaagatgagtcattcagagactaaacagactttataaaaagatgtgaaagtgttaggaattggaagacacttggcatcctgaaaattgtcttagaaacaaaccagaactctttcattccctcattcagcactttttgaacatcaaccaggcactggagacacaaaggtgaagggatccagccaaacacaaaccctgctttctttgactttaccaatgaagaaagcagatgctctcactgatgaaaacacacatattcaagtaggcatcggcccaagaagttcatgtggaagagtaaatcacaaatgaatcaggtctacttggggcagagagggatggatgtgaggcaggctttccatgcagggccatctgagctgggatccaaaggggaagaggagtggagctgggtggaagaatccttctagagacaggggacagcacatgccaagtcctttggaggaaggctcatgcaccttccagaaagagacagagaattagtacagctgaagaatagagaaccaggagaagtggggttcaccgaggcagggcaatgggaaaggtccagcaggcaatctggagggtcacggcaattatctgggctttcgtcccgagagcagtaggacatcacagagcatcttttgcttaaagtagggatgggatgtgaccaggagctggactcttcagataaccaacactcaccaacctgtgtgcccaaacatttatatttttactttctttgaaggacgaagacctggatgaggctggctcttatcctttctgtccattcttacacctctgaacccttaacattatttcaatggtccaaggcaccaaaataccatacttttaagatataaaggctgcttgtcctgtgttcagtgatcctagaccgtttttctcttttggaaaaggattttaactcttcttttccatcatgccttcctctcactctaattggatgcttccaatctattgtggaacgaaaaaccagagaaccaaattgagaggcttcagctgagctgaagttcatggtctttgtagctccccggctacctcatgggtttcctcctctgccccagtggttcttcagatggcagggtggctacagggagctctaattggtgcattacagttgcactgtccaacatggtagccactggtcacaggcactattttaaatttcaattcgtcaaaatgaaataaagttaaaaaacttagaccttagtctcaatagccacatgtcaagtgcttaatggtcacatgtggccaatggccaccatatgagaccacacggatgtgaatgcttgtattatcccaggaagttcaattgcacagcaccatctcagagtgttgatggagaccataaaccagatggtgcacactattgtcattcatattttttaaacatctctctgacagtcactccaggcatgtaccagcctttctggttccttcaagtgtacaaaaatacaatgtgtaaattattcctttcagaattgttataattaccgtaatgctattgaaaaaagcactcagggatctgctatttccagcagagaaagactcaaagctaattaaaattcgacagttgctccctggaaaatctgagcttgattcaccttcccacagtgtctccaaatagatccctgtcacacacatgtcacgcagccttaataatctagctgagaaatttcaagacacccgcatgagccttcctccatccatatctcaaccaggtacttcaggaacctgagaccttggcacaaaaaatgctcattttctgggggggaaaaaaaagcagtttgtt

SEQ ID NO: 53878 - DNA, 2463 bp, Bovine  19866881082249
  misc_feature (1)..(1): n is a, c, g, or t
ntgctgtattcttttttaaaaagttgttttttgttttttgttttttttcctggaactgatttgtccaaaacagatctggggacctccttagtggtccagtggttaagaatccgcctgccaatgcaggagacacgggttcaatccctggtcctggaagatctctccaagctgcagagcaactaaacctgtgtcccaccacaactcagcctactccctctagagcctgtgctctgcaaaagagaagccactgcaatgagaagtccacataccacaactagagaggagccctcacttgctgcaaccagaaaaagcccatgtgcagcaacaaggacccaacacagctaaaaaaaaaaatcaaaattgagatttgtcctcttcaagccatcatgtgctaatgagataggacattgtcatgtggcatctctttccttaccacccctgtctcttcactgagtgtgtgggctggctctgtggtaaaggatgagctgctttgcctcggaacataatgacctgtgaacatccagtcccacagtatgaaggtgattcccatggctacccgtcccagcaaggtaccagcactaactctcagagctccctccaccttctcctgagggtctcttatgtagaaccccactgggtgagatgctttggatgtcatttgggtgtggtttcatgcccatcagcatctcggggtggggggttccactggtttccaggctgagattgccatgagatcctcgtttctcttacaactcatgtatactttcaaaagaagctcccatcactggaggtgactggagatttcattctagccagcagaaaaattgaacaaggctcttgtctctaaatattctctacttgcacacaaggcaggtagtgggatcttcctttcctctagttgctgactgagcataaattaatgccgtttacatttttaggaatagtcatcagctcatgattcatgatgaagaaaatgttcctatctctcctgctctgtaagggtttattttggtttcctggttgtttatgttgaaagttccaagattcacggccttggctaaatctgcaaagaatccatcatctaaacagcacctttctctaggtctgtagggtacagactatttatttttatctgaaagtgaccagcattcatttcagcattggtcccagatgtcacaccctgaaaagctgacctagccgaggagtagctatgcctctctgctcctaaagtgagaaggatacagcctgttcatgctggaagacagtggaagccttggagctttgtgggtgactaggtgctgctctttgagcatccgtcctgtacaaattctcaaactggccacatgaacctatcagcttggtctagtcgtgtgtctgtattgcactactttgcttgtgagtggttggaggacccctagaattaaggttaataggaaagctcctttaggacttccttggtggtctggtggctaagactccgagttcttaatgcaggggcccggggttcaatccctagtcagggaactaagatcccacatgctttaactaagagttcatatgctgcaactgaagatcttgcatcctgcaacaaagatggaagattccacatgcttcaactaagacctgatgtaggcaaatatatatatatatatatatatttttttttttttaaagaaaggcttcttcaccttgagttgagctaggtggtctaatgaccctcacggactattcacacatggtcccttcccctgccaggcacacctagagtggcactgcccatcaccttgcgctcaggtagagctctagccagtaaaaatgtgagcaaatgcctgtgagtgccggtgtgcaatgtgctacaactgctcctgacacagcaagtgtgatgcttctgattagtggtaacctgagtgaaaggaggctgagcccatctgccctggacggatggtgtgagcaagaaattctctttgttatgttcaaccattgacatttcatggttatttagaaccatacttaagcacaggctctcttgggccatgaaatacacagactcaaaatccaaggttttctaactctgacctgaaacccagaagcataagagagaaaatttacagatgactatatttttaaaagtcaaagggtcttaaatggtaagattcaaaatgcagaaagcaacagagggaaagtacactgaggggaagatgtttggagctcctggactgaaggcttgtttctctgtactcggatcatgctgttcctccacttaaaatgctgttcccacagagagactcatggctcagactctcacctgctcccagaatcagctcaaatgccgtcttctcagagaggctttcctgaacttgaaattctcatgctatggctgtcctttcctttctttattctcctaatgacgtgtccagtgttgtgcccatctatttatttatttaggtctgcccactccatccc

SEQ ID NO: 53879 - DNA, 718 bp, Bovine  19866881222923
  misc_feature (1)..(1): n is a, c, g, or t
ngaccgatttataagtgtacgctgagtaatgattttcctgggggcagcagctcttatgataaagtgttactgctccagctgcattattataaacaacatccaatttatgttgttagggagcagatgcatgtctcagtaatgtgtcaccatcatctagaatgagccataaaatctaggttgtcgtgtattttctggctgtacacttcaaacaattaatattcctataaaacagtcttgatcacaagcccaatttagaaattagttgttcaatacgatgattaaattcccgagctggaacttgctgtggccaaaggtgagtcgccaaacgtgacaaatcttgtaccacttcccagacggaaggagctgttggagacgctggggatttttggtgaattttaaatgaggcaccttcaccttcagagaatgccacggtcctgcccgccttccagaggaagatgagtcaccggtgtcttcctgtatccagcaagtcagtctgtggaggcggcagacatgcccagaagggagcttcaccttgacgcatggcagagtctaccctgctctgcccagaaggcctgagatgggtaccttctccagcttggggaagccaggcagagctgcaagactggcggacccagaatgagcactggggaaatgtaaagcttgggtgatatccctctagagtctaggccaccaacaactgggtggacagagtgacaag

SEQ ID NO: 53880 - DNA, 1496 bp, Bovine  19866881266087
  misc_feature (1)..(1): n is a, c, g, or t
nttttaaatgtgatcccttatgttatctgtgtgtatgtgtattcccccatcttttaagtactcagtggagtcaaaactaggctaaagacagtagatgaatacatttaaacctttttattcacagcaaaatttctaatcttttaggatatggtgccaagatatttctaaaagagtattggaaagatgggacttgaaacagtaattgttacaccgtgaagaatacatagtgtaaaatacttaatttggaataggccaactctaaattaatgaaaaatataagttataaattatcttttctgggtgtgttttgaagtatgacacattgaaaacttgctgtaatggatgatgtgaaataaaatggagcaaattaatgaaagattacaaattaagtcagtgttacattctgtgtcaccagaactcattaacgtgtcaggtacagtggaagtcatccattttgaaacgtcctattgcacagttcagttacttggcttaggttaatgtagcttaatgattaggattttaattaatcttcacttaacttacacaaggacttggagagtatatgagataacattaatatcatctctttttatctcaaaaactgagtaaaagatggattatgaagctggctgatgccttacaatgaatttctaaatttaaaaactgatttttttattcattccatgaaaaatgtgtaaagaatccacctgcaatgcggaagacctggtttgatccctgggttgggacgatcccctggggaagggaaaggctaaagggcttccctcatagctcagttggtaaagaatccgcctgcaatgcaggagatcttggttcaattcctgggtcaggaatatctactggagaagggatagactacactccagtgttcttgggcttcccttgtggctcagctggtaaagaatccacctgcaatgcatgagacctgggttcaatccctgggttgggaagagcccctggagaagggaaaggccacccactctggtattctggcctggagaattccatggactgtatagtccatggggtcacaaagggttggacatgactgagtgactttcacacactatattttgctatattagttttcttttttttttttttttaagtgaaaactgaacattgccttagtaataaatgagtaggttaagccttaagttgattgccagtaaaggtactatgttctttgcaaaaggcctgatgagatcctggactctttctgctatcatgccctctctttattaggacagactcccatggccaacattggattgacacctatgtgatccagtggactcatttattttttttaatgctatttttcattgagagcagaagatttgtctagaatatttaaaagttaggtagctgggaaaagcaaaagctaataaaacctatttttaataggtttttatcatattatataatatgttaaacatataataacataacatataataacataatagaggtgagga

SEQ ID NO: 53881 - DNA, 2017 bp, Bovine  19866881367808
  misc_feature (1)..(1): n is a, c, g, or t
ntgcaagccttggtccagcctctcttccctctccactgcctcctcgctcctgggattctagccacactgtccttttcaaaagtcccctggctcactggcttccgccgaggaaccagtgtctcttcttggaatttccccccatgccacctctcttttctctgttgatttcccagcatctacctcaaacattgtcttagtagagcctttcctgactcccagatgaggtcaagacttcctgctcattcagttccctagagttttcatccacaagtatgcatttcatccatacattagtgctcattcctgggtcgaatgctttctcctcttagaccagaaacttcatgagggccatgacaacactgtcttattcaagccatggccccggcacccagcagagaacccggtccagagtgggtactcaggaaatacttcattaagacacatggaagcaaatccaggcatgatgtacccgatgtgtgtgtatatatatatttacaggtttatatagatatatgtatttatatatatttacaggttcacacactatatcaatatttaaaatagataaccaacaaggacttactgtatagcataggaaactctgctcaatattctgtaataaccaaaactgaaaaagaatttgacaacaaatagacgtatgtacacgtataactgaatcattttgctgaacacctgaaacggtgaacctgtcaatcccaaactccctaactatccctcacccctcccacacacagaaccactattatgaccttggattcagactgtggggccaccttggcccaaagggactggagagaggtagagaccatggcacgagctgaaatgtctcccctcttttgagtgtgaggtggacatggggaccctggtggggaatgtatcggctggccttcactggttctaggaccatgaccacacaaggctagaggagtgggatttgatgaaaaaaaaagcccaactttctttctgccactgaattgtcagcttccactgtccagaagaaaccagccccccagggtagaattgcaggcttccttttaggttccagggggacacttaacaaagcctagtgggtggagggctgtctctttgatctctgtcccatccattcttcttaaaatcacatacccagaacctcccgccaatttctgatcttttgttccaactcaactagtgaacagtcataaattgctttgaagataaaagcgccacatcagtgcaccatgataccattattattttaacaagtggggtctgcacatgtctccttgacatatgagctgttcaaaatatttgtcttgtttttcaattcagctgcatgggaagaggacttgcatcatcccttgtgtatactcccacatctaccctacgtggagtgagcattgttttcataaaaatgtttgccttttccccaacaaaagaaattgatgcttctcacggggacaccactccgttagtcaaaactccagtaattattttcagaggcacatacttgtaaaatgtctaatttattgcaatgcttacaaatgccaataaaatgtataaagactatgacattcataaggcaaatgaagttcaggtcacactgaaaaaagtttggtgcacagtgagaagaaatacatatgtgaatgtaataatgggctcataaacgaacatcaggatggattccactcagagaggagaaacagaataaagcgttttatgctctagatctctttttttttggctgtgctgagtctttgttgctacacttaggcttcagtagtcgtggtacatggaagtagttgctccacagtacgtggaatctttccagaccaagaactgaacctgtgtcccccgcattggcaggtggattcctatccactgtaccaccaggaaagtccctctagattcactatttttttaaaaaaatgttggctgcactgggtctttgttgcttttgcgtaagttttctcccgctgtggccagcagcgctgctcttctctgcggcgcacaggct

SEQ ID NO: 53882 - DNA, 1339 bp, Bovine  19866881504133
  misc_feature (1)..(1): n is a, c, g, or t
ntcacaacttccgttgtcatagagaagagggaataagacatttgaagtaggactttcttcctgctctcgtttactgcttccctctttgttttgctctaggttgagaacagaattagactcttaagtcacctctgtttcctagaaatcccctggccttagaagtacagctctattcgcttccctacagcctgctgctgccgacagtaggaaaatgcagcatttacatgtgagttaacacctgcgcagggaacacccgctgcgaaaccagcagacgagctgccaagcagccgcggctggtccgggtagcagctctctggtccaccctccagagcttggtgttcagtggtgagtagctgtctgctctcggttcatccccttcaggaaacactgtaggagtggaatattcaaaatactgtagcagggaagaactctttactaccagagatgatcagagaaggtttcatcaagtaggacggtaggctttgaagggaccatggtctccgtcgaccagaggagagacatcaggattatcgttctgggaacagaagacagtgtgaataggtgtcagggagatgaagtatgtttggagaaggggcagtccagacaggtggggtggagtttttgctgtgatgctcagagtcaaggtttagagagattgtgaaggacggcctgtggcaagttaggaggttgagtatattttcagtggtaaagcattgaagatttttgtgtatgagggaaataaacattaatcagttgcttttttaggtgactaatctattaataagtgtagttatcaggtgccactccttttttcttagcaaatttgagtactttaggtcccatcgttaagttagataaaatttggttgttaaatttttcacacaggtccagaagctgaccctcatacacctagcaagagtatttcacaagaaagttaagactaagtggtttaaagctattgcaccaggaaatatcatcaggtcatgacatatgattttatgtaaagccttactaatgagaaattctttgcagtatatacttgggaaggaatgaaaacataaccagaaatcacttttcaccttgggatgatgttggaaaatttattttaaatacttgaaaggcttattttagtttccatgctgagctcaattacttgtggatacatactccagcgagtataaacattacagtgttcctctggaattcccgtggagcaactcccagaaaatgtctgttttagatggaatctttaaactgaaatatctatgacacaggatatataaatcaacacaaattatttttaaaatacactatattttaaatggatcccttatgttat

SEQ ID NO: 53883 - DNA, 938 bp, Bovine  19866880392046
  misc_feature (1)..(1): n is a, c, g, or t
naggggaagactgaccttaaaaccacaggtgagggacttccctggtggtccagtggttaggactcctgcttccatggcaatgagcacgggtttgatcccttgttggagaaccaagatcttgcatgctgggtgcagcggaccccccaaaacctagcaggcggagacccccgagggtgagcaggaggaaccctgggagggtgctgatgagggagagggggctggactgggccccagactcctccccttggctactcacgttccccttggggctttctcactgccactgccacccccatcaccacgctgacctgccctgaatgttcaagggaaaacgtccctttaatatttccccgcatgttaaagagaagcagaaggaagtaatttcagaaagtacaaacaaaaagaaaaacttgacatactacaagtatccaaaatgtttctgacctctcattctagaagcaggaaagaacattcttacccagattctttttttttttttctgtttaaatctcagacacatccttgttctctctgcccactctgccccttcgccccaaaggaccctttccacttcccggtcgctctgcctggctctcttccccttcggcatcctgcctgtctctgggccagagggcttccggctgcctttttggtttcttggtccctgggctccagcacatgtgtgcttgtgccagatgaagacaaaagaccttttcttaagtcaagcttgtgctctttcttggtttgagaggctccagtttgaggcactctcctcatcccctgtggcagggatgtggtgactgacacagcagtcagcaaacccttcctgccccaggttatcagtgttccctccctggaatattctgtgactcacagaggtgagcacccccaccctttcctcatccaaaacagggcagggccttaaaaaaaaaatctat

SEQ ID NO: 53884 - DNA, 1708 bp, Bovine  19866880528409
  misc_feature (1)..(1): n is a, c, g, or t
ntggatgcatttgctttttcctgtttaaaatgcagcataagagaaggaaagctccagcacctgctagctcgagacctggtacctggagacatcgtgtctctctccatcggagaccgcgtccctgctgacatccgtctcacagaggtgaggggcccagaccccggtccaggggccgtgcagacacttggcttctcggaggcaggcattctctccttcttgcacacacatatacacagacataggcatgtgtgcacacaagcagaaagttagcaagcaagctaattttaagcacaaagctcctccgatggcatttcataaattatgtattctcatgtaagtataagctaacacgttttggttatatgattttctagcttgtagcctactgcagtagagaggaattttatagctgaggaatgggtttatagctgaggaatgagggataagttgcttctagaaacaaccatactgatggcagacagaagcactgtcagactgcttaatctcaaggataacaactagtctagccgtagaaagtagcacaagcctttgttaagagtgcagtttgggacatcgggtgtggggctccatccccaacctttgcgggtctcagggtgtcacaacctcacagaacattccctgaggctgtcgaagatgatcctgaatcctcaagaaaaggaagaaaaaaaaaaaagaaaaggtgaagtcaggttcagagagatccgttgatgggagtaacctattttatgatccctgccaagaaggtttaaggattgttcaaagcttttagtgataaaggattaagccccggttatcagcctgatttatttatttaaggaggacgtgttctctgggtcaatagcaggctgttggaagggtggcctggagagaggtggggagtggacggagacaaaagagactgggagccaacctccggggtgttctctgggtcaatagcaagctgttggaagggtggcctggagagaggtagggagtggagggagacaaaagagactgggagccaacctccgggacctgcgtttacagcaccctgagcctggctttgaaggtgaggcgggggccagagggcacccgggctttccagctcctctgcccctgttttcagatccccaggcagggcacagcaagtgtaccccacaccagggtgaattcctctccgtctgcttctccctacacgagcatccagccttcgagtccagggcatgtggttcccagtagaggagccactatccagtggccaagccccacctgcagagaaagctggggaaaccagtctgacactgtccatgcctccctagggatgggctctgccctgcaacgtggaggagtccccaggtacaggggcgggctgtccacatactgggcagctgatagacaggacgcatgtatactatggacgctacagggaggcagagcggtgaagtgattagtgccctggggctggccattagccaagtcctatccttcagaagctgtgtgaccttgagcaagtagcttaacctctctgtgcctcagcttcctcatctgtcagaggggttaatgttcattcccaactcgaggggttctgatgatgccgaattgagctaagaccatcagcctgcttgcgcagcgccccgaggtggggacagagtcccgaacatcagccattggtttaactggttatcattaccaagcttgacaacagttc

SEQ ID NO: 53885 - DNA, 775 bp, Bovine  19866880547345
  misc_feature (1)..(1): n is a, c, g, or t
nattttcaggttccttttgctatctcctgactcagttattcctactgaaaaatggcatatactccctatcagactgacataaaccacttcctgaaacacggaagcctctccaagcctctacaggcctcctgtgcaggtccatgcttcccaccaggttggggaagtgcttttcccttccgtttcctgcttaaatcagagtttacacttaagaaaaacggcgaaaggaacaaaatgttgacaaatgacaccatgaagatggccttgccaccaaagaatgtaaaagcagaatgcaatgcagtaatggataaacagactgtgagtaactgaaatctggctatatttcactccaaaatgctgtgtatgactattattttctgtttacagttgatctgagttccatttcatttgtggttatacaaaactacctggcactcattaagcacagacataatgacagggcagacagatgatccagaaatgcggacacccaaaataaatgaccctggggtcaaaaattggcctgtggatactgatatccttctaagaactcaaaagagaataaacttattcaaactgccgttccctcctgtttctttcccaaatttaataaataaaatgatacacataaaaattactctctcagcagaaccactgagacgttaatgcaagtcaaattctatgacagccaacatcaacagatcttttaatggagctagaatttcacacagttaaatgctgcttaaaggaaaaaaaaaagaaaataaaataagcgggc

SEQ ID NO: 53886 - DNA, 871 bp, Bovine  19866880565830
  misc_feature (1)..(1): n is a, c, g, or t
nggaaatgcaggaggcaggggctatggccccgcccccactgtgtccccccaaccctgggaggccatcgctgggaggtgacgcggtgcaaggaggccaacaactcattgttaaaccttggactcggaagggaccccagaccctcctcagcttgcaaaggagcccccatccatctgggaccccacctccctggggtggttcttttagaagaccccccacggatcccagacaggactctccgcccagctgtgcacccacaggcattcctctggccagcgatggctgctggaaacaagtctgggaaaaaccatctccaggtggggtgtgaaaggtgtgcaagggatcaaaccgagagaggggagaagcgccccagacttaccgactctgcctttggggcctctcccaccgcccacacctccatcttctggaactggaagtcctcctgggccgacagctgagggctgccgtacgtggtgcacgtgggcttggccttgctgtgtcctttcccgaaatcgacgtcgatccacagcccaaagtaaccgtgctgtcctcccatgccctgcggggggaggcgcatcagaccccgaggcccaccccagccctcaggccacaagggcatgcggaagcgaatgcaactttcttcttttttttttaaactgtgaaataataggtattggtacaactgaaggatcccactgcaggtgcctagaacactcatccaggtgtcctgagtcccacccagcagctctttctcacagggctgcactggcaggaaacacaagtcaggacctccctggtcgtccagaggctaaggctctgcactctcagtgcggggctgaggctggttccatcccggtcagggagctagatccc

SEQ ID NO: 53887 - DNA, 1948 bp, Bovine  19866880583133
  misc_feature (1)..(1): n is a, c, g, or t
ncatgtgtacacacgtgggtctccaagtatagttgaggagcagcatttatacacagagagccaaacgactaaagctacacaatgcaatacaggtttccactaatcacaccagcaaccttacctagaaaataacgcttttcaatagtctttcctgatggacatttgaaaaccaatgctgtaattcatctactgacatagataatttcccttaagaaacatgtgagactgtaagagctaccaagttatatcatatttcagtatcatattactggagctcctagaacaacatatatcacacaacttctgaaaagtttaaaaaacaaaagcacacatcacattctaggtgtcctccatcggttctcgagccacagtcggtattcaccctgtgccctccgtgcggccctgaaggctttcccacagcactcttaaaaggcttatgtttgttttgcaaaggatgagtcaagagtatgctaaataatcagtcgtgaaaaaaaaaatgcagaagataaattccatgtgttcctccaaatgtagaatactgcaggttcccacgaattggtcaaacttcccaaccatcatctggcttcaagctttgcaggataaggcctccttacgcaaagaacggttgagaatatttgctccccacacccagagccattcaggcatatactgtgcgaaaagaaactgaagatgaaagagaaaaggattacaaggttagaatccaaagccattgacaacaaactgcacagatcagcaatgatttaagccaacaaacatcaccaatcaccttaaatacaaaagaggaaaaaaaccttaggtgatgctgcactgagtacccgcttttgcataagaccctatgctagactctctggggaacaaaaagggggatccccacccactcaccccccttcctctaagtaggcaggacacacctacatgcagtgatacgattccatctttactcagtgtgatatgaatagcaggtcatgtaggtaagaattccaaatatcccaggaatgaaaggcaggtcaaagagcaaaatgcatccatgggtcagtactgtgagagagaactggggtttgaggggcagggtggagcttactgtactgacattaaaacagcgaatttcctcttctagatgtcatgcagctggaactttcaaatgttcttaacatataaatccacagaagagaattcagtgactgaactggaaccactaagatctgagaatcagaagttatgatcctcatcttccagcatcaggtttccatcagattcccatgtatctatcgtttggaaaggtttaggatgccttaaccttaattacgagagctgagcgcacacggctggttacctggatggaatgggaccagtatcctgtggtcctttttgaaatgccgagggtagaaacagcatgatgtgcatacacttttggggaaggcaccaaccatgggcacttgtgcagaaagctgccaggggtggccacgttggtagccacgtagaatgggattaaactctgtacaaagattcctttggaagcatattcatactgcaatgctctgctgaagtggtctaaataagcctgttaaataaaacagaagaaaagactaatttcgttgggaactcgaaacaatcaagagggaaaaaaaagactaatggtcattttgggaaaaaaatacagcataagcaaacatcagctgctgacacagaactcaacaaactagaccaaaccactgtgacaaatgttttcctacatgatgacttcactttccacctgggaacgggttaccttagatgctgagaacgctgccactgggggggtggggtttgcagcaggagccagaggagatggtgacgatggcgcccttcttcctctccaccatccctggcaacacgatgtggaccatgaggctggccgcccgcgatgttcacgttgacgatgtcccag

SEQ ID NO: 53888 - DNA, 1017 bp, Bovine  19866880591481
  misc_feature (1)..(1): n is a, c, g, or t
ntggtacataataagcaatgtaaaagtaattagttactttccttaacgagcaaacaagtgattcttgaagggtgggtgactgttgtggggaaggcaacttattatatgaagattatatatagcatctgtttaagaaagattcttaaaaaaatgttctaaacacttctgtagtaaacacactgaaacctactatcattatttggtgagagaagcttctttaggttcagcatttcctcatggagtccatttagaatgaagcctaagtactcttcggcatcttcttgtcgaccctgagaaggtcaaataggatcatgttaattttaacagattactctccaaggcctgcacagagtatattatctgcatatacaaactagccttctcctgaatgttcaataagatttaacataaagagtttccccaaaaccatatggattttttcttgacaattaagatggtaaagaagaggagagggagggagattaaacatttatctctaagcaataaaaagggtgttttgtctttttcatttttgcttttctgtatttctgaaatttcctaaaatagatagatactaccttcatgataagttattttaaaagtttcttttttattaaaatgaaataaaaacatgaactcaatgtctaggccaccccactgtacaaccccaggggtcaccatgcacactgtaactataagctgtaaaattaacagcccctgtatgtctccttccatttttgacaatgggcaaccaaggtagaaaagatgttatatgtgaaaaactactcatttaaagactcagctgcctgtttcacacatcagttatatcagtggtagatgaatcacacaagaccgtcatacagagacatgagatgaggtatcatctcacatggtttcatctgattatgttatttatcatgatcgcttcacacttcactctttggagcataaccatgtggcgtgtttcagggatctgcaagctcttctgcttgtggtctctgagcagatctgcttact

SEQ ID NO: 53889 - DNA, 1236 bp, Bovine  19866880621628
  misc_feature (1)..(1): n is a, c, g, or t
ncttttagttcagtgtatgtacatagccaaaaagaaatgcaatgagtagagaagaccaacagctgcacaagcatcaggagagccagaaaggttattaagtatctgggggagtgcagtatgtgatgcatggcagccttcacatgagaagagcttgtcagtgagggagcaggagtcagttcaccaaactctgaagctgtctgggtaagaggaggcacacccatgtctgcgttcatcagcacacattggtggaagcacaaatacttctgaaaatgcagaaactagagcactggtagcagaaatggatggtataaatttatctagaggcacaggaatgagattttaagtttctgatgtccagaccctgggacgtggtttctgtgaggcggtcaccgataaggccagaatactcacgtctgcatagatgttgcttccaaacacgggagcccagtaggatggctcgtctttgcagtgcgctggacagcgaactctggaaaacaagaagcgtttagggaatggttatcatcggcagaaaacaaaacttcttgagaaaagcagctggccctctatttgctcatcaagatttagtacttagatgaaaggcaattattaccacagtctactctttaagaaaaaatacatatatacctctctcgccctagcagtgataaaagatatttttccttttcttaaaagcacatgtagaattttattgacatatacacactactatatacaaaagagactttctgtaagatcccactctatactactgtatagcacaagcaactatactcagtactctgtaatgactaaggaaagagaatctcaaagagtagatacagatggaaagatcgagggcaggaggagaagggggtgacaggatgaggtggctggatggcatcaccgactcaatggacaggagttggagccaactccagaagacggtgaaggacagggaagcttggcatgctgcagcccatggagtcacagagcctaacactactgagcaacagcaatagctgattacataactgattcattttgctgtacacctgaaactaagccgacactgtaaatcaactacactgcaataaaattttttttttaaaaagctcttcatattaaaagacatgcacaaacaatgaggtgaaatgaaacaaaaatctagcagaggtgagtatgcaattgtaaggggttgtatctcccattcttgggtgtttgccggttcacactgcg

SEQ ID NO: 53890 - DNA, 1126 bp, Bovine  19866880681299
  misc_feature (1)..(1): n is a, c, g, or t
ntatttgcagatgatgtattcagaagctggaccatcactgcccatgctgatggaggagaatcagagatttttgtggtctttactgtatatataatgcagacctcagtgtgtatgctgattctctgtaggctccagaggatcatatcttgcgttcaagtcttgcatctgagtgtactggtcagaaatacagtgatttttcacctcctaactacaatcctgttgatcttcctgtgccttgagggccttctgtttacattttcactgcatttatgtttggcacccagatcttctcaacatgtcatgatgaaatggagatggagaagctgaaaaggaagaagctgacatgggagcagaggctgcgatgggaagggatgaagtctgtcttggtgggcaggggcttgctgctttggatgaaccactttgtcagcttccagtttaggtggttgcagacaagacccaggaaaggggctccgagctctcaatgtgaactcttctcaaaatgctggaacttgttcacagactttatttatttggggtcgaaaagggtatcaacagcttatctgtggccaagaggacagatggaacctacacaaaccaattgcctgctcaggcagagatttcatatttacagtcacagttgccacatctcccaccctagtagctgggtgacactctgctcactgtcactgtccagtaatgaaatctaccctggaagttgtttcatgtgaaataaggggctcatcttcattggcttcattaccaggatctccttgcacttttcaacctggctgagacatggttaagtcctctgcatctcatgtttcttcaggccaaatggctcttcctcaagataccccatgatgcatttcttcatggcttccaatttacttaaattttatgctaccaaagtaacctgatgtctatcataaattagcagtcctgtcactctatgatcttagcagagttacttttcatgatagagcttgttgctatgtcactttgtcctattacatttttgccccgggtcaccccaactggaatgtaaactccctacagaggagatgttgccattctgctccttatttcctcagaggccaaaatgccggcacagagtggcactcaatta

SEQ ID NO: 53891 - DNA, 899 bp, Bovine  19866880689912
  misc_feature (1)..(1): n is a, c, g, or t
ntgagaaaggtgcacataatcataccagaggaagttttatttctttatcccatgaaaacatgattaaattcagttaagtccctgaatgaagcatccaacttaaaacacagatcaaatgggaaagatgacttcatttttaaatcaggcatgaactgaaatctcatctcttaccactcacgaccgcccatcttccatactgcttgatcaggtccgctctgctcaccaggcgcgggatgaaatgcagcctgatgaggctgtagaagtcacagacgacggtgatgctttttctggccgtgtaccaggctccaaccaaggcgagggcttcaatgtagcagttgcaggacctggcgatttcccggtacaagaggtagaagctgtcgacggcagccatggcagcctgcaggggcggggagcgagagaggtggtctttgcttagtaactgaaagggacacacacagtttggttgaagaaggacatttgagacatcagggcttaataattttgcatttaaataacagtaactgttcaaatgcacgtagcccgtggatccagtcaatttatgatatcattacttaacatctgcagcttacaaagttctttccatccaagaagattagtcaacatgattatcaagagttaccaaattcctactaaaatccaggcactgagctaaatgttatggatacgacaataaacacaatatgctctgcgccctaaggagttcccggcccagcttagtgacaggcagactttttaatccacgtaacagctgagagtaatgtttatttcttttattgaatttattcatgcaaaaccggcaagcacagaggacctactatccctgtaaagacaaagtataaaaatagaagcactattaagacgtagcctggcctcaaagg

SEQ ID NO: 53892 - DNA, 1406 bp, Bovine  19866880720207
  misc_feature (1)..(1): n is a, c, g, or t
nggggtgtgtaccggtgatgctggggacgtgtaccagtgatgctggggacgtgtaccagtgatgctgggggcgtgtaccagtgatgctggggacgtgtaccagtgatgctggggacgtgtaccagtgatgctgggggcgtgtaccagagatgcagggggcgtgtgccggagatgctgggggtgtgtgtcagtgatttgggtgccatgcctcccttcctacctgccctgctaacctctgtcccagagatctgccacatcctcaccttcaacacttgtcagtgagctactagcaatttataattcctgccccctgcaaagaaaaactaaggcaattgaaaccaatatagcaagccaaagctgctcagtttcccctgagggagtacacatgttccagagtgtttttagacactttctctgataacagacaggctggcacatgacagcagggagtcttacttaatgttcagcccatcagggaaggtgtcggctctgtgcagcaagctggaaatggccaagaaatgaaatgtctgttcatttacaagaaccgtggcttttcctgaaagcaggccttgaggaagatgaccaattaggaaaatcaacgtttctggggcagcctgttcacatgtcttagaaaactcaggacctctcctcgcacacacgaggtacatctgggttaacgggtgtcatctggcagctaggatgtggagggcgtcctatgtttcatctgcccaggagggtccaccctggctttgcccccatcagcgctctacctgacgcccctctgatcatgatcgtgttgaccagggaacatgcgttatgacccttgagaagtcagcatcctgtgcggactcagcgtagggctgggaacacagccactgacctcgcaggcccagggatcccatcttcttctcctcctgctggcagaaggctcgctgctggggcgtcagcggcagggggatgcccccgtggttgtacatggtgcagtaacgaatcacctcctcaaaggcccccttcatgaagtacatatcttcccgctccttggaaaatacagagggaaaaacattggcagtcactgcctgcttcagctcctggtgaccatcacctcgtccacacgggaggtgttcacggtggggtcattgatctgtttcagttaacgatgatggtctgggataaatgaccccaccgggaagagaagttacaggaagtccatgtgatggaaccacacgcagcccagagagggctgatctgtgacccggacacccgccccctgcatcagggcccctggtcagttgttgctcagagcatccacatgtttcatgaactggtcatatcccagcttttacatgtgtgactgactcctaggtgtccagttcagggagacttccaagcgagggaggcaccatgaa

SEQ ID NO: 53893 - DNA, 1389 bp, Bovine  19866880733087
  misc_feature (1)..(1): n is a, c, g, or t
ntctgcatgtctgttcctatactgtatgcgtttttttgtgtgtgctttatacataaaaggactagattttttcaccccttaaggacccattttcacgccttgagtgggcagtgggatgcattagggttggtttacatctggggaagtagaggctcaggcctgtccaggaactgacctgaaagcatcagagatcaattgaacgtcactggcagggacccgagggctggccgcccgcacccactcccaggggctccttctgccagctcttcaagtctgaaacattcctcctggcagaaaccccatggcctttctccgtgacctaaacgctttggatttctcatctgcccgaggtggtttgaataatgaataatttaaatggacagagctttgcatagagattggtttaggatgactcactgaaaacatcccatttattatcccagatggacttaggcgatattaaagattcatacatccgaaagaaagagatcccgttcagttcggagcagaagtggatggcagttcagtgcagctccaagaatgaggtgaggttgtcttctctgcccccttccagcccccacccccaccccagcaaagcaaaatgcagaggtcaggagatgagtttcaagttcccagctgcttctatgacatccgaagacgtgaaaatacagttgatggcgatgaaagctctgagtatcttggggccactttcgagattgtcttctgaatctctggtcctcaaagtggggtcccagaccagcagcagcatctccttggaatttgtttgaaatgcagattctcaggctgtaccccagactcagcatcagatgttccaggggtggagtccagtcgtctgtgtttgctgggggttctgatgcaagttcaggtatgagactcagcggcctgccgtacagtgactgagtaattcctaccagagtgactacaggctcctactgatgatgctgagcccgttgctaacttgggctccttttgtcacattgctgcatgctgggttctttacacgtatgagctcatgtaactgttgcaatgggggaacgatccgggacgcacccctcgtgcccaccatagacggatgacctcacgtgtgtgtgcacatgtatgttctaagccaccaaggggaatatgtaccaagctcttaccagctatccctgggtgagacagcccaccctatcttccccctccccttttttttacattttctgtagcttttcagatcttctactgaaaaaaaaacaaaacaaaacattttctttctcttttaaaaagatttttattgccttccatcttttgctccaaactttctgctcttgctggaacctgccatgtcttgtctatgctgagattttccatctcattcacggtggcagg

SEQ ID NO: 53894 - DNA, 820 bp, Bovine  19866880859702
  misc_feature (1)..(1): n is a, c, g, or t
ntggaaggtgtttccttgtgatttttgtccttctattgcctcctgttccccatccagccctgcctccctgctgcttgcttttccttcttgctcttggttttgaaactgtccttacaaacaggtaccactttcagaaatgcttcccttcttttaaatttcattttcatttaccattgtttcctaggaaagtacctcctgacactcacagagaccaggtgaggctttgagaacagtctcccactgtgtctcgcagtcaccttggcaaacgtaaagcggcgcttcctctacctgtcagagtgtctgggcgagcatttgattagctcatgtcatttgtattgcagattccaccttgtgcttgactgattactcacagaaccgagcttatgtctagtgtgactccttctctgattaaacccagacccagggtatttaaagtccattttaaggatcacaccgtgaaatgagtttgctccctttgccggcttgtcctgtaggtgccacggacgggattggaagggcctatgcagaggagctggccagccgtgggctcaacattgtcctgatcagccggagccaagagaagctgcagatggtcgctaaagacatagctgacacctacaaagtggagactgacatcatagtcgcggacttcagcagcggccgcgagatttatgacatgatccgggaagccttgcaggacagagacattggcatcctggtgaataacgtggggtgtgttctacccctatccgcagtacttcacgcaggtctctgaggacacgctctgggacatcgtcaacgtgaacatcgcggcggccag

SEQ ID NO: 53895 - DNA, 1494 bp, Bovine  19866880944378
  misc_feature (1)..(1): n is a, c, g, or t
ntttttacacgggtagaatttgtggctttgcagggtgttcggtttggtggtctcaagaaattgtattttggttgccttagaagaattaatgaatgtacaaatttgggggaggggggccggaggagaaacctttctgtgtcagttttctttgagaaaaggaactctacttttccaagttacttgagctgtctttacaggtttgcttgtgatagaaggaaaatgtcctttggatcaactgaaatccatcattacctccagctcccttgcagaattagatctttgatgattaagtgttgataattcactgggtatgttctggctgctaatgttactgaaagctggttatcacgtgtgtgctatttttttcatttgttgcttttatattgtaactgtatgacacccaaagcttttctgtttcttatctcttcttaatttcctgcatgttgaagtttttttccccttctgtttttaactccataaagtattcaattctcgaaacacattaaaaatgatttgcctgctagggtatggcttattttataattaaagccctagtcttgtgtggttattatagtaatcttcagtcctattttctctgcccaaatgaaaaagagcccctttgcatgttgagcccaaatataatttggaaattaaccagactgcctttcggtgtcatgggaggcaagggcattcccagtcagctctcactatgctcctaattactgtattttaccagaagtttcattcagtttcttgatgacagccctaagtcctctgacctgaaatgaaactatttccttaaatttgtgtccgttgggataatctgattagaaaagaaaaacaagcaatgggttatctttatcagaaagatacaataacatttctgtaagaacagagttcctttaccacccttagggcccaagaagaggcaaatagatagctctgatgccctgcaggggtttcaaagcctccaccagcaagcagacaagcccagacactgtggttgggcgtcacttccctgagcctttggtaattcagctttgggagaatggtgggaagaacctgcctcagatttgcctctgagccactgagctgccccagatgggataccaactaacagatggtaaattctccttgattcttttacttccagaagaatcttaggttagaaatgagatgcctcccattttccagatgatgcacccaaatctcgggctaattatattacccacattgaactacctcacctccccagaaggtccacgtccttttgggttctcttgaacagagagagaaccttagacaaggacttggaggcaggtggctgacctggggagctggtctcacagcccaggaagccgagcgagaccaggaaggaggaaaagctgctcacagggggctttatctatgactgagtattgagtcaccccaagctgtggcttatagccatagcagttatttttggtgatgaatctgagggttgactgggctgat

SEQ ID NO: 53896 - DNA, 1801 bp, Bovine  19866880963021
  misc_feature (1)..(1): n is a, c, g, or t
ngtgagtgtcgcttggttgggaggggtaggcggcagcaggccaggaactgactcctgggactggccagcttgttgcggggcctcggcccgtgtctgcagagcagccaggagtctgtgtctcgacggtccttgtgggcgttgccggggcggcgggggggggtgctgtctggtctcctgccgtcaggggcgggaggggagtcctcggtgccttccgttcccagcctcacagcctctctgaggaagacgctttcagtggggaggaccgcttcgctttcctcctccctgcagcagggatagcacctctggggggtcagcagtgctttctagtgtgagaagcagctcgtgcagatgccaggccacagggaagcacaggccttggagccctgggagcagctggagctgcggcctggtcttgctctgtcagcaggaggggcagggcatccacattgggctgagctgtgagcagttcttgtttttgccaaaagttccactttattctcctcacatctcctgaagtcagattcccatctagacctgttagcaaaaaacacagtaacactccaagagcagccatcctcgaagaaaaatacttagcaactgtggaaagagaattttcgttactgtttactaaaggtctcttctctgcactcaggcagtcagagtttacttgaattaatagcatgtaggcacacaaacgcacatgtgttaaagctggtgttctaaagcaagccagagcgtctgggcgctgctgcctgagtccagctgtgttctgacgatgagcccccaccaggcccgccccaccagggtggcgcaccccacgcaggtctccagacagaacaggcctgctgacagtgggtccctcctggccatgcctctaggccacgcagcatcgagtgcctgctggacccacctccaccctccccttctcccagccaggctgcgtccacctgtcaggaacctgtaactcctacctgcagcctctgaggtcagctgtattgagttagtaggaaaatatgttttcctggtcagttagtgtgagcccagagtccgtgttctcacagccacttggaaggaggtaagtggtcagtcccgagacaggagcagaaatgagcatatttgcctttgtcttacacgagttttactgaagatcccattaggtacagagcaaggttggaggttgtgtgattgcactactatgggttagggatcgtctggttttctttcttttgctaagagcagatgagcaaatacgtggttctcccccccagcacagtccagaaacgtgaactggtgaacccagccagcatgaagcaggccctgatcgcgtccgcccggcggcttcccggtgtcaacatgtttgagcaaggccacggcaagctggatctcctccgagcctatcagatcctcaacagctacaagccccaggccaggttggtgttcccgcctttctcctcttcctgggctttctcagcacaggctgtttgcctcaaaacagaacccaccccaccaacaaggcttgggggccttggggagcttcgtgctgctgcttctgctgggacaccaggactgctccccacttccctacatcctgccgtttgtaatgtcagtgatttagagtaatgaattcctgcttttttttacttagtaaaacttttttttgaagtaaccttaaacttagagaaatttgcaataatcatatggacgttcttatatatcgtacatcaggactccagccctgccctggcttttccgatgttggcatcttacgtaaccatcgcacacgccacgagcctagcagtta

SEQ ID NO: 53897 - DNA, 1686 bp, Bovine  19866880964900
  misc_feature (1)..(1): n is a, c, g, or t
ncccaccaccgccgctgccgctgcggtgggtccttcttacaaaggttttcgatggtcttaatgtagttgttgctgatgttgagagcatccagtttctgcagaggttctaggttctcaatcttatggagcaagttcacttgtaagaagaggcagcgcagttccgtctgggcctcgagattctcaattttctggatgccgttgcactccagccagaggcagcgcagccccgtgtactcttctaggttctcaatgcggtcaaagcctggtgggaaggaagtgggtatttgttgggctcccacacacacagaggcacaggtctcaccgtcttttatgcctactcgccttggagaaggaaatggcaacccactccagtattcttgcctggagaatccaatggacagaggagcctggtgggctagggtccatggggtcacaaagagccaaacacgactgatgcgactcagcacgcaggcacacacgcccagcatccacacattcctccttaggcacaccaccgcctctctgagaacaccgcgtcctgatccttgccccgtggctctctgcagggagctggtcgtgctgagccacatggggccaaccttcaggaaccctgcggagctttggctggctctactggaaagaggtaactttcttcgagaattgccagcctggtaggggggagcctaacttcccttctcgcctcggagtaggtgggagtgaggcaggtgccctgcctgaaatgaatgagcacaagggaacgcagggcttcagaagggggagaggcagcctcgtgaagacatgcggtgagaaaatccagtggtacctgaagccactgcaaacttcgggtctggctttctggtatggctcagttttatgagccacgtttaaggagaggaaaaccaacatttttgtttccttgagtaactcgttatagatttgtacttcacggttcgtctgctgttgccaaatgttttgaaagtcatttggttgcctgaaaagttttaaccggaagtttgtgggtttttttttttttttttggctgtgctgggtcctagttgtggcatgtgggatctagttccccgaccagggatcagacccgggcgccctgcgttgagagtgcaggatgttagccaccgggccaccagggaagtcccaaacccaaagtttttatgaagaaagggtgaaagcaacggtgaggcagaatcacccgactaaatcattcccaggtcctgaccctcagaaacagtatcaaataataatttcctaagttggtaggcatggggttaatttgctaggcagcagtagataatataggcacctctctcgtcttcttcttcccacctcttaaatacgggtcccctggggtctgccctcctgtgtcatctcatcactgctacacctagacactgagaggaggatttgggagggggcaatgtggatgtgaggagaccaactaggggtccttccccacctttaaaggatattgcagctgcagccctccgtgaatctccctggcacagtgtgaatctcctcatggtggccgactgtcccccaagacaccaagagcatcctcagcatatccatctttgtatctccagcactgcgccctgtgccggcccacagaaggctctcagtaaacttttactgaataaagggccacgtggatggcccaatgaaacaggttga

SEQ ID NO: 53898 - DNA, 1332 bp, Bovine  19866881050956
  misc_feature (1)..(1): n is a, c, g, or t
ntaagtttgcagctatcacgctgatcttttgacactttaaagactactttgctagaaaagagcactggtatgccaactgtgtgcatgtaatacacacagataaaaagcagcatttctccataaaacaagtacaagtggggaaacaaaactgtactaccatcagagagagaaaggcaggcagctaggtgtaaaacttggataccaaaggcacaagagtggggcaccagtctttctactaggaggtattttcattttcaatgcactacttgtgagactcttaaattaaaccagagagtgtaggcttatgagatggtgagatggtccttgagctgataatcagaaaaataaagtgagaactgacctgaagaatgacaaccaaaaaaagctgcagacaaagcccaggagggagaggcctgaagagggagagcagaggagcagccctgggctagcacgtggtccgagcacctcgtcatctctcagctctcaaggcagccagagagggcatgtccaggaagactggctgtgtcctgcccaccccaaaccacacttccacctctacacctcagcaagcctactcccgggagagggcaacccgagcacagggtctttccagacagggagcagcatggagctattggtttctcgggtcctctgctgaaaatggggtcacgactgaggagctttcaaatagtcagaaagtggcccactcatgcaaagtctacgctctgaagactccaccttgaggcttacgacagatcctacagtgcctgatccttgaaacaaacagtactataaacctaccccaagggctatctttactttgcctacactcagttcttcctccagcctgcactgacagaaaagatcacagaaagacctattgggagatcacgtcaaaaaacaggaaaactgcagtccaagcacatgcaagtctttggaattgaacatctacactgctgaagtagcactaaagtgacaaatgacagtaatcccatggcccaaggccaggaaattccactgcaaacagatttatctgttttgtgccacagtgattcttgcctgtgtggcagtaaagagaactgtgacagcgtaattacaaattcaaaagcaagcgcttcccactggttttcatacttagtgtattgtcagggaagaagtgtcctcagcaaccaccttcaatgtgccacttgaaaagccagacctcttaacagcaagcacttgcatgtctgacatttgtaaaagcacaaacaaacaaacaaacaatcttgatgtaactacttcaggttgaaatgatacaacttttctcaattacttgatattatagtctgagca

SEQ ID NO: 53899 - DNA, 1609 bp, Bovine  19866881055905
  misc_feature (1)..(1): n is a, c, g, or t
ngggggtattggcgatggtgtcgttgtctagactcgtgttcaccgctcttccctgcaagtgggtctaaacattttctttgctgcccatgtcactcacctctgtccactcccccttccagcctgcctgccagtcctgaacacactccagatggcgcacaaccacttagagaccgtggaggacattcagcatctcagggagtgtgccagactctgcgtccttgacctttcccacaacaagctgagcgaccccgagatcctgagggttcttgagagcatgcctgacttggtaaaaaacaaacaaacaaaaatagaaagaaacacgcacaccagagacttctctggtggcccagtggttgtgactccgagctcccagggcagcgggcatgggttcagtccctggtcgggaaagaccctgagtgctgcgtggtggggagtggaggtgggggacaagcccccggacacaacttgtgtccccttgtgttctgtaggcagcaaatctcttttcttctcccctccctcccctcttcctttctccccgccttctgaacacccatcacacttttcctctctatttttagctgctgtgttttaaatgccaaatgctgtgtcatttcacctacaatttcagtgtgtattcctgacagataatgactttttaaaaacatcattacagtactgttattatacctaaaatagtatcagaatggcagttaatacccagtctatgtccaattttctccatttgcctcaagcatgtgttttgaccattggattcagttcagttcagtggctcagtcgtgtctgactctttgtgaccccacagaccacagcatgctatgcttccctgtccatcaccaactcctggagtttacccaaactcatgtccattgagtcagtgatgtcatccaaccatctcaccctctgtcgtccctttctcctcccaccttcaatattaaccagcatcagggtcttttcaaatgagccagctcttcgcatcaggtggccaaagtattagagtttcagcttcaacatcagtccctccaatgaacacccaggactgatttcctttaggatggactggttggatctccttacaatccaagggactctcaagagtcttctccaacaccacagtttgaaagcatcaattcttcggcactcagacttctttatagtccagcacttacatccatacatgaccactggaaaaaccatagccttgactagatggatctttgttagcaaatgaatgtcttgctgtctgggttggtcataactttcctttcaaagagtactgtggtcaccatctgcagtgattttggagcccaaaaaaatagtctctcactgtttcctctgtttctccatctatttgccatgaagtgatgggaccgtttccactatttctccatctatttgccatgaagtgatgggactggatccatgatcttagttttctgaatgtcgagctttaagaccatcagattttaccaatccaaaccagacccacacattgtatttggattatgcatcttattcacagccctccccgcttgtctctttctcttcccgccaccacccccccgccaagaatctgctgaagaaaccgggt

SEQ ID NO: 53900 - DNA, 933 bp, Bovine  19866881077291
  misc_feature (1)..(1): n is a, c, g, or t
ntggggggggcctgagcgcccaccgctgacagcagagaacccgtttccaggcagcctgaatacccaccactggagggacccccatccttagggcagcctgagcaaccccccgccagggccactttgaaaggacatcctgagcacccaccttccctggggcaggatctcccgggtgacctcttagcagagctgttttcaatgggtggggtttcctcagcacagaatagtgaaaagctaacttctgcttttcagcatttgcaaaagatgtattcggaaaatggaccatcactgcccgtgggtgaacaactgtgtcggagaaaagaatcagagattttttgtgctcttcactgtgagtaaagatactactcctgtagtgacttgtgttgagtcttaattctttatatactgtcttacctggagcgagggtacgtttattctgacatcagacctgcagtcccttctctggggttcagattacaactgtgttgttgctggtggggaggcacccagcagtgagtgtgggttgcccgttgctccaggtgttcgctgtgacttaactctctcctggataccttgacccaccgttgtcactaaaacgtgtttccctgtggtcgattagtctgcgagattacggtccttggtcccgagtgaccccagggaggcatgtcacctgctcccctcactgctactgcccacctcgcacaccctcactgcgcctgagacgcagcagtggacgcaggggtcctggcaccgtgctgaccagtgtctccctgcagatgtacatcgctctggcatccgtgcacgcgctggtcctctgcgggctgcagttcatcgcctgcgtccgaggacagtggacaggtaggcctgggggggtggcttctcttgctcgtgccgcggtgggggagagggaggaaggggctccggtttcagagg

SEQ ID NO: 53901 - DNA, 1899 bp, Bovine  19866881154527
  misc_feature (1)..(1): n is a, c, g, or t
ngttcataccctgggtaattttaaaagcattaggctttgtaaagagcttgtctctctgcacagtctaaatcctggctccctgaaaatccctaagaggaacaagcttgtgaaaaatccaggggtccttctttagcaactaggatccagggcaaccttggagcataggagattgacgctccttactttgtcctaatctttcgactgcaagtgtccacacctaaatatttcagtgaacaagcaaattcttaaatcacataattttgtgctaaagaatgaaaaaacaaaagtccatgattagagctacagttctctctatgggaaaaaagctgtctgaaagtcaaaacattttggttgatttgctttataacaaaacatgtatagattgggcaagatattttattcaacaaatatttattgagagcctgctcagtgtgaagcactgactggttctacatctatgtcctctctatctggaaacttctctgatcgtccctggaatccatgtttaagggaagagaacttaggtcaactgacattggttataagccatccacagcctgcataactttatgtatatgttttaatgatcgggtctctctctctgctgtaatgtaagctccgtgagtcaggtgatggggaaccatggaggattatagagcaacattttcacttaggaaacagtccaattctcagtttgaagctctctaataaccttcccaacaaaatgctaggtttttaactcacatttcagaccatctggccccttggggtatgtggtggcggtggggaggagggttatctcacagcttcctggaaagacagggcctgctaagtcacttcagtcatgtccaactctctgtgaccccatagactgtagcccaccaggctcctctgtccgtgggattctccaggtgagaatactggagtgggttgccatgccctcctccaggggatcttcccaacccagggatcgaacccacatctcttatagctcctgcattggcagacagttctttaccactgagctaccagagagggcgggagtgggtaagcaaatgtttctgctcaggcctcttggggcagggtcacttatagattgactcttcatgtccctggagggagggaccttctgggagggtcaggaatgagggctgaggatcccttctgtcatcagcatcttcgctagattactccgaagaagctaagtgccctgagccttagtttattcctctgacaatggaatgtcagagctgagatgcccatgagaaggttggcttaaggaggtagggaatctgaacctggtctagtgctcagcgcagaatagctgctcagttaacacacgatgggtgcactgagtgtgtgaaccttcacagtgatgtcaggtgtctcatggaggaggaaactgaggctcagagaggttggagcgattctctcggctcacagagctaggagaggcacggctgggccagctctgcccattaagaccacaatgtccagcgtttgctctcaggggcagggcccctcctgactttcacgggtccccttcatgtgcttctttctcaaaaaacaaaaaatatataaaatatcttttacaactgccttgttctgaaattgaacacagtccacactggatcatattcatttcttgccttctgtctgaaaagacatgaaaacggtttttcgtgggccccccagtcccacgggtcccgggcacccacgcctgatggagcgatggactactcaccttgtcctcctccgccctcaggtcgggcatagtgctgacgcacaggctgacggccgaggtggccacgaagaggatggacaaacaagcgaagaccttcccggggagcccagactgcgggttctccaccatctcgcgcagccggctcatgaagagcc

SEQ ID NO: 53902 - DNA, 1206 bp, Bovine  19866881185870
  misc_feature (1)..(1): n is a, c, g, or t
ntcatggtcacagttcccatcaacctcaaggaagatgaacggaacacggctctccgccacgcatggtcagaggtgctgcggacacaggtgggaagaagacagagttccgaggagagcacgttgtaggggagaaaaaacgccacattggtcaatgcgcagtccccccaagggtgacggagggtttggagctacgtcaggcaggctgcggggaacgcgggtcgcccgctaagggcatgtagagcagatacctgcaccgtgtcagggccagagctgggcaggcatcttgtgcaaaggcccagaggtgagacctcagaggcgccagggcactagccaggaatgagcgagagggcaggaggacaggagggaggccagagaagtgaaggggcagggccgtgggaccagctggggtctgacctttagctggcagactctggcctttaacctttaaccctctggggactgggaaggtaatctatttctttgattaaagtctgttctttctcttcctaatcctttgtttaggaccctctgtgagcatcaccttgcttgacatgaaatatttttcaaaacatttaatcctttaatctgggcccctccgtgaaatcggttctttatcacccagggccatctgttgttcaggcctcaccataaatcacttgggcgatttgacttctaaggcgcttatctcttttgttctctcccaattccgagaagcgacatctgagttttcctcagagagccctggcacatctaaactggatctctcaatgtgccccccaccccacccctgtcctgttgggggctgcccttaggaagtcacccacctgggaggcatcggaggtgggggaaagcatgtcccgtctgatctccgggttctgttaaatttcataaatgaggctcaatgtgaaaacaggctgggcggaaaagccggcagtcccttgccagtcacactcagcatccctgctcgccctcccagggaggccagggcagctgtcacctctgattaggattccagtggcggggccccaacatgggtccagggtcgctcattctgaagaaaatgaactgggagttgttggcgtgggatgatgtgtatttcgtgtagcttggaaattattcctgaggatacgggaattggcggggtggggcggccgagcaggtggtggcagaaaggctaaccagggctgaagacccaaaaggtataag

SEQ ID NO: 53903 - DNA, 1627 bp, Bovine  19866881267287
  misc_feature (1)..(1): n is a, c, g, or t
nccgtacgtatttattatttattctttagctgctctggtctagctgcagctcacgagatcttaagtcacaacattcgaactcgtagctgtggcatgtgggatctagtttcctgaccagggaacgaacccaggtcccctgaactgggagcgtgtactcttagccactggaccaccagggaagtccctgagcacgttattccttcaggctctttcctgttctctctggacctggactgccactggccatgtgtggccgcagagcgtggaaagcctggcttgtcacactgctgtgtgctgagtgcactggctttttgagattaagtatggagaacaaaatcacttgtttcggtgtggcttctagcgaatttacgattccctatgtgttagcgttgctctgggccgcgctgttttcctttccgcaaggacttgcgccctgccgcttgcagcctccgtgtggcctgcctcttctccgggaggtgttggtggtacctggagggtgccagggactgcggttgagagtccagggtgtgcgcatggcagggccggggcgggggggcctgctttctgtagacgtgttctttgtggttttcagtgtgggcgagtccttgcaggcccctcaggtcgtgggctttgctcctacattgaggtctggctgtccacagaatcattttcgctgtttctgcctgtttttgaaagctgacatttaagcccactccccagagatggtggcgcctcccttgccatgttgaatgcccgctctgtgaggaccctggaaggaacggaggtggagaaatgtacagtcatttggggttgagtttaggttgactcagacctttgggggactttttgtggagtccacaccctgaggggatctcacctttttgaagcctctgccttccacaaactccaccccaacatcctgtggtgggggagcccctccaggcccgccaggaccacctctatgtggccggccacttcctgtctgccctctggagggagggggttgattccgatagtagggacagatgaggctgcttgtctctgtactttggttcgaaagaattggttttggcaaacgtgtcaaaaaattttggttttaagcatgtctcaaattcccaaatgtatagggtttgagttttatttttgcagtttgagacgtagattttttttaacgtaattttgttcatttacatttattgttatactgtatttcactgggtcctgctaccctggcttgctcctttagctatgattcgatttcccatacacttgtggttttaagggggacggtgctgtgtccacttgcactgtggatttcttagaccttatgaaacctcttcttaatctaggttgtctaatggctaacagacacaagcgcgagtgttcttgtttctctagatagccatatatagctatcacggggcagaggaactttggacttccttctgtaggcatcttgagctgtggggcttcctcctccgggtttgctcttcgcccctccccctgctgctggggctcaggttgagaaacaccttatttttttctgggttcccctttctggctctgccgttctgctgtgttcactctgtgctgatgacttacacagacccttagcagcacagcatgg

SEQ ID NO: 53904 - DNA, 720 bp, Bovine  19866881293609
  misc_feature (1)..(1): n is a, c, g, or t
ntgtctggagctagtgacgacacctgctacctggacgcccagagtgagcagtgggtcaaggagacgcccctgccggcccggcggagccaccactgcgtcgccgtgctgggggggttcatcttcatcgccggcggcagcttctcacgggacaacggaggggatgcggcctccaatctcctttataggtatgacccccgctgtaaacagtggatcaaggtgagattaaagccagattatttctttactcttgaggactttcgatcttcttaaccttagtcttgactgccccctcactcccttctctcaggcctggacagccgtcctgcttctgaactaggtgtgatgataagatgacgagccccatcacagccccctgcctggttgggggcactgagggctgactggccaccttctgcagggatgggccacgcccagggcaccgctgccccgtagaactctgcacccgcagaacagttctgtgtctgtgccatccagcagtagccaccggccacatgtggcagttgagggcttgaagtgtggcccatgggaccgaagaactgagttttcggttttatttcattgtcacgtgtttaaacgtgagtgtgaatggccgtgcgaggctagtggctaccatacctgatggcactggtctggagacttgacccatacttctgacagcctccccacgtactgggagtctccgccaagctcctctttggg

SEQ ID NO: 53905 - DNA, 1466 bp, Bovine  19866881343074
  misc_feature (1)..(1): n is a, c, g, or t
nccagagcatcactcggagtgcagagcgccttgctggctgcccacaggcctcaggctctgctgggaaatgagggcagatggaaaagtaccccggcggggagagagtcctagacaaacacgaagatgctggtggttttcaaagacacgagctgcagcctcttaaaattccacaggcctccctgccatggataaaatgctttctggggagattgcaaatgtttgccctggtgggactttgttataaatggacttggttttgtttagttggttatgtttttatttggttaaaaaaaaaatcttgcaggatcttaactgaggactccatgttagtccaaacaaaccaagaaagggcagacacgatggacgaagaacctgcctgcccccgcacgtcaggtctgcctgcccctgcacagcaggtctggcttgaggtcctgcttggctgcagagcccttcagtggataggccgtcacagttacccccgtttctggcgtgcctactatgcaccagccctcctggtcagccctctatgttccctcctttctaatcctcccaaaggctgcatgaggcaggaaatgttgttgcatcgttttaaagatgaggaaactgaggccagaaaggtgaaggcactgggtgcaggtcacatagttgggaggtggcagggatgtctttcaaccatgtctcacagccacgcaggctgaagccagatctgcccacaacgtaaccctcacggaggctgcttggtcactgagttttctgggacacagaaccccgtgtgtgccagccagcctgcgaagccacccagtgagcgactctcctctggtaccagatagcagactatcacccaggccgaggccagagaaaggccatgtgcagacccctcccagccacttaaacccccgcccctgcaccacgctgggctagcttcccacagcagaggccaaccctgctcccactgaggccccctaacaatccacccaggatggaaatgtctctgaagaccctgtcttcagagcttcgctcctggactttggggaaggtggttggcccgtgtctaagaaatctgcttaagatgaacctccgctccacccaggggatgacctcggcgtctgcacacgtgttaacccctcagcctcttccctgagcccagcaggctgacacgcgactttcaccggctcttccaccccgagttctctgattttaaccagctgcaattcagagttgagcaccacacctttcccggccccagcccttccccaaatgctcactctccatcacactgacactaacgctccctctccctgctgctctgttttttagcacgaatcacaggatataatgacacattcagtttcttgtgtttgtgtttactgagggcagaggccttgccggcacatagtaggtactcagtaaatacttgtggacggcggcggctgagacaatggtgcagggatttttgggcctcagca

SEQ ID NO: 53906 - DNA, 1749 bp, Bovine  19866881405939
  misc_feature (1)..(1): n is a, c, g, or t
ntccccccaatgcatttaatcttaagagctgtttgctgctgctctctgggtgtccctgtagactacctagagattaaacattctgtgtgtgggatcatgtcttacagttccccatttcccactgcgtacaacacccaagctgcaagaggcaccagatgatggtttggggtaataaagaatgtgtgagtgtgaaagtcactcaatcgtttccgactctttgcgaccccatgcactatacagtccatggaattctccaggccagaatactggagtgggtagcctttcccttctccaggggatcttcccaacccagggatcgaacccaggtcttctgcattgcaggtgtattctttaccagttgagctacaagggaagcccaataaagaataggtgctcaatatatataataattgattggttatattaatgccaaaactaccatttattactgacccactgtatgcaagtcactctaattataactatcccggcttgcggaagatgagactgccctagagagcggttaaactctgggcaaactgccataaaactggcaagttgcagaggggtagtgttagcccaaagtaacttgctccaaactgtgtgtccatagcacaacatggcttccctgtagcaactcatacagggcttgcctggacagtcattgcttacaattgttggctgggttcaaaaaatgaaacacaaatcaagcagtttctttatcagtccctaaaaggtttcccttatgattgaagccaagcaacaggagaggctatcttctaagcctattcaggaaaactttggtgaggagtcaccaggtgatcccagaaacaccagctcgtcattcactctgtccaccacagatcaggcactggactggacactgccaattcatttcgggtgtctgccctgacatagcttgccatccagagggagagagagcctttgatcttacatggtgaaggaaatgaagggatacattcaaaagttgggttgtgaggggaatggtgtcttgggtgagggcttgggctcttggcgtcagactgtccaagcataagtctgttctaccattgactggctgagggtaatctgtttggagcaagttctttaacttctttaagttccaggtaaattatctgtgtgacctggcaagaggagtgcctaccgcagagggctggcctatggttggaatgtggtgagtgcatggtacataaccttcagtgagtgtgggccgccgctgttattattttttggccgcgtcttgtgacatgcaggatcttagttcccctatcagggatggaaacccatggaaccagcagtggaagcttggagtcttaaccactggaccgccagggaagaccctgttattattattacggttactgctggcagtgaagaccaggtatgtggtgctgggcgcagcccgtcgtccccctcgcctccctggggcggtagtctgcaccttccttgcggccaccttcgcctgcgttcccgtggtcaccagccgactcctccacaccaggctcctgcgcgcactcttgctccgctaccccgtccaccacaggctctgaggcctcggggtgcatgtttatttcggaaacaccgaacaccccgtagcagtgggagcccggttctgcgggatcgctatggcccctaacccaccaggccactggagcccgggtcgttggcggcccaacgcttctctggtctccacggcaaccgctgcacacgcgcactcgggcgggcctg

SEQ ID NO: 53907 - DNA, 905 bp, Bovine  19866881468762
  misc_feature (1)..(1): n is a, c, g, or t
naaatggcccctgaggaagaaagccagtggggaaacgtccctggtgagaagtcccacacctcacctgactgcctgggctgctggtgaccctcggtcactctccaggagcctttgtgccctgcctgtaaaaaaccacctcaccagtgattcccaagcgtggctgacactcagtcattccgaggacagtagttttcagcccccctcagcccccttcagaatcgctaattctgaggtggggcccaggaacctggtgtttgaaaagctcagccaggtctggggaggcggggactacggggcctgcactgtcgcaccggagcccttcattccactacagaaacttctgcgtcactcttgccctggctgctctcagcgggatggtcggggggtgggggggcacccacagggggttggtgacttgggaagtagccccgcacagacgcagtgaccactcttgcctgggccctgggttaattactcaagcaagatggtatgtcaaatcacatagaacatttaatcggttactgtgataccatagaaataccaagaatcataaaagtaaaaattaaaaaaaaaaaaaaaagctgctaggtcgtacataatggtgccagggttctcccggtggctgctggtctgtcggcacgccaggggtcactggccgtggtcctggggcctcttgcctttgcccttcttcttcttgtcctccagccgcggcttcagggcgcacacgcaggccgacacgccagcgatggccttgggcagctcggtgccctcactccacttgtccttgtcgcggtcgtagacctgcacggtcttggagaaggccgtgttctcccagctgtagccgcccaggatgtagatgcggccctcccacacggccacgcccgactcgctgtggcgtcagcagg

SEQ ID NO: 53908 - DNA, 1002 bp, Bovine  19866881558272
  misc_feature (1)..(1): n is a, c, g, or t
nctgatgaattttgacggaaatggttctttttattggtgttgcactttccccttcccatcccttccctttccttcctagattagcaccaaggtgatcgaaatgaaaacaggtggaattttgaacttttttctactaggggtatcccagataacaagtaccaaattgactgcctaatttatcagctcttttccatgtgataagtctatatagcaagttattgtagaatgagggctgtttagtaacagtttagagcaaagcaagttaaaatttaactgacattgtgtaatgtacaataggcctggaaagttggtaaaagtggatttgtgttaactgaatcatgttttctgatttggagagtgcagtctgtggaaacaagtttcagcttagactccccatgaaagcacttaaataaatccagtctattaaaaatcttggaaaagtgaaaagataactttttaaaagttactatttttttgccatgccatgtgggatcttagtttttggccacaccgtgcagcacttgagatctagttccctgactcgggatcaaccccatgcctcctgcattgggagtgaggagtcctgaccactggactaccagggaaattgttgagagggtagcttttgataggacttcaatagtcagaataaaatacacaaaccacatgaaaccaacacttgacatttgaatcttcaggagggcgtggctttggcacactttttggtccatttttccccttctcggggctcctcagccacaagaaagtgaggaggatcctgctgcagccctgggtagtcagtcgaggcataagccttcctctgccccctcttcctctgtctgcttctgccgtttgtagtgctgtaagcaatgcgcagttcacgcacacggtgacaaatttataaatatcgtggtgtcccaaacttcgtcttgttcagaatttgttctcataatcacagttcagcgtggatagttgatgctcaatacatgctgttaaatcaat

SEQ ID NO: 53909 - DNA, 993 bp, Bovine  19866880172098
  misc_feature (1)..(1): n is a, c, g, or t
ngctctttagttctttttcactttctgccataagggtagtgtcatctgcatatctgaggtattattgatatttctcccggcaattttgattccagcttgtgcttcttccagcccagtgtttctcatgatgtactctgcatataagttgaataagcagggtgacaatatatagccttgacatacttcttttcctatttggaaccagcttcagtatgtccaattctttgcgaccctaaggacagtagcctgccaggctcctttctccacgggcttctccaggcaagattaccggagttgcttaccatgccctcctccaggggatcttcccaacctaaggattgaacctgagtctcttaggtcacctgcattggtgtgcaggttctttaccactagcaccacccagggcaggccatctggaatagaaggaagccctgtagtccctgatctgaaatcctgacttgggcatgtttgttggtatccaaaagtgaaagtgaagtcattcagtcatgtccgaccctcagcgaccccatggactgcagccttccaggctcctccgtccatgggattttccaggcaagagtactggagtgggggtatccaaagcgatccccaaaaatgtcatcaaatgatcatagttagactcagttgaattaactttattattgttaataaatacatattataaagcaaagaacagagatgtctgatagaggcaaccatcataggatgatggtcaaagcctggaagtcagggacattgatggaattcaatcccagtaaaacagaaattcacagctggacaattccccgggtctgatgggagccacaaactctaagagtgcagaggaacagatggcagcactagtaggtccgattctgatttcttctgcctggaagtcttctgctttatctcagctggggatttcagttcttcctaatgccagtgatttccatctgggcctgtggtgaaaaataaacctctgaaccattaaga

SEQ ID NO: 53910 - DNA, 1903 bp, Bovine  19866880388073
  misc_feature (1)..(1): n is a, c, g, or t
ntacacagtattgagtagagttccctgtgctgtacagtaggtccttattagttatctctttatgtatagtagtgtgtgtgtctcaatcccagtctcccaacttatccttctcctctcccctccgaccccgtaaccataagtttgtttactacatctgtaactctatttctgttttgcaaataagttcatttgtacacccgccccccaccacctttttaagattccacatataacttccctcctttcattgacactcatatctatttataactgaaattcattggttttgctttggatctctgtagcagcaaagagcaaatattactttctctgacaatcccttactctcctcagtcttccattattatttttctgcttctcataatctctcaaagatgactgttagtgattctgaaattccttgaggccctgtaatccaattcatactggcctggattcttgaggccacttgaagtgactaggctgtctctcactagctcaataggcaagagcctatctgaaactgaaattccctctttgcgttgtttgttttaccttctttagggttgaacactgggctgccttgttgaatagcacagaaggaaaaagccactgggcacttctgctttctctcttccctcctttatcactacaccaaattcccaaatgaagttctttgcttttgtcctcgcttcagacatatcttgaaaaagcaattaatggctcctttaaaaaaagaaaaacaagtcttagacagataatgctcatctttagcttttgtgacattacttgaacaagttcatgctaaacaacaaaaatggtactaggaatactataggtagcttaaatactcttgtctttctgttagtagaatttgacaccctaagtgtttcactcagtgttatatcacgagagtctccccaagtcatcggaattaatttatatatactgtgttcactcattccattaatacttattgagcagttactatgtgccagaaactattacaaatgttgggatgcattgaagaaaacaatagagacagagcttagtgttagaagttactaattacatagatgcttaatcataatagtgccacaaagaaaataaatacatgtggatcatgagagagactgtatgggggacactgacctagtctggcatgtagaagaagctcattggaaaagaccctgatgctgggtaagattgaaggcagaaggagaaggggacagcagaagatgagatgcttagatagcaccaccaagccaatgtgcataaatgtgagcaaactcctagagatagtggagggcagaagagcctggcctgctgcagtccatggtgtcacagagctggacacaacttagagactaaacaacaacattcaaagttcagtctttcaactgatgtagattctggagatgttgattagtggtctgtggtaagtacagtaattgaggattaaatatttaaaaacctcaatgaacatgagtttgagcaaactctgggagatggtgagggacagggaggcctggcctgctgcagtccatggagtcacagagtcagacctaactgagtggttgaacaacaacaatggcaatacgataatgtgattttatgttaaaaaactggaatatgtatgttgtctgttactttttcatttttctctagtaattcattatttttttaaatttaagcagcaaaagtgtttgttcatgatacattgggagggaaaaacaagtcctctctcaaacatagttggcatgaaagctagtagaacccccttgctcaaattttctttaatggatccaaagttccctaatgctatataatgattttttttcccctttctcatgggaaaccaatggaattagcaaattttaagaacatacatgtatatttaagc

SEQ ID NO: 53911 - DNA, 1248 bp, Bovine  19866880397853
  misc_feature (1)..(1): n is a, c, g, or t
nacattattcagtgaattaaaggtccactgttatacataattctatttcatgaaatggccttagaaaacatattttccctgtacttatcatcatgaaagcagcagtactaataatttattgaacactctgtgccatgtgtcatgattagcaagtccataatcttccaaggctgtttcttcaattataaaatagagccaataccatgttgtattagaatgtaaagggcccagcaaagaacttggcattcagaaagcacttgagaaatgcaatagaccttgggaaacagtaaataggaactgagcctcctagaattatcacttgaagattggttgaacttcagggtagtttttatatactgcttgtatttgaaaagttgaaatttggctataaaatgtgtacagttcctcatgcttccaactaaacattcatttctatccttctcattccaatagtcctgcccagttttaggaagacagagaaccttaagatttgctaaatacctaccacggacgaggagttttacattatctcatttgatcatttgattctcatgacattgttaaagtaagcattattatcctcatccaagagtagagaaagcaaagctcctgaaaaactaagaattaagaatttaccaatggataaagtgccagagatggagtttcaacctagatctgcttgaatcccaaacctgaattccttccaggaccctgggtagtctcctgagaacacattaccattagcaactactcagtgttacactagaagaatcctctgtaaacaaaacatggtggtgtggagccagagggttgacccttctggcctggtctctgaatctcactggattctgtgaataattagtgtctcagaaatgaggccaggtttgctgttgatgattgagtataaatctgttcttgggcaacactggagaaagatacttctggcctgtttttaaaaaatcaattccccttcctggcaatctggtccagaaccctgcagtccttacagatgtcctcattttgtgcctcaatccccttcaggagggagccaccaccgctccttaacagcccaacccagacatgaagacgatcttcagtcccgctgtagacatctcttgtatagaataaatagctctagttcttttaaatttctcataagacctattttcttagcctttcaaaaattttcataactcatgttttttggacacttttcaaactttcctgcttaaattacgatttcaaaat

SEQ ID NO: 53912 - DNA, 2504 bp, Bovine  19866880400723
  misc_feature (1)..(1): n is a, c, g, or t
ntgatggacagacatggaaagcagtgatatgactggctactgatcatgaaatgtatctgtcatttacacaatgatttgtggactaaagcgctagcagtgaatttttaaagaatcactcacagttaatatgctcgattaactgaaatttgaactgagttgttgaaagatcactgctatttacctagcccatggtaactgaaatttatgtatattaagctgtgtaaagcatggactgtctgtgtatatatatttttttcagtttttttttttttttaacaaaattgaggtcatgaaaatacaattttataccttgctttttcaaatttagtattataagttatttactactctctagtaatattgaagaataatgtatatgattgggaaaataccaagggaatgataaaagagagctatggactggcagagtgacttgcttcccattaagaagcagcacagggaagagtgcaaactgtctggtgtatgttgttatatcaagaagaagtagaagatttggctagaatgtaggatctatgttggaataaaaatgtcccaaagtccattttcctaagctttaagaaataataatagtaataactggcatttattaagtgcttactatatattctgggtacttttcaagcatgatctccatcttcaactcttagatgctgtcattcccattcctacacaccaggatgctggagctcaaagaagtccctgagtttgcctaagtcacacagctgttgtggcatagccagcggtcctgccactgactactctataaaactgcctgatgaaagcatttttcagtttatataattcttctacatccattgataatagatatgcaattaggtgggtggtacaaaatttccaaggtatgtggcactgaaatctagtctatgccactagctgagcctgagccagaaggctgcctacttccagaaagggcacttttttcctaattagcacaaaggttcagtataggctagtgttggtcccaatcaacatgactgattctcaacacaacctcagaattgatagttggcagagcagttaggattattccaattttatacttaaaaaaaaaaaaaaaagccttgaggcttgcattaggtaagtgatttatctaaggtaaaaaatgaattgctgagataaagatgtggctgaggaagagattagatgccaggctgagcaggtttcatctgaagcaaaaggcaataggggactgtagacattgataaatcaggctacacatttgacttcaacagggtcaaatgataactcatggatgtaatagattgccctgggcagttcaatgccttccacctggctaaataatttcttttctagaattttggtcctttcttgcctttcaattagacctttacagacacctccacgtcctttgaaggataatcaccaggatttaaaaagagtgaatctgaaagcaaatttcccttcacctcactgggtttcataactgcactttacagacttctttaattagcaagttgtaatattgttgttactatcctaagagtatccaggcctaagattttctgagtgtttccgagctactctctatacccttaccttatagagaaatgctcctacctaaaccaggtccttcagacatatgctatgctatgctaagtcacttcagtcatgtccaactctgtgtgaccccatagacggtagcctaccaggctcccccgtccctgggattctccaggcaagagcactggagtgggttgccatttccttctccaatgcatgaaagtgaaaagtgaaagtgaagtcgctcagtcatgtccgacttttagccacccccatggactgcagcctaccaggatcctcccatccatgggattttccaggcaagagtactgacataagggcgcaataaataaattcactttcctgagtgaatttagcaattcctctgggatttacaagttttataagaattcttgtaagaaaaatggctgcataagaaccaactcatcctgcttctaaaaatagccaaatggttagtaagcattaaaaagtacaattaaaccaaaaaattccagaggctggctctaagaaatgcaataggtttctgatcaaatgtgtggaaaattctagacacttatacctcttatttggagtgtcacaacactgaaagtccttcctcataggtaagaaacttttttaatttttacaaaactattgtttttcataaacttggccaaggtgagagacccaatgaaacatttttattcttctcagttattttttattaatatcctgatgaacaagcattctatggaacatgttttgagaaatgctggaccacagccatggacaaatttgggtacgaacagttacttctctatttaaactcagagctatttcctgtccctgagtccagggctggaggggcagtgacagaaaatggactagggatggccgacctttcttactgagtgaagcaacagcagttttcatacctctat

SEQ ID NO: 53913 - DNA, 2658 bp, Bovine  19866880518414
  misc_feature (1)..(1): n is a, c, g, or t
ncatgactttgcagcatgggcgctggagttggaaagtccttcctaaactgcaggccttgggcaagtgacctttctgttttctctggaaaatgggatgataacaggactcatttcactgggttatatgagaaaaagcgaagataaatataaaatagacttagagaaatattacttaacatgtactgttaataattattaacagtaataattagttctgtgaggtagattagtgttgtgaggtaagaactttatgtacactcaagaaattcaatgaagatcttaaattctttcatgaaatgagaatgaaagcaagagtggagaaaggctttctcttcactttgcccaaggtagaggccaagatgcatctcattggatgtctccctcagccaatctgagcattactggtgggcagtggtcacagggacagctgtgcccaagcacactgctgcctgtgtccctgtgtcaggagactgccagcctctgaagcatggccccttttaacatcttcagaagacacttatcatgaagactaaatcctgcatccatattcgttagagtcaaagatcagtattgtacaacagacacaatgagctcattgtagctcagacagcaaagaatctgcctgcaatgcaggagactagggtttgatccctgggccagggaagatcccctggataagggaatggcaatccactatggtattcttgcctagagaattccatgggacagatcatggggttacaaaaagtcaaacatgactgaataactaaccccacaccccataaaaatatttaaaagacattttttatgaatgtttttatgtaggttagctcatttaatagtcacagcagtcccttaaagttattcctgttttaggacttccttggcagtcaggtggttatgactctgtgcttctaatgcaggggcatgggtttgtcccctggtcagggactaagggggcttctctgctggctcagcaggtaaagaacccacctgcaatgcaggagacacaggaaacatgggtttgattcctgggttggagaagatcccctggagcaggacatggcaaatcactccagtgtttttgtgggaaaatcctatggacagaggagcctggagggctacagtccatggggttgcaaagagatggacatgactgaagcgaccgagtatgtagcacagggaactcagataccacatgctgcattgtgcagccaaaaaaaaaaaaaagttatttctattgttatcccaacattccagacaaggaaacttaagcacaaggcagtcaggtaaactgcccaaagtgagatggttcaaggtagtggagacaggatttgctcttaggctgccccactgtggcccctgtgctcttctctactgtccgcaggccctgctgcccctccactcatgatgtttgcatcccaagaggtaggtacctctggatggtgcccaatccactgatacccaagtgggtgctcttcaccccagttgattgactcagtctctgacccgctattgaatggtgatcaaagttactgcatctttagactttaaggccacagctatcattttgaagggagaaccataatttaaaagaggcttagtgaagtttaatgaaaggtaactcttctcatgcttgaggtgagttgaaagagaattcaatataagccaatcagttgcatgaaatgactttgcttaaggcctgcatgggtctagtgaaggcaactgaatagggccaagtgcaggaatgggcagggacccatttgtttcccttcctccaacacatgggacatccttactctcagtcttcccagacactcttcccactctacgacctgcccacacacccccagctcagaaaccctgcacacctgcaggaaagcaaaaaccagttttttcagtaaacacattgcacgtgtttatgcaaaccccagagtggaatcaagctttggaggaagagagaacagttgtttaccctacaaagttctcagatgccaacagactaagtgctaataatcctacaaaagttgttgtggaaaactgcttggcctcaggcctctgtatacaacatgctaagacacgcagaagcgttactcaaccaggtgccagcaggatctaggggagctgagatgccctacttagctctgccctgctcagaaggtttctctgttcccttgcttttgaccatggggctgtaaatttgagagcttactgagatgtcaattttgagaggccagattctgtataatgctgcatatgtgatattccagacttaaaacctttaaaataaatggaagtataagtactggaagggccaaataaggaaaactatgagctaaagaaagtctgaaacaagatgtgacaagcctgttacaagctattcataaatccattctgattcatagcaggagctaaaacaacctgtgagcccaggactgctgctggttgagtgagagtgctggcatgatgatttgatttcttcagcaaggacagggcaaatggaggcctttgggagcgagattgctgcagcagataaaagtgatcctccaaggccaaacggtcttttggctgaagagctcagagatttggtaaccagagttggactgaaaccacagagttgactgaaggaagttctcagccagaggccaccctggatag

SEQ ID NO: 53914 - DNA, 1441 bp, Bovine  19866880543235
  misc_feature (1)..(1): n is a, c, g, or t
ngggacgacagaggatgagatggttggatggcatcaccgacttgatggatatgagtttgagcaagctccaggagttggtgatggacagggcagtctggcatgctgcagtccatggggttgcagagttgaatacaactgagcaactgagctgagctctttgagatgaaggactacatatatttcatcttagttgagtttctgtgacattgccagtgatccaataagtgtttgctgaaatgaatccatgtatctgaggagtaattgttggcttgatcttcttattcaatccaagatataaacacgtgctaaaatgcaaggtggttgtctgttgacaaagaaagggggaggatgggggctctctgcttatgataatgacatatagaactagtcggactgtactgttccatctgcagtcgaaagggctggttcggccaggcaggagcacgtggcaaacttgcctacccgctgcgtctaaaccaggctcttttttacaaacaaaactgccaaatatcctgattatgcaataagattggggcaggaaacaagccctaatgccaagttacagatttagggaaaagctgcttttgaattgggttacctcagccagtttgatgtaggtttgatcttgacattctctctcacttaaaaatacatgaaggaaggttactgtcaagaaaaaggagtacagtaagtctgagaaggcttgttcaaactagtagcttatcccgggcaccaggtaagtggggcaaggtaggcaaacagtgggtgtagtccacccttagaaacaccagttgccggtattaatcagagcagtccaccttttaagtctcattaaaatgaagatttatgcctgcagtctttatgtagcagatgtctacccctcaattgctgtccccagctgtggccatgatcacgcacaggcagggttacagtccagagagatatgcatgacttcagagggagtttcccggagtgtttttggcaagagggccagggctggtgggaagggtgagtctctctctgtggcattcagcatctggcagttggccatcgttcactgggaggttcctggagagaaataggaaaatcagtcttcagggcagttctacaaaaggacatgtggtgaagctgctgattttgagattccacccaatgagaaaggaatctctgaatacaattaatttttccctcatggcatatgtggttatcagactagaccatggcatcagtgctgctatagaacagtttcaaaatcacacacaaaaaaacaactggcccattgtaccagggtatgctaagtggcttcagttcagttcagttgctcagtcgtgtctgactctttgcgaccccatgaattgcagcacgccaagcctccctgtccatcaccaactcccagagttcactcagactcacagccatcgagtcactgatgccatccagc

SEQ ID NO: 53915 - DNA, 1475 bp, Bovine  19866880573108
  misc_feature (1)..(1): n is a, c, g, or t
ngatgtactgtagagcacagcgaactctactcaatactctgtaatgatatctatgggaagagaatctaaaaaggagtggatatatgtatctgtataatgatttactttgctatacagcagaaactaacaccacattgtaaatcaactgtatttcaataaaaatttttaaattaagttaaaataaatttaaaaaaacaaaggacagataaatcagtaattacgctaatagcaccataatggctcatgctttaggcagagagacagtgaaagctacaagatgcaaagcgatcataacctttccagacctaggggtaagaacattctctgaagttgagagtgttaacaatttagaatgggtgaaatcagtcccctgcaaaagttactcctgagattacagtgtttcccaattctacagaaaggagaacagcttgttcattcaactgaaacaagaaaattgaagtgtttctcaatacccaaaaaagagccagtttgatccatatacattcttaggatttcaatgttgctaatgtcactcaatgtataaccaaggaaagtgcatattctcttgatggaagaaataatgaaaaatagttagtctgtttggactctagaaaagggggaagcagagaataggaatctgtcggtgagtttttagccgtgcataaaagacagagcatgttccggatctgaaccaggcagaattgttctggctagcttaacaagcattgccattcttctggcaagtacatccccgtactggaaaaggagatgatcagaactgatgactctattactaaaatcatcgaaatcctttattctgagccagtaagcaagttctcactttccatatgaggctttctcccagttgagggaaaaaatctgggcaggaagaatgtggctttaatgctgaatagaaaacagaccctaattctggagttcagtgttaacatcttgactccagccacagtcatttgatatggagaaatgacccaagctgtgagaaaaatattccacatgaattttttgggcctgtttttcctatgttcaaatgccttctgtgatcccccattgccttcaaactcaattccaaattttgagtattactctcaagatgcttctcaaacttatcctccatactttattattctggcccatcccgatgccttcccatgcatctacattcattccctcttccctacctttgatcatactttctcttccttggaatgccctctctctcttcttctccactaaccaaaacctcattggttccagggtaagtttaagtccacctttttccataaaaacttctcctgctacactagacccactagtttctgcatttcagatatactgcctagcattctgaggcttaactcttcctttctagtcttaaattatcattgtagattcctactgacttcattattactgcattctcttctctattatctaagctgaataaaactgtatta

SEQ ID NO: 53916 - DNA, 3458 bp, Bovine  19866880603444
  misc_feature (1)..(1): n is a, c, g, or t
nagaggattgatttcttttttggggaggggttggcttgggttgaccgatataatagttgaagtctgtaccaggaagaaattcatgccttgatgaattagacagtctctgcattctctggattttcccttgtagtgtgcgtgtttgcatacataagtgtcccatactccagacaaacactcacaaaagcatagatgatgatctggccagaagacaggccccctctgatgcattgttttgttctaaatttttcaagagcccgtcaatggacttcttgtaaaacaccaccatacattttttaaaaaggaagttatttgagacaccaatgttaaataagtgtcagttacgtttatatcagttacaccctcactctttgggttgcaaaaaaagacttttatatattttggggtcatgtacttctgtataagggatataacttagtaaaactagacaaaagaccatagagggaatatgatgagctgttacagagtttgtcataaccagatcccgaatgttgtaaagatgaaatatgaggtgtgcatgatagaatgaaggaataaagggaatatggaaaagaacaaaatggagttctatgagaattttcaggtctatatttttcaaagaaacaaagtttgagagtcagcaaccagagaatcgattctcagagaaaatatctgtgaattgtgttatgttctttttttaaatgaccatatattgaggttgccttgttgtttgccattttatgtgtatgtttgtatgtgtgtgtgagagagagaaggcactttcctgatatatggagttacagatcagtgctgggattttttttttttttttttagtattaatttattttatttgtctgtactggatcttaagttatagcacttaggatcgtccagctttgttgcagcatgtgaattcttagttacagcgcatgggttctagttccctgaccaggaattgaacccggcctgctgcactgggagtgtggagtattaggcagtgggtcacgaggcaagttcagacgcagggctatttttcaatgaacttcagtaaacacttattatgtaaacattaattagtacctctgtattctgggcattgtcctaggccctggactatatatatatatatatacacacacacacacacacacatatatatatatatatatcatgctgcatttcctcttcagtaatcttttgtgtgtgtgtgtgtgtgtgtgtactcagtcattcagtcatgtccaattctttgagaccccatggactgtagcccaccaggctcctctgtccatgggattatcctggcaagatcactggagtgagttgccatttcctgctccagaggatcttcctgatccaagcatcgaacccatatctcctgcattgcaggcagagtctaccatgagacaggaagccctcagtaatctttatggagttgtctttttgttgttaacacctaagacaaaagtctttcagccctgggatttctttggaaggaatgatgctaaagctgaaactccagtactttggccacctcacgtgaagagttgactcattggaaaagactctgatgctgggagggattgggggcaagaggagaaggggacgacagaggatgagatggctggatggcatcactgactcgatggacatgagtctgagtgaactctgggagttggtgatggacagggaggaccggtgtgctgtgattcatggggtcacaagagtcgggcacgactgagcgactgaactgaactgaagacaaaagtcagaaacctttactttactttcctcttatttgtgttatcaaaagaaagagaactccagagatttagtgcaattactggaacacagcttctaaagtggcctggttatcaaaactacttgtgtactgatctgctagaaaagcatatcttgtcttccagttggaaatgacaacttgaaaccaaacagtgcctcccagcttcagtaaaatccagggctctgatgccgaggactagcagaactctgctgtctgatttgggtcctgttgtgggtctcgagttccctggctgagagtgaggcactggtccttgacaggatgtttggccccaaggtgggggcgatgctgtctctgcactgttttttcccccaaaccctgtgggagtgagagaggtggggaggggggtggacagaactcctggcccagtggaggggtcttctccagatgtctcccaggggacctccttcttcattgtatatcatgtgtgaatggcccgtgtgtgtgtgtgtgtgtgtgtgttagtcattcagttgtgtctgactctttgcgaccccatggactgtagcccaccagggtcccctgtccatggaattctccaggcaagaatactggagtgggttgccattcccttctccagggattgaacctaggtctcccacattgtgggcagactctttaccatctgagccactagggaagcccatgaatggcccctgagccctcagccagcatgactgaatctccttgaagaccagccctgatgcctcttctgccctgagaagctaacttctaagctggccgagacagacttgggaactaggctgatagatgtggatgctgcacatctgcacgatgtgcagatcattacagcacataatgatctgcacaatcattacaggcatactcccttcctcttcacttctcccctacagctgccactttttgtggttgacatcaataatacctaattcctcactctggaaaatgtctgagtcggtcatgacaaagccaagggcagaatcagcaacaacaacagaacaaaaataataatagcacctaccgtgtgtgagcactggctgtgtgccagccactgtgctaaacactttacatacatgatctcatttattctttacaaccatctatgaagtagggaatgctgggatccccatgatatagacaaggaaactgaggcttagccatttacctgttgttgggagatttacatctgagtgccagattctaaaacattcaaccacagctgtgatgtgaatgatgatcaagtttataaacacttaagcattaactaagaaaagacagaaaaacagacctgtgaagagggtgctggggcaggtggccctctggctcccttggcttccctgctcttccgtgatgcctctggaaaggtcttcgagagaccaccagggagaccaaagggctcgttctgctgcctgtggcttctctctgcaagtggcctctcatcccttcctttgaggtctggcagccaacatttatcttggtctttgtttacaaacaggggtcatgcatcctgttctttctttgctatttggggctgactttaattccaaagaagcatatgttttacttccactgtgctggtgtttttggagacagactccagccctaagaggagtctgagagagtctgtaacctcttctttccctttctgagggagt

SEQ ID NO: 53917 - DNA, 1866 bp, Bovine  19866880622002
  misc_feature (1)..(1): n is a, c, g, or t
ntctgactctttggaccccatggaatagtccacggagttctccaggccagaatactaccaggagtgggtagttgctcccttctccagaggctcttcccaacccagggatcaaacccaggtcttatgcatttcaggtggatattttaccagctgagtcaccagggaagcccagaacagtgaggaatgaatttccattaagtcaaaataagcaaataaataaaagtgagagtatcatatcatagaacatgattgcttaaggctgaaccccagcaggggctgtggaaggtccaggagacatcaggaggggctcaaggatgtgactgtccctgtggtttccttgttgagtacacttgtgctgagctttgcagatagagctaagagagcctctaagggagggttggtggatgtggacactagatcagaattaagatgagatcttttgtgtggctgttgcaaactagctgtttttaatcaagacatgaacataaacaggattagcagaaaattgttcaaagtaatgagagtggggctgtgtattgtaacctagaatagaaacctgaatattagttgaattaaatggaatcaaattgtggaaagcagacataattcaaagaaattgggagggtatgcatttaaaggaaaatgagtagtaaaactgtaatatagtgttgtattataaacaaagacgtcagagacagacagatctggcttctgggtcttgtgtatctcaagctgaatttgtgactttgagcaagctacttaggttccttgagccttggtttctttgttggaaaatgaactagtaacatttaatttgggggttattatgaagattaaatatgaaatgcctgtaacatatttgtcacagagcttagaacatagatgttaaataatattcatggatgtttgctattatagtattattatcacattaattttagtgagttccctggtggtacagtgataagaatctgcctgccagtgccagggacacgggttcgatccctgttctgggaagactccacatgccatggagcaactaaagcccacatgccacaactattggagcccacgtgttctagggcccaggagccacaattactgagccagaacacctacagcctgtgctctgcaacaagagaagtcactgaaataataaacccatgcactgcaactagggagaagcccccgcttgttgtaattagagaaagcccatgagcatcagtgaggactcagtgcaaccaacaaataaataaaaattttaaagatacattcatggtctcaaaggatcttggtttactgtgcctgagaagtctagaaaaggtcagcccggtgggctaagagagaaggtcaacctggtatccactaagaagtcccatttgggtacaagagctgaagaagttttagaaactctagtctttgaattcacactaggatttccccccagacacaacatacctcaagccacgtatgtgcataatagcaggagctcaattagtggttatgaaatcagaaagtcacaaagatctgaaacttttatgaaaaaggggtgtgtgatagctcctcttcatcacatgaaacagtccctttgagctgtgattgtatctcagctccatcttatgactgtactttcagaaaagtctcttccaatagattgggagcagttgaaagtttaagggaggaaatatgcctaaaatatggccctctacataatttgccaatgccctccaagggctcaaagctagaatttcttatgttcacagtcatatttatttagccattttaggctgtaagatatttggtgcaactactcagccctaccatcatagcacaaaaacagccataggcaatacataaatgaatgag

SEQ ID NO: 53918 - DNA, 909 bp, Bovine  19866880625105
  misc_feature (1)..(1): n is a, c, g, or t
ncctgtcctcatgccatgacaaaaagccccaatcaacatttcaggtggatagtaaacagctttagggaacatgtggatctgagcccaaagtaggcaaaaccatataattctattggaggcagcatctcttttatgtcaaagaaagcactaaccaaattcagatggccagccctggctagacatgtttttcctttctatactgaaatgatccccattctacagtctctgaaacttccaactcctttgacaaatggcaagagttgacattcccatcaccatactgcttgccttctggtatacccagggaaaagcacaattataagcttgatttgaacaaacaaattaaaacataatacaaattggggccagttcctgggaaaataaaagggcctgttctgcatatgccctaatctctgttactgatttactggctgaatggcccactccagaaagcatttggagaagcccacatgccagaaagcactctaatgcttttcagttttcaatcaagtgacttggaatcttcctttgacaaaacacacttattgtaagctggccacttatcccaacctaggacacaacttatctgcagcataagggctataataaaatccagcttgagtgacagagaaaacatgagctaagggagctcaacttggaatccagatgttgttaactcatgtaaagtatctgagtcttttatattttatacttttgcaaacagtagggtacctagtatttccccccttacctttcaagtgctgtgcctataggaatgcaatctgcagagtactgctttaattaaatggtctttgcatgaacccaggtgacactccctgaaacgtgagatttgggctttaatggataaaccccaatcccaaatattcactctgtacttctagtcttaaa

SEQ ID NO: 53919 - DNA, 1101 bp, Bovine  19866880636795
  misc_feature (1)..(1): n is a, c, g, or t
ngaagcattaattttatgctttggcttgataatttttaaacttactataaaatatttatgtgatttgccaactaataccaatatttactagcatgtttttacctacataacaggaccttatatcaagtcaaacctttctacaaactttctatatgcagtgaccagagcaatcattctttgttcaggtggagaggtaccatgtttgaacggtaaggggatggtagttatgctctgtacacttgcttatcacgtttgttaaagctagcttggaaatttagtattcatacaagtatatatattctatattttttgttccttaaattataatgtagagaaaattttattaaattctgaatagtgttttagttccatcaatggcagatttgcttccataatggcacaaggtggccagataacaggagttgaatgtaaacatgcagcttcttcatactgcattgactgtgtgctaaaagctgtttatcatatttgcttgctgtcttggccagatgattgatagtcaataaaatcaataacaactgcttgttaaaagcactatggatttatctgtgccatgtaagatttattagattgaatggaaatccaattctacatttgagtttttgtgaataatgcgcttggataacatttcatggatgtggagggggtggcatagcataagtgataccattttatcaagttcatgaactggtgcatctgggtgatggcataaatatcagtagcataatgcaatggactacacacctttatagtaaagtcagctgttgattgtttgcatcaaaaatagtatgttataaagtcatttcccttcagctttgagtgagttataattacaactgaatctgtgtatatttgaccttctgagcatttgctccctaccaagtcaaaaagcctgttatgaagaccttcctggggtagaaaaactgtttaatcccccatattcacatttacttctctctgcaactggttttgttcagagactagataatgtcttagactgatgaacagcacaggtcagagcagcatggccctctcacagctcttcctggagtgggcagagagtataagtattggtgtcaaaca

SEQ ID NO: 53920 - DNA, 1647 bp, Bovine  19866880677455
  misc_feature (1)..(1): n is a, c, g, or t
naaaaacactagacaggagtcgggagacctcgggtccagccccagctctgccctctgccccagctctacccagctctgcggctgcaggtcacacactccccatctatgggcttcagtcttctcacatatgagtcaggaggtcaggagctgccacaattcactccctctccctttgcccatggcaaacatccctgatcaatcagtacactctttcctgtggaacccagactccacgcagccaccatcaaaccagtgcagttggtaaaggagacaaaagcatctttgcaatccccgtgcttcagtctaaaatctcccttattatttgagtagtctctgcctctatgacatggatggcctcaaaggataggtttgctcactggctagcatcgccaggaagttgagcgtcatgactttcctagaaagcagtcatgcacacctatagtccaatgccctttaccactgcagctctgggcagactagtgatgggtcctgctagggtgccatgtggaggaaaaccagtcgtaactataacccacagctgggtggagctttgccccaaccatgtccatgcagggggcagggctggccctttaagacctgacattgacttttggttggaatttccaaagaacatatcccatgagcctcgtttcaccatggataatcagactaattccacagattctgctgtgccaagtctttccttacttgctagcttcaatgtctgctttggcctcctgccctgcctgggaagctctggccacttccaccgtagattccacagcccatgaccttgactcaactctgtatctggctccggtcatcttgggctgatctggtgcctctctccccagtcagccagggcctagaagccctagaattgctctgcactgccccatcttccctgagcatccaactcaaatgcagattctgaactgactcttcccaaatgtatctgacttcatatcatttttcccatgagcatgcaagtgacacccagcttagggaggctcctagccctgctggatccatgaaatggtattgtctctgctactcaacagccttcaatagcttctgtaattctcttttctcatccacattcgtctacctgcttctaaggaccttggtgacccagcccatcctaggtaccacccagcacaccttcccaccccccaactcaagtcacccaggtcttcttactgtaccatcaacccccaagcccacttctacttctgcccaccagatattatattctccttgccaggcatgtcctgttctctttcttcaagtccaaaactaccaatttttcacaatccagcttacatttacctcaggaaatctaatacccaattatattttatgtcacaggatccataaatgttttgtcagtgttggcctttacttatcaaggatagtgaaaatttttggaggacaagaatctgccacaggacctgggtatctctcagtggtgacataacaaatcaataaacacattactggtcacctgttctatgttcagaatttctcagcaaaatacgtttgcgaattcattgttctaaccaagtaaatctactcagatgcatcaaattcttacccttttatgtccaacctggaccattacagatccttccctctctgaattaaaaa

SEQ ID NO: 53921 - DNA, 903 bp, Bovine  19866880714081
  misc_feature (1)..(1): n is a, c, g, or t
ntaatccctttattcacataagaggactctgcgtgcttccttcctttcccacaactcctgctcctcaagcccatgcttctccggggaccttgaggagacaagagcaaagaaaggaacaggtagtaaatgagcatctgaaatacgagggcaaaagcaaaataaacgttctcctaaaatgttcagttttttgaaaggttgaggtactgtactaaagcacattttcccagagcagaagaaaaaaatgattggggctggactgggaagtttattgcagcccattataagccctctccccccttccacaaaacaaacagcagtatgagttacgtctttaaaagcaaactataattaaggtctgttgtctacaaggtagatttctctgtgatgtttctaagctggcttgattttctctgcctcaacttgcccttttacttttgctgtttctctctcttcccatcctttcctttctgcctttggcctttccctcttcctttccttcccagtactcactattccaaaaagtgaatagaggcccacagtgcaagtatgactatgagagaatgagatttttatgtttaaaaaaatattttaaaagtcaaacttagatgagggacatcctccaggtaatgagttcaggaagtcatgtacttaacatcattgtccacattattcaagatgtttatacaaatccttatttagaattgcctttgggcaatttgcgcaaagctgtctcctcttatcccctcttgattatgcttcttcattaggtttagctctaaatgacagatttctgaagggaaaaaataattttaaaggaaattgtttttggtggccaagattggctaccaataaaaacacacacgtatgtatagcttaagtaatccttaagggcccttcacaatg

SEQ ID NO: 53922 - DNA, 1341 bp, Bovine  19866880754331
  misc_feature (1)..(1): n is a, c, g, or t
ntatgacacccccataggcatgtaatagacttgaaaggatgggtgagagaacttgtagaacctgatttagaaagaactgttcaagttgtttttcttttccccacgaagagtctgaagtggtccatgctttatttctctttcattttatcacactctaacattttctaatttacttactatgtttacttttttattgtctctcatccccagaatgttagctccaagagggtaggaatttttatctgctttttttatcttttccactgatgcatcccaataccccagagctattgtgtgtgtgtgtgcgtgtgtgtgtgtattcatgcatgtgcttagttgctcagttgtggccgactctttgcaactgcatggactggaacccaccaggctcctctgtccatgcgattctccaggcaagaatactggagtgggttgccatttcctcctccggggaatcttcccaacccagggatcgaacccatgtctcttgtttctccagcattgcagagattctttacccactgagccatctgggaagcccccctagagccatgctcaataaatatttgctgtatgaaatcatatctccagggtccttagctcagtgtcacatgccctgcttccccatttcagtgttcatggctctgtgtgagtcaattagtctaaatgtttctcttggcaaaatgtgtatattgcacttgttctttcttcagaaagccacatgttgactccagccctacatctgccaactgtcttgctgctgcccctcggagtgccttcctgcccagaagatccattcattctgtcccctctccctctatgttcttcctgtcattgttcccatacctggcaccttcccgtctatgggaacagtgtagctgagttcattacagcaaagcctttctggaccagcctcttatgggtaaatgtctctgtctcctgcttgtccaatctttctgttttccttcaaagcacttaccatgtgttctgttgttgaatacgtggagaaagaaatggccattacagtacaagatccagatataataatggaagtttgtggatggggtgcttccctggtggctcagtggtaaagagtccacctgccaatgcaggaggcacaggttggatccctgatctgaaaagatcccacgtgccatggagaaactaggcccatgcaccacaactactgagcctgtgttatagagcccaggagccacaactgctgagttcatatgccacaaccactgaagcgtctttgccctaaagtctgtgctccaaaacatgagaagccactgcaatgggaagcctgtgtaccacaactagagagcaacccttgtgtgg

SEQ ID NO: 53923 - DNA, 1698 bp, Bovine  19866880821347
  misc_feature (1)..(1): n is a, c, g, or t
ntctgacacccggccttcgctcccctgtatctctgcctcccgagctcagtcgggctggccgggggcggcagtttggcctgagcttcgttttggtaattcggaacaacgcaggggaggccactgggcgaggaggcggtcccagccgaggcgatttagcgattccttactccctccagtcctcctgtcccgcacccacctgcccatccaccactcgggacgccggtcttgcgccggttttatgctggatggaggaggccccgccgaggaagtcaagccttccccgctaactgtctctccaggtcttcaggtagacacagcctctgtccgctgtggttttagcgccagtgacctctcggaaattatttttacccgctctgctctcgatggtagccgagggagtgatgcaaaaggccaggggaaggtatttttagggcactaagactcaagataggagatggagactttttttggtcaccttttatttgttgggtctagggaaggagtaggttacacctttccagccagcctgcgccacttggaccagcttctggggattggagacaagagagaagaaccagcctccagctggctcccaggcccgaaagccacagaactacccgctcccggccggggcttctaccctcctaggtcttctgttgcctgctaatccggtgagccctcgccaggggccggcagtaacgcccactgggcccctcactaagggagtgatgaggtgcttctggaagtgacaaggagacaaggaaacaggacctgacaaaggacactaccccaaatcagatttatgctaacagaagccagctttaaaattgccctgctcttttgacccaaaaataaagttacctgttgaaggtatgcctctgtgccttgtttacatggcaaaagaaattccgttttgtgttcacagccgaagcttactagaaatagttgtttcattcacagcttttacattttgggaacaatgacattggaactgaatattgggggtggtgatcttttttgtctttccgcaatctatatatccattcggagcttatttcggataaaacaaaacagtttctaaggctattgcactcatgatttaaagtcatgactccattgtgggaaggaagacaagaagtatgttccaaggactgccgtttgaattagttgtgtttaattaatagactaaatttaaaaatttgtttagtagttgattacaacgttgacatttaaaagtggaggtttatactttttcctctcatttttgactttaatatgcattcagaatcagtgcatattgaacaatagttgacaaggtcttaatttgatatctaatgagataacccaagttttcatatgtgaagataaatgagacaagtgaggaatgtaacactatcatggaaaacagttcctaaatctgattattttttcaggcttcatgcataaaaatctagcagataaagaataacgttggattgtgaagcattgctgaaatttgaagtaattaggtaacccagggagtaaaatattttaaactacttttaaaaaacatgtgtttaagattgggtttattgtctaggattttattatagcaaaatttactatatgaatttttaaaatcataaagatcatgttattagtatgaataccatgataaacatagactcttcacatcttacactttgtaaactaagtact

SEQ ID NO: 53924 - DNA, 2264 bp, Bovine  19866880860848
  misc_feature (1)..(1): n is a, c, g, or t
nattctttaccgtttgagccaccagggaagcccatccttcctcttcagccaacttatcaataagtgtgtagtttagaaatgcgatgtggatcagcaaaagtttctgcaggcaaaagctttgagacttcttagaataaccatatttgaaacaaaaacgtcaaactgtagtcaatcaatgtctggctgatatctgagaggggaacccaggaggacggagctcccggccaactcccctgaccttgagtgagggtttcctttgagagttgctgcaggaaggacccttacaggtcagaggataatcactcaaggatccctagagactttgtgcaagtcagagccttcaaggtgtcatcctggcctcagtgcctagggggctctgatgagtatattcagtcagttcagttcagttgctcggtcatgtctgactctttgcgaccccatggactgcagcacaccaggcctccctgtccatcatcagctcctggagcttgccaaactcatgtccactgagtcagtgaagacatccaaccatctcatcctctattgtccccttctcctccttcagtctttagtctttcccagcatcagggtctttttcaatgagtcagttctttgcatcaggtcgccaaagtattggagcttcagtttcagcatcagtccttccaatgaatattcaggactgatttcctttaggattgactggcttgatgtgcttccagtccaagagactctcaagagttttctccaacagcacagatcaaaggcatcaattctttggtgctcagctttatggttatcagtgctcagttgcttcagtcgtgtccgactctttgcaaccccatggactatatagcccaccaggcttctctgtctgtgggattctccaggctagaatactggagtgggctgcctttcccttctccaggggatcttcccaacccagggattgaacccatgtctcctgtggctcctgcattgtaggcgaatcctttaacactgaggtactggggaaattattgttataaatcatgtgaaatgcattgcttcagaatagaaggaagtgggagaaggggagttggaggtcaggaagtagaatccaactgaaattagcaaaaggcccaaagaaaagcacgcttgcacttcctgggcacaatccactgggccagacacaaattcaggcaggaagactaagaactaaggtgaggttaagcgagtgcaccagacacaggggcctaataaatcctgtgaatgaatgaacagtgtccacaagccagcacacagctggccatctcagagagcacagctccagacatgctgccattcctgtgttgcagtcttaacctccaggacctcaaaatgtgaccttatttggaaatggagtctttacagaaatgaacagttttaaaggatgtcattagggaaggctctgatccaacatgactgatattctcatgaaaaggggagattttggaacctccccggtggtccactggttagaacaccgtgtttccactacaggggtccagtttcgacacttggtgggggatctaagatcccacaagctatgcagtgtggatcctcccccccccccaaaaaaaaaatcagaagaggaagctgaaagcaaagaaggaaccaaagactttgcacagaatgccataagacaacattctgtgggtccttcactgggcacatagaaatcctagttaattgttcatagatattttcatatgattttgacaaaaacagaagatcgatcatttcttttggcttgacgtgtgctgtgacttgcttgtgcattgcagggttcagtctagattgtcattagactgacgtctaccttcataaaataaaggtagcactacgtgaaaaagtttgaaataggatttgagaatagaatggtggttcaaatagctcttaacttttcgaaaaatctgatgccaagcaataagacttttcaagtctgagttgaaaatttacatttcccaagtcctgcctttctgaggtattgaaagagattagagaaaaagatttccctttgatataatttttctcattttcactgtgtgggaaaaaaaagaatgtatttcccataaatgggaactctgcccagtgtctcaagaaatgtgtattccagtgacaactgtgaggccctattggagataaagtccaaaatttactcatacttttagattatacaactaataaaaactaccttactttaattcagtgttctacacatgataatacaggacatgtttaggaag

SEQ ID NO: 53925 - DNA, 884 bp, Bovine  19866880921294
  misc_feature (1)..(1): n is a, c, g, or t
nattgcttgttttcactcaaaacttaatgataaattcagcccttacagctggagagtccctctggacccagagcatagcgggtaggcattagcagatctcccaaatgctagagaactaattaaatatttctcaaatcatcagagtttagatggaaaatgcttccagcctttgaaatgtgaagtggtgggatgggggtgtaggggaagaaaggacagagataagcatccaatctctgaaggcaatatttataacaccaaactagtgattcaacacaaacgcaggcaaggtttccaggacaggagcactacttcatgttgtatatagaccttatagtgcacctcagttctaatcctttttctcacagcggagaagatcttattctttaatttccacttttaaatataaagttttccctacttcagtctttacctcaatactcatccttctaagtttagattttccttgcaattcaatgcccaattttctacttcttccttcctctcaaattatccctttaacttgttcctacttatttttataggcccccaaagcctcttcctcaggataatgtgcaattcaacaggccctctcaattactccctataccaaagtttaactatagaggccaacgataccatttttcctgtttgggtttcaggaaagatactttttaactaaaattttaccactcataaatttctccactaaatctttcctttccctcatcctacactagattgtttcacacacaattacaatgtaatcaaacactcaaaatgtataattctataatcatacaaagatatcctaaaaatatatcattgctaatgtatgacacacaccctttataactctgttattgggagtacaagataaaaaaaca

SEQ ID NO: 53926 - DNA, 633 bp, Bovine  19866881060502
  misc_feature (1)..(1): n is a, c, g, or t
ntgggaatagtccgacgcccggtgctgcggaccttctccgaggtaagagcaggagccgcgtacccggggactcccttagccaacctccaagactggccaccgcgccccggccgctcattctgccccctgccggccgggcggcggcggcggcggctggacgggacctcgggagggcttctggaagtcgctagccccagcccaggcgatgtccccttctccgcgtctttcttctccttctcctcgctctctcagctctgggcgtcgggcaccggactggaaggaaggtcgcttctcggcgagtcggagctcgcccacgccaggaagggaggacggggcctcggggcagccgagccgggcagcgaggaaggcgcagagcctcgggcagcctctgcggcgaggggggaggccggccgggactgcgggctgcgaccccgggatcggtgctcgcgctcggctcccgggtggtcgggctggggacgcctgcccgtcacgccccgttgctgtgcccgggcggcggggccagctcttgagtcccgaattcctgggtgccgcctgttgtgcgcgcgccggcccgggcagcccggctgcgggaggggacttgagcgcggcgtctgtcccacagtccccgtaagt

SEQ ID NO: 53927 - DNA, 1257 bp, Bovine  19866881068011
  misc_feature (1)..(1): n is a, c, g, or t
nctaaagaacctatccccaccccatacccactccctgcccacccctgtaaatcaaaccaaagggactccgcaggaagaatatttctctcatctttttctctggacagaaagcagcagtacaaaacacgaactgcacagtgtttgcttgccttgggtggcagctgctagaatgcaacattgccatttgtattcaagggaccttttattcccaactgcttgagccaagccacagggcttgcaagaatgcttgggatgcttcctgtgaacttagaacacaaaggctcagtggtgtggctgtgaaataggaaccactaaagagagaagagattaaaagaacttttattatgcttgtaaggccattgccgttcatgtacagagtatgttgtgtatgcagaagatagctcgtgtgtttaagaggagatatatatatatatacacacacataaatatgtacatatatataaaatgtcttttttgggggacaattgaagttattgttttcaatgtctaaccgaagagtgttggaatgactcagtgggcactgagccattatacctatgattgaccaagttcaacaagggaatcatagaattaaaggagccctgtgtttttcttattaatggttaaaccatggcccctgataagagctcttcaaagtttacaaataggaaaatggtcactccagctagaaattattccaaaacagactccctgtttcacataatactgagcgattttggtatgccaggggctctgatagaagttgtttcctatgaaacattcaaattgataagtttccaactcattctgtctcttttcaaagggctgtgaaaaggtcaccagtagtaccacgtggtacaaaaagtgaaaggtgtggaatatttctatttacatcaaagtcagagaaaccatcacaccgttaccaaaccatggtaaaggtctttgagatgactaatgcctgcagttatagcttctctttcattaaccaaggttgtagtgaaaagtgaacttgagtttatagttcatggtccttagctgaaacatcatagatttaggtgtttagaaatatagctataatacaaacaagaccttgaatttcacctgaagtcagtgatagactctgttagctacttttccccttacgtatttttcccaaattatagctagatttaagagcagtttggggtaacggggaccctaaggatagattaattttcttcagtgtcatctaactgaaaaatagtggtcatatgcaag

SEQ ID NO: 53928 - DNA, 1304 bp, Bovine  19866881168291
  misc_feature (1)..(1): n is a, c, g, or t
ntggccctgaagggaaatctctggccagggatatggctacaggattttctggtctttgtgagttggctggtgtttggggattttccagtcatttattaccctggaaaagcaaccagactgttcattttaagtcaggatgttgaagtgtcactgaatcgctggggaccaacatctgggatcagagccttgccttgattgaagccagagcctcaatatcacttaaggacacagacgctccagcttcttcctcacattaatttgtgagtataaatatgaaacctctgttatgttccccacaccctctcaggaaaggggacagagttcctatcttggcttttcattctgaccttcaggcctagagccatgaagtgtctgtcgaaactgagactgcagtcatgttctagtgtttgtcatcattcttccctgcatgctggtgcttcaagggacactgcagaagcctcttttgaactattacccctgctagtactagtaataatacacagcgtttggggagcttcccaggtgacgctagtggcaaagaacctgcctgccaatgcaggagacctcagagacacaggtttgatccctgggtggagaagatcccctggaggagggcatggcaacccactccagtattcttgcctagagaatcccatggacagaggagcctggagggctatagttcatagggttgcagagtctgacacaattgaagcaacttagcacacatagtactttttactttaaaaagtgctttcacctttactgttattttaacaactgttatctaaccatgaaaatatatcagccaggatcccaggaggaatcagcggactcatttaaggagtctgtgcatgtgtgcacagtcatatacgactctttgcagccccatacactgtagcccaccaggctcccctatccatggagttttccaggcaagaatactgcagtggattgccatttccttctcctggggatattcccaacccagggatagaatctgcgttttctgcattggcaatggattctttaccactgcgccatctgggaaacccttaacaagtttaattgaaaattatttaaagaaggaaccatttacagagatatatctgagtccaatcaggaaaacagaagcaaggccaaatattttaataaagagaatatttaaagagtcagaaatctttacatgaagtatctatagtagtcaaattcatccagacagaaagtagaggggtggttgcagggttgggggagtagggtaggggagttattggttaatggacgcagagtttcagtttttaaag

SEQ ID NO: 53929 - DNA, 1584 bp, Bovine  19866881267313
  misc_feature (1)..(1): n is a, c, g, or t
ncattttctgccatcttgccaccttaagaccatttgggcatgctgatttatgttgtcacagcagttcaacatctagtcaattaaatctgaagaaacccagtttgtcattaggtgatttggaattccaacaataaacaactggttttgttgattgctttggctgaattgattaaatgcctctgagatatagtagaaacacttcagtttgtatgacagcattgcatttctgctttccagtaattatagtctccgttgagccaatatttccaaaggaaatgctgtgaaatgttctgaattggtgtttcatttacaatgtattattatctttattatatttacctgaaatagggaattagcaaaaacaaagccacaggtaaagcagaatagatgagctgcttgtacccaaccaaagttcatctagagaagttgaatataaacacagtatttctatatctgtgaggcacttagaaagtgatagtcattaaaagcccacaaatgcctcttggcacatctgtttatagtgatgaacttaaagaaaacatcaaggtcactcattctgtgtttaaagacttagggaactattccttcttaatgactgtgcatcttctaagtgcatcttaatgactggtggtggccagtggccaccgaacttgtgctgctcagatatctgctgtgatgagcatagttgactattgccctactagctgcccctctgaatgtaccactgcatttgtgccaaggtcacaattcccactggagaaggaaatggcaacctactccagtattctttgcctgggaaatcccatgggcagaggagcctattgggctacagtccatggagttgcaagagttggacatgacttagtggctaaaccaccaccaccacaattcccacaggctgcttctagtgactgaaatgaacatgatgaagatcaaatgtgttctgttcctaagaaacacgttgttgttcagtcgctcagtcatatccaactctttgtaaccccacggactacagcacaccaggcttctctgtccatcaccatctcccaaagcttgtccaaattcatgtccattgagtaagtaatgcctttcaaccatcttgtcctctgttgcccacttcttattctgctttctatctttcccagtatcagggacttttccaatgagtcggctctttgcatcagttggccaaagtatcggagctttagcttcaggatcagtccttccaatgaatattcagggttgatttcctttaggattgactggtttgatctccttgcagtccaagggactctcaagactcttctttaatgccatagttcaaaagcatcaattattcaacagtcagccttatttttggtccaactctcacatccatacatgactactggcaaaaccaaagctttgactttatggacctttgtcagcaaagtaatgtctctgctttttaatatgctgtctatgtttgtcatagcttttcttccaaggagcaagaatcttttaattttatggctgtaatcactgtccacagtgattttggagcccaagaaaataatgtctttcactgtttccattttttcctca

SEQ ID NO: 53930 - DNA, 2966 bp, Bovine  19866881300782
  misc_feature (1)..(1): n is a, c, g, or t
ncttcagcatcagtccttccaatgaatattcaggactgatttcctttaggattgagtggtttgatctccttgctgtcctaaaattgtctttatgttatacttgtccaggaggaattccttattttagacacatctattaaggaattttattgccttggcttgttagctgtagacaggagcttgggagtaaggatctttgagctactcaccacgccagttcaatcctccaaggagcaaagtgaggcagcactatgtgtgagctatcacatcaggatatactagagaactgctcgcatttggaaaacagtcttcagttgcaagcacagccatcagtgaaataactgtagcttgacattaatcttgtagcaggattacatttcaggccattgctttgcagaagatgaagtgtgtttgcctctgcttcagtgacaatggtgtaactgtatgctttgtaattgggtcctaaggaaggaaaactcaactttgttcaggatcaggactgggtaattgagcaacatttgagtttctgttattcccaccaatagctgagagctgtgactgagaaaaattcaattaatccctctttctcaaacagctatatttctgcattcttattggcctctataatagctcatgaagggtaaatagctctctttattaacgcttcattaagaatttttatatctatgtgacaagtggtgcattctttgcacagaatgaagtacttggagccttgattccagctggtctggattggaaaactcattattgttcttagcctgactgccaggaaactcctcaggggagaaatatagccttgtatatatggaaacactcaaactggattggtcaacttttataaataaaccgttggaaaatgtaatttagagggagaagtatatcaattgcagattgttttcttaattgtccctgttatttcccagtttcaaattttaggtatttttcataacaaaataattaaaagtagggaacaaagctcatcattcagtcttttaaaacaacatctttctgtaatgacaaagggaattataaatgactttataatttggaggtaaaactacaagatcctttatagttaggcaattgatagtcatcttgatcaagttctagactcaagtcaccatctcttgactcaaaaattggcaaaaccaggttagaatagacaagcaattgtttccagtggagaggattaaaacacaattatgagtacattcatcttccttggcccagggactctatcccataataccatttgcataatgggttactttgttcccttttaaatgttaaatttggaacattttattccaagagccatcaaaaaataaacacacggagttctaagcccacagattttcatatgtatctgagactaaaaagcagtccactttgcctgtatttaaggaaggataagcactttctcatttgtttatacacccaagatgatgtggctctaaagagttgtaaatatagacaaatggaagttagcatctcacttcatctaccacacgctcaacaagatacacaccccatcccccccacacacaccgcctctgttcctttctgaaggaaactggagatgccactttgttcattcgttggcttctgactgtccagctccctccctgtctctgatgtcttctactcctgagctgtactcctcagtcaatgcatgcctgcactctttcctcccctgggtccccagtgcaaatgaacctggcctatgtctaattgcctggatggcaaagtggtaacttaaaaaccagtcactgcacagagaggatctattattcaactcaagtggaacacatttaggtttttaagagggtgtcttgggatacacaggctccccaggtgacgggtcgcaaagagtcggatatgactaagcaactgagcatgcatcctgaggatatataacagctgagtttagtctttagtggagggaattcaaggtacaaggttgaccagcagatagatctttggcagggggagaaaattccatgttctcccatacaccatgtagagctactttctcctgtccccagttcagccctgcacagcactcagttcagagaggaagttaaaaagcactgcagccaacctgtcctgatgtttgggagtagttatcagtacaacaattgcccagaggattagaaagtgccccctttcagcctgccatccctctgaattactatagaaactaccctgcagcgtctcagcctcctagaacttaaagttctgcttttctaaagcttctgacattctatttgtattagtactggctttttttggggggtgggagattcaaactttgttggcaaggctctaggtaaggagattctatgctttttaatggtaaaaattcagcctccctgatgggttttccccaacacagctattcacgtagccagtggatgggtctccttggaaacagcagcagctcagtttctgcatctcctaatgacacactctctgtaccctcggctgctgattcccagcagttgatgccttgactagagcaggacactgaggaccacgagtaataagcatcaaatctgtgcttaagctggtgggaggtaggcttaggtgacagtggaggttctgcgaaaccaagatactgtccagggagcatgggtagctccgtacaaggttgcaacaaaggggggcaccagctgttctcaaagtaagggcccaacagtaggctgagcccaacagtgagaaatttgacaataaatgttgacgttcaggaggttaggcagggctgtatcaccatatagaggacatgggctctgccactgggcaaagagacttgttagcaatgggcaggcctgagtgatagaaagaggactaagggatgttccagaaacagctctcagatacagggagtacagctatatctgagtaatctgtactgggatactcagtactcagctgtacagatccag

SEQ ID NO: 53931 - DNA, 1088 bp, Bovine  19866880422218
  misc_feature (1)..(1): n is a, c, g, or t
nctgggtcaggaagattccctgggaggagggcatggcaacccactccagtattcttgcctggagaatcccaaggacagaggagcctggtgggctgcagtcgatagggtcgcacagagtcggacacgactgagcgactatcacctttccaaccaagcttgacaggtaagcaacctcaacccacattcttaattaatttctaacttaaagatgcccctgagcgccagggctggcgaagcagagcggagacagcctttgggcctcctcctggaaaggctgctccctgcgcctctttgagagaaaaactaacccagcaaaggcgtgcctggctccccgtcttaaagcttggaaactgagccaaagtgaagctgaggctgccctccttccttggggtaaatgcccagcactcggagggcgcccgtgagcgttcgcaggacccgcccagcgtgtgggacccagtcacccacctgctcggcagctgccctgtccggctccccagctccgtccgcagtcccctcgtcaggctccagagtccctgggtctccacccgcatctcgagggccctcggaaccaggcggggggctttcccgcgcagggctgacgccgcccaccctcttgtcccctcggcgacggagctcgagctctcgctccagccacagtctggatccaggctgtgcctggaagctggacaggccatgtttcccctccggaaaggccttcttggggtctggagggaagaattccgatgtgggcagcggggttttcacgctggtcagcgacaggcagagggcgccggactcggggccgtcgggcgggagccgggggagcgtccgcacctttctcaggcggctcttgtccaggaagcctctgtcctggtcagccggagcccgctgggcgtccaggaggaggcaggccagcctctcgggggccagcccctcctgacctgggctctctccattcttcacaggggaagacagcagagccttggaaggtggggtcccggggtgctctgggccttctctggtggggctcgggggccagccctccggggcaggcagggctcggggtcagcagaatggtcccccagctg

SEQ ID NO: 53932 - DNA, 1595 bp, Bovine  19866880760807
  misc_feature (1)..(1): n is a, c, g, or t
ntcctgtcctgtgcagggacgtgacatcagttaaccagactgtgattcgtgaagggtgtgcactgcgatcactagagcaagtactacaaacacaagaaaagaaaagcttataatggaaaacccagtggagaagataaagtcggatactaacaaatattcgattaacccaaaagggggtggaaagacacagaacatacaagacaaaaggaaagcagtgaagtgggaggttgaacctgagcacgtcaaagaaggtattaaagtcaacagaccaacactcaggtacaaggcagaggttaccccactggacgcaaaaagcaagacccaactggaagccgttttcaagagagacgctccaaatacagagacagagaggaacagtttaagggggcagaagatggactctgccagcctcgggtgtaaggaggactggtggggctgtagaagtgtgatcagagacaaggttcaatcagcaagaaaatgtaaaatcctaagtgtgtatataacggcagagcttcagaaatcaaataattagacacatgacaattacagctgtagatgtcaacagtcttctccagtggcagacagaagaaaagaacactcagcagatcacacagctgtccttgacagactctccccaaggaccctgtcctggtcttcaggtctccaggatgccaaggcccactcgggtgggctctcccccacctcccaggggatggagccagcttgccattcatccctagagtggacttgaccgggccctgcagaccctgatccttgcaggccaaggagcagcctccttctcccctggactcctgatggacagggtggccgagtagctggcggctcctgcattcaggtccctggcttcagggtgtcccggccatggggaggtgggtctccccaggaaccagtgcttttctcctggagtgagtctggtgcccccaggccaagctgcaggaatgcatgtcttgtgagtgcacgagccgctgagaggagagggctcgtggcacctgatgttgcagggtctgaactgtaggctctcagttctcagcgcagagccaaggccgctgaacaaggcctgctctgcggcctggggacagggcccccttgctcccgcagggccggacctcgcctggggcggggcctccttccactcacattgccgggcaagacaccctacaaagtagccattcagacatcagtttatgattctgtctcatgactctgcgggttggctggactcagcggttagttctggttccgggacgttcacgggcttactctggatgcccccagcaccctcccccaccaggcggctcctggggctctccccttctgcagcaccttcccgggagcctcctgtgagcgaggtgcttgtctgtctccagggtggaagttcagctgctggcggagatgctgagctcggtggcctgcatccagggcaggagcatcatggagaacctcaaggggcggaagcagctgcgcctggcagccgccaaggccttcattgaaagcgccaggtgcgcctcggctctcgagggccactcgccgtgggtggagatgctggggaccacggcgcgtggtgttccgtggga

SEQ ID NO: 53933 - DNA, 587 bp, Bovine  19866881015642
  misc_feature (1)..(1): n is a, c, g, or t
ncccctggctgcttccccgagcgaggtatggcccgcacgtctgtgcaggatacacatctgggcggagctggccaaggtggcccggaagcagaacgtgtgggacgtgtgccggacggccagccgcttctgcctcctgtacgacagtgtcaaggtgaagaagctggccaagttcaagcgaggtgggtccctccagacacacatgggcatctgcgccggcgggctcttcccaggcactggggggtcactgtggggttcaccagagctcaggaaggggtcatggggccggagcccgcaggcagaggctgggcgggggcgcccctccactgtgagccctgggtccggctgagtccagcctgcaggtctctggaagcggtggtcttggggatggtgaggacacgggggcatgccaggagccccagggggcggagacgtgggtgttgcgggagtgatgggggcttcttgaggggcagaacagcacacgcaaaaccaagagctgacctgtctgtcggggaaccagctggaggttcgctgcggccaagctggcttggggagccctcgctgcccccagggccctgcacttgggaggc

SEQ ID NO: 53934 - DNA, 838 bp, Bovine  19866881425542
  misc_feature (1)..(1): n is a, c, g, or t
ngcccacagagcaggacagaggtgcggggtcctgagcacccacgtcccagatggcctgcctctcacctgattgggtgtgtgtacgtgtgcctgtgtgagctgtgggcgtgcgcagcgtgtgtgcctgctggctgagtagtctaaataggtgtgtccgagtttgcacatacatgtatgtttctgtgtgtgctgggggggccacatgtgatctgtttggatacgggtgcacgtaagtgtgggtgcttccacggtgtgtgaggacgctggtgctaacgtgcacacccacacgtgcacggctgcacgcgcggtagtgcctgcgcacgcgtgctggcccgctggcgggtgtgcttaccttggaacgccccaaaagactcgatggagagcactctccttccggcggccgacaggctccggcacaggcggcaggacgacgtgagctgcatcttctcctcgcacagcgcgatgatgctctgcggcgggccggtggtcagcccgcgcccccgccccagggcggcccccaccctcgcccgttaagccttccaagctctggggtcacgggccggggctgggggtgcttacggaaacccgcagattctgtcccgcccgtgaccattacaaggcgcacccttcatcgccgaagtgcacagtataaaagtcaggagcccggatgaccaggtggtgggggccccgcgtgcttactgggtgtgcgagcgcgggccggggttgcgcagggttcagggtatctcctggggtgaagcgaggcaggcctgtgagtttacctggaggtcgggccggtccccggggtcctccgcctgcatcggcccagcagcgcctccag

SEQ ID NO: 53935 - DNA, 1644 bp, Bovine  19866880265901
  misc_feature (1)..(1): n is a, c, g, or t
naggcttttgagttcctcttcactttctgccataagggtggtgccatctgcttatctgaggttattgatatttctcccggcaatcttgattccagcttgtgcttcttctggcccagcgtttctcatgatgtactctgcatataagttaaataaacagggtgacaatatacagccttgacgaactccttttcctatttggaaccagtctgttgttccatgtccagttctaactgttgtttcctgacctgcatacaaatttctcaagaggcagatcaggtggtctggtattcccatctctttcagaattttccatagtttattgtgatccacagagtcaaaggctttagcatagtcaataaagcagaaatagatgtttttctggaactctcttgctttttctatgatccagcggatgttggcaatttgatctctggttcctctgccttttcgaaaacgagcttgaacatcaggaagttcatggttcacatattgctgaaacctggcttggagaattttgaacattactttactagcgtgtgagatgagtgcaaaattaggtatatttttatcttgtttttctaacattttagattgtttagaagcatttgttatatatctgatagtgtgcagcatttattttctcatttttattaaacagattacctgcttaaatattttattaggctatatagttccctatagcagatgttatttcactaaatttatgcctttgtttactttttgcttatctttcatgtaaaatcacttactaatttattgtatttcttccttctttccattacattcattagtagataatctgatcaagttcatatcctcagtggaataactgactgaaaaaattctgtaaaatgctggcaaatcaaatagaaatcttataaagtataatcccaggtattggaagtgtagtgctagatattttatatgtagaaatctaagaaaccaataatgttatactttagctaagcaaacattttcatatgttctcatacttggctttcttagaaaataaaatagcacccaggtcaaaatttagggcattaaatctgaaaatttaccttaaatcttaatatacatttccattttaatcaaggattacagttttatacttttatagcagagactttggttcatatttatactttatgattttgttcatatttattttaggcctcttttaatttttggttcacaaaaaaaggcactggattaaccattgatgaaatataaaaaaagagaagactatcaaatagtagtttatatgcaatttttcatggagaaggggtcattattatttaggactttctccagtacattttaggaaacaaaagcaatacctaaatttatttttccacatctcataacggaaagtcaattgtagaaattctatagtataataaattgatttagcaaatatttactaaactttctatatgcaaataagtacagatggatatagaaaagatactttctctaccttctaggaatttatacactgatgggaaagatttcccatcagtgtataagacataaaaataccataaatatgtatcatatgtatatatatgtgtacatatatatgtatatacaaagtgagtaatgctaaaaggacaaagaacacaa

SEQ ID NO: 53936 - DNA, 1504 bp, Bovine  19866880445306
  misc_feature (1)..(1): n is a, c, g, or t
nctgggtcgtcctagtgcactagccccaagcgggaaatttttaatgttatattttatctagtaaaaatagctattaaaagctgctgtaccaccttttacttggtacttcattcatttttagatttaacttatgtttggttaatatgttaagaaaattattttaaaagagtgaagagcttttttttttttgaggagctctatttttatgtaaaaacatttctttttttttcatttctttgaacatatatattatattcccactcattttatttagtgggcagagttaattttttatttttctcaagattcaatgtcacaatatatgatgcatttgaatctttttagacataaaaatgaaatgggaatctgagttcttgttcgcagagctgaagaatgaatttcacaaacacacaagcaagcgaataggatttattaaagaaggaaagtacaaacctctcagcatagactctgagaggggttaaacagtcccccaaaggtggggcagcagttttaatagcctgaatatctacatttttggttgtctcctgtccttaaaatgcatcatttttaatcattttaaagatcaagatgcttaacttaacatctttatggtttctcttgatcctcggattaagtcatcagcctttttcatgctccctggccagtttacagtggaccagatgtatgagctaaagattaatgatcaccagttgtttttcccacaggcatatggaacagaagttaattactgcccttccctaaatctgagtgtgataatttatcagaccacggaattaactttaggccaatggatgtgtattgaaaataagatctaggtctcagagtcttatactgattgcctagcaatttctaccttaaaaatagcaatatggctgttgacatttttatatttatgactcagcattttatgaattgttttattattaactcaaaatgttacaatttgctctcggtttgaaaggttagatttaattataatgaagcattaaggattgataattagaatttgaaatcaaaaggtcagtctatttattgtgaagctacttgaatgaggtgagaatttcacgagtctgtcagtttcatcttgtcggttagtgatcatgaaaactccagcaggattctgtagacagcgctgtcttcaagttctccttcagttttttttctccctgtgatcttgtaattagaaaagtacaatttggaatggtgttaacagtttatggtgtgcttgtaattggaaatgagtcacaagaattacctgtttttctcatttgagttaataggcataggctagcatttaaatacatgttcaaatactattttcaactcatggtaaacacaaagacattcataaataaacaaaaggagtaacagattgaaagtctttatacttttttctaacattttatagtagagaaaatgggctaataaaaggagtagaaggaacactctgttcagtgagtgtacagatttatgtgaactgggg

SEQ ID NO: 53937 - DNA, 1574 bp, Bovine  19866880466550
  misc_feature (1)..(1): n is a, c, g, or t
ntcactcataggtttgaaaatagaaagttttggttaaccctgaattactcacaacattcaggtgatctctttttatttgacaatgtttgaaaatgcagttataaagaggttattaagttgaagataattttacttcgatatgaggggattcactaatgttttatactgacgtccgtcttagaaaatcaatttctgcttgaagtgaggctttgttcacgttacatttcttctggtactgatgctaggtgtgcactcgtgtggcacctgctgcttgctgttttcaacacctgagcgatcttaagattcaagccctaactatgaagaacagctgcagccagaaggtaaatggggaccgtattcttcaaactgcagcgcagaacaagctggtaacatggaagcagaaggtattcaagaatgaaagaaccctaacattaaaagatgttgcagcatgagcctcttactcatccttttttttaaaaaaaggtgctaattactacagttttctttttatccttaatacatattagttagtacgctgatatacacttttgagaataatactgcttagctacacccataactttgagactgtatgcaattatgtttttctcttccttttgtcatttattcttcttttaaaaacactcctttttgttcctggcttcctttaaggagcagatggtttaatggctggtatttgacattcttgattaaataattgcattatctaaaccatcttctagttttcaggaacctccttttgtgaaactacaataatgtctagtaaattttctctaatactctcagtctgtgaccaacttagactgtcatatcagtacctgatactgtgaaacttggaggaaatttcaaatggtttcaatcatcatttctgttattgtgctattctgatctcctcattttggttaacagatgatttatatttcaatatcttccatatatacatcagttatagaaaaaagtattgatattttgattattcttaacatcttcatttttctcttaaattttgtgggtttttttgcaatttcagtagcaatatctataaaacattgagttcatatgacttcgttttatgtatattgattagaaaagctcactcttttataaatgtttccatctagggttacgaaggtgacttttttcaaaaagcacagtggaaatgaatccagattttggttaacagtggacggtcactttaagggacagtttaaagccacgtcacgcactttggggcaggtctgccccttctaagtgttcctcctgagcatctctagcacatgagtctcatgccagatctgactacctaggctcttgtgcccccctcagcctctgagttctaatgcagataaacaatcagagtcttccccagcagggatgtgtgagtctcggaatgactgtcttactatcacctcttcctgcccataatctggcttttgccatttctttggaggagcttgtgataactttaggttttgctggtcttgagttccatcggtagtggcaatggtgactgggatgaggacaaaatacgttttagcacaattcctcaggtg

SEQ ID NO: 53938 - DNA, 1626 bp, Bovine  19866880509077
  misc_feature (1)..(1): n is a, c, g, or t
nccccttgggagagcatcctcttgagggagccaggcttagtgtcctcgtccacctgggagtggagggtgctggcctcaggtgcctccagaaccccagctgatgttgtgactctcctaggctggggtcctggagaacacgcttgcttcctctctacctgtcccttcacttaactcacctgccctgttacctgcccctcaggattgagactggagacacagagccggccttgaaagccctttggtagtagtaatggctgcactcatatccggtccttcgtgaagtgctgaactcggtgccaggcactggattctgggccttaatcctcccacagccctgctgtcaagtgcttgtatttcacactcagggagctgcagggacaaaacgcagcaggggctcttgggattggaaccatggtctgacttcaggactcacgcacacccttttacactatacccaacacccaccagtgccagggagggcccacatgtgtgtctgctctgctgggcgaggcacccaaagaagtggtcccggccagatcagtccctgtctcctgtctccagactcaggagtggcctctgtagccagaaaagggtgtttagggagctgctctcttctccctgtggatctggggagccccacgtattgcacccctcccttgatgaggatgaccgtctttacagcctggggaggtgagatgctcagggagggcccacctgggccaggatgacttctccacatggctgtgtcctcggagtgcatttggaccttactgagcagtaacaacagatattattttttattttatgtttttaaactgcaagcactattaaaccaaaagaatgcccactaattctgtcattacattttattgggcctagtaaagatcacttatatccctttaaatcagattttggcttcttatgtgcacagttcacagcaaaatggcagcaaatgtccaagagctagaatgaaaagatggaacattaattcttctttcattgctacaggagtaagtgtaagctggaggatccctcatcttctttgcaaaatctggctctatcccttaccagcctggatgttagcctttctggaccccagggtcctccattgtaaaataagactaagctggctggtcaggttatggggtgttatggggcatggtgacaggctgtgaataaacctagctgtttgtgcagcgcctggagcagctggacgtggactgctgtatcccctcatctgaacccaactcttaacaccaagatgtccatgaagaatattgaccagcaggtgactggagccgtacgtagcgtgtggcacttggattcatttgttcgctcactcattcagtgaatgttttctgaacattgccttattgttgttcagtcgctcagtcctgtccgactctttgaaattccatggactgcagcacgccaggcctccctgtccttcactatctcccagagttctctcaaactcatgtccattgagtcggtgatgccatccaaccgtctcatcctctgtcacctccttctcctcctaccctcaatctttcccagcatcagggtcttttccaatgagtcagctcttcacatcaggtggccaaagtattggagcttcagcatcag

SEQ ID NO: 53939 - DNA, 1044 bp, Bovine  19866880539736
  misc_feature (1)..(1): n is a, c, g, or t
ntattcaaaggtgtgcaaccaatactgcaatctaatttgaacacatttttatcacctcagccccaaatcttacaccctttagcagtcattcttcatttccgtccttattaattttattttaaaaacatttaattttctactgtttcaggatgtggtagcatacaggaggtagtcaataaatatttgatgaatgaatgaatgaattgccaactgactgatattacagctatttatgactggcatctttaggggtaattcctatctgctagtttctatattttcatttttaaaaaatgtggttggtcttcaagcatcttatattaaaataaatgaaattttcagtctcttgaaagttattttataaaatccatggtggtagtattatctttattgtgtctaataaaatgtggatgatgagctactattataccaatatgttttggaaagtgttgaggtcactttaacatagatgataataatcagtatatttgaacttataacctttgccacattggcaacctatcatcaatttctatgatgacagactaaacaaaattcttcaaatgcaggttaactttattacattgttgagctggagacatataaaataaaatacttcttccaatatgaccttatgctaaaaagtggaatgagcacagactatgcataaccacaaattaccttttttataaaccatattttatttttatttaagattgtcagcaaaatcttcttttcaagagcaattcaatgcacaaccctcaaaagcgatcaaattattatttgtggtaatggtaaaaaaaatgtttaggcctccactttaaaatatatccctaaaattttagttcttatatggatacaatcacttatataattgcattcttccagataccagttatttttaaatgtttggaataataaatctctcaaagaactggtttaatttgccacagaaaataggtactatctctagaaagaatgactgttataaaataaatttctcaaactaaaatagatacttcaattatattttttaagtacagt

SEQ ID NO: 53940 - DNA, 3970 bp, Bovine  19866880583072
  misc_feature (1)..(1): n is a, c, g, or t
ncccctttagtggaggcacagagtcttaaccacaggcccaccagggaagtcccccagggacattttcttatttccaacttctaactcagtgctggggcaaggagaaatcactttataccacataaggctggatttttatcatgatcatggttgctcaaaatatgacttcctcacttccctgggaaagttatttctggtaccaaatcaccacctggcttttttaagataaattattaaaacccaaatcacagcaattaataccaccattgttatttgcttcagtcaaaaagctgcagcccactcaacaccaagaagaccttgctgtttgttaggacggagaaggctgcattttgcttgagattctgtagaacgtatttttattctttgtgaattttcattcaattgcgttttcctactccctttctgagctaatttcaaatgatcaagtttagggtgatttctgccagactcagtagtttggattaaaagtttgggagcctttggagctgagcctgatattttaaagatacaagaaagccctagaccccaacatatcaggcttggggcagcctgatcaaaactccaagctcagtctgagaccagcagcagcaggccggccccccaggaacgacagaactctgccgtcccctgaatcaccaaacagaaaaggggagggagacctcgagcttcctccagcagttcttagtattctaatcatctcctgaatacaaccaaatccccagcatgcaggtgatggaaattttaggagctggaacaagcaatgactaataaaaccctgagagaaataccaagaaagtgaataaaagcggtgacagaaacaagatacaagactgcttgtgtttggtgaaataaataaagcataaacgaaaacacaatgatgtgaaggatacgagaggggtatccataaaagtcacataaactggcggtgctgctgccctgatgggctttatcctcgagaaggtttctcccttcccagctagtagacaaagacttcaccatgtttcaaagataaagtgagcgcctggcctaagaaaaccttgggtgggtacataaaaaggggccatctttttctagaaaaccgtttgccaatacacgtcataatttaaaatccacgtcctcttcgagccaacaattccactgcagggagtttccctgcattcttacacggagtgccaagatacatgcaaaaggattttcatggcaggataatttgcaatagcaaagcacttgaaaccatttgatgtctgtcaacagtgaactggtaaaagaactcatggtgcatttggataaggggatattagggcacctgatgcaaagagccgactcattggaaaagactctgatgctgggaaagattgagggcaggaggagaaggggacgacagaggatgagatagctggatggtatcaccgactcgatggacatgagtttgaacaaactctgggagatagtgagggacagggaagcctggtgtgctgctgctgttcatggggtcacaaagagtcggacatgactgagtgactgaacaacaacacaactatttttaaaattagatgtacatccactgaaaaggaaagtggtctatggtatatgttaaataaaaagcaaaggtacagaacaatgaaaatacagtcctatttgtgtacatttaaaaacatgatagatacatagataagacagaaggtgtaaataggcggatagataaatagatgatgaatagatggatggatggatagatattacctagattcagcatttttacgtctggatattatttttaccaatagtgttaaagaagaaaagaataaagtaaactgaggtgtgcagtggctggaaaccagctcagggttcccgtccttcggaagaaagaggcaggtgcagccttgtctcagcccacactcaggactgcagtttttctatttgtccagcaaagccccacagagcccaagaggcagtgagcatccgccccgcagaacctctttagagatgaattgccacagtttggagaagaagcacctcagaggtgctgtgtacactctgtgcataggagggttttttaaataattcctcactctggttggtgacatgggatgaagtcctctctgtgcagggcccatccagacaaggggaggctgggtcggctcttctggtgacaagagcgtcaagggtttgcctaccctgcactgtggatagtgccctcagaatgctcaggacaataatggcctggtaataacagctggtgggaccagatgctcaccacgtgccccccagaccaggatggatgggctctgtgcatgggatctcattcagtcctcacagtaactcctagatagaattaatctcatgttgctgcaaaagccactgaggctcagagagggtgaatgactgatgcaaagtcacacagccacgggaaagctggacaggaattcagattttcgagggctgtgcccattcaaactcttctgtgccctccagcctgttgggggaaagtctcctgacttctgagtaggaaagctcacagatccacccgcattcccacttcatttccctccacccacactggaggccatgttgtgagagcagcccaagctgacatattgcagcatgcgttcgtcttcaaaagataattacattccctccctcgccttaaggaaaagaacagcagattaaaaaagaaatgtaacaagccatctgagtgccaggaccgctcccccaagagtcccacttccatctcggtccctcactctagacataaaaccaattaaagtcgctgcaacatacacagttaacaagtgacaaaagcctgcctaactgctttcaggatctcatttacccgcagactgtgcccagaaaagcatggctggcctgttactgtgagatgttggaggtacttgacccagtaccaacttcgaggggcgcccagtcacatcctcagaacacaccacccccaactcccccagctgtcactgtcagagtggctggctcaggaaaaccgcttcatccctcataccctaaatttgacctctcccacttctgcccccatgactggaagatgtgtggggagagagagcctgtggctttagcagctgcttttatcttatctcaggcctagggtatctactttcgaagtggacagaccaagagtagtaatggaaagtgggtcttattcccttgacttgccaggattccattcctactccaggacaggattttcagaaaatggtacccaaattgagaagaaaatggacaacaggcagaaagaaaaggtgatttctgcaatgcacgagcctcatctaggcttgcttcccttgaagtcaatcgagaatgaatccccaagcctctcccactaaccgtgggaaccagtatcggaagaggaaagaagccactgcgctctgatgcgaagctccttggtttccattcttccagaacatttctgtctctgggggacccttagggtattcagataatatctcctttacctgcaagtgcttacagcttaccaagctcctttacacacattctccttccgttcttctgctgccaggtggggagttgttgagcacctccattttatggatgtgaaaatagaagcccagaaaggtctttatcctgcaagtgatagagaagccccccttccccgccctagttgtcactcagccccgcctccgacaacatgaccttctccttagcttcccttctcctttgctggcatcttctcactcactggggaatagcaaactgttttgactatcagcttttgccgagcacctctagagtttattttttaattccactgagtttttcaaggcaatttttaaagggtattaagtgttcttctgtaatctgtgctgtgtgcttagttgctcagtattgtctgattctttgcgaccccatggactgtagcctgtcaggctcttctgtccatggaattccccaggcattaatactg

SEQ ID NO: 53941 - DNA, 1847 bp, Bovine  19866880642512
  misc_feature (1)..(1): n is a, c, g, or t
nctggaagactaatgcattaaaaattaaatggagtcagtagaacttgagattttcaagtgatgggcaggatgcaggcagccagtatagaaggaaaaggtcaatccaagccaagggactcatgagcaaagaagagtcagaaatcatagtgacttgtaagtggggagttgctaaggcagttggaagatggcaggaaggcccttactcccaagattcatttgaatttgatttggtgggaattaggaaaccatgatgggttgttgaacagagaatgatctaaaaacacagggtttaagaaaattagctttgctgcagtacacaaactcagttgtacaagattaggcagaagtaaaagactacttaggaaaaaatttgcagtaatccaggcaggttggagtccagatggtgataggaaaggagagtatctgatggatttgaaaattattgcaaagtaggaatcaatagaatttggtgtccctgatggctcagcagtaaagagcccacctgcaatgcagaagccgtaggagatgcaggttcaattcctaggttgggaagatcccctggaggagggcatggtatcccactccagtgttgttgcctagagaatcccatggacagaggagcctggcgggctacagtccatggggtcgcgaagagtcagacatgactgaagtgactgagcctgccagtaacaaaattgaattaaattcactaatatatcatttattcttttgtgcatcttgcctttatatgttaaagataatttcatgttaacagcaaagttcttaatataagttgatttgagagctcttttccagttgaatgaagttgttacagtgttggaattaccctaaagattttagtaagcaagacatcattaaaaatcaggtaatctatataaatacaacattgagaccattaaaacttaatgtcattacccagttttgaagggacagtaactagccagtcagaaggtactttagggttagatatcctggaggacaaataaaagaaaaatttcaggattgattttcctaagaatagccaggaaagggaccccaaaacatatccctctaaaccagggtatcagtccctgaaacaaaatggaacatggaatgaggttaaagatgcaaggatccaactagagcttattcattcatgaaataatattcctgtacagcaaagtgaatcagctatatatatacacgtatgtgcatgctcattcagtcatgtctgactcgttgaggccccatggacttgggcctgccatgctcctttgtccatgggattttccaggcaagaatactggagtggcttgccatttccttctccaggggatcttcctgacccagggaatgaacccaagtcttttgactctcctgcatttgcaggcggattctttaccactgagccacctgggaagccaacatatacatgtaccccctttcttggatttccttccatttggatcattgcagagcgtgaagtagagttccctgtgctatacagcagcttctcattcacggtacagcagaaactgacacaacattgtggggactttcctggtggtccggtggctaagaccatgttcccaacacagggggcctaggtttgatccctggttgggaaactggatcccacgtgctgcaaaagactcagtgcagccaaataaataaatatttttctccaaagaagacatacagatggctaacaaacacatgaaaagatgctcaacatcactcattatcagagaaatgcaaatcaaaaccactatgaggtaccatttcacgccagtcagaatggctgcaatccaaaagtctacaagcaatacatgctggagagggtgtga

SEQ ID NO: 53942 - DNA, 1546 bp, Bovine  19866880645832
  misc_feature (1)..(1): n is a, c, g, or t
nagttcactgagactcacgtccatccagtcagtgatgccatccagacatctcatcctctgtcgtcccccttctcctcttgcccccaatccctcccagcatcagagtcttttccaatgagtcaactcttcgcatgagatggccaaagtactggagtttcagctttagcatcattccttccaaagaaatcccagggctgatctccttcagaatggactggttggatctccttgcagtccaagggactctcaagagtcttctccagcaccacagttcaaaagcatcaattcttcagcgctcacccttcttcacagtccaactcttgtttatcaacccacaaaaaagtttttagcaatttatgttgtgaacatattgcttctccagtttcaccccctaggctttgctgggttttcatctttgcaaatatgatgatggaaacaagtaattttttttaatatgcagatgtattacattctaagttgataatttactttgtgaacattttaattggttaagacaaaaatatccttcaagggttaggaaggtgtttttaaaagctttaaaatatattttctgcaatagtagtaattaagaagtaaatgagtttttataatattatgtttctgtatttcaaaacaattccctagtttgtatatttttttcagagaaataaaagcatcttttaaaaaatgtatttaagataaattttatgatcacttaacctaaatttctataaaatcttgacaatattatctctttttgcatttggctgactagattaccactagagagtatttctctgtcgctaaaaccgtgctttacaatataaccttacacgacactgtgttacttttcttgaattctttttaattttccctaaatgagagtacctaatgacttccttatattttcacattaagaatcttttccataatgaccattttatgaaggttcagatcaaattattgaaatatctctccctgagttcctatgtttcctttttttttttttttaatccctgtagcttatacacttgcttttaagagtttcttttcttttctgtttctcctgtttccattggggaggattttttgaagggtgtttaatagttcccatcttctagactgttatacagcagacttaaaaaaaaaaaagacagctcagttacttcctgtacccttgcttccctccacaatacctataccaaggaacaatccaagctattgtaaaatacaatagaaaacaagatatgaaagacagcagcaaaactaatttttatctgacaaacttgctgcaatattagattaaaggatgtttgatgttgcccattaggacctttgacctaagaaatatattagggaaaagataattggagcagataaacccagaattttggtcactttagataataataatacaaagttcatttatcattcacttaaagttcagtgtgcaaaagggaacatgtggaaggggcagagtggtatgtagggcactgtgccaccagtgaaattagacgagaaaatgtcattcttcaggctttcagga

SEQ ID NO: 53943 - DNA, 1568 bp, Bovine  19866880696878
  misc_feature (1)..(1): n is a, c, g, or t
naaatgaaaaaggttgtgtctagaaaaaaaaaagggagggggaaaaactcatgcttgtccttagctaatcaaatgagtttgagtttgtatgtgctagggaataaagaatcaagctgtcattgtctgcccttgatcaaggtactggttatattgtaacagtgttttcggactcaaattaattaatatactaaaatagctaactccttcaatattagattcattcaagttctacaaataccatgttcattaaatatactattctaatagtgttttacctaaatatcacaattaaagtatatgaatatttcagtgaatggcaagccaaattagaccataattacacagatattaaaataattttaaaataaataaatgtaacatactacatagcaagaataccaggtaatttcttgataaagacagtatatgtcattaaatgccaatttagcattacttccagtacaactatgactctaggggatgagaaaggagaattgcctctctaaaggggacatcaaaatcatccagagtagacattttcaaattacactattttgaaatgttctctttgactgagaatccctaatacagtaaactttatatacgcacatgatactaccctaatggcacaaagtgaagaggaaccaaagagcctcttgatgagggtgaaagaacagagtgaaaaagcgggcttgaaacttaaccattccaaaaaactaagatcatgttatctggtcccatcacttcagggcaaaaagatggagaaaaggtggaagtagtgatagatcttattttcgtgagctctgaaatcactgccgatggtgatgacagcaattaaacttccttacagcttaatccttggaaggaaagttatgacaaacttagtgtattcaaaagcaaagacatcacgttgccaatacagatccatatagtcaaagctttggtttttccagcagccaagtacggatataagagttggtccaaaaggaaggctgagtgtcgaagaatcgatgcttttgaattgtggtgctgaagaagactcttaagagtcctgtagacagcaagatcaaatggatcaatcccaaaggaaatcaaccctgaatattcactggaagggctgatgctgaagctgaaactccaatattttggccacctgatgtgaagagccaactcactggaaaagatcctaatgatgggaaagactgaaggcaaaaggagaagtggacggcagaaaatgagatagttagatagcattagtaactcaagacatgagtttgagcaaactctgggagatagtgaaggacagaaagcctggcatgctacaatatacggaggtgcaaagagtcaaatacaacttagtgactgaacagcaacaacaatttaccataaaccattacccgtgatggaggtgcccagtatcaattgtttcaatttattactgttttcatgttccttttaatatggttgaattaataggaaaaaaacccacaatttttcagggtgctgatattattaataaaagcacttttattttgaaataataaatactaagcacatgacagagataa

SEQ ID NO: 53944 - DNA, 1128 bp, Bovine  19866880711710
  misc_feature (1)..(1): n is a, c, g, or t
nctcactcctgtcctctcccaactcaccagtgccttgcctaattgcactgctctcctgaatgccaagaacctcaggttttaaaagacagaacaagactacttctgctatgtttgttctcagggaaaaaatattagggaaacctcccccccgccaccaggagctgaattacccagattattaatggcaagcagaacaccaagtctttagggattttccttccagagggccatttcagggaaacagcctttctgacttccccagactgcatgacttccaagctccccctctccaaagttacgtacttcacttggtttgacttgctctcctcctccataaccatgctttccctgcttacttctgttctgtgcagtcagttcttcaactgagatgcgtccccggtcttcacacttgctgcctccctgctctttaataatccctgcctttgtgcattcattattcttctaccccacttttttagagacaagtcctaaagaactgaacatcaaaacgccagcacagagggttccagggagatttttacaaccacagaggctacaggctacaatggaaggactctgggtatttgtgaaccagcattttctcccatcccatgtctccccatcttaccaataagccccgagtaggcgaggaggcagtcagcgtaattttcctttagacagctgctgacagaccttgactctggctggcagttggtgaaaaaatcggccaggcgagatctgcaacagaagaaagttgggggaggggggaggatgtgtttcaaaatagcccaagcttctgcacagacataatttttccttattcctttctcgataggcctttttcaacatccccaaatacagagagtgtagactcttaaaaggttagcatcttctcttatatacaagcccccggccatcctctcgcccaccttctttgcagagaagtcttcagggcctgcaactggagaaatcttgacgctttgaagtttcccttcaatatttatttctgactagacttatttgcatctttaggaaatatgcttctgcacacactcaccggagatccacagtgggaaaatatttactttatacagaaacatgtcccggcgtccaaataggatcctacag

SEQ ID NO: 53945 - DNA, 2268 bp, Bovine  19866880757053
  misc_feature (1)..(1): n is a, c, g, or t
ngaagcctggcatgctgtggtccatggggttgcaaagagtttgacatgactgagcaactgaactgaactggctcttcacataaggtggccaaaatattggcacttcaccttgagcatcagtccttgaatgaatattcaggactgatttcctttaggattgactggtttgatctccttgcagtccaagggactctcatgagtcctccccagcactacagtttcaaagtatcaattcttcagcactcagccttctttatggcccaactctcacatccatacatgactacaggaaaaaccatacagacctttgtctgcaaagtgattttgtggctacagcccccatccatggtgattttggagcccaagaagattaaatctgtcactgctgtttctgctttttctccatctatttgccatgaagtggtgggaccagataccatgatgttactttttgaacgttgagttttaagccagctttttcactctcttctttcaccctcatcaagaggctctttagttcctctttgctttctgccgctagagtagtatcatctgcatatctgaagttgttgatatttctccctgcagtctttaattccagcttgtgattcatctagcctggccttttatgtaatatacaacccactccagtatgtttgcctggagaattccatgaacagtagggcctggggggccacagtccatgggggcacaaagagttgggtgtgactaagcacacatccacgccaccatttaattatcaattttgcccttcactgtgtgagaattccctaagagaaattttaaatattatgttttcatgaaatcatgttcctaggttctctattttaaatagttaccttgtgacaatttcagtgcctgagtttacatctgtattcacaccctactggagccctggtgattcactttcattgtcatggactaatgagaaagggtggaggttgacttatgcaattatttgtgtacttgataccaccaaacaaaaccaaaaaacttcatagggtgcatgacaaatggaagttagaataaagaaaagcggttgtagggttgtgtcatcagcagtagcacagatacaaaaaccaaagaagttgacaccatattcacatagcagatagtaatcaaggttcaaataaatatcagtcactctaaattaatgctgttgatttgaatggtatttgttttttaaatattttatttaatgtataagatttgttttaaaattgtttggttgtataagaactgtagtcataaatagttactatgtaatttcatatttttacacatttaagtaacacagtgaaaataatttagtctaacactgagggagctgtaagaagttttcttttaaaatggatctatacattttctcaatttgggttgcactgttctcacagctacatccttatgcatattcttagaataaattgtttccttggggaaatttcttagacataaaattactgtcaaatgttgtaaacattctacggtttttgatgttttgaactcaaatttgagttcagagtcttcaagttacttttccttcctttagttttgtcttcattttaatgttttcctcagtaattcacttacttcaatttgcaaatatttactgagagtttaccctgcatacgcatcatgcttcttactgggccttcaaaggcagaagaactcagtctgtgctccggagcccccactcacagggaggcgatggcataaggcagtgattctcaaacatttgttttcacatttagaaatgattgtgggccccaaatagcttttggggagatgagttatgtcaattgatatgtattctgttagaaaatggacaaattttttaaatgccatgattcttattttcactttaaggcctatgttttatcattggccagatgtactgttactcatttttcctgaaatgacaagcttattttgttcattttagagaaaatttttccatatacccaagtccgaataaccacaatttgtcagtcattcatttaagaaagaaatggtgtcctgtaaaagaagaaagaacacagctagttcatctggcaattcaaaccatcacgtaagtgctttccttgagacagccatcttactttcgtatgcagcagaagtgctgtgtgcataattgctattgtttttttttttgccacgagtgtggagaagatgagtaatacctcagtgctcttaagcttggtaccaccatcttgattcacactatacagctctagcaattgtacccaa

SEQ ID NO: 53946 - DNA, 3233 bp, Bovine  19866880767750
  misc_feature (1)..(1): n is a, c, g, or t
natatcagttactgctcacatacaccattggggtagaaggaaatctgagaggcatgtccgcagaggcacatacctgcctgcataatgcatgtatgaataggtggcagccattcagcagatgagcacacaaacattaaaaattcagaccctcgctcattcctgttgtagttcctaaaagccagtccatttcaagacttctctcacactcatcttattcacactttaacttgagtataatatgataaagactaagaatgggtgctgagaatgtgtactaaattgtgagaacctgcactgtagaaaaataagagttttattatttgaaagtaataaaattagtctgttcatgaatttgaattttatttcaagtacctaaaaatgaagttgctgttgagtttcaccaccaacatgtccagttgtttttttaaattatgttttcttcagtgcttctcttaaatcacagattaagtgaagcttgacaaatgtccaaaaagactaacttcactgtaaattagcctcccttctttagatcagtgttagtggcctgtctttaagtggaggttgatttaagaatggaaaattttttccctttaactttgtctccttatcaagcaggatttaacaaaacaaaacaatagaaataagtacaaatgtgtgcacagaatccagtggaagtagcgagaggagcctctagactcaaatttataaaggctagaacataagaatgtggggggactctgaatagatgtatattttatcttctcaatgatttcctgccttgtaattctttaaaaaaattatatttcaatctcagattgctgggtaagagagagaataaataggaagccaagctgattgtatgaactttcagtactgttccacgtaagcatgtggtatgtggctaattatgttctccgggaacactctctagaaatgggttcagtgaattacagtcttggggctaaacaagataattttaagtaaaacgaaatccctcttcaatgtgacagtagaaaataagaaacattcacattaccacgaaactccactgagcacaaaactttaatcacttcacatctagctctgtctacctgccaaattgctggaattctttgtgtctgctgtcacagggtatgatctgccaactgcagcttctcacaatctgccagtttgttctataagggacccctggctactatgcatcaccaagttctttgggctcttgcccagcatgagtgacactgaacagtgggaaacccagttgaccatggtgaaaggttaaggatgagatgtacctacttataatgttccatgtcttttcattcctgagtgcaattcccctgtatgaatatactacagatttgtttatctattcgcttgggttacatccagtttggggatgttacaacagatactttgaaaatttatatacaagtttgtgtgaatataaattttcattctcgaggataaatcccaagagaggaattgctgaatcctaaattaagtttgtgtgtgtatgctcagtttctcagtcgtgtctgactctttgcaatcctgtctatccatggggttcttcaggcaagaatactggactgtgttgccatttcctcctccaggggaccttcccaacccagggatcgaacccatgtctcttgtgtttctgacattagcaggcagattctttaccattgtgccacaagggttgggaaaataccctggaggaggaaatggtaacctggcaggttacagtccatgaggtcgcagagtcggatacagctgagcaactgagcacatgcgtgtgaacacacatacacgttaggtatatgttaaactttaaaaaaaattttttttaattttatttaattttcaaactttacataattgtatcagtattgccaaatatcaaaatgaatccaccacaggtatacatgtgctccccaccctgaaccctaaaaaatttgacaaagtatcttccatagtggctgtgccattttatacagtcaccagccatataggagagttcaatttgcttcacatctttgtcagcacactgcattgttaatattttttttcgaatttctcataataaacatgtagtggtgaacaacagcaaaataagagtgagatgtattataattcattcattcgtgcaacacatacttagtgaacagctactgtgtgccagacacttgggcacacactgtaaggatttgtacttgaaatctaaaaaggtaaaatacttagaagcagagagttggatgctgttaccaggaatggtgagatagggacagttaggggtggatggtgatcagaggcacaaagttgcagttatgtagcatcaataagctgagagacctaatatacaacctgatgaatacagttccagggtcaggaagatcccctggagaaggaaatggcaacccactcctgtattcttgcctggagaatcccatggacagaagggagtggcaggctatgtccgtggggtcccaggagtcgggcatgacttagcgactaaaccaccagcaccagtagtaatcatttcattgtattgagcagtttgctaagagagcagatttcaggtgctatcaccacacacaaaaagtgataactgtgtggagatgatgataaacttgaccccagtaatcatttcccttccctaatggctcagtcagtaaataatcctgaaatgcaggagaccacctgcaatgtaggagacccaggttctatccccgggtcaggaagatcccctggagaaggaaatggcaacccactcctgtattcttgcctggagaatcccatggagagaagggggtggcaggctatgtccatggggtcccaggagtcgggcatgacttagcgactaaaccaccagcaccagtagtaatcatttcattgtgttaaagttcctcaaaacaccatgctgtacaccttaaatatatatagttttatttaaaataaacaagcaaataaatgaatatttcaagtccagatatttctggtgtaatgccttaatgcctgttccctttcatctgtgtaatataccctcaccgtgggggaagaaaatccataactctgatacataacatacctctcaagtctctctcaacagttggaataaaatcatgtctagatttgcccgtgggttatagcaggtattctccaaatcatatttgtctgtttatttcaaatagaaactgttttcctttacataacttttccttttcttactg

SEQ ID NO: 53947 - DNA, 1037 bp, Bovine  19866880771096
  misc_feature (1)..(1): n is a, c, g, or t
nagcaggcttttctggaagctcacatggacagtctggtcttctgctgtccacgtggatcagatggcaaatctgatcgtacaggctgtgacccttgtaatcgatcctacaagagcttggccttttccagctggggtgctaaaaattacatttaaaaggcaatgttggctctttggagcccattttgtccttcatacaccgtctgagacatattgtattacacaatgatgaatctcctccttgccctgttttttcacaccttccacaactacattaagcctcaagtcatatccaagatttctctctagggttcacagtgactgaattattctgaatatctgtgaatttggatataattcttctgcctggtgaagacagtgccctgtattaaccacgagtcaggcactcgccccatgcttgctcactccaagttcacccattagagcttctgtttccataaagaacacactgtggcccacaccctccacaccatccatatcttaaaaaattagatgcctcctataagtggtgtgtaagtaagtcacatgcttgctgctgcaaaatgattaatagtgctgtctcagcaaatgggatcattacatttttaattaacctttccaacctcctccaccttttccttttgttacacattggatctctgaagttttctacttgtttatgttcaactagctttgaaataaaggcatgaaaaacgatagcaggtgatgcaggagctggtgcccaggtgaggtggctggtgaggggcagtgcctcattgtacacgggacctggggacaggcactcggaacttgatggctgggttcccatctaatttttgttctggcagcttagcgttatttaatggccttggctaccaggaaactggctttttaaaatctctttcaacctaattataattactgtgtataaatcatacaatgatcaattataaaaatctcgggttcataaatatttaacttagcatttaaatccacactgcaggagtgcataaaattccaagcccatctcttgcaaacaa

SEQ ID NO: 53948 - DNA, 953 bp, Bovine  19866880773875
  misc_feature (1)..(1): n is a, c, g, or t
nttatcggtgccttcctgcagggggacacgtgttttctcccttcagtgtgtagtaggcagtttgtgtgcacacagcttaataccccttcagctatgcattttctttgatcctgagcttattaaaaaatgcaaatctaaattgtatcttattaatgtgatcctttgtgttaaagctgtgggggttaaaaatcccagtttctctggcatatttggatttttaatgtgcaaagtgagacaagagcctgactatctgcaggccatattttctaatcagctgttatatgaaagatcttttattgtgctgctatttcttgctttcttggaattcagggagataaagagtaatgacttcattgttataccccaagtattctcaggcatattgagacccttattaatttgctataacttctccaacatgacagtggctcttgtcttccaggtgcacactggaagcatattttaaagatgcgtgtaacatgggagatggttaatccatataatttgctagtgactcccctaggcctgggcttcccaggtggtggtcgtggtaaagaacccacctgccactgcaagagatgcaagagacatgggtttgagccctggaggacagcatggcaacctattccagtattctggcctggaaaatcctatggacagaggagcctggtggactgcagtccatggggtcacaaagaatcagacacaactaaagcgacttagcatgcacacatgctcctaggcttctggggcacgcgcgtggtgactgtgcccagatagacctttgtccaggtatgtgcagtcacccttagacccagtgggttcttattgttagagcgatttctttcctttaaaaaataccgtgttggagattttatttgaatcgagtcaaaaattgattccatgagaatagagatgcatttttctcacttgtcttatttctagtttaccag

SEQ ID NO: 53949 - DNA, 2232 bp, Bovine  19866880821331
  misc_feature (1)..(1): n is a, c, g, or t
nttttattgttccttgtccgtgtgatacattttccagggtaaagtaccatctcggtggtgcctcatgttcctgtggagattgggagtgaatgcttgctccctctttttttccccccgctttcctgcatagtctcatctgccctcctggttgcaatcacccacctgtattctgatacctgccaactggcccaggccttcctcccaagctccagatcctcatttctgatgcttatccctcagccttctctgcctcatccgtgccccaagcccaggcctgtgcgcttcctgtgtttcctatcagaaacactgtgtcagccctgagcctggactcagcctatttcctcctgtttctcccctctccattcaccacgtggatattccttaggatccgggattcttccttctgggtcaattttgagtcctcctcgttggtcccattcctgtatctcctctcttagcccaggccctagttatgttgcctggactatcacacatgcctcttgatggccatgctctctctgtcctccgcactgccgctgtggtcaccgtcatcacacacagatatgcccctataattgtctagttcaagaaacctgggtgactccttattgctggaggaggagggttacgtttcttataagcctttgatattcttcacagtcagggctccatgttcctttacaccttagcttatctagcatcctctatttttagtgactttttgcctttcccaaacaagccagatttggtacaacctctgtgcttttgatcatgctgtctgttcgtctctgtctatcttgtttccttcaagaatgactgctcagccttcaagcctcagctcagaagtctcttctctgtaaagctctgtacacagaccccagctctacatcatcacctgccatactgcctggcagtctcctgcatgtctgttggtgcattagtagaaggtaacttcttgaatcttatctttgtatctccagggtcagtccatggtaggcttgatatcactggtgcagggatggtttgaaagatagaaggagggatagctggatagatggaaggatggaaggaaggagagttagggaagacaggaaggaaggggaaaggtggaagaaaggaatgaatgaattccgttcggtattctgttctccaagcagacgcttctgtctcgtctccctgatgcctgaggatgtcatggactttttgtttgctgctccatgtctaaccaggagcactggcacattgtaggctcttagtatttatcgatggatgtgtttatgaaaaatgtgctttaaaactcttgggctatggaaaagaaaagaagaaaagctggttggtagtttttttctgcttataaattgaagattttgtttgtcatctttttaaaaaatagtgcatttgctggcttacttgtggtggaaacagtctgcctgcatcagacattagtagcccctatattttttaaagcctccacttaggaaaaagctaaaggaagggcatttggtaaccagctgggaactccatctcccatgcaggcctgctttttaacttaatgcttaggccctgcaaagttgaaatggccaggtccctttggaaaataaggcaatgaacttaacaaaaagagaaaatcaagatttccattttctcctgaacatggaaagcagcataactaaattctttgtttccttttattaccatattgatggttacattttgtaactatggttaaatggagcagtcccgtggtgagggatgcagggtaagcagtgccccgtaaacatagggaccctgaggatgggaaatgtctgtgcagttacctttactcatttttctgaagctcataatttagcccacaaagtcaagctaagcaagggaatcctaagatgaggttccccggcaaggattgtaatgagcgtaaaatcaacccgcattcatctcgccctttaatgatctatgcatggtaatctaactttgcattttttcccttctctgtccttggtggaaggcagcctgctgggctctcacttgcccacgctttctgataaatgtcaagcctatcttgtggagctggcacgtagttagaagtcatatgtttcctccaagtcatcctttctcccaaggataaggctccatgttgaggataaaacccagtgcacattctgcactcagctcagaacaaacgctattaacctggaggaaagctgacatttctgcaggctgctgcagcgtttg

SEQ ID NO: 53950 - DNA, 928 bp, Bovine  19866880843366
  misc_feature (1)..(1): n is a, c, g, or t
ncacacacacagacgaggcggacataggaaacacaaaagtacagtttgaacttaggggaaaacgtttgtgtggctgttgtctattttttcaaactcactaagacatgtgttgtccttgaagaaattcagaaatttcaagcattcctccaggtcgtttccgctgttgttgcagtcacaccagggggccacgctgaggctactggagtctatgtagttgggggtcatgactgtacctaaaagagtaaaaacaaggcgttttattcttgtgtgatgatataaactttcctatagcctgaaaagaaacaaatgttcctctgactacggatgcgccgtggataacaccgtggataattacaaacactgtgtttgctgagtgggaaattatgttaagcagtgcattttctcggcaatttatcttgagcacataaaataatttacacatttacttaaaaaattctaacagaactccttgagctgcgcttagggtatttttctctgcacaaatggtatggatgtcatggagcaggagagaattaacttagaatgcatgaattgccaaatcccttgcattttcttgaaaacgtcattaatcttcacaaatagatagagctggttttacatatcttaaaaggccttttaggactttgccatctacttccttcggaagcaaatggctccttcagagtaacccagggaagtttagaagctttccttatgggttaccccatgttctagatgtattcaaggacgcctctgctcgctagactctcaacagatttaaacaaggtcttccaagttgtgatggaattggaaacaaacagtggaaatttcctaagccagtggctcctccagtattgtcttaatagtcctcaaaaatcctcaaagaaatgctgggggtgggtctcttgcccacatctttcctgtgtat

SEQ ID NO: 53951 - DNA, 1790 bp, Bovine  19866880851409
  misc_feature (1)..(1): n is a, c, g, or t
naaatgcagctcataattgcttcttgtctgaatattttactaatcaagcaagttaagcatgaatgaaaacacacggttctctgatgtagttggcaacctgtctttgccctaacttgggggaaagcgaaatagatgtaagatgatccggtgaagttagggaaagaagaaaggccaggccgaatgccacgttgagctccctgctgtagacagtgtctgcacacagtgctacttgccatcctgccattagtgttaaattacaagcgccaggctgcagacatccttttatggtgtgcaggagactgacaggccagcccgagggactgcttagctaatggaggactgttgatatatcttacaggactgtatctctttcatcacattcatttttaaatccgaggaaacacagaagatcacgagccagttctattcagtgtcacgttcacaaggcaaattagctgaagcttttgcatttttcccacccctgcctgaatctgagaacactcaacgtagggaccacagaagagctcagagatcatcaacagcaacttggattttaaaagcacttccaacacgagtatcacgtttgattctcacaactctgtgaagtgggcagcagggtgcggttattataattatagatgacggttgaaaagccaggacacgatcttcctaacctgtgttctttatagcataccatatcaatcaagctggtaccaggagtgatttctaaatcattaaatttagagttctcagtcaggtctagaagttctaactgacccacatttaaccaattcaccacataagccaacctctccaccattcccctgtaaatatctgatgcccaaggcaggctgaatgcctcacactaggggcctctctcctgctcacctgggccccttgctttctccaatggagatgcaagcttgaaagattcaggatcacttgttctcaaacctttaggtgccgttgtacttggtattttgcttacctattttagttaaataagctggctacaacataaattccccttccattgaaaaatggctttggattaggtgtaggacaaccaacagtaaaagactgaaaaaaaaaatttaagtatatggaaattgtgcactgagattccctggtgggtatcaaacaaaagtcattcctgttttaaagaaatgaaaactggatgttgcagattgtaaatgatagtaggtgtagcttaggcagaacataagccagggaattccagtcagcaaattctttctttaaaaaacttttcaaagtggctttgattacgtatccaaaaatcagtcaatgcatgacattcaattttttaattaaaatgtttgataccatacaggcaatggaatattcagttcagttcagttcagtcgctcagtcatgtccaactctttacaaccctatgaatcacagcacgccagaccttcctgtccatcaccatctcctggagttcactcaaactcacgtccatcgagtcagtgatgccatccagccatctcatcctctgttgtccccttttcctcctgcccctaatccctcccaacatcagagtcttttccaatgagtcaactcttcgcatgaggtggccaaagtactggagtgtcagctttagcatcattgcttccaaagaaatcccaggtctggtcccatcacttcatgggaaatagatggggaaacagtggaaacagtgtcagactttattttggggggttccaaaatcactgcagatggtgactgaagccatgaaattaaaagacgcttactccttggaagaaaag

SEQ ID NO: 53952 - DNA, 3245 bp, Bovine  19866880852440
  misc_feature (1)..(1): n is a, c, g, or t
ngtccgactcttagcgaccccatggactgcagcctaccagggctcctccgtccatgggattttccaggcaagagtactggagtggggtgccatcgccgtctctgagtatctcctgaactgtgctcaaattcatgtccattgagtcgatgatgccattcaaccatctcatcctctgtcgccctcttctcctcctggcttcagtgtttcccagcatcagggtcttttccaacgagtcagctcttcgcatcaggtgattgaagtattagagcttcagcatcagttcttccaacgatattcaaggttgatttcctttaggattgactggtttgacccccttgcagtccaaggggcctcccaagagtcagtctttttctagcatcgcagttcaaaagcttcaattcttcggtgctcggctttctctatggtccaactctcacatccatacatgattactggaaaaaccatagctttgactgtagggaccttagtcggccaagagatgtctctgctttttaatagttgagagaaagcgatctgtgagaagtacaaaattatccaaatgcctggtgttgttaatttccatgacttgagtgaatggggatttttccctttggatctgtgtggtggcctggttttcagttgccacagaaaagtgtcttcaggtctggtgtgtctggtagcagtagtacagccctccttcctcatccatcactgtgcgtcacatttcctaaagaagatctctgtagatcatgtgccaatttgttgggggcagttatccatcaaggtggaacctgggtcattcatctttacacctggcagctgccatcgacacatagcagatgctgccctgaagggctaggaagtgacaggaacagctcatctgagagggagccacagcaccccgtgacttctgatgtgtgctttgggggaagaaattccaaagagaggaggtgtgtttgaaattattgctcccccaaaccccaatcctgtttcacgtgttttttgccccaatctaacacccaagaaggaagggatggtcttgggagactctggtcccatttccaggtgtcttattgtcgctttgattaatattcagttcacagaaggtatggaaagctcaggtgaggcttttgtgaccattcacactttgaggaattaggcatcatttgtgcagtgaatgtctgagcgtgcgctctgctccggaagtacgatggtgaacaagacagacagggcctttgttctcgaggtctgacagtccagggggaggacaggatgacaggtaacaggcagtcacggcataatgtgacatggagacgcaggggggtcgaggaacttctagggaggcaattcatctggatgtggagcctcaggggaagctgctgaaacattaaccaggtgggaaggctgggagtcagagggtgggagggctgtgggggacagagggacagcaggtgtaaggcccaaagtggaagtgggggggctgcatttgagcagcagtccaggactggcatcacctaggaatttgttagaaatgcaaagtcttggcccctactgcaggcctacagaatcagaaactctgtgagtggggcaggccgagaagcccattttaagtagttcccaagtcatcctgatccacatcctagttggagaatcaccatgttagaggaagtgtaaattgtttaatccagaatctagcccaacaaagcatctttccttctggaagagacatgacttccatctctgccactatgggtgggggtccctcctggcaccctgtcctcctcttcttccccaccattcaactacagggttttattaatattctcagcttctagtggggatggtactcaactttctgacctccacattcccctcccccaaagagctacaaagagaaatagacatatccagttacagtcagagatttcatcagtcatctctccataactgaaggaagaagaaaaaacagaaaatcaataaggatagaaaagacttgcacaacaatatcacccaacctgacctagttgacttttatgaaacactctacttccaaacaggaaaatacacatttttttttttccaagtatgcacagaacatttaccaagacagcctacattctgagttataaaacaagtcccaataaatgcaaaaggattcaagtcacacaaaatatttctctgaccacaataaaattaaattagaaataattacagaatgatatctgtaaaattcccaaatacttgaaaactaaataatacacatctaaatatcatatgaccaaagaaatcaaaagggaaattacagaatatttgaactgaatgaaaatgaaaacacaccgtttcaaaatctgtggaaggcagcttaagtggtatttaaaaggccatttttagcatgaaacacttatacacaagaagaaaaacctaaaataagtgaccttagtttctatcttaagaaactagaaaagtaaaggcaaattaagccaaaaataagcaaaagaaataaagtaaaaagcaatgatgtaggcaaaaaacaaaatagacaggaatgaagccaaaatctagttctttgagaccatcagtaaaattaataagcttccagccagattaatcaggaaaagaggaggagatagaggaaagatacaaattgctaatatcaggaatgagagagataattttaccacagattctacggatattaaaaggataatcagggcataatacaagcaaatataccaataaatgtaaaatcttggataaatggacaaatgtcttgaaagacaaactacaaaagttcattcaagaaaaagattggtaacctgcataaccctatagctttaaataaactgaattcctttacattttaagtaaattcaaaacgttcccatgaaataaaactccagactcagatgacttcactggtgaattacaactgaacattttaaggaacaaatgatatcaattctataaaaattcttccagataatagacgtgggttatctcccaaacctttctgtgagaccagcattactctaataccaaaactagacagacattgcaaggaaactacaggcaatatccctcatgaatatatatgcaaacgttctcaacagaagtttagcaaaaaatagagctaaacagcatttgttgttgctgttcagtccctaagttgtgtccaggagaaggcaatggcaccccactccagtattcttgcctgggaaatcccatggatggaggagcctagtagg

SEQ ID NO: 53953 - DNA, 1637 bp, Bovine  19866880870015
  misc_feature (1)..(1): n is a, c, g, or t
nagccttcttaaatgaaagtctattagtgtgagaattctgatttctagaatcaaatctgttttaggtcattatggagttttataaagaaaagcctcctctgctcagcctaacaacacgttgaagtcttaaaagtaggcagactattgatttttagcaagagttttactgccccagacactgaagaatgattctcatgactaaaatttataggttattaaggagaagaatgcagagaaaagactagttgaaagattcagaaaattagctcattttgttcgttagaattcactaagcaccctttcctgaaatatagatatatcagagtctggaaagggcctcttggttacatggtaaatttatatggatcagaaatatagtggaatcgtattttagcccacaaggacacgatcactctttggaggtttgcgaggaaaaagcaaagtgctctttttaaagaagcttaattcgaaaagatcagggttggcagatcggaccactggtggactttttttttcacctgccaaaaaacctgttcagtccaaactaaacagacataacagaaagcttcttctagattaaggaggtagtcatgcaatgttttgtttttaaaatatcaaattctgtgcttcagtttcgaataggggaatcgttctgaatccttgggggtactaatctgtctggtacctttcaaagggaatgtgtagagttactggaaagccaatcgtgtgaaagcagtaggggtactcttcattgtacttggattaaaatataaaatgtgccttatgccagaggcagggcagtataggagaaatcactgcacggggaaggtttgaaaggggcatctggtctcagctccatcattgagcttctgtgacactggacactctgaacctcagtttctgtatatgtgtgatggggttcgtagcagccatcatgcctccatcatacccaccctcagaactgtgatccagcctttcctataaaggaatcgagaccacgtggctcagcaaccggaaaagcaccggtcccatagcacctgctccaggaagtgaggtagaagttctcactacccaggactgcaggggtgaagtgtgaagtgttcgtcaatgagtcatgtctgactctttgctactgcatggactgtagcccgccaggtgcctctgtccatggagttctccaagcaagaatactggagtgggtagccattcccttctccaaggtatcttcccgacccagggatcaaacccaagtcttctgcattgcaggcagattctttaccatctgagccaccagagaagccccaaagaggtgatggtggtggtggtttagttgcttagctgtgtccaactctttgcaaccccatggactacagcccgccagacccctctgtgcctgtggaatcctccaggcaagaatactggagtggattgccaacccagggctcaaacctggtctccggcattgcaggtagattctttaccctctgaaccaccaggacggtgttctcagtatccagggctgcaggggtgaggatgagaccaaatcatctatacgaaagtactctttaaagtgtattgatgtacagtatactaacacatatatatggaatttagaaagatggttaacgatgacccta

SEQ ID NO: 53954 - DNA, 1372 bp, Bovine  19866881017331
  misc_feature (1)..(1): n is a, c, g, or t
ntgtaaaaagccactttgctccagtgcatatgtatgtgttcatcatctgtattacatatacattattaatgtatgcgcttccctggtggctcagatggtagggaatccgcctgcaatgcaggagacctgggttcaatccctgggttgggaagatcccctggaggagggcatggcagtctactccagtattcttgcctggagaatccccctggatagaggaacctggcaggttaaagtcgatgaggttgcaaagagctgaacacgactgagcaactaagcacagcacattactgtgtgtgtataaatatgcctagtagacatcagtttttcccccagtcgggctgttgctttgttgaggaggttgggccaatagctttgcccagcagcctcggttttcttatctgtaaaatgagagttggggagatccttgacccaatgtggcctcctgctgacgctctgttttaagaagttttaagtgaacttgagttaataagagtacaaaaatgtcccatgctgcagattttgagtattgcccagagaacatgggtggaaacaggttgagaatgaggtggctgagaattaaggtgaaaagaagcacggttgcagaagtgtaacgtactctcaaggctttttggaaacatcagttcttgcctatgtgtgttaataatggaattcacactgggtggcattgcttttactaatctgaaaagaacaataaatcatagtttgctttctggcagcccagcccagctcgttaattgttgaggtgggtttgtgatgacagtgaccactgccatttataatgtgcttgacttaagctcttttgcatttttcaaatgtgttggtctaactgctggagttggatcttaggtttttcccaaccacttcagaaaacccatctgttataaaactctgaccctttagccatgaattatggtccccctggtaacattatacattatgaaatattgttttctttatgaatgtgggatttgggtgaataaattaaatctattgttaccacctccagggaaaaactccaagttgtcatatgatgctaactagtaaatgagaaaaatgcgtaaacattcttatggtggaaagtggctggttccctggtcacacttttctatgctaatatttatgttgtatatatatcatccccctttctgttcagactcagtagaatattccgagtcatgtaggaaatgcattcatctttccagcacaaactgaacattaccatttaatttcacgtagattcactttgtgtgagtgtgttgtgtaggaaaacgagaggcatatttaaataatcacattctctgagatgcttcataacattcctgcgtgggctctgcaagggggatctgtt

SEQ ID NO: 53955 - DNA, 1373 bp, Bovine  19866881023355
  misc_feature (1)..(1): n is a, c, g, or t
ntgtccgtgacctcagttttttaaaacctcttggtgacttgagcctgttaaagggtctgatcatggtcatcttgttgattacatccttatcaagcccttggacagagcctgagcacccaggcttttggcctctcccctcctgttctattagtctcacaaaggctgtgctcacagacacagccatttctacccatgttttctgctctttgctactcaacaggagctagcagtgcctcccatactctagtgcaaaggtagtcttcccagcatgtgattattcttatgggcataagaataatagtgtctttgtttctaggttctcacaaatggagtccagtgggcttgtttcagttcattattagcatccacctcaagagcttcatcaaaatcggcgctctaccaggaaacacattacttatggatgacaatagttgcgtgcgatgatttagaagggaggagaagattgggcttctggacccaaggcttttccttattagaattgtggctctgtgaaaggcttataaacactgttcagaaatggaacaaagatctcagaagagggatgctttttctaaagagactacagacacaatttacagacaagtctagaaagaatattatttgaagagggtgatgatggagctatggaagctgagaagggatggagcttttaattggaacaaaaaagaagcttcaatcccagaattcaaaaccgaaacagagcttagaatccttaaaagaagataagaaggagggggaaagcaggtagaaagaggccaatgtctgtctgttgttggggatagaagctagaaagtaaggatgagggacaggcacacctcggaaatactgcaggtttggttccggaccaccacaataaagcaggtattgtaataaagtgagtcacacagtttttggttttccagtgcatataaaggttatgtttacactataaacatatatttactacacctagcctgctaggtgtacagtagcattatattgctaaaaaaagtacataccttaattcaaaatactttgttgctaaaaaccatcttctaaccatcatctgggcttccctggtggctcagtggtaaagaatctccctactaagcaggagactcgggttctctcccttggtcgggaagatctcctagagaaggaaacggcaacccactccagtattcttgtctgggaaatccgatggacagacgagcttggcagacaaaagagttgaacacgacttactaactaagcagcaacaataaccatcatctgagccttcagtgagtcttagtggtcacatcaaagatcagtgatcacagatccggtaataaaaataataataatggaaaagtttaaatacggtaaaatta

SEQ ID NO: 53956 - DNA, 991 bp, Bovine  19866881025113
  misc_feature (1)..(1): n is a, c, g, or t
nctggctttgaaactattagacatataaagaactattagggagagaagcgtaaacgcacagtttctagacaataagcctttctttgacaacagttcctttaactagtatggagttttattatattaatcacttgctgattgctagactgatatgaaaatataatgcagaataagatagttataatgacagtagtaaaaaatttttagatggcatgagtccatcaatataatgctgaattcttttaaaatcttgaatagtcacttgaaaattcttaagcaaaaagcaatgctgcctaaccagaaacagtttaggaagagtttgaccagcttatgatgtgccttcatagactgcatagactccaactccttaaagcttcagcaattccatgttctggttcttattgacagaaactgaaattactgagcaaaggactggctgattgtcaaaaaattacatcagatagatcctggacttcagcttggacttaagaacatttgtttctaaacaagcacttagaagccctggaaagcaataaagtgaaatgcaatttgcaccgactaacggagcagctaaaagaaagggagtggagaatgggtgctggtgagagaggataagttttgttggggaattctgttgtaaaatagtctttccctgatgatgaaacactggctaatgacatctagaattttcagctgaagccataatagcttcaagtttgggtggctgcacattaaaacgagaaacaatgcaacataaaggcaaagccatatactaaaatttggtatttggggaagtagcctattttatagggctaaatatctctcagttaaaaagcaaaacaaagcaaaccccccacttttatggtgtagcttagacatttaatgctaagtgctaattcagctcatgaaatagcttgacagttgtttccttcttgtataggaggtggttttattttcctaaatacaaatggtataagaaagaaaactatta

SEQ ID NO: 53957 - DNA, 928 bp, Bovine  19866881046296
  misc_feature (1)..(1): n is a, c, g, or t
nacacacacacacacacacacacccaatagtaacactgaaagttcctgatacttttaggacacacttgtgtttggacatagaaacaagggaatggagtcatatccacactgatcgtggtgttttgtcacacagcaatttgcttgtccaaagtcagagtcagttaattttgttaggtccttgctcttcttcatgtatacagttcatatgtccaaggttagaaatattttaaaatgtaagaaagaatgtatttatgcatataactgaatcactctgctgtatagcagtaattattacagcgttgtaagtcaactgtgtttcaattgaaaaaaagtaaaacaagatataagtaaagggtaaaccacttgacaacttccagtaaacagctatatgtttgatcgctgaatataacacaatactaggccaccactgttgaaatccccaaaatgtctaaccaaacatttacctgccttttcctcttcttccaggccttgcaattgccagtgccctaatagatatttcacagcagaagccttcagatagtaaagacaaaacttcaggagtccgaaatcgaaaacaccacctctcaacacgtcaaggaacttgtgtctgaaaaacagaaactgctcctgtagattctgtcatgtttgactctgtaaatggcttccattaaaggctagtccaaggcctcagttttcacggagacaaatctctgtatggtcccagggcccaaacacagttccctctgaaaagggaatgacccgagtggccaaagaatgttcatgagttttataaaattaatagtattgatggtcacaggtgataaagttagtttttacagctatcttaggcttatcatagataacattaaagtactcggaaaaaaaagatgtatattgtttcttaatgcagataaaaatatgtattcat

SEQ ID NO: 53958 - DNA, 1598 bp, Bovine  19866881066355
  misc_feature (1)..(1): n is a, c, g, or t
nctgtaggcaggaggtctcccatacccacgaggccagcaaagggccagagagaacagtcagggccagtacagggcctgtgcaaaggagggtggggcaggttctgagggcaagagaagtggacaaaattagagggtagaagtcccttactaccatatgttaggggcttctcaggtggcactaatggtaaagtacctgcctgccaatgctggagacataagagacacaggttcgatccctggatcgggaagatcccctggaggagggcatggcagcccactctagtattcttgcctagagaattccatggacagaggagcctggcggtctaaagtccatggggtccgaaagagtcagacacgactgaagtgacttggcatgcatgcaccatatgttggattctgccaagacaagctcctactccagtgacatgtctgcacatttccccagccaggtggatggtgttgctctaggacttgacagaaaagagccacctctgcatctactcaccttttctcacttcatcatcattatatagaagctcattgacattccctcaatctgttgtgaagagttaagatggtttcaaatctagtcaaactcaaaactagtttatttgccttttatgatgatcgaaatgatgcaaactgtaaaaaaaccttatgttcaacactcagtgatattaatttcacttgactttatgacttaaggtcaaatatgttaatcaaagccgccatcattagcacagtttccttttctattaagtgattatgatcacttactattaatgagtcgtgaagttttaataaatttttgctggtgtgaaattgcaaaacagtaattatgacacatacggtatggatggcttgttccacaacgtaaatttggtctaatgttggtaaaaatgcaaaagaacattaggtaattaattagttcctctatggaaccaaaataagctttcaccacgacggtaaatgaatgaaaaaatggaaagccttttgctgttaattgtgaactgttaaacagtgagacctagccattcaaaaagacccagtccaccccaaccccagataatatcatgacttaaggagaaatagctttgcaagaatttcttgtgttgaatcaatatttttggcatggggctgattatatgacagtatggggcagtataggacagtatggggaggcttccctggtggctcagctggtaagaacctgcctgccaatgcaggagactcaagagatttgggctcgatccctgggtcaggaagattccctggggagaaggaaatggcaaccccctccagtagtcttggagaattccatgaacagaggagcctgttgggctatatcctgcaaacggtcagacttgactgagcacacacacatcatcatggggcaggaagaggatttggaaataaaattaaatgttgatacaaaggaattgatgggaatgggaccgaagaatcaccatctcaaagctgagagaggtcctccgagcctaggatagaaccagaggcaaggatcaacacgcacattggtttacagggcgcataagaatctctagatgtgggacttccctggtggtccagtggcgatg

SEQ ID NO: 53959 - DNA, 1275 bp, Bovine  19866881080471
  misc_feature (1)..(1): n is a, c, g, or t
nggcatgcatggcaagccactccagtattcttgcctggagaatcccatggacagaggagcctggcagactacagttcacagggtcacacagagttggacacaactgaagcaacttagcatgcaggcacagattacaaaaacagaaagaaaatagtggccaaacttttgttctacttgtctgaaacgttatcaagtagtaagtaatgccagcagtacatgaaaatgaccagtaattcaagaatagatcggacacagtagtttgttgtatttttaactacagaagattggtcaataactgtactcaatttgccgttgtttccccgtggaaagctcagtttgttagctttaggaaaggctcagtcaatggattcttttttactaagagaaatgatccacgggaagtccccagaggagtaaagtcatgagaaaacgcaggcagcctttcatgctgaacggcacaaccaggaaagtaagtaagactctgacctatttgaggtagcttttcaaagactgtgcggttggagctctttttaaaaaaatcaattcacattatcaaaagaaaactggaaatgatcgtaaaaagctgtttttattagaaaaacttttcttctattataataatacagtatttgaagtgcttgaaattggcctcaaataatattaacatgtattaaggaagacaataattacctttgtaagtttgtctctttgtagatatcctttgttgttttctagtagaacagtctgagaggtgggaaaagcacacatacttggatgagacgagcaaaatcctttatttgttaatagtttgtgacctgatttcaaaagaaggttgcagcacctcatgatccatacctgtgttaataagacacaaaagccataaataatttccccccattatatattgcttacaattaaagtccccatttgggcaaatgatattgaaaagcaatgtccttattgacagcattaggattttttccccattattatattctcccctatttccaaaagaggattgaggtgattcacagtgaacaggacagacagaagcacagtctttgtggttgatggtggttgttcgtgtgatttgtttatttttagtaaatagtgattcattagaataagctttggagtcaaacaagcttggttataaattccagctttttctcttgtttgtcttgggtaggttaattcaattctttgaacttcatttccttcaacaaaagaggtgcattaatgactacctaaggattgtttcagcaactctgggag

SEQ ID NO: 53960 - DNA, 1405 bp, Bovine  19866881082599
  misc_feature (1)..(1): n is a, c, g, or t
nccttcactcagtcatgtccagcttttgtgacccccatggactgtggcacgccaggcttctctgtccttcactcagtcatgtccagcttttgtggccccgtggactgtggcacgccaggcttctctgtccttcactcagtcatgtccagcttttgtggccctgtggactgtggcacgccaggcttctctgtccttcactcagtcatgtccagcttttgtgacccgtggactgtggcacgccaggcttctctgtccttcactgctcccagagtttgctcacattcgagtccattgagtcagtgatgccatccaaccatctcatctgtcaccccttctcctccttccctcaatctttcccagcatcaggggcttttcagatgaattggctcttcccatcgtgtggccagcgtattggggcttcagctccagcatcagtccttgcaatgaatatttagggttgatctcctttaggattgactggtgtaatctccttgctgtccaagggacactcaaaagtcttgagtacaaatggatggacatgataaagcctagagcccatggaatctcataagagagttctccagtggcaaaggcattggggtgaggatggagtagggtgtggaaagcaaaccggaggctgtgactctgtactatgaagagccccagaatcaatcctcttgcacctcttgcaacatataaccgcaatttcatgtttccaagactcaacacccagagccccagctttgactgtaaagtttagatagtgattattactttaaccaccccctcagagtagctgtgagagtcacgggagaattttttttcaagtgatattttgaagaattttgtcaactctttagtgccaaaaacaaaaaaaagtttgtagagattgctgtcactgaaagagactttaaaattactatagctgctattagccaacagcaataagtaacttttacaaccaagaagaaaaataatatgattaaattctctgacaaatagtaatttcatcttactcaaatactcttcttctgaggagatctcagaaaatatagagccgtttacagagattaatatgtcctaacttcctttttatgaggtaaataaaggaaaaaagctaaggtcatgaaaaatttgaggcctcgtggttgctagaattggggaaattagtttgtattcctatttttaaaaatgtatgggttccgtgaataggagtcatgtgtgtgtgctcagttttgtctgattctttgcaacttcataggctatagactgccagcgctcctctgtccatggaattttccaggcaagaatactggagtgggtggccattttcttctccaggggatattcccaacccagggatcaaacctgtgtctcttgtattttctgtattgacagacagatt

SEQ ID NO: 53961 - DNA, 1800 bp, Bovine  19866881157760
  misc_feature (1)..(1): n is a, c, g, or t
ngtgaattcttttaatagaaagacaatgctttgaacaaatgtagcataaagatattttaaaatagatctgcagcttctatggatgcccataatatatgtaatggtacttggtctcattaacaagcagctcaaattcttcagctatcataaaatacaagtcatcagcagcgcattctcaggagcaataatatgtctgtctgacccaacttctgctctgcagttaacaattttgttttaatccgtaaaaaaaagaaatcattctcatctttaaattgggcaagtgatctccctaaagtctagttttcatggtgtctatggttctacattccacagcaatttctaggttccttttaaaatgactgaaaagccacaattaattcattacctacaaagacaaccctaagaccttccagcagaggactccctgaaaccacccccacccaaaacagcatttttgacttggattcttttggttctttctcctgctattcaaaacctaccagcctaaaatatctgagcttaagaaaacatacataaagaggtattttccaagctgtgccttaaggaacccttgggcttcctaggtggcgctcgtggtaaagaacccacctgccagtgtaggagatgcgggttccatccctggatcgggaagatctcctgaaggagggcatggcaattcactccagtattcttgcctggagaatcccatggacaaaggagcttggtgggctacagtccataggattacaaaaaatcggacatgactacaaccacttagcatgagatatttctcaaggtattcataggctttctttaaaaaataacagatattggttcaagatgatggagtagaaatgctcatttcctcctgtgagagcactgaaattccaacaacctgttgaacctctatctacaggaggatgccggaacccactagaaaataagagcaatgattctatacgaaaaaagtttggtaacggcattctacagttccctggagactcacaatgcacattagtttaataaggttctgagacatcctgatattaaaaaaaaaaaaaaacctaatttgtagagtttaaagaaatgatcccaaacaaatctggccatgacccttgtttcctgtaacttacttaaccatattagggctggggatgtcttgcaatctataatatggttccaagcctggtacggagttctgtcctaggcagctaccaaggccttagtcataggctattcagcttctttccagccaggcattctgaaagttatattcctgatctagacttgcattccagtaaactggtcttcaccaggggaacaagacatgactgtatattttgaatagagcaaatcatcactgataatttgctgctaaaacatgtttccttgatgacaaaaataatgaacatttgggcttttcagtggttcagtggttaataatctgcctgccaatgcagaggacatgggttagatccctggttcaggaaaatctcacatgccaaggggcaattaagcctgtgcaccacaactactgctgagcctgcgctctggagcccatgagcctcaattactgaagcccgcaccacagagcctgtgctctacaaaagaagcctctgcaaggagaagccggcacaccgcaactagagaatagccctggctctctgcaaaaatagagaaagcctgcatgcagcaatgaagacccagtgtggccaaaaatacatattttttaaaaataatgaatgtttattcagcacttgtagtatatagaaatgccatcctcactacttggctataaat

SEQ ID NO: 53962 - DNA, 1354 bp, Bovine  19866881168626
  misc_feature (1)..(1): n is a, c, g, or t
nggctgggaataaaaataagattgcaaaataaatagcacaatgatatctcagttttaagacaattgctatcttcgaaaatagcgtatcatcaccctgcctccacacaaggctacatctaagctatctaagaaaaaataatagctgaaattttcttaattgattggttttcagctactaataatggtagctcacatctgttatcccatttgatgctcacgacaattctgtgaggaagcagaacaattatgatcacggtctctattttatagatcaagatactgaaggttctgatttgttcaaatgtgcaagtgataagagttggttctagaaacaaaagtcaccacttttgcttagctttttctaaactgagaagccttaaagtctatagattctttgtccaattaaaaatttttttaacttcactctcttttaaagaaaggccagaaatcagtgtacacacagccaaagaccaccacgctgtctcttgagaaattgacgtaagaaactagcatttaattatgactaggaattatgttaattatccatcctgcaaagttatgtttatttaattttgcaaaatctaacataccttttatgatttttccattaatttttttcttaaatttcattttgaatacaaaccatggtgtggcccactcctgttattccaaatacatgttatagtttttctaaattgtatctcccttttgtacttaatcatcattcacaatgatggatgaccacaaggaaccatgtcttactactgttcagctgtttcaataaatcacaaacagtcgacatttccctttggtgtatatatccagctaaaagtgaatttaaatggcaactatgtgaataaagtcatgggaaattctgcccacaaagtgtgtagccctaagtactctcttccaggagcttcttctcaatttgatatctgcaatcagtcatatgttattcctttcatgttaaacaagatgaattataatgttttgaagcagttacacaaagatctatttacaatacaacccactgaaaagtttgccatgacttctgctttcacacaaattcatatttcagctcctttctaagaaatctattccaagtcaagagcccaataagcaaatacattttaaagacatgcagccctgaattatatacctacttcttatgggtaatataaacacaacattcatcgtcatttttgaatcatagacaactccactgttaacccacactacacttcacttagaagcttatgcttccttctgttttacaaagagaacgtacagctcaagccaaagattaaacataagcaaattctgaggcttgacatgttttggaagtgtgttttca

SEQ ID NO: 53963 - DNA, 1998 bp, Bovine  19866881172834
  misc_feature (1)..(1): n is a, c, g, or t
natgggctgtaatttagaacgatggcagctcctatgacctctatattggagagtcactggaaattaaaaaaaaaaaaattctctaaacaatttaagtttatatttgaaaatctggcttaaatgtctgacatggagccattttatttcatgaaaggattttcttgtcctagccacagctccaaatacttatcctaaagctggagaagattttctgccttttttttgtgtgtggtagaattctcctcagattccactcctaaccagattgggaacattctaatgagctgggtgtgggcaggtttgctctctttgtttcactagatgaaattagacccactctggtctgtaactatatctccttcctatcctgcaaggaggggaagtctaaagttgttacagtttccaactttctctttatacaaatgtcttgtctcaggttctgagtttgatcctcaaggctcccgttttgaaaaataggttctattactcccttaattgtgagagttaaatgccttttaaagagttatgtgagttaaatatgagctgggtatgcagtgtagggttttttttttttttttttttaccaaactgcaattctccaaacataccaatacattccaaaattgctagttgcaggccataaaatatttacattacggagtaaataatgtatgtttagtaagaaatgatgaaatatttacagtttttctaaagatactatacaggttttttcctctaccacagccattcttcttgaagcaggcaaaataggcaactttaagagctctgagaacagcatggaagcatctttgaaggaagagaatgttctcaggcagtaaatggagatgtttctataagggaaagaaacaacagctgatcccagatatcaagatatacatttcatatggtaaaggtctagggatgcattagcacacaattttggtatttttaccattaaatggaaaagtcactgggtccaggtcatgtcatgcagtcatttgccaaagccaatcagttggagttgtgaactcagaagatagtctggccatctacgcttccaaacacataccttttaaaacctctcccacatgctcaatgaccctgaagaagccaatcacagtgtcatgaaatctccattgcgtgtgtttagcaaagaccctgaagaagctctaatgaaagtttcccacaaaatcaccggagtctttcaaagaccttctcaggccccacccaacctaagaaattctggtaggatcactctagcatagggtctaagaatctctgttatttttattgagtatagatttacaatgctgtgttaattacagctatacgtacagttatacatacatatacatatataagcagtcttccctggtggctcagtggtaaagaatccatctgcaatacaggagacgcaggagacacgagttcgatccctgggtcaggaagattcccctggaggagggcatggcaacccactccagtattcttgcctggagaatgccagggacagaggagcctggcgggctacagtccatagggtcacaaagagtcagatactgctgaaatgactgagcactcgcacacacattcacatatacattctttttctaaatattcttttctgttgttttatcctaagatattgaatatagttctctgtgctataatgtaaattcttattgcttattcgttttgtatgtaaaagcttatgtctgctaaccccaacctcccagtccatccctcccttaacctcttcctctttgcaaccatcagtctgttctctatgtctaagattccatttctgtttcacacgtagtttctcttgtgtcatattttagattccatgtataagtgatatcatatggtttttgcctttctctttctgacttacttgctttcagttagttcagtcactcagtcgtgtccaactctttgtgacccccatggactgcagcatgccgggcttccctgtccatcaccgactcctggatcttg

SEQ ID NO: 53964 - DNA, 1193 bp, Bovine  19866881185525
  misc_feature (1)..(1): n is a, c, g, or t
naaaaatgcctcgtatgcagggagaacaagtgtcctgaaataaaatccaggagccacaacagacagttagctccacgaggaagtgcttgttagtcttgtcaccaccaattcccagatcttgtgccaggcaaagagcaggggcccaggaactgtgttaaatgaaaagaaaaaaaaataaatatatgaaaatatttggtatgaacaaagtctttttgtataggcaatgaatgtataaatgttcctttcaataacaggaaaatgctagaaaccaatactcaattcaatgtactgcattttgatgcatcatatcagaacctaaatgatcaaatgaatgagagccctgtactcctgtctataaatacagttgccagatttatcaaataaaagtacaaggtgcccagttaaatgtgaacatcagataaacgatgaataatttttcatataagtgttttccaaatattgtatggcaatctagctataatgtcatattgtatcatattttagacaaattgtaactttgtaaagatgttactgccttaacgatgatattatgcaggaagaaaaggaagtgctgtcaggagactgtgttcacaaatgggggcagacagtggaaactggctgtgctgcattgcgctgttttaaaagtatgcttcaccgtgagccagtgcccatggagcggggactgaaattcagcttctcataaattctgcagtgctaccagggaacagtaatcaacaaggataaaatctggagggaaggtcagtgaggcaggtaagaactggtgcatccatattacctaaagaaaacacggctccactaaacaggaccaagccggacctagaaagggcaagagggaaaaatagaatcgccctgtgtgagttttgttagattgcctttaggaaagagcccacatcagctcccacagcctactttaattttaccttcgtgttgtgcttgcttagcttatgagctagagttgagtgtaccctatgtactcagtggcctgctttcataacgccctgctgctggtgaagtaattcactgtgtttcttaggaaggacatggcgttgctgtgttcatttgtgcctgatctgaagaatctctattgaaaccttttttttttttttttttcccccgctaggcatttagatgctacctggctgttaggcctgaaaataccagatggaactggg

SEQ ID NO: 53965 - DNA, 660 bp, Bovine  19866881223285
  misc_feature (1)..(1): n is a, c, g, or t
nttgtccttgctctccccagagtgccatgaaaacattggagaacaacccaggctgatcttgccagaaaactctcccactctttgcaaaggaaggaaaccaaagaggaaggaatcagtgacgtcacaagcccagattgcctccaggagccaatggaagaaaggtgaccccaaagagcccccactcccccgattttgtttttttttttttttttttgctcccaaaacatggcatgcggtcagaaagcaggtactctggctattaaacagtcagcctctgaaataggttttcattaacaggttctggaggaagtagcagctgagaggtcaaatctgtatatcacagattttcagcaagagtctcagtggagaatgaaggcactgaatgtttgtgttagatttacaaacatgagccacctcctgcacacaaggaccaaaaaactgccattgtaatgaatgactgtaacaagtagacctgtccctctctaagtcatttctgtatgaaccaaggctgaaccacactagctggttcaagactcagatcatctaagatgacaattttttttttccccccacatctgcctttgattcaggttttggaggtggaggggatgggtaaagatagaatagattccactagactttttattctgaattctttat

SEQ ID NO: 53966 - DNA, 2171 bp, Bovine  19866881232842
  misc_feature (1)..(1): n is a, c, g, or t
ntatgaggtgagtcttttgtttctatgtagccagcatttccatgctactaaaagaacattggtttccctggtggctcagagggtaaagaatccacctgcaatgcaggagactctgattcaatccctgggttgtgaagatccccccagaagggaatggctacccactccagtattcctgcctgggaaatctcatggacagaggaacccggtgggctacagtccatggggttgcaaagagttggacacaactgagcaagtaaccatgcaaaaaaatatcagggatccctctagatcatctactgggagaatggaaggtgacaaatgggggaaccttgtgatgtggaagaattattcaagtagcctggatttgaaagcaacagaaccttacctgtttcttagtgagctaaaacctgaagacatgtaaaactactgcaaacatttttgaaggttactttggacaagtgtaaaattaaaatatggattcttaattctacattgacagagatggcatcactgattttgactttgccaaagatgatctcatgtccagatgaaagaaataatgcagaatggattcatctagaagagccaattactcaggtactacttgatacaagaccatcttttctaatgagcaatagaaaatttaacagagttttgtaaggcagtattttgttctgtttgtactttttgacaattaaaacaaaaaagtcaaaaaatgaaatgcttattgacaattttggaagattactctggacacttaaaaagcatagtttacagcagataaaagtcttatttgttcaacatatacatatataaacaaataatgaaaatattaaagaaaaaagccgctacagaaaatacataagggttgggagaaagacagtggagagagaaggtgcttcagaccaggaggattacagaaggtctctgcggaaatcacatttgacctgaaaccttgaatactcagtcagagtaggtgtgcattctcaaaactccgtttaacacaaaaaaagtgtatttctggctcacataaactttctataactccaggtaacttcacatctggtaacttagcaatacggatgctccagtcctaagactcttatcatttcaacccagggattccttaagtgtaaaggcagaaaagagactagtgaatcctgcatggacttttcaatgtctcaggccagacataaaatatttccatagccatagagctcaccctaactagagaccacaaaatgcagaggaacaagtgcaatattacatgagtggaacaggaacaaataaagccaaaaagaacttttcaggcagaggtaagagcaaatacaaagttccagagttcctcaggctttaagtatgagcttgaagtgttcaacaaaaagaaagaagtttgagttttattaagcaagggggcaaagagcagatggtcaaaggataattttggttttatcaaggttaagagaaattgaaataacatatacatatcatcaggcatcataggattcaaaaaaatcagattattttttttaaacataatttccttttgtattgcacagacagcccattcttctggtgttagaagtagtttggaacaaacaggcaaaagaaataggctttaccctcctcaaataaagttattcaagacataaccagaaaatagcaacagcagttaatctcaaatacaatgaacctagctctcccagtaagaatcgaaaggtcaattttgtatgtaaccttctttaatacaaaaggccaggtggttgtaatttatctgagcaaatcaaaatgaacaaaggatgagtactgaaaaggtcatttaaaagctagatcactagaatggatgtttaatacatattactcctcaaagagcaacaatgagaagctaaataacttcaaattttgaaacctgcacttggaaaaaattttttacccacaaagaatacccctatagccccactgtagaatatattacttccccaaatgagaggcctaagttgcaagaggagaaaatagttgtgctgctctcaagaagagcaaaggaatgactttgacagccacgcggcactcagcatgatctagtcaaccttgacgcctggaaatctaaaagcagctgattacaatagaaatgacacatcgactcttgcttgtgtgccagtcatttatga

SEQ ID NO: 53967 - DNA, 1524 bp, Bovine  19866881267450
  misc_feature (1)..(1): n is a, c, g, or t
ntgtgcgaataaaagatgaagtttggtgaatgggtagacacaagagcctggcaactctgaagtgacatcttgaattccattttacaaagtagtggctctcagcccgttttaacacatagactttttttttttggcagcaacatttttgagggtgaatgttttaaataaatcttgtactttccagttcactgtggtgcccatcacttttaactgtcttactctacaggttaagacaatctgcttacctagtacaggcagtgtgcataatggttaggcatacaaggtgagaagatagctatatttttccaaatcctggcttgttcacctgttaggtctgcaaccttagttatgttacataaactctttgagcttcagtatcacaatttatgaaatgggaatagcccctacctcttggaataggattaaacccatgtaaacatttggcatagcataaggcatatcgtaagcacttaataaatgtgagctattccttgaagtaatttgagttggcaagccctactttggcagtattaaaagttttggttttgttttctgttttatttttttaatgaagtatagttgatttacagtgtttcaggtatacagtaaagcaattcagttatatattcgtgcatgctcagtcatgtctgactctttgcaaccccatggactgtaatccgccaggttcctctgtccgtgggattttccaggcaagaatactggagtgggtagccacttcctactccatcagttacatgtaattctctcaaatcctcagcttctggggttagtttccagtgatgggcttcagtgtgatttctataagtcacccacttcctccttcacttactctttgagaagcaaacactggaggagggaacaagcagccagcttttgcccactgaagtcttctaaacacccagggcttcttgtagcagcagttttccaggacagaccccgggttcacaaggtggtttccgtttcagaatatgttactggaagttttaagaactgtaatcttgaaaatccttatgatttcagaagcttctctggtaacttgctggtctttgatagctcaaaaacagaaaaagttttagaattgctccaaaaaaaagcaagaacttaaagatatgagtacaatagtttcagaagtaactgctgtgaacaaaacaagtcttttgtaaaagctctgtgtgcttaataaacaaggattgctaattacataactgtcagtgatgttttctggcacggtctaacgcctggttcttttggtacaacaaatatgaaaatgcctagaagtaaatcacagttgctgagtgctgtgggcaaacaaacccatgccttatcgctttcaaaggcagccatggaaaatgtatgataaattgcacagttcagtgaacatgttatgtcattgtgaaatgattttgatgcatggctttgtatttattgctaaccaactgacaaactcaaggtatcagaaatttcattcaggggggtttgctgtcttctgttgcaaaacccaag

SEQ ID NO: 53968 - DNA, 1218 bp, Bovine  19866881294715
  misc_feature (1)..(1): n is a, c, g, or t
nttttaattttggctgtgctgggtttgttactgagcgcaggtttttctctagttgagaagagcggggactgttttctagtttaggtatgcagccttctcactgcagtgcttctcttgtttcagagcgcacgctctacggcacacaggcttccgcaggtgcagcacatgggcacagcagtagcagccggcaggctccagggtgcaggttcagcagttgtggcacgtgggcttagctctcccgcaacatgtgggatcttcccagaccagggatggaactgatacccctgcactgcgagtcagattcttaaccactgcaccaccagggaagacctgtctgttcaaatgtttaccccctcttctattgggttacccatccctttttactgatttgtaaaaagttctttatatattctaaatatgcttcatttgccagatttacacattgaaaatatttattcccactctgtagcttatttttcactatcttaatcatgtactttaatgaagataaattattaatcttaatataatctaattcattaatttttcttttatggttaagatttttatgtcctgtttaagaaatctttgtctactgtaaggttattaaaatatgttttaataagtaacacatattttgtttccacaaattttgtaatgtgtatttaaaaatacatctaaaatatttagaagtataatttatttagaatagatcaattgcatctactttttaaattactgagcataacgtttactactaggtagtaaaaaaaattaaatagcttaaaatcttttagattaagcattttcctaaatttcattcaaatagtaaaggacagttatgattttccaaaatacagttttactcaaatccattggcttatataggatatggctataccaggcttaatggactactaaattacaagaatttttgacatcttatttgcttactgtctggtggtaaattaaactcattgttccagtatgaattttatcagccataaaatatgttacattttacccaattctaagactctcaaaatccaaatatacatatcagtattcttcaaactattctggaaataggtcagtgtttaatatggttgattgaattcaagtgccattatagacactaatgaattgatactgtgtagtgtgaaataaaaaaatctgtttcactgcaggacttagaaaatagcaaaaatatttagcaag

SEQ ID NO: 53969 - DNA, 800 bp, Bovine  19866881311530
  misc_feature (1)..(1): n is a, c, g, or t
nttattacattctgcaaatattttctcaacttcagagggtaattttacagcaaataccaacagattgtttttctttcccatcatcacacatctttccgacccttcatcaactagtcagcttgtttccgcctgtagcagactagcactctcatatctctatcaatgcttaaaaaaataaataacataaaataggtcttgaacatctttgttcccttgtgacaatgcgcattggcagtggtaatctttccctttagatcagcttgtttgaaatacgatggtacttaaaaggaaggccggctggaaggacaccaataaaaataccagctcagcttaaaacaatttgatttcaacctaaaatgaattaccttgcagcacaaatagataatggcaaatgggatatcctacttatcaggactattccctgcggagagttagaactccaggttcatttgaagctcattgccctgtgaggatagagaatacggtcttctgaacatttatgtgcagatgaactagttggaagaggaaacaaactctgagtacgcaacatccagcccttgctgatttctcaagtgacaactccaatttgaccttcaacattgcaaaaatgcaatgtgttgactgttaaaagaaacaacccttctgtaagggaaaaataccaaatagcatcattttgtttctcaagaggctgtgtctctcataagctttacaaactagaggtttgtaaagatatataaggatactttgtttgtgtttttgtacataataggcactgttttagtgacaagattttccttttc

SEQ ID NO: 53970 - DNA, 1778 bp, Bovine  19866881334750
  misc_feature (1)..(1): n is a, c, g, or t
naggaaaggtttctgtaaatcatcagacttaaccctcccccacgcagtggcatgagcgttaaaatctctccaggtcagcttggttcaaaggttgtaagtgattgactcccaaataattcttagtggttggttagactggacggagatgactgccctcgaagtttgagaccatttaattcctataagtgcctagttcttgtgggttggaggtggtggacacatgcaccagaatagaagatgacaaaaggtatttctgtggctgatgtcctctgaggtctgcagttcggcaggtgtaaaatggcacagaatctaccttcgtctcacttattttccattcttctgtccatgaatcatttgaacatgagcctggatggctgcttctgtctggaaaagtgaaattttaaagaggatacccaagcagttattaatcagagcaaagagctaagtaatgctaagaatggaatgatttatgtcatagagtacaaaagacataaatttagagtgtaaattacaagataactcatgtgcaaaattgttgtaatatttatactagtgtttattaaaatttacatttgaataaaaaggtgaaaaatgtaaatgaagctgaaaagtggatttgaaaagaatctgaaatagcttatatgaaaatcaggagagttttctgggatagaagataggaatagtactctatgtaggtttgtctgttaaaccatgacatatacagtgggattggaatgaataaggtctctgattcctgaatttctgcctgaatttcctccctccctgcccactgatactttccagtaactcagatcagtactgaaagccatggagaggaggttgaagtttctggacggatgtcgaggctggatccgtatttgaaaggctaatctcatttcactgatgttttcaatgttggaaatttttttctgtattcattaaaggataatgataaatctctaatttgtactttgctactaatagggatgattttgtgcttcattaaggttaaatgaatctcatgtcgtcctggctcagcctttcacagacaccatgtgtgatcttgggagagatctcttccttctctgggactcagtttcttcatctataaaacaagggggttgtagcagatgagtgttgagagagaccagccccctgcccttccctcctgtgtgggaacaccctatgccaggcagttaggatccacaaaggccatcaagacgcatagctcttgttctcaggagcacatggtcttcataaataactaattatagtatgaactctaattgcaacatgcacaagttactctgggagcacagaggcggaaagagcgacttccttctctgcagggataggctctgagaaacttcacagtggccgtgacatttgaagggggaggaggagggcttctccaggtgtgcaggctggtcagagggtggatggttcagactgtgcattacaggcggcagatgcccgtgactgtggtaatttagggagctgcacatggtccttctcaccgtctctggaccgtcagggcatgggggccgagtagctttgtatacactgctgtgtcagaacttgggccagtgatgaattactgaggttagagagtaatgtatggcatgtataaattaaagcagggtttaagttttcctgtaatggcaccagtctggcccatttacattccagttggctttcctgagtgtgagagaaggggtggtgatttagccaactccctgggagttgtaagcctatgtggtctcatctgtcctaagcca

SEQ ID NO: 53971 - DNA, 1651 bp, Bovine  19866881380159
  misc_feature (1)..(1): n is a, c, g, or t
naggaattttttagcctaagtactgatatgggaaagacttgcagagcagatggcaaattaggaagccccttgagagtctggtgtcagggggggatgcccatgaagggaacagttgacagtctcctgctatttcaaggttaaagaaaatatgtctgagaacacgctgttggatttgagattaaggagggcattggatctttcaggggaggaacttccatggccggttttggctgaaatcagagttaaaggaatgggttggtctgttaaggaaaggataagaaaagggattgagtgttaactctactctttccaacttcaggacggatctgggattgtccatagtaccatggcaatttgaggagatgaggggaggtgttttttggagaggggatctgaatatatttatgcacagaaaaagactttgtggagagattgagattaactgaagatgcaagagataagggaagcggccccacaaaacaaggatagatatgggaatgggtttaattagccatgaggtcacgttcctgcctctgtctctctttcatgtgtatatgaggagggtgtgtgtgtgtgtgtgtgtgtatgttagaaagagacagggatagatagagagacacaaacagacagaccaagaccaaggcaggaactggaaacttcatagctgcacagtggcttccagaattgttctgtgggctgggagagtagcaataattccccagtcttatcctggttagaagtgatttcagggaccaaagaaaatactattaataactgtgggtgggtagttgatctgaatcaccactgagagagcagaaagaagggggaagcagaggatgagatggtgttagatagcatcactgattcaatggacatgaatctgagcaaactccgggagataatgaaggacaggggagcctggcgtgctgcagtccgtgggatcgcaaagagtcggccaggactgagcgactgaacaacaacaatccacgataggagatgcatatttgagtgataaaaacaaagtatcacaatgcagagtctttatatgtctgctcttttgagcattcttaagatgtttttgaccactgggatgtgttgaagacaggccaaggtacttaagagagagccaccaaagaaatttaagactagttgattcaaaacttatcgcaggtgcagagattttaggactaaaagctctgagaagcctggtgtttccagagaagagagtctgaagaccagttataaaatccagtaactcgttattaagagctgtctgtcctagcaaggtagaatgcgaaaacacaatattgggaagtagtgtcagtaacatatgtgaaaagaacaataggtttttttttttatataagaaatttttcgaagatttcttataaaagaaatcttccaaaaatttcgtataagtgatttcataagtgaggaacaagatgtcagccatacttttaaatgatcttttttgacactggtcgttgaaaaaaaaaacaagggatggtttttggagggaggacaggtctggtcaggcttccacttgctaaggatgacactgagttgctgctgtttggaagtggagtaaagatcttatttttcaagtgcaaatcgtatctgactctaatagtacgaattctgtcaagtagtc

SEQ ID NO: 53972 - DNA, 1033 bp, Bovine  19866881399606
  misc_feature (1)..(1): n is a, c, g, or t
ntctaattgcttttctggcactgcagtggtggccatttagtaatatatgatgtattcatcatatgtataataatgtgctttaaaaattaaatgtgtcatttgaagtacctgaacaggaaaaaatattactgaagattggacatttcaaatttcactgtacttagagtaagtgttagatattgttatgtcacaagttctgaaggttttccataaatcatagtcacagaatgttaaagagatcctaaaatcatccagcctacgtgttcattttccccttgggaaaattggattcagtaataagcccaggatcacacagctaaatactgacagaactggttctggaactcaagtgttctgagccctgctcagaaatggggcagatacacacatataatttttaaatatgatatcttaagttgattcctcctattaatagtcaagctgagagaataagagacttcttgacttcttaagctatgttttttaacagtatcatacagttaaaaacagacctaggttccaatcctgaacctctcactttctagctgtgtcaccctgagaatattgtctgacttctctgaatttcaattcattcatctgtataaaatagaaaataagacagtaatcaaatatagtgcttagcacagctcttggctcctggtaagtactcagtaaacgttagctaatattctttttcagtgttttattttatccctttaatatttcataatttggatagaaactgagtcatgcccaccagttatctcaccatgtgatgatgccatgtattctttcttttactagttcacttaccatgtgtaaaaatgcattccattagatactgtgtgtgtgcttaatcattcagtcctgtccaactctttgcgagcccatgaactgtagcctgccaagctcctctgtccaggaagtttcccaggcaagaatactgaaatgggtggccatttcctactccagggaatcttcctgacccagggatctaacctacatctcctgcatgacagggaattctttacaa

SEQ ID NO: 53973 - DNA, 715 bp, Bovine  19866881508722
  misc_feature (1)..(1): n is a, c, g, or t
ngtctgtgtcttcaatttagtccctctccccagcaccagggtgatccggacgttgcacgccagtggtccctacacagtgtcaaccgtccttgctgcggatgctccatagatgctcccactgaacctctgttcagctgacatcattcctgtccctgaagaggtctgcacagccctagatcccctgaggggatcgacaaaggacagccgtgcttcttagcccctcttgtcacacgggttctgtgtgccccagacagaatgctggctaattcagactgacaagcccaaagatcacactctcctggatggcccgtcacacctcagctcctcattactggatgtctgaatgcaccgtatccacgaacagcaaggcacaacctggggcgaggcagcactcacagagcatcaaaccctccagcacctctcctattctgtatttccctttgaataaaaattcaacactggccccctaaaaccctcagactgcttggtttttttggtagtttttgtgtaaccaattagtctcttttgtgctgtaggtcctgcttgggtttgggctagagtgaacagcatttaaaatgaaggcattgtttattcacaaatcaaataagctcctgacagctgccccagtggcttcctcattcagttaaattaatgcccaaggcctcagggtgaagggtcttctggggagaatgtgggcattattttcggattccca

SEQ ID NO: 53974 - DNA, 971 bp, Bovine  19866881547187
  misc_feature (1)..(1): n is a, c, g, or t
ntggtttcttagttacaatctttaaacatctagtaccgtggcagagttcctttcctgtttgttggcatgtcacgcattctgataccatgcatgtccaactcctatgtattgcagtgtttggtaattaaagcttgtgtcgaaggaatggttgatacaaaggtagctatgtttttcaaatcccggatcacaaactaattccaatgtgtctggaaagtaaaatcttatttcctgtggttactctaactaaaaaaggaataaaaaatgcagagtgaaaaaagatttgtgggattcagaaatgagatagtttgaaagattctgagagaaagaaggcatgaaagaaaggaataatatacaggattttgtagtatgtagaagaaggataaaggactctattctcaaaaaagcagaattgtgagataaaataattattctgacccaaattatttaatggtcatgatgtggctcatttgaattctacacgtactttaagtgtctgcctgacagacttcttaaggcctttagtaccagtccagcctatggaaatatgatctttttctgagatcctagcatctgtttatgtcactgacttgacaactcttcacacatttgcatttctgacttgttttgccactaaagtattctattgtcagttaacatttcataccttaaatctcaattttgtaagtagaatataaatctggaagataagcactctgccctaattcttgttaaactccacagccttagccaagcatcttatattatggaagattctcaattttctagtgattgattgagtgtcccttggactgcaaggagatccaaccagtccatcctaaaggagatcagtcctggttgttcattggaaggactgatgttgaagctgaaactccaaaattttggccacctgatgcaaagagttgactcatttgaaaaaccctgatgttgggaaagattgaaggcaggaggag

SEQ ID NO: 53975 - DNA, 933 bp, Bovine  19866881732104
  misc_feature (1)..(1): n is a, c, g, or t
ntgaacatgtattacctgaggagcgcttttttttttttttttaatgtttcgaatgatgctaagaggctgtgatgaacattatgtcctaagctctgtgaaaactgtctttaaaaccgatgctgtcttagttactgagccataaagagcgtcgagatccagaggctggccgggatgatcattctgcctgtctggaacgaaaggtggtaaggctgaacgatgttaaaaacattacattcttgtcgtgaaagacaatcgtttggaaagaatgacagaaaacaggtttcggagtgagcgagaccaggctgatatccagctcctccatgtgggctgggatcacagagaccagtgcctctcatcactaaaacccagcaaatgggttgttgctcccacgtcttcctcaaatccacagccctgggcctctatcccgtttctaccaccgctggtctcctccatgccgctcatcctttcagccctattcagagggcagcttctccaggaggttttgctgacccccacccaggccaaggcccagtcagctattcttatctctgccctcccgtagcgctttgcgtcttcctgaccacagactcccacaccaggctgaaataactgtatttgcagctgtcttcttttttgtttggctggtgagaaaccaggtctttactcctggcacagtaactgcagaccagctggatggatggacggatggacagacagatggataagaggatggatggatagatgagggatggatggatgggtaaactgggaggaagggagagatataggtatggatggacagatgggcaggtagatttcctgtatgctaaatccattctgaattctcctcttccaccctctatacctttgaatgacacaacaaggctcaccccacttttattcctaagaacctgatctccctcagctctgctg

SEQ ID NO: 53976 - DNA, 1058 bp, Bovine  19866880405536
  misc_feature (1)..(1): n is a, c, g, or t
ntaccaaggccagaaatctactatcctactcaacctcaaatacttaggcgccctttcctttcgttgaacatgcaaattgtccttttacagtcagtttgcaaattccttctggttaccttagagcaagacttcctgttcagtgactgcctcaggttttctctaagaatgcacaggcagtcacaagtcagactttcaccacccagaagcagatggtgggtagtggctaaaaatacagtaagtgtcaatgagatctgttaaaaaactggatgttgaatcacctctcgcagattccaggcaaaggccctcaatagcaatactttcccccttatctcctcaactataattataggttttctgacttagaaaataaaactgccagtttggggaataaaatcagtatttggaacacttggtaatgatgaattttggtaaaatatcagatctttatctttgatacgttgttctctataggtctcttttactccatatgctactttattcatcagttatcactgatgagtgattttatggatgggatttttaaataaaaggttaatttccccccaaaatgaataacatcattaacattcccagtaacattcttaaatattcaacaattgtttaatgccattttctaaaaatatttacatcagctttaagaaatgaattacttatattaaaaactaagctaagcagtaaagcagtaataaaatagtgacatagatataatcttcaaattataagaagagttttcccaagcctagtgttttccattttctgatagtttttactatgtgtgttaaagttgctcagttatgttcgacactgtctcacccatggactgtggcccaccagctcctgagtccatgaattctccaggcaagaacactggagtgagtagccattcccttcactaggggctcttcccaacatagagatcaaacccacacctcttgagtttcctgcattggcaggcagattctttgccactgcgccacctgggaagactataagtttatgcagatactgcttaggaagtatctattccaacctcaaaa

SEQ ID NO: 53977 - DNA, 1121 bp, Bovine  19866880415688
  misc_feature (1)..(1): n is a, c, g, or t
ntatatatgcctgaatcaaaattctgttacatccaaatacattgcagacatagcaaacagtgccctgtactattttaaagaccagtgattccattccttttacaatgtattaactaaatcagatacttaagccatgatacaaattaaagtttatttaattctgctgttacatctagattcagattcctactagggatagcttgacacaccctcttataagttacccagagtcaaaaaggaaaaaggcaaagaaaaatctcaccagggtgatcaactttttcctcaacacataacaagattacttcttttcttcttagtcatgtatttccccttagaaaataatttgctgtcatgtataatatatatacatatatgtatatctctctgtgtatgtgtatatatccatatatatttcagcttttaaatgtgaaatatcttttcctagaatggagaaggggtaaaggcaatgaacagcttttcactctttgtagcaagtattagtaaaatatctgactagatacgtcaagattttaaaccatttaatttttgacaggctgaatgggtttcccttaatttgcagattactgctggaagaactctctttgcaatattatgaagtaggcaggaagtcatcaaatatgtgcactgctgggaatcagacagtagcaacgtcttccattgaatttatcactttgactacttgagccttttaatcttctgatcattggtgcttaggcttgacttatagactggctacaggaaattcagaaatgtcatacgtacattaattttcaatcaattgatttttagacagtgtactttacacagaaggatattatgagttgttagcctatactattacagtgagtgtgcttccctgagcactggtttccgattgcttgtccagtaagcccataggccatagcatggcagcatgtaaatcatttctctaagacacagatttttttttttttcctttagacaaactgagtgcctgcattccctgagggtgcctctgcagtctaaccattccgttcttggactttttactattctatccattttctttctttctttctttctttcttttttttttttttttgtctttgaaatatctctaa

SEQ ID NO: 53978 - DNA, 1331 bp, Bovine  19866880528967
  misc_feature (1)..(1): n is a, c, g, or t
ncattggagttttagctttagcactagtccttccacagatattcaggactgttttcctttaggattgactggtttaatctctttgtaatccaagagactctcaagagtcttccccaacaccacagttcaaaagcatcaattcttcggcgctcagctttctttatggtccaactctcacatccatacgtgactactggaaaaaccatagccttgactagatggacctttgtcaacaaagtaatgtttctgctttttattacactgtctaggttggttatagcttttcttattccctagatacattcatatgtgcattatctcacttaattcttattacagccacaaataatgggaattatcattttttataaagaaattgacatttaaacatattgagtgaattaccataagctgtaagtgaagggaaagggtacaaagactgatctgcttgactccaaaatccatattctctcctattaacccaaataccttcccaagcaaacagcgatttcctgttgaactctactcatgaccaatcactagaaaggaaaaaactgaaatgtgtattgcactaatgaattgttttctggaattttttctttggccaacttcaaaggcaaaacagtgacttgtgcagattttgcaaataacagagttctttacctctcatgcagattagcatagttcccacaacagtatagatatctggtaaatatgtggtgaaaggtagtgaataaatttatttagttgcaaattttcaacattttcagaggatgagatattattcatttcttctatgagaccacatgggatttagttaggggaagatcagataaccccagctagtacactaatagcaggattcctcaacagagcagggaagggatgctcgtcattgcagggatccacgccccaaggggagtgatggtttttaaagaattagttgtagggccatgaccaccaatgcacactaagtaaagctttcaaatcctttaatgcttaccaactgattccctgaggccctcccccacccaccacgcttcatctacatcatgtatcatgctaactaacatatgctgatccctacaaagagagaggctctgtcccaaattctagggatacaaagatgatcaggaatcagtccctgctcccaagacagcagaaacagtagcaggagaaagatatatgaaatgaacaccctaaagtattataggaactgtgcatgtttgccatgtacagtgagaagcagctcagaaatggaacagtaaattctacctaaggagagggagaagtgggaccaggaaaggcttcaggggaaaataagcttttaa

SEQ ID NO: 53979 - DNA, 1367 bp, Bovine  19866880586377
  misc_feature (1)..(1): n is a, c, g, or t
nccatgaaatgtataaagaaaaagcactttctgtggaggctgaaaaactattaaagtatctcgaggctgtagagaaagtgaagcgcacaaaagatgaactggaagtcattcatctgatagaagagcacagactggttagggaacatctcctaacaaatcacttaaagtctaaagaggtaagaaagttataatacattccagcatatgagtaaacatgaggaacttaggctgtgtagtaaaaggataaattttgctaatgcttttaacatatattaatacttaaaaatttttttgccatactgcatggtttgtaggatcttagttccttgaccaggggaccaggaattgaacctaggcccccgtcagtgaaagtgccaagtgctaaccccttgaccgccagggaattccctaaaaactttaaatatatcttaaaattaacatttatttaaaacacctgggcacaatgccccagctgtagttggcaattttttaagtattagttccattccagaaaatgtattggttagtttacctcactaattaaataaataaaattcttacatacagttccttcacaaaatataatgtacttaactttattactctaataaagagcaggttactttgttccatgagcctttgaccaacccacacaaatttttattgagaaagtggtccaaacccccaaaagaaagccttaaagactattattaattgatatgtctgtgttacatgtattcatttccccttaattccttttatttctacctattttattgcaataggtatggaaggctttgttacaagaaatgcctctcacagcattactaaggaatctgggaaagatgaccgctaattcagtgcttgaaccaggaaattcagaagtgtctttagtatgtgaaaagctgtgtaatgaaaaactgttaaaaaaggtaagtgctatgctatgctaagtcgattcagttatgtccgactctgtgcgaccccatggacggcagtccaccaggctcccccgtccctgggattctccaggcaagaacactggagtgggttgccatttccttctccaatgcaagaaagtgaaaagtgaaagtgaagtcactcagtcgtgtccgacttttagcgacaccatggactacagcctaccaggctcctatccatgggattttccaggcaagagtactggagtggggtgccattgccttctctggttacctttgctaactactactaattgaaacaactggctcttaaattttggaaatggagtcagggaattttttaggtgttttgagacttttatcataccacattgcattgactctgaaatctaagtttaatatgtcctcatttttctctttatgaaa

SEQ ID NO: 53980 - DNA, 891 bp, Bovine  19866880646302
  misc_feature (1)..(1): n is a, c, g, or t
ntaaagcttaagcctttgcagtatcctcctaatctgtcccccatcctctcccacatacattccaggctatccagacacagagaggctctgagaacaggaaggtttctgtgacatgtgtgagtaaaataagacctccgggaacacagaatgaaaaaccaatcaagaggaaaaggagcattagcctataatttattatatttgtgcccctctgccacctgcactgaggtctaccctacttaccaggcatgggctggttcatgaagatgctcactagtgttgtttggtccatgaagccatctgcgtcctggcaacctgcattggttcagaacagctgaggcggtccttgggggcctgctcatgaccatgctgctctgtgtggccctggttctgcatatgctgtaccagccagtggtcactctcctaaagaacattaaaacagagccagagcccatggattactgtgggagatggtgttatttacagtcatagtcagatttctaataattaaaagccttcttcacacaagacagagagctagctattgaagtttctgcccttctggaggaaagacataaaaaatgtggcaagttcaacctaatttttacaggatcttaatcaactttaatagaagccagactcaagaggaaactactaaacagtaaaactggaagccataaataaagacccacttccttgggggctcagatggtaaagaatctgcctgcaatgtgggagacccagattcaatcccagggtcaggacgataccctagagaagggaatggcaacccactcagtattcctgcctggagaatactggagaataaagagctggaaatcttcaattccttgcttggaattaaaatataggcctttacaaaaggacttagca

SEQ ID NO: 53981 - DNA, 1029 bp, Bovine  19866880688038
  misc_feature (1)..(1): n is a, c, g, or t
nattcaaccatccttttgggtgtaattcattagcctcatcttccataaggtttttctaccctagctcctgtcttaaatggccaaaatgcatctttaaaaaatctgctttaggctttctaagcattttttgttactactccttaggatctttttcactcatctttttgtatattacatcctatgaaagacatattgtactatgcactgtttcatccctcaggcctagctcacagacaatgccaagcatacagcaagtacagactgaagatttgttgaatgaataaatggctttatacatacaatatctctttcctgaaagaaatcatgttctactaatttctataatacctaaaattcctggcattaaaataaatgaacaaatatctgatgtgtgcttataacaatttattaaaatacatggaaattataattaaattagatttggtggatatgcaaagtaatcagtggatttacattttatcatgattctaataatctaactttcacatttgattgaaaagcaacctttttgttatcaggtgaaagtggaagcatataaatgttcttccctaaatttatttcaaatcagaactgatttcatatactgttttcataatacacatacatgcaaatgtattcatagagagtcttaaatattaatcaagagcacttgagcattttggttgttccaactgactctcatgtaaaaggaaatttaattttttgaaaaggctgctatattgcaactcaattatttcctaggatatagctgtattaacgttcttaattttaaattgccagggattgtattaaatgacaacaataaaattaatgtataatttggggtgaaggcttctagcttttaaaataaaatatttcaagataatcttatagggttatttaaacttataaagtgagctcttactttagaaggaagaagaaaaaaagtaaaacgatctgaaatgttccattatcaagaatatccattcacctcttgaactcagggggaatacttcagggctctgctag

SEQ ID NO: 53982 - DNA, 4746 bp, Bovine  19866880773691
  misc_feature (1)..(1): n is a, c, g, or t
ngagagtcccttggactgcaaggagatccacctgtccttttgaaggagatctgccctgggatttctttggaaggaatgatgctaaagctgaaactccagtactttggccacctcatgcaaagagttgactcattggaaaagactctgatgctgggagggattgggggcaggaggagaaggggacgacagaggatgagatggctggatgacattactgactcgatggacgtgagtctgagtgaactccgggagttggtgatggacagggaggcctggtgtactgcgattcatggggtcgcaaagagtcggacacgactgagcgactgaactgaaatgaactgaactgaactaagtggactaatgggcagaatatgttaatgcaactgaaaggctttccaataaactagggagtggggatgttttaattgtcctagttaatatgcactttttactatatatataagaaatcttaaatgtgctacctttaggtgatgctaaaaatgcacctatattccaagtgcctactccctttgatagctgtagattaatgattgttgttgttcagttgctaagtcatgtctgactctttgaaaccctttggactacagcacgccaggctcctctgtcctccatgatcccccggcgttggctcaaatttatgtccatgggagtcagtgatgctatctcactacctcatctcagtcacatattggacagcttctgaccggagggttcatcttccagtgtcatagttttttgccttttcatattgttcatggggttcttgcagcaagaatactggagtgggttcccagtttgctcctccagtgggccacaatttgtcagaacttcactatgacccatccgtcttgggtggccctgcccagcatggttcacagcttctttgagttaacgcaaattcctctgtcaggacaaggctgtgatccatgagggattaatggttagggagtgaatttcaaagtaagctggtcaacaatggcccctctgaggacggctctctggggtgggatctactccaacaactggaggcgcagacaacacccattgagtttcaggtccacgtgtgatgaggacatcctgggacagagttggctcagagaggagggcagaggggagcccgggtgggagctcctctccaggggctgtggacagagggagcagagagaactaaagaagcaggaaacaccaccgcagcccagctcacgtctcctctgccgctcaccatggaatccagcctaggaaagtcataaaatattgcaaaccccaagtctgccagtgacttgctatgaggcgttggtgagccctctctgtttctgttttcacactaaaatgggagtaggtgtagattgctgggtcattgcaggtttggcagactcacttgtattatacagcacgaagttcacctgaccaattaatagccgtggttaccattatttctctggatctcccaaggacccagcaccccaggagctggctgtccagacctgctccacagtaacccttgcgccaagaccccttccatccctgaggcccttccatgcccctgcccccctcaccccgatcttcttctactccctgcttcatccctggcacattagcccacaggtgtgttcattcctcctacagtcaaatcctttgccttaggggttttcatccctgatgctctcttggtcttcaaataaatgggtgcccgtttcttgtggtcttagcttaaatatctccacctctgttaggtcttctctgagcatcaaatctgctaataaaattattgggaagacccagagggatggtatggagagggaggagggaggagggttcaggatggggaacacatgtatacctgtggcggattcattttgatatttggcaaaactaatacaattatgtaaagtttaaaaataaaataaaatttaaaaaaatctgaaaataaaaataaaaaaatttattatataaaaattatataaattttttcaaaccatcctacttaactttcccctagccagtattactgtctcatattttcttgttgtatttatcgatggactgtttttgccccactagaatgcaaactgcttgtgagcagagtttggttaatctgttctgtatctcctctacctactctggtgcttaaataaataaaggtgctcagtaaatattcattggatgaataagcgtgtagcacaaggaaatggcaacccactccagtgttcttgcctggagaatcccagggacgggaagcctggtgggctgccgtctatgggtcgcacagagtaggacacgactgaagagacttagcagcagcagcagcaagatggcttgggggttgcgtttacattttctaagtgtggggaagcccctcctgggtgcaggccttaatctctcagtgtgcagttggggggcgggcggttctgatttcctcagggtattctgaggtctttttccctcagatgcgggctgacgactgctcactgcttctccttttcttcctcttcctgtccctcctcctcctcctccactttgttctccttctttgtcttctgttccttcttttgctcctcctcgtccttctggctcagtttgccttagcctgtccagagacccaatgtaagtgttccccactcaggagcagtcagtgtggaatgaaagcagcctgaggttacagtcaataaggagcaaattaagaacataaacttgtgaattcaggtttccctatagggctcttaaccagagtgtggagctataaattgcctcatgtccactgagaagacagtaagtgaaagtgaagtgaagtcgctcagttgtgtccgactctttgagacccgtggactgtagcccaccaagctcctccatccatgggattctccaggcaagaatactggagtgggttgccatttccttctccagtacagctggataaaacgagaataatagtgtgatgacctctttcttttccaaaagacacatggaagctgcccagagaagctataggtccctcacggggcccaagacacactcgatgacagttgctggaagtccagtggaaatctgctgcggtcctgaaatggagcaaggcttgaggagagctgtttacctggagtgagtgtctttctttattctctaaagtttcaactctttgacttccaagaacatctgattcaaataatcatatcttattaattctgtatattgctgctgttgttcagtcgataagtcgtgtcctactctttgcgaccccatggactacagcacaccaggcttccctgtcctttactatctcccagagcttgctcaaactgacgtccatcgagtcggtgatgccatccaaccatctcatgctctgttgtccccttctcctcctgccttcaatctttcccaacatcagggtcttttccggtgagttggctgttcgcatcaggtggccaaagtatcacataatcatatcttattaattctgaatatagaagataagaaacatccagtattcactacctcctggtagtttaaatccctctcatggggcatttgttctgggtttcctttggccagtcatcttgctttgcctggttctgagtctgtatttggtttatctgggggtactcctgagtgtgcatgcctatctcttaggcaagtgaagaggtctgtgtgtagcttgacaccacctttcttctgacctccaatgcactttatagtcaggaaggtttcctcaatctcgagaatgagaaatatgtcgcttatctttaatcatggcagggctcagcttctatcgtgctcctgctttcttcacattggagtatcggtccacagggatcctgtgtgctaaccctgagcccttctagctcctgcctcagggggactgtatatttatttttaaaagtccccatataagtggaccagggcagttcaaaccaatgttgttcaagggtcaactgtaattttgccagccttgcaattttgtcattactaattgaaccttaaaattattcaaagttctattattttaaactttctcatgaaatgggttaccagtattaatctataggcatgcatagacctgtactttaatcttcaaatggcacacttgtactttagtcacagatggcctcaatcctagccagttacactttcaaagagcagaacgtgtttctaaatgcttagggtcaagtacgtgaatgcttaacagtatatactctcaatggtttatggcaattatctgagccatctttgcaaatatccaagtggtaataatgctcatatttgagcattagctgggaatgttattgtcttcacttacctgccaaatgtgcaataaaaaagcttatcctttagatggctattaaatctttaatgttcaattatttccaagtctgtgaccactattttatttcatatggttattttaattaaattattgaattacagttatcaggtatcttgtcgcatggctaatatttagtgaatatctgactagaatgatttctgcattgttgaattgatcaatcagatctcctcagcacaggaataatatttgatattatactcttcaataatagcagttacagtaaagaactgggccttggacttgataagatgtacatacaggaagtgcaaagtttggtggtggaatgatagtgctatggcaactgtatggaatggatgtgtttttttttgttttgttttgttttgttttgataaacagaagatgtttcacactttaatttcaattaa

SEQ ID NO: 53983 - DNA, 3605 bp, Bovine  19866880941067
  misc_feature (1)..(1): n is a, c, g, or t
natttataactataaaacttaacaaaatagctgccagtctgctgagtctgataaagaaatctgtcacatttagtgagaaagtttaaccacagaattcagattttaaaagaaaccagactgaaggaagagattctacaagcttgcttgtcataagatttttacagcttctcttggctggaaacatgcaggttgctagaaaaagtcactgaaggaacttttatctcatgactgctgtttttctgtaaagttcctaagctagcttaacttaaacataagaaacagaatgcagttgtacctgaaagttcaaagtaaattctgattcggcacacaggtatcctttcatgagctttcaggagtctcctttgctatatgaacacttgctcctctgcaagcacagttgagacaatagtctactgggaattcaagggctccacctaacactacagggaccactaagcagcagcttatctacggagttctcttaatagtcaagatccataagaaattcagtggggcaatcaaaaaaacagccaaaaataactgctttatccttcctggagaaagggcaaggatgcatctaaaccatttttgtatcatttattaaggtgtgccaaattgcaaacgctggcacacagcagttgatcagatacctatctattgatcaagtaaataaaacaaaaatacaaacatccatttaaaatcctatgaatgatctctgggtatgctgtgctggtgtgctcagtcacatctgactccttgagaccccatggactgtagtccatcaggctcctctgtccatgggatttcccaggcaagaatactggagtgagttgcgatttccttctccaggggatttttccagcccagagactgaacccacacctcctgaattagtaggcagattatttaccactgagccaccagggaagccccatgctgtactagtaacaggaaaaaaattcccacagttctccagcagggccatgcagcataatggttgagaacaacttacttttgctttaattcccagctggactctttcttatcacgaatcatctgatagttgggataattgttttataactctaaacactggttcttcatctttaaaatgggtattacaataataaaaccttatccgaaaaaaagtcatttatataacagctcaagcaggcttggcatgcaacatgaattgagtcactgctgctactagcacagtcaaatcctatgtcaggaattattgataaatagtgacctagtaagatctacttatacttttataaaataagtcattttaagcttatttaaagcttatatttatatttaagcttaaccatcactctgccacctaagtttaattaaaaacagagtggtgaacatgtaatatgtgtggactcagggactaaatgccaagaaacctgggttttagttctatccttcacactttaccaggaaaagccaaagctccaggccttaggtttcccatctataaaactcttaatgttccaactaacatttccaggaaaatcacatacaccccttaaaaaaagaagtcttaggattcctaaaactacaaaacacaattcatcatttgtactaaaaaatataacaaaaacaaaaaattaaaaatattggaagcaacataaatctgtatttgaaacaacatacattagtagggaaaataggtgggaccaaaaatatatgaccacaaatatatagcttaagtttcaaaatggtaaatttctatgagttaatgtccctaaaatctgaggaaaactgataactcaagttattttaataaaggacaatgccccagtacttgtagaaaaaaagcagcaaggtgcccaacagactaaacatacaaagaaatatttcagagtgagtatctagtgtttacggaaaactttgcttgatggcaagttactaaaccatcctgaaatattaggacaaataaatatgattactatgatctcactacccaagaagatcctgtttaactatgttttatctattacattattttgttgaattccaccatacaagtaattttaaagaaaaataaaaaataaatgatgacattaaaaataaagttttgctgccttcaagaacactagaaactgcatgtaaaaaaagaagtggctgtatcaaatcatgtgtcagtacaataattcatggcagctgatttatataaactccagaaaataatggagaggtgtttaagttactcattaaaaatggtctatgggttgtaactagatattagtaaaactaaagttagaacaatttgaggggaaaaaaaaattcaagggaaggagtgcaatgaaagggttaaattacaccaagttacacactaacgctatatggcttgtgcccggtaaaatcatgcaggtaacatgaaaaccaacatctaacaccgaaaacatttagaaaatttgtgcttgaacgtaaagttaaaaaaaaggggaggggggataagctgaaaaaaataaaataaccattcatttcataatccttccattgttgtattattcacttatcactacacttacattgactacgtataatttaacacaaagaagcaaaatctctaagcttctccctaccttgggtttttaagcaaaatgaatgcaaacaatcacgtgggattcagccaagcagtgacgttaaattctgctctgtcagagagagcatctgtcaagcccacatttaaactgctgcctgcctgtgcagcagctgaggaaccgtggatttcatattacagactaaaaccccagtgaaacggctcagtccttcctgcagctgccaggcaacgacgagagagttaaatcctgctcttttccaataccatcgaagcactccattctagctctggctgctttacattgcagctcagggttcttactagaaatatggatactgaaaagagaatagagcactgcattgtccggccaggaagacagcagatgtaaaaagcttcaatgcatcaactgtcagaagagtcgacagtgctccaaacagaacgaaaccaccacagctcttttgttaaagagaaaatgaaaggaaagacctcagaagattagcacccatatgaacaaggaagggtactcgaagacaagcagacagatggacactttggacatgtgataagcaatcgcaggaggcagactgttgggggaggtgtgtgtgttcgatagcgtctttttgctggagcgatggcgtgccaaaagtatcttcagtgggcataatcctcgccacataaatggcctgaccaaggaaggtatgtcgatatcttgtgtgtgatactcatttaaatgtctgttaccttttgatagcccaggaggcactaatctctaataaacaagttcatacatttcactgtccttgaaactgtgagagggtttctaaatatatgattttaaaatttgtcactgtttagaagacaagctgtcactgctttattcaagtaaatatgtaactcgcagtaattatggattacagaaaaggcaaatagtaacaagctgtgcttaaaggcttctctgaaaaatgaaacttaaaaaaaaaaaatctgaaacccgctaaagaaaacacagtatcctctatcaaat

SEQ ID NO: 53984 - DNA, 1453 bp, Bovine  19866880959537
  misc_feature (1)..(1): n is a, c, g, or t
ntttcaattgtttttttggcacacacagaatattcttagaggttagagctggggttatcagtgaggttggtattgagcttgatactgctttcctaggacatgttctagaagtttacgagggaaggtgttctgggctgacaaaaaaaatgaagagcatttagtatatgtggccagggaatgtagtgtgttgggacagtttttgaaaacaacaaagactagtcctgtgtgctgcaggacttccaaatgtccgtgtgtgtgtgtgtgtgtgagagagagagagagagagagagagagagagagagagagagtcagtccccagtctctgggatctaatgcttgatggtcgggggtggagctgacgtaattaatgacagaaagtccgcaacaaaggtaatgtgcttgaatcatccttcacaccccatctccttgggtctatggaaaaattgtcttccgtgaaaccagtccctgctgccaaaaggttggggccactgtgttagaccatttttattattaaacgaacctaaaacataattggaatacactcggagaaggcagtggcaccccactccagcactcttgcctggaaaatcccatggatggaggagcctggtgggccacagtccatggggtcgctaagagtcagacaagactcagtgacttcactttcacttttcactttcatgcgttggagaaggaaatggcaacccactccagtgttcttgcctggagaatcccagggacaggggagcctggtgggctgccgtgtatggggtcacacacagttggacacgactgatgtgacttagcagcagcagcatgttgcctgtgcatttcattttaaatggttagaggggtcagtgtaaaatattcttaaaggggatgtgttgagtttgatagagttgcgaagcctactaggtccgcacctttaaattgtttcaggcatcttactggcccgtagctgtaattctttgattcccaaaataatcaaattaatataattccaaacatgtaacctttgatagagagagctgggcaacagagtattgtttatccacatgaaacaaaagaagagccaatttacaagctatagagcaaaattataagctgtataggtttgaagaaacccacgttgaattgtcttcaaatgtaatcatttaattgcacccttcaggttgtactgtaatggcattgttcctagtgaaaaagtattacttacattagaataatggaatttcagagtagaattggacctttgaggtcatctaaaaatctagtttcctcattttacaggcaaggtaactaagaccctgagaggttgagatttttctcaaaggtttgctcttaatgtagcaaagccacattaagggtagaacctagagcttgagatttgcaagtcaagtgtttttttgcattgatttactctgtcttgagttacattagtgtatttgttttt

SEQ ID NO: 53985 - DNA, 668 bp, Bovine  19866881005256
  misc_feature (1)..(1): n is a, c, g, or t
nctctttcctaccccatggactgtagcccaccaggctcctctgcccatcacattttccaggcaagaatactggagtgggttgccatttccttttacagggtatcttccccaaccccaaggattgaacctgcttctattgcattgacaggcgggttctttaccactgagccaccagggaagccctacgtacagatactaatgactaaaaacaagtattcattttgataaaaagtaaatgatcatgtgctaatttacacaacttcattgcaaagattggaatgcattttattactattaataaatgtattgccctgttttaatactcagatgaggtatggaacttgtagcaatcactcccaagtctttccttttttcagttaacggaagcagataacatttagggccttccaagaacactcaccagtgagaaattccaagggaaatatgaagtaacagaaacaatgacattaggggctattttaatggcccatgtggttgttccctactcctaccctcaatgttcaaaagggcacttttgttctagaatgaaaataagaagcaatgtgctagatgaaataggatctttttgcaccttgactcagagaaaccaactgctctaagaaactcttctgggaactacacaattctgttctcataaatttgcaaaa

SEQ ID NO: 53986 - DNA, 1198 bp, Bovine  19866881054511
  misc_feature (1)..(1): n is a, c, g, or t
ntcatccaaacatatgatcccatgttccagcctgactgaataataagcctgtaaagagacagtcatatttgctttgggagtttctcagtgacaggttgacttctaaaccccttggtgactttcaaggtgtggtgataaaaataaatatcctatttatgttgtatgcaattctgatgagacacaccggtgtgagtcttaaagaaccatgattcctgttaattaacattatgctgaattttataacatccaaggaaggctagacagaactgactcatgttcattgctcacggtgtcctcatttagcaaacaagaacacggtggactcctgaaagttgaaatgcgcacatattccattaattccaaggaacttgtacattgtttgcacagctgttctgtcttattccttttacaggaggcagaaatgactttaaagtccctcagtaataataataaaaatcatggctgtaatttattagtctcctattttacattagttactgcaagagttttacctgcattatttttaattctcagagtatctgtataaaaggtgagtattattacacctattttgcttaataatacccttatagaaagaaaataagacatattatcatttgaatgtctttgtttccatttgtactgtggcaggtatgtgcatttctcatttttctcccaacttttggctaagcagagataagcattactccttccaactagcagataaactagaacaagatggagttaaataacttactcaaatataagagtcagacacatgtctggggccttaatttcaccttaggctattttttcattagatcaatggttttcaaattaacaaactcaacagttacatgcctgtggatggtgactgcagccatgaaattaaaagatgcatgctcctttagggcttccgtggtggctcagacagtaaagaacctgcctgccagtgcaggagacctgggttctatccctgggttgggaatctcctctagagaagggaatgactcactcactccagaattcttgcctggagaactccatggacagaagagcctggtgggccacagtccacgtgggcacaaaagtggggacatgactgaatgactaacactttgctccttggaaggaaagcatattaaaaagcagagacatcactttgccaacaaaggtctatctagtcaaagctatgttt

SEQ ID NO: 53987 - DNA, 827 bp, Bovine  19866881115677
  misc_feature (1)..(1): n is a, c, g, or t
ncgtgtccgactctgtgcgaccccatagacggcagctcaccaggctccatcatccctgggattctccaggcaagaacgctggagtgggttgccatttccttctccaatgcatgaaagtgaaaagtgaaaacaaagtcactcagtcgtgtccaactcatcgcgaccccatggactgcagcctaccaggctcctccatccatgggattttccaggcaagagtactggagtgggttgccattgccttctccaattttggagaatagtctagatttattttccaatatttcaaggaacgttcaaatctattatctagacttgaagtttaaattaaacagacctcccctttcatttaaatggaagctgattagctaatcttctgaattatacaagccacgtcctaaaataagtaatcaataataatcattgttagataactaagtgaaagttgctcagtcgtgtccaactctttgtgaccccgtggactgtacggtccaaagacattcatttttttaaagagaggaaattccccttaaaaacaaaaacaggctggtctcagtatcataggcttcatacatttatttcttatgcaaaaactccatttctaacattcgcccacacaatccttgtatcagtttcacccagttatatcttatgtgggcctggttttcttcccaactacacagttttataatttatttcatggtgatgccaattaatttaaaatgaactcttttcacaactgtgtggaaaagggggggatgttgtcacagcagtaatcaattattatatgaataaagggcactcgctctgggttcctcttcgttttt

SEQ ID NO: 53988 - DNA, 1934 bp, Bovine  19866881120740
  misc_feature (1)..(1): n is a, c, g, or t
ntgctgtcaaaccaaaataagacctttcttattttagatgtgactgacacataggttttaaatttttagaaatgtaactatacaaatgttaagaaaaatctattgaattaaaattgggagataaagagggtggctggcttcaggacacactgactgggtagaactgaacttgacatgcggtactgtacataaatggacattgtacatttccctccctccctctttcctttctgaccctcttggtttcctttttttctcttttatttgtgttttagttgcaactttacaaagcttttgtccagctcttctcctttgtgtgtgtgcatatatttcctgtaaaattgtgatgcatggtcagggtaacttgtgtgtgtgtatgacttgccatgaaaatttcacttgtgtatctggaaccagaatcacacttggcatttcatggggtttgggctgatttccttccttatgtgagtgccatcaaggccggcagtcctcatattacgtgtccagagtagagtcaggccagatgggaactgtgtgaagctaccagttatcttgctaatggtgcccgttagaacctgttgtattccattaaaaaaaatgtgagctccagcaactgagcggtccacactcaattagcaagcgggagattcacacaaggagccgggtgcttcaggaagtgacagctgctgccttaccaacagatatatctgtgttcaagtttctcagtccatgttgcaacagcgaataatttttgctaggattgtgtatatcttaggtctttaacctgaagatcaaataatttgggagagcctcacataaagacagtgggttttctccactttctaagcttgccttatcttagtaaatataaagaattaactgtaaacacatgcactgtgggcagattttagaaaagaaggaaaactcagttgagaaaggagaaaaagtataaatcaggagggaagacagcaattaacatatttataataagtgaaagaaacgcaacattgagactcatggagactcaagtgttttcatctgtacatcgtctgagataagaagaactttaaaaagcaactcacttcaccggcatttttcgttccactgtctgtcgcagatgatgccaaatttctctttctgacagatcttccagcttaagggaatgcgacagcaggaacagtacaattagtatgcaaatagctatcccctgggtcacaaactggcattctttaaatcaagctgtcctcagctttgtttccttttgttgttaacttttcactggtcagaacacttaaacttctaagtaacaaataactctctgaataagcatggcatttcctccagtctgtagtataactggaacaaattccatttggaagtttggtttctaaagttcatatacattcatttccaagacaactattgttcacatgaggttaaatcaactcaggaaaaaacatatagatgacgttcactttcacttttcactttcatacattggagaaggaaatggcaacccactccagtgttcttgcctggagaatcccagggatgggggagcctagtgggttgccctctatgggatcctacagcctcagacatgactgaagtgacttagcagcatagttctgtatacctttaggtctttagtctgactaaaaagtcattttgtttctcttctttggttctcaaagtctgagaaagactttttttttaatactcttattttaagtatatgtgtttaaggattttttattctagcacaaggcatcacacttttgaaaaaattgtgcatttgttatagtttaataacatacatttgtcaatttattttaccatgaaactcaaggcattctgtgccaatatttctttatgcaatgctgatgtttgagataataatagctgaatatatttatcaaggtaaaggacttata

SEQ ID NO: 53989 - DNA, 1565 bp, Bovine  19866881138593
  misc_feature (1)..(1): n is a, c, g, or t
nacactatgtatgttatatattatacaatatatgcatatgtaatatatgttatatataagtataatgtgttataaaatttgtaacataaaatctaaagaccaagatgatgtatatgcaaactgacatacattttaaatctaataatatctattcaattctttcctcctaagaataggaatgagataaatatacttgttatcattatttcaatacagaatttacatgagatcttgaaggatacaaaaggcaagggaaaaataaaattaaaaaacccataagactggaacaaatgtataaatttgtcattattatgatcaaatgatttttaatttacacaatccagaaaaacctggaataaatataattaaaaaataaattcaacaacttctctgatataatataatttaaaattaataaattcctaaatagcacccacattaagcaatttttttaaatttttaaattatataaagtaacatcacacacatcaaatagacttttttttaaatatttgtttatttttggctgtgcttggtcttagttgctacaagggcttttttctagttggggagagagctaggtctactctttagttgtggtacatgagcttctcattgtggtggcttctcttgtcacagagtataggccctaggcatgtaggcttcagtaactgtggctcccaggctctagggcataggctcggtagttgaggcacatgggtttagtaatttcatggcatgtgagatcttcccagatcagggattgaacctgcgtctcctgatcctgcctgcattggcaggcagattctttaccactgagccaccagggaatccccacagggattctaaggtgaaagaatcaaagagaagatagcgtgcggaacatggaaggtagacagggccagaagattaaaatacatgggccaagtgtaagcagcaaatccagaggtcaaacagctacagaaacctcttagaattcatgcaggaaaaccaagagcaaatcccagagccactgggagggcagtgaggatgtagcttcaagtctcgtcaacagactggagtaaaggaagcattaggtctaagcaggctccacagtggaggagtacagcggggactgaagactagagaagccaggtgtgtggccaacttctgatttcttgcctctgaacttgttttgttcttgttaacaagcctagcaagggaaataaaacacttcaatgcttctatttttttaaaaatcacacagaagattagctgtttggaaataggttgccccatgcataggcagttgagctagagtttagaactcaccttgaatattctgttttgttctttccctctgcctttagcaaggccttctgcattttgctggatggtgttttgtgagtctgcaaagtgtagcagagaacagactgacttttgattgctctggttttgttaattaaagtacaaaggttgatagagggactgaatgttctaaaaattgggagagggagcaaggagggaaaatggttcatgctttgcagctaattgctctcaaacagttatttctttcttcaaggtgt

SEQ ID NO: 53990 - DNA, 826 bp, Bovine  19866881159630
  misc_feature (1)..(1): n is a, c, g, or t
naaatgaaaatgcctttcagttcatttgaatgaaaagaacaccatttcaaaatggcttcacaggaaaccttgtgttcccaagatttagtagatcaagggagaaaggaaaatcagttgcctgtcattgaggaaaaagtaaaagaaatggcagataggaaatccaagtactgggagatatcagcatgtgctccctgtcacccagccaccctgtgtggcctctgagtacagatattaccatctgagaatataactacaacagcaggagagaggagagcaatgcaaactggagcaaatcacacaaagtaatagaatgtaaaaacatagggactgcatcacacgagcatatttaagattagtcaccttgatatgcaaatataaattttataagaatgactggatgtgagactatcaatctttttaatagaaaccttcaattagatcattcctttccatagctaataagtaatttgcacatcacagctacatcatccaagatttttcttctgggtagcagatgttttctatggatggggacttatttcattaggatctttgtttattaaggggaataatgcatgatatatttacatctcagaaagtttatatcagaaacttgatttattatttctacatcacatcccccaaagtataccttcttcagaagacttaagtcaataaattttttgactgctttggaaaagatattactctgtcctgacagatacctagatttaaataaatcaacccagatggaagcatacctttaaagagaaatgaaggctgtctcaaaatgggggggaagactccttaaaatactataaataaa

SEQ ID NO: 53991 - DNA, 1769 bp, Bovine  19866881267593
  misc_feature (1)..(1): n is a, c, g, or t
nagccagaagtaggggaaaaaccagccttactcacccaccccccctttaatttgaggtctcttcaaattcttttccctttggtgctgaggatgtttaaaatatgctgaaacaaagaacttttttcccccattacctcttttggagcttctttttctatgaagtcagtatatattttctttgcttttgaggacagcttttggggtgacttggtttttttgaagtcttcacaggccagccagaattcaatattttcttcacagaattcagattttaaaaaagccctgaatgcagcaagaccatctgggggagggaaggaagaaagcatgcagaaattgcactgagtgtccaaataatcccttatgtgttttcctagaactcccactctcctggccccatatttcattatttgccagatggaagcaattttcttgagtttactcaaacctgtaatcgtcaaaatttagctctttaaagactaagacgccagtcagcaaaatgtgtaagttggcacactactacaaaaatataaacacttagctttgctgttaacacaactgataggggagccctaagttctttgggaatgaagcctcttgaaaacattgtttgcaatggaaaagctgacttaaccttaacagacagcaactgccattacaatctggggctatttccccccactccccacctattgtgaaaaagccatgcatttccctggttaatcactgggaaataaaggagaaaaataggccccatggtacagggattgtaaagtcaaactctccttgggcaagctgctcttgctgtgtgaacacaaccataccatcctctcctgatacttgaaatggatcaaattcaagaggttaacttacatttactggctagcagctcatcaaatgcttctgaccacagctgggcttcctcaggagaaggcctgcaaaagaaggtctgcacatcagctcctgatagccagaggttccctcttcagctcagcagtgagctgcgcatattggcaagtacaagattttcaacttacttgatgaaggtttgctgtttgcttttcttgccagttttgggcttcccaggagaggaggaattttgcaagaagtagctcaaacggctcttccaatcttttaatctacagaagaaaaaaaaaagatactcacttagcggcaacacttgaaactgccattgcagctgaaggcatttttaccaaataaagtcgcccccaatagctacagacaagccaaataagacaaaacaacttctccagtcagtcttactcctttaatccagcacctaagtactcaacacaccagtttcatccactcatctgaacataattattagttttataagtaaggataagacggcctacaattatagggtattttaatgaatttagtttgcatagttcaaaggtagatgctatttatggcccacaaaaggcagccagtttttctgcaacggttaattacaattctgagacatttcacacttgaggaagcccacagtggacctgccctgagccagcccatgctcggtctcccttctactctcagagcaggaggctcgggaccacccgagaagctgtgcacaatgaggtgtgtgtgcgcgagattgaccgccccctctcccaactccagcactcattttaagaaggtgatgcagaacaattatttgttccacactcttgagtgggtgagacttgctgttcaattaaaaaaaattaaaagtatatttagaatcagcaaaaatatctccatcccag

SEQ ID NO: 53992 - DNA, 1610 bp, Bovine  19866881300893
  misc_feature (1)..(1): n is a, c, g, or t
ntatcatgaatttaaattaagatgcatctccatcacatattgctacaaaatcacacaggaccataaactacgggtactatgccagattacaatatataataattggctcttttctgtaacactgaaatactttagaaacatcacttcaggcatattttcataaaaatacaatttactaatatatttacctgcattcatttttcagtcctttattcattcaaatatctgaacttctatttattgcttcttaaaccatcaaatttacactcttgaaagatctaaatgattagacttcaaccagatttcaagcattctctatcaacagaaagctgatacatttaatttagttttggaatgtttaaaatagattatcaaataaacattaaaagcaagttttgtttcttttaaatttacattcataaccctcgaagctattggcctctttatggggtagaggaagagttattattatttatctaatatttcatttgaaaataaaagcttagttttctcatctcagcagaatggccaactataagaaaaaaagtgagtttctaaattagaacactcagctctattattttcacaacagagttcacaacagaactgttttactggtacagtgaagtcttggtcttcatcagagtaatgtgaaattaaaattcaagtgaatatattctaataaataaataactagattctatgtttctaaaacctgaaaacttaaaaaaaaaaaaacattgctcctatctcacaagatgattaaataatttcttatttctgaggaaaacgataacttgtaaaagtacatttcatatactagaaattatcaaaagatggtgcctatactattatacttttagaagtccgttcaaattcccacctacttgctcctcctagtggctgttactagaatagtagtactttcattcatacatgtgtctaatactttcaaccaatattttctaaatacttcatattatataagtgcatgttattctagttattcaattttatgaggacttccatgtaaatgtcattatttcccccaaataattaaatttcatatcaaagtatatttggtattaaccataaacttctcagtatcacaagctagataaacattttcacacacatatttatataaaatttctaataaacaaatgcttacaataaatttttaattgaccagttttccttaaataattttcacgataaaaagttgaaaaagttaaaattaaacatcagtccccatttcaaaaagtttttattctcttgtaatagaattcaagctatagctcagctatcctctacccccacaccttgatccagaaaaactaagaactgaaaaaacatgaacaaatttgtgctatgcactgagaaacttcgaagaccggttcttaatacgtggcatcatgaatctcctatattgacagcccataatttttgtcttctaaatgtagggctctaagtgtcaagcaagtctaagtgtcatgcaagtcctacaaatgtaataaattctccacatgcaaatttagaacacagcataactcaaaaatcttttaaaatgcattctgtgaaatttaaaattttaaactgaggatataaca

SEQ ID NO: 53993 - DNA, 2640 bp, Bovine  19866881336183
  misc_feature (1)..(1): n is a, c, g, or t
ntcacaggccacttttatcctaaattactctcagtctttcacttcggaatacaatcacagcttgtctactgtgagtgcattttaagctacaatattaaaaggactaagaaaaatatgcagtttatgtgatccacactgtagtttgagaaagaacagatacaaagctttggtttgaaaagcaggtggtacttagtagacctttgccctgtttacaatacaaaaacaggaaagtttacagtattaaatctccatttagcataaacctgtgtattctcatggagagtgatttcttccagaagtggccactgagcctggtaacctaaatgtcagaacttaaagtgctacctctttctaatttcttctacttctgttttcaaattccagaacttcacaaatcctataacattctacaaaagtgctaattagatgactaacatcttaggagcagctgagaacaacaatttcttaagtaattttgctcacatacagttatttctaggaaaaaagtcaatatccacctgctattgaaacggttaataaagtgtccctgaacattaaggcatatcttaacagagaatgtagagagagcccagaaacatcagtaaacataaaatcagtaaagtagcactgtccaacaaaaaagataatgtaatacaacataacatgctacatagataactttaaatcttacagccacagtaaaatatgtagaaagaggactttctctggtggtgcagtggcaaagaatctacctgccaatgcagggaacttgggttagatctgtggtctaggaggatcccacaagcccaggatctactactgagctcaggctctaggggctgagacccacaactactgagcccgtgtgccacaactacggaagccgatgtgcccaaagcctgtgctctgcaacaagagatgccaccgccaccacagtgagaagcccgcgcactgtaatgaagagtagcctacacttacaactagagaaagcaatatactcacaactagagaaacacaaagcaatgaagatctagtgcaatcaaaaccaaacaaattttaaatatgtagaaagaaattagtttaacactatagttatataaccctaaagattatcatttcacagaatataacatgtgattcatataataaagtatgaaaaagattttatatgtattttttctcattgtgtgttcaaatctggtgcatgtctttcacaccagccccatttcaaatgctcagtagccatatgtggctagtggctcccttattgcaaagcatgatagtctttgtctgttatgctgagtctgaggtgagagattataaaaccagaataaattgacactctgccttttttttccaatccccacgatatatttcatagccagcaattctcaacattctttgccatcttgctgcttttgtcaacagtcaggaaacttgccttctatgtgctgtcaaggcagtcaaggcagtcaagatagattgcctgagatcaaatcccacgtccatctcttcctggatgtgtgaccaaacagggacatgtcatgaaacctcctcacctcactgcctctcagctatgaggcagcacagtttttctggtcttctacaggtttttctgctcttttaatcttttttcaaaataaatggatagatacatgtaaaatgcttctattaatagaattgctagcaaatgatgtttattagttacactatttatttgttagctatgaacacaaccttgtgtaattgcctagacatgatggagatcagtaaatattgttgactgggagagcagtagaaaaccctgacttgaaagagccagtttctcaagggaagtgactcctttgcgaattaggatgttactttcacacattcaacaatactcagtcaggtagcctctaagcctcgagcaagacatacggtctccactatcatgggaatttctgttgcagtggatttccccctacgatctttttacatctctcacaggatgattttgtctgcaagtagtcaaaaaccccctatccagctcgcttgcaaaatacagaaatgcaaagacaggattgagcccagccactgtgccatctgggctcctgctgcgactggcactatctctctagctctcttctatatttcagacttgtcaacagactggcttccaccatggtcacaaaatgttgccactagtagagacaaaagactgctcctccgactatgggaggtttcttaagtctccttggatcaacctgtggcagtccaaagaagtcatgcacggattggcttatgattgggatttttaaggatcgctggcaaaggtgtggagtcatcaccaggatccagtgctatccagtctaggagagggatcgtgcctggggttgaggtaaaacactgaagaaaagtagggttttgttagtaaggaggaactgaacctgtgtaggcaatcaacaatgtctacacacaccgctaaaaaggaacttatacgtgtgtgattcttctaaagttgctgcagaggcagcctgtgactcaaaacagacttgaggagaggaccacaaaatggtcctcagtaacatgaaattgagaacacacattattttcaccccaactgcatggactgttgtctttatcagttcaaacacggct

SEQ ID NO: 53994 - DNA, 2305 bp, Bovine  19866881481660
  misc_feature (1)..(1): n is a, c, g, or t
nttgatctacagaaatgccagaggacactcccttagcaagtggccctgggctaatgagaccaagaaaagcagaagcaatgacctaaaaagtcagtatcattaagaaaggaagccatcagttagttccattcatttggttaattcaagcaccattaagtaatgttcttatgagatgcaaaaacagaatccattaaacatatttaggcttgttgttttgctgaagggggataatgaagtactaacttataaagtatataaacatatgccttgaatgtagtacattttagaaaaataagctgtccaaatttaaagatcctcatggtaaaagccatgttaagtctacaagaaataagaggcaggaatagactaattttacagtaaaacttaaaaaaaatgaaatttgttttgagttcaatgcaattgcaagtatattccttcttataactcctccccccacacataaattgttatttaatgtgtacttcctatgctttttaaacttcttttaattgctcaggaagaacagaattgaattttatttaccaacctgaaagttcataataaaatgagcaggtgagtaaataaacttgtcttcttaagctaaatgattcttaactgtgttcaattcgcctaaagagaagattgtcatgttcatgttgctaggacacctaattatcaacagctcttagtttcaggggacttagactctgtcatcagagctcatgcccagtgtgccaggctgaatgatggcccccaaagaggttcatgtccctgtagcctgaaacctgtgggtgtgttaccctacatggcaaacggaggttgatgtttccaggttagtgagatgggcccagtgtaatataagggtccttacaagagagggccaggagggttcagaccaatcgtaaaatacatgaggacagaagccagaggctggtgtggtgtatggatgggccaaggaatgcaggtggcctctagaagctgaaaaaggcagaaaaagaggttttcctctcagagcctgcagaagcaaccagcactgtccagtaaagctgatttggggtttctgacctcctggtctctaagataacaaataacaaatttgtattgttctgagcttctcaatttgtgaccatttgttacagaagcagtagcaaagtaatgcatccatggaactctaatctttaaaaaaatgctgcttaaaagaagacaggaatgaaataaaatgggcatgaattttgagaccagagtactgagttcacataaaatgtggatccttcctaccgagcattaaccttgacatctctgaggctctttgctactgaagtggagatagggtctctttcacgggttattgtgtgaaaccaaatgaaaatatgctaagccaagacaccttacatatagtacttgtatgtttgttttttattcttttcccttatttggcgttcacagagcagtgaatgtcgaataatggtggttaagatgtagtatggggcttatatgggcaatactaccatcatgcagtcaatggaggtttctgtgtaaggagttgagatttattctatgaatttttgaatgtttactctgtataatgagttatgataggtgtactaaatgacgtgcatgagaggaatataaaactttaatcaggcaatctgagattgatgattctggaaaattagcatgatgaacttgtatgtggaatgaattgaaagaatgtgataataaagtggtccacatatgagatgccaggggtttggataaggacaattatagaagagtagaagagtagccatcagtattctggtggctgtgtagaagggatggaagagagaaggtcagaggaccagatttcaaacctgatagcctgaaagaatggtattccctagtaaccatggtaatagcaaaagaaaagccagtttagggaaatcaataggtaaaagaaagtttagggatacacagtacgttggcagagttttgattaaatttcctgtcagtgggagatcacagcatttttgacagcataccccaagacaacacagagcttttacatctatatgaagcctctctgttaatttaaaaaagctatttctgtctacccttcagtacctttaagtaggagaaaagtcattttaaaagaattgaattctcttacaaaatttaatctattaaactaatagatccatgttttgtgaaagcataacattttattttggtgcaacttctagacaaagtttatatctataaaaaaaatatgctgaatggattgtatgacatccaagtgaggatgtcatgaagtattggtgtgtgt

SEQ ID NO: 53995 - DNA, 1972 bp, Bovine  19866880703708
  misc_feature (1)..(1): n is a, c, g, or t
nttttccttagggggaaaatgaatggtgaaaaagaacatatagcaacagattaaacagctgtcagtatcaccaccaactcagcaggctatgttctgtttgcagcccccagaatagtttaacaaggtcactgaaagtaactttttcaaaatatgtctcattaggagctacccctggaaaagtcaaataattctcctatttaggtttccaacagtagattccactttggcaagaacaactgcaccataatttccaagtctggagcaggaatatactgaaataacagatgctactacgggggcccactattatatacaaaatatacaaaagcatgaaggttatatgtgctgaaagagatctgagtcattgctcagcccaaagcctttgtttactagatgaggaaactgaagttccaacagggtaagagaattgctcagattcacttccatagtatcccaatgataccatgatagaaaaacgtatcccaatgtttgttctcttgatgaagttataagggtatgaagactggggacattgttgttgttcagtggctaagtcgtgtttgactctgtgaccctatgggatgtagcatgccaggctactatgtcctctgttatatcctggaattttctcagatgcatgaccactgacttggtgatgctatctaaccatctcaccctcatggatacatatataatgacattatatgtatataaaacaaatagctaatatagtcactgacatataacatattagacactcaacaaatgcatcccttcctctttctcactctttttttttttttttgggattctcccttcttatccaaggtggcacttcagttactctctactgtagaaagatagactaaaatcacttaacaccatttcagactctatgatatctatttctttgggaagatacaagttcactggagtgtcctgaaaccataaatagttagatatccaatgaagatacatccaaaatataaaataaatcccacaaaattgacaaagcagtataggtcatatacaattacacagcccaatttataaatggtatgctaaaaaccatgtttaaaatggctttcttttataattcttgcataaacacaaaaagtggcatattattcatttattttccaagatcatgctggtaatttgttttaactactaaattgaattgatgagtgtttctgatgcttgaacaggttgctagcatgcaaacgtaggtaatgagataaattgtatgtcatggcttattatatgtctgtacctgatatctactttattctctctgatacttttcaaagtcctcacagctaatgcgtctcttcaagtccctgtacaaataaattattaccatagaataacatatttaatttcctatgcgcttaagaaaattattttaaaggctatttcaacaaaataaaattacccatctaggtaatattttaacttattttaaaaattttagaattaattagcactttaactatttaatgttattttaaaatttgggcttattaaagaggtaatcccagaccctgatgctgggaaagactgaaggcaaaaggtgaagagggcagaagagaatgagatggtcagaacacatcaccaactcaatgaacatgaatttgagtaaactccgggagatagtggaggtcaggaaggcctggtatgctgcagtccatggagtcacaaatgttgtccaattaacatgctgataaagtcgtccaattaacaacatagacgttaattgtgactagtaataaaacatgtttcttaagctagaaatctcctctattttcctttctctgtgtttattttctctgtcaatagtgccccatatatctgaagtgaattctgggagaaagctgttatctagaattttctatattaggaatggtcaatcatgtaaaatgctacatagaactctgtgacacaatgaaggtcatagcaacaggtctaaaag

SEQ ID NO: 53996 - DNA, 1111 bp, Bovine  19866881074713
  misc_feature (1)..(1): n is a, c, g, or t
ntacctctaacatctgcttattctaattttctctttctataataatagtcagaacttttcctgaaataggagtttttcttttatcttttctgctaaaagtttcttgaaattgaactttcagaaaaattttttctgaatgtttaaatgtgtattattttaaaataaatataaacaacaatgcagataacattttggtaccatttttacataacaacgtatcttttgttagtgtaaagtgatcaggtatttgtaaaaacccaaaggaaaaaaccatccaataggtctgaagtaggaaacagaatattaatcagaaggcttaaatcagggataaatcatatcattaaatgatatatacacctgtgattagcaaaaggctgctactgaggtggctctttcttatttccaccccataaatctaatcttccggggatgagaagcaacccaggatggtctatcagtcatggtctaatccagtcattagacatagtgtcctgggagactatgttcagttcctatttatgatcttaatatttttcacacaattaattcctcccacctccattttgtaggcagaaaacaaacaacattggtaaattgttactgctcgtaaataattcacactaagatcggtttgtagcttttacagaaaaataaatatctttattagaacaaagggaatagaaaatgcttgcttgtttaaaattctgaacatggactaatttctatctcagtgcaggtgtcctacatgcagtggttcagttttggtcctgacaggggtcagtccatctagtggcacagcatgaaggaactataaaaggtttattttatatttattctgagtaattttaaaactattgcaaaggttggaaggtaacaacacaattctgaaaaataaaaatttctcataataccatatatactttaaaaatttttttgcatgttttacttgtatggatttacttgcatagtttcatggtttaaatagtaagttaagttgcagtttagtaggcagatattaaatgacattttaatgtttcccctgctgtttcaagaaactattttcttgtatttgctacacatagaaacattaatatagtaacagcgactaaaa

SEQ ID NO: 53997 - DNA, 1857 bp, Bovine  19866880196731
  misc_feature (1)..(1): n is a, c, g, or t
nctcaaactcatgtccatcaagtcggtgatgccatccaaccatctcatcctctgtcatccccttctcctcctgccttcaatctttcccagcatcagggtcttttcaaatgagtcagttctttgcatcaggtggccaaagtattggagtttcagcttcagcatcactccttccaatgaatattcaggactgattttctttgggattgactggtttaatctccttgcagtccaagggactctaaagagtcttctccaacaccacagttaaaaagcatcatttcttcagtgctcagctttcttagatgacattaaaggaagtaaaatgcagaactgatccataaagaatcaaaccaaggatgtgagtgaggggtgctgtgctatttgtctgtgtgcccccagatccagtccctgctgtctctgttctactctgcatcctgacagggtgtgggcattgtggctagccccttcaagctaacacatagccctaagccatagctggtttctggctgggttcagccaggggagacaccgtgggaaattggaggtggagggagaaataaagccaaggtgtttcttgtccccttcctccatcctgagtagcttctacagcaacacgttcctctccatgactccagtatccccagacagctccttctcaaagtcacagcctctgccaggcagcccctgcctggcttggttccagcccccctagaatctctcataacaagaaacacaggcttctcgattggttatttctgagtgtcagtgacatcatcaaagaaccatatgccttccaagctcagtaagtcaaccttgccctcaaaatggtccttttcttggtctctaaatggcttccaacaactgttccaaccagcttcctgttcagattcagctgcttttctctagaaaccctgaggaagtccttctctgtgttttattgactccagttggcttaaacttgcccttccccaaaccattaaatggtaacaagaatagaatgatcatgattgaattaatctaattgtctggagtgttgggaagtcaaccacaatgttcactacaaaggactgatgttaaaagatcttcttaagtgcaaaaaaaaaaaaaaaactcaagaaactaaaagacaaagtgatagtcataaagggcagagagccaactcacagataagtgacgttattgaagaacctacagcaaatggatcagaaataatcatcaaagacataatagaagaaaacgtacctgcactgaaaagtcttcaagtgtaggacttgaatggatgttctctgcaaatcagtgatgggagacacatacctgtatacagtctagcaaaagcattctaaaaaggcacagaaagacctagcaaggcatccaagtagaaaacaggatcctaaaggagtaagaatcagactgcactctgaggtctctgcagtattatcataggacaactaaatatctacagattttttttttggaccgtaccatgtggcttgctggatccaagttctccaaccagggactgaacccagtccctggcagtgaaagcaccagaacctaactactgcaccaccagagaactccccatctacagatttttttattttttaattgaaggataattgctttacaatgttgttgttggtttctgtcatacaacaactcaaatcagtcatcagttcagtcactcagtagtgtccgaatctttgtgaccccatgaatcagagcacgccaggcctccctgtccatcaccaactcccggagttcactcagactcacatccatcgagtcggtgatgccatccagccatctcgtcctctgtcatccccttctcctcctgcccacaatccgtccttccag

SEQ ID NO: 53998 - DNA, 733 bp, Bovine  19866880440864
  misc_feature (1)..(1): n is a, c, g, or t
ntggactgttgtgttgatagaggctttgatcttttctggcagttggttccctaagtctggggtttttcatgctgtgctgcttttctcgggagcgtcgcgtgggccccggcgctcctgtgtgcacagagctgccgggattaactcccacactgccaactcgagcattaagcacactgttagtagatgtgctctgtttagatcctcttgttcagagcctctcttttgctcatagaattaattttatcaatgccaccgaaaatggttctctgactacgttgctgcagcgtggcatcagagccgtgttttgccccaggattcctcctaatgactttagccagcttgaattagcttgatgtatcattaatgcatacaaatggcttttatttttgttcataatctgttcataatgccatggcattctgctctttcgaatgtttttgagatgattaaacggtggtgtactttttgacctatttaaccctccagcagagtctctgatcaaaaggacatgaagatatgctttccctagggtcgtcagaagttgttaccatctctggctgatgtttccaagttctttgaagtcttctgttttttataacatttttttcacttacagagcatggactctagccaggtatttttaaatggaagtatcgttggtttacaatgttgtgttcatctctggtgtacagcaaagcgatttagttacatcatatagattcttttctgttat

SEQ ID NO: 53999 - DNA, 704 bp, Bovine  19866880468883
  misc_feature (1)..(1): n is a, c, g, or t
nacagaggcgctgacatcacacgctggttttcctttttcctcctcccctgagcattgattgaaacccagctaagccacgctggctttaggaaccgaatccggagtgtttggaggtatgcgggttcagatctccacggcggggcggccggtcctgtgcgtgcccgcggccccatgcaggtgcgattgaacccaaaggccctttcatgaccggggacttggcggaggggcctcggtctcatgaaagctaaactcttcatccccaccactcttctgtgtttcagagcaagaagaaaactttgagtttatcattgtgtccctcactggccagacgtggcactttgaagccaccacatacgaggagcgagatgcgtgggtccaggccattgagagccaaatcctcgccagcttgcagtcgtgcgagagcagcaagaacaaggtaagacccggagcagcctgccccaggcccccaccccagcccacccccagaaaccaggagccactgatcctgaaagggaaacggccgggggcaggggacggggtgcatcctgtgaggccatgagatgggtacaaaaccttcactttttccatgcagaaagggaagtgatcaagaagataatgaaacattgtgtcgatgcatgtcctgtatcatatattagtatcttagctcagcatggcagagtatcctgttttaaatctttttctct

SEQ ID NO: 54000 - DNA, 1478 bp, Bovine  19866880482348
  misc_feature (1)..(1): n is a, c, g, or t
ntgaaacattactttgccacaaaggtctgtctagtcaggctatggtttttccagtggtcatgtatggatgtgagagttggactgtgaagaaagctgagcgccgaagaattgatccttttgaactgtggtgttggagaagacttgagagtcccttggacttcggagagatcagatcagtccatcctgaaggaaatcagtcctgaatattcattggaaggactgacgttgaagctgaaactccaatcctttggccacctgatgcgaagagctgactcactggaaaagaccctgatgctgggagggattgggggcacgaggagaaggggacaacaatggttggatggcatcaccgactcaatggacatgggtttgggtagactccgggagttggcgtgctgcggttcatggggttgcaaagagttggacacgactgagcgactgacctgaactgatgcatgtgaatggactgactcctcccgaaatcactgttctttgtccttttggaggttatttcctagaagacaagtcagctttgttattgtttgaatttggcctgctgggggtcacgtgactgggtggccaggtggcatgctgagcccccgaggatggcatccccttctattgcaaaatttgtaagacactttgtggtgatgtaggctccccatgctatggggaaatctcaacagaacttaacactagcatatcctgcgatcgtgtggctctgtctttactgacatggaagacttgggaggggggcaggagagaagccatccttctctctgtagaaagaaacatctggaaggtgctcaacttgctaacagcggtgatgttcgggtggtggcatttggggttgagtgttaaccttctttatgcttttctgatttgggcggtaaagataggatgtattgtgcatgagaaaaaatttttttaaatttattttttggatgctagagacaaacatctttattaaagatagcaccaaaattttggcatttaatattaataatagcatcatgctggaatgggtttgtttcctagccactttggacgccttatcacacatctagctcagcgcagtccagtgcaaagataacatccaaacgtatgctgcttcagagcttccgggccctgccgattcctggctggaggaaccacggcctcttggagtttctcgtaaataaaaaaagtcagaagagctgctccttgttttttatctcttgccatgactacagcccctgggccagtttcctcatgcaagaggctgtctgaccctaagagaatccctttggtaagtgagtccaattaatcatgacaaataaaccctccccctccggcccttccccacccccaaaacccaaggaaaacctccaaagaagcgaggtagacatatttccatttctttattagaaagaggcctctacgctatagccacctctctccattactttacacatttttcttttttcttttttttttcc

SEQ ID NO: 54001 - DNA, 3196 bp, Bovine  19866880483970
  misc_feature (1)..(1): n is a, c, g, or t
naggtacagtgaaggaacctgctagcaactgagagcgtgtcagggacccgcagcttccagcttgctgacggcagcacggctccacgtggctcccaccttcctcgggccacctctggagacagcccggagccctgggcaccttggtgggtgtaccagatccctcctgattggagcattaatgaatgtgctgtggtaacggttctgtcctaaaatctcacagttacgacttaccaagactggaaggtcatcactgaagaagcaccgagttccagccaggagactggcatcaagtccctatcaaaatactgcacgaggctcctaaaaaacccatccaggagctctccccagacagccaagggaacactgtgtgggtgttgttgtggccatcccagagccctctgtgtgcctgacgccctacagttctcagtaaatggtgagttcatcttagtcagcttgggggcatttggcccttgaagttaagctcaaaatacagcaatccatcaatagtccctaaaaatactcttactatattgattctcactgcttcccatccctttgttacgtttggctgtctggtgaaagatggtttgcttcatgtattcatagggtaccagaaagcagtttaacaagatcttagagcgaaacccaaatgcatccatgatgtgattggcatctcagagttagatcatcagaataaagcacacggctctgaaatgcaatcagcaccactccgatttcacatgtactttttaaaggattaacactattcgtttctgtaattacatgatggaaagaattatagggatctgtattccaattaggttttctcaataagttctggttcctaactgtacataaaatgctgagaaatttacacttttctattactctctaatattttgtctaagtgagataactgttaggacagactaatgctttgctttggtctttgtgtcatggctaatctaatcaagcattttctctttgcataatctaaattcagcaatcctcaaagtgtggtcttcaacatcctatcaggggattcacaggttcaacactattttcaaaacaaccccaagacatcgcttgctttttccctgtgttgaaatttgctttgatggtacagaagcggtgtgagtgataaaccctgatggtgtctcagcgtggagcgagaccgtggtaaccaggttgtgccgcacattgtctttattttactgattcctacgctctcaaaatgcaaacaaaaaacagcttcactccaggatgttcttaataaaccaaaacctaccaattaaaaacaatggtaacctctgagcctttaaatttctcgggtgatgccagggcaagtatacttcagggtttctgctgcactttgaaagcaggaaagctcttcctgaagtgtttcattcacaagctgaatttgtcacttgtttgcgggggcaacacttctacttgaaagaaggactatgtcagacactaactgtggtgattcagtcttgggtgcttggcagatattttcttgaaaatgaacaaagtaagtactgcaaggaaagcagctgacagtgtttgtggccagtggtagaatttgagctttctagtgatgatgtgaggagaaggcaatggcaccccactccagtactcttgcctggaaaatcccatggatgagggagcctggtgggctgcagtccatggggtcgctaggagtcggacacgactgagcaacttcactttcactttcatgcattggagaaggaaatggcaacccactccagtgttcttgcctggagaatcccagggacgggggagcctgttgggctgccatctatggggtcgcacagagtcggacccgactgaattgacttagcagcagcagtagcagtgatgatgtgaagtttgaaaacttgtaactctcaccatgagattgataacttctaaatacccagagacttttttctgacaagactggtggtgatattaatgaatgtgatttgaggggtattaaaagaccctgatttagaaaaggcagagggactagggaccaaattgccaacattcattggatcatcgaaaaagcaagagagctccagaaaaacatttacttttgattcgttggctacattaaagcctctgactgtgtgaatcacaagaaactgtgaaaaattattaaagagatggaaataccagaccacctgaccttcctcctgagaaacctgtatgcaggtcaagaagcaacagttagaacaggacatgaaacaacagactggttcaaaattgggaaaggagtacgtcaaggctgcatattgtcacctgcttatttgacttatatgcagattacatcatgagaggtgccagggtggatgtatcacaagctggaatcaagattgcctggaagaaagatcaagaatctcagatatgcagatgacaccaccctcatggcagaaagtgaagaggaactaaagagccctttaagaaagtgaaagagagtgaaaaagctggcttaaaactcaatactcaaaaaactaagttcatggcatccagtcccatcacttcaaggcaagtagatggggagaaatggaaacagtggtcgatttaaaagatgcttgctccttggaagaaaagctggaacaaacctagacagtgtattaaaaggcagagacatcactttgctgacaaaagtctgcatagtcaaagctatagtttttccagtagtcatgtacagatgggagagttggcccataaagaaggcagagcaccaaagaattgatgctttcaaattgtggtgctggagaggactcttgagagtcccgtggacagcaaagagttcaaactagtcaaggctaaaggaaatcacccctgaatattcattggaaggactgatactgaagctgaaggtccaatgctttggccacgtgatgcaaagagctgacttattggaaaagaccctgatgctgcgaaagactgaaggcaaaaggagaaaggggatgacaggatgagatggttagatagcatcattgactcagtggtcatgaatttgagcaaactctgagagatagtgaaagccaggggagcctggcatgctgcagttcatggggttcacaaagagtcagacatgactgagtgactgaacaacaagttttagaatcacagagcgtgaggctcccgtgttaaggagtctcagaaacatgtctccatttta

SEQ ID NO: 54002 - DNA, 3419 bp, Bovine  19866880569589
  misc_feature (1)..(1): n is a, c, g, or t
nggtgattgtgagtcctcgggcaacacacctcagaaggaacaagagccgtctgcattaagacgtacacgtgggggatttagaatgtgtggtgagtggtcagaacttggggcaacacttgaaatgccacacgcattgggaatggatacaggaaagaatttcagttctcccaaggaggaaggtgaagatgaagggatgatgagcgagaagacgggcaaggacccagcaaggggcgggctctgaagatgcccccagaccaggagacacagggccaaagatcaggctgaaaggcgtttcagggaaagcagaggctcaattgtccatcccaaggacagccctggttgaaagaactccgagtactttgcagcaggacgataatttgcagcagtaagataagtagccgttctttctgcttgtcaacataaatatccagggaccatgttttgctcagtgatatccccatgctcgtgtgtgagctcattactcttgcaaaatagagcagaaaaaaataattattatttatttctgcagatccatgtcagcatcccagtaaaagcatagggaaaagaggaaccagctgggaaaatggtgagaatgacgtgttctggacaacccttcaggtgtacatggggccccttacagagggcagagggcaaaggaacttcagaattcagcctcggcagataacagggccaagtgccgaacatacctgccctgcctggccatggggcagaagaggggtcctcagtcaggttttcccttaaagatgcaactcacctgtgcccttgggaagccacctgctgtcctgcaaagatgtccctgggatgccccgtagggtgctgggaagtgcatggaggtctctggtgggcattcaaccccagtcagacccagattggcctgctatgaggaaccaaggaggctgtcctggagctgggctctgtgtgtgtgtgtgtgtgtgtgatgaggggaacaagcctgagctccagttcatccacaatctgctccctcatctttcccacctaccccctcccaataaaaacatctccaccaggacaaaacccaggctcacctagacctccccttcttctagatcctgtagaagtccacttctccagaaagcccaccctgcccacccaacacacagacccacctcccccggccacaagagcgcaaagccctcagtctccatctgttactgaaacaaaaccttgcagagctcatctttatacccactgagtgtttcattctcaaatatgacctccttaagatcaagacctttgcctggtatccagagcctggcagaaggccttagccctgtgtgtgtgctcagtcattcaggcgtgtccaactctttgagaccccgtggactgtagcccgccaggcgcctctgtccatgggattctccgggcaagaatactggagtgggttgccatttccttctccaggggatcttcctgacccaaggatcgaacttgcgtctcctacatcttctgcactggcaggcggattctttaccactaagctatctgggaaacctatgaaagtgaaagtgaagtcgctcagtcgtgtccgactctttgcaaccccatggactgtagcccaccaggctcctccatccatgggattctccaggcaagaatactggagtgggttgccatttccttctccaggggatcttcccgacccaggggtcaaacccaggtctcccacattgcaggcagatgctttaacctctgagccaccaggaagcctatagaaaggctcaaactctgggtgggctgcctgcatgggcaggccaaactcctttgctaacatttacccaggtggacacagtctgtgttttcacagacatgattggagtgagtctttcagcaaagaaatatttgattctactttctgctaaagccaagtctgtgctgttcagtattagcaacagcggaattattcgacctcacctctttggaacacctatcagctcactgacttgagggaacacagcaagggagaaaggatggcgggggaggggtggagagaccctgcttgccccccaaatgcatcaactgtacaatttggtaactggcgtaatcaaactacttaagaaacaactgattactaattgctattattaaggatgtcagcattccatgattttgctgctgatatattatatacaagtcaagatgctacttgaattcttgattgaaatagaaaaactagaggcattatgttgtgtttggggtaatggtatttaagcatctggaggcaagttaaagaaatactaattgggtttttattaagagagctcgtgccgccggcacatataggtgcagaatgagtgcggtgaatgtgggatggacaagggccagtggagtctgccgtggaattcgactgctcactccgtcagcgcgatgtttagcatgccttgcggtcagggctacacccacctccttctgcatggaggggaaggtcccccacagaaagctcaacagttgaatgtaagttaaataagcacaactcccgccttggaggactcacatttgaacgaatggcaagtgcgtgggcattgacagtgtaatagacacgacaagagactagcaacgacatgacctgggttcaagcctggtgctcccactatatgtgtggtccttaacctgtatggtctgttcttctatctgaatcctaatttcctcatttgaaactattggactgttgagaattcccatgcagtccagtggttaggactcagcgatttcactgctgaggcccaggattcaatttctggtcaaggaattaatcccacaaaccgcacagtatagccaaaaagaaaaagaaaaaaaaaatgggattagcggggtcatctctcagggtgcttccaaatgggacgaactggagctccaagaccaacatgtagtgtttttggagatggatgaaaaccctgttgccttcatgggtgtgtagaacaggccccactttcattggaaccgtcagctccaggtcagatgggcagggaaggtgtctcctggtgagaagtgagtttatcagcttgactcaccaaagagcagcagccttgcccagagatggccttgttctgattgttaggagaacaagtctgcagaccagagcctgtctgtgctataacgagccccaagtggagacaatgacagaggaatcacgtgcagtgaggactctagttggtctgtgttttccaaggactcccacttccccagcagagaaaaacgaggctcagagaggttgagttccacatctcaggtcccacagctgcaggagggggaaacccagagctcttcccgctaccccgtcatgcctataattgccctatggctgcatttacagaccaggacaccagggttctcgtgtatccccttactgggcaacagtcaattaggagcagcacacaaac

SEQ ID NO: 54003 - DNA, 1797 bp, Bovine  19866880636377
  misc_feature (1)..(1): n is a, c, g, or t
ncttcaaaatcccccagaaattctgatcgcaaattagggtgcggggtttcgttctgaggcaatgaaaatgttctaggcctgtgcgatggttgcccctatccgtgaatatactaaaagtactgaactgtcagtgataaacgggtgaattatatgtgctctgagtgttaatctcaataaagctattttcaagcaaaaggaaaaaaaaaaggcagcgatgggtggggagctgggggtcattgtattaaatgggcttccatggtggctcagtggtaaagaacctgcctgccagtgtaggagacatgggttcaatccctgggtcgggaagatcccctggcaaaggaaatgacaacctgctccagtactcttgcctgggaaatcccacggacagaggagcctggcaggctacagtctgtggggtcacaaaagggtcggatacgactgagtgactgaacaaaaaactgtattcagagatcaaagccacggaatgagggagacaaaagaaggtggtgcggcaggctagaaagactgcaggctcggggtcagagcaggtggtccaaggggcctggggacattcaggaacctaagctaagccagtcacaagcctcaggccacaccatcgagtgcagggatttacgtggttgcctgggtctccagccaccagccgggacctggttctacgtctcacacagagggtggaccctgtgacaatcactcctctgagggagccgccccacgtccccctcgtcctacggaggacagcacacgcctgtggggggagccttgctcttctcgagcttcctcatgtcctccccctctctgagccacacccctcccctccgacctcctgggagatgccgctgccccgcactcttcaccaccttgtcacctgtcccttcctgcccacgacagcaggctctgtaaggcgtctcctggggtccctttagtttttccttctgccggatgctcatcatgtcctgataccatcgcccaatctgggggaacgcaggccaggattttatatgtaagggtcaaatattaaattgttctctagttgatttttagctgaatcaagctgcacaagtttaaattaatccagtgtgctcccaaaaaatgcaaaaaggtgctatgagcagtaccgttaggtggaaatgaaatcatttcaagagactcccgcctcttggcagcctcatctctttttacataatcagccacaacccatttctcaagttgggctctgacgattgttaaatgacaaagagattctcttacacacgggaggctccactggcctagcaggctggggaagaggctgagccgtctagaagaaaactcagctaaatagagaagttaattggatgcatgatccttctttgataacaaaaatgtcccatctttagaaacttaactgtttctatgaagtcacttggaatcaaatttccagctcctacacaagaaatggttctgacggaggcgggaaggcaggctaaagttccacccatccctggaggggctctgtccagggtcctgaatgtgttcagttggttcattctgagcaagacacagaaatacacgaagacaaggctgcttcttcacggctcatccctgctcttcatctactgacatcatgtggtttgaaaaagtagagcaatggtgctcccagctttaagaaaacctaatacacagacgcccagactaaaacaggaggtaatttggttgccatagatccttccgttgctctagggtcacactgtgaaaaaggtaaataaagagtagagtgtgcttaagcatgcttaacta

SEQ ID NO: 54004 - DNA, 1112 bp, Bovine  19866880705770
  misc_feature (1)..(1): n is a, c, g, or t
ncagtacacttggtggtattaccttgctctgaggcaaaatgtatttagaggtgcgtcccacctgtgctgacggccggagccaatgccatgagccccgtgcactgcctgcgagtgtccctgcatgtctcctcagcaagcctgcaggcctgccagcatcgcctgccagtgccagccgtggtgcctgttggtgtggcagccgaagtccctgtcccttctcctcccggctgtcaggttgttccagcagctccaccccatccccgattgcttcactccaacagttaatcttctgccgccctggccggcccgatatccccggcagtatcgcattgcttccactgccgcttgaacatttcacttcagcctgcctgcaccaggccactgtccgacctcatcagccccaagtacaaaagccatacccgtcttgcacacttccacgtggaaggtgtgtgtgtgtgcgcccactccccccacactgtgtaaccacacatcttcccacccgaatctgtggttatagggcaaccagtcctgaatctgaagcaaaaatttacgtatttgcaaactttcaaaaaaaaattttttttcatcatggacatttttttacaggactttaggctccccaggtggcacagttgttaaagaacctgcctgctgatgcaggagacactagagatgtggatttgatgcctgagttgggaagatcccctgggggaggaaatggcaacccactccagtattcttgcctggagaatcccacggacagaggagcctggcgggctacagtccgtgggatctcaaagagtcaagacacgactaagcatgcacacaccattagaaacacacgtttccactccggtccgtgtgccctgcacttcctttggtttctccctccccatagagccagctccaggagggacaggcagccctgaatttgagattacagagagtatgccataaatgtgggttctgggcatgttttccgtcaattcgttgattttagtttccacagctcgagcactttttctctctccttggcttctgtgctagcaattttagcatgtgaccagcaggtggcggtagtgaatggcagtaccgctctcatctgggagtttaat

SEQ ID NO: 54005 - DNA, 2588 bp, Bovine  19866880712848
  misc_feature (1)..(1): n is a, c, g, or t
nccgcgtcttccgctgggtggcgtggcactcattcttgccatgacacctgcacttctcctgcccgtttacatgtgagtgatgaacacttggctactatgcattctgaagatgctgacgagagcaaccatcacccgtgcgtatttacacgatgcttacttagccacaagccatttctcggtacaggttatatgaataagtttatatgcggtagttataatgaggtatgacaacattacacaaaaggaggttaacactaaggattttaagtaataaaacatgaatttaacacttacgcagtcagttcagttgctaagtcgtgtctgactctttgtgaccgaccccatggactgcagccaggcctccctgtccatcaccaactcccagagcttgctcaaactcatggccattgagtcggtgatgccatccaactgtctcatcctctgcctttctcctcctgccttcaatctttcccagcatcagggtcttttccaatgactcagttcaataatgttttataaaacacaaagtccaagatgctcatctcttgtcttctagtgccttgtttggctctgtgccctcaagaacttatttcaatcgctcagttccttctttaacgtatcccttctcctccatctgatatacgcaataggcatttttgcacaaaaccccctgtagctgagcggcgcactgctttgagggcaggtgtctctggctctcactgcatctcctaagccctttcaaggaggcggccgtgatgcccacaccaaggccccacgcccaggcctgtccacctggacttcctcctctcctctccaggcctcacagaatcatctcttaggactgaatagaggccgtctgtgaggagtgagggcgctgagcaactccgtgtttgcaactgtgaggatgtgaagggggctacttgtttgtgagtcaggacatttggggggctgactcctcactaggaacattccagagagaggcaaggtctctgcaggcgtggttacttgaaatgccaggccacaaggtttggagctggtgaagcatcaagatgacttggttctcctctgccaatgcgggaatgattacgtagcaagtaggccaaccatggacttgactcgcacagaagggctgtaacctgaggctccgaccagccttcctgaagaccgtgggtcacgtactgacgtctgtctcagagctccgcctctccagcccttttcctacagctcctccatgccgactattttgctgatcatgaaagcatcgtatcaacagctgaaatcctattctccactggacacacacatttttgagaggggagaaagtctctacagcaacttgtatttacttattggaatatctgttcccacagagatatacaacttagtattgccaacacccctcgtatgtttataatgaaaactatcaagggttaacttacttttgtcagttcttacagaaaggaacactgcatttggagtttaaacgactgaagatggtttccttaaactggaaggcgtggctttgatttctatgtgacctgtaccccaaaggtctcaaccacagaatactgcagtggaggaaccaccatctgaaagccaacatagttaccctcgatatttatcacttttacatctcacgtgacaggcgatattcaagaatatttacttcatgcaaaaataattgccgggtcatgacgttaggagaggatcacaaaagaagagaagtagtggtctccagctcaaagagtttacaatttaatgctggaaacgatatagccacgtttgactaagcctcaggggaagaacgtgcaaacagagcaacagccagcagtaagaaggcatttctcctaacagcagaaaacaccgaactaaataatggcttgcgtcatttcacttcagatgtcaccaactttctcaaattctagtcttagagaaaccccacgagacatgtttaacctcaaaataatgaattactacttagccatcaaaacctagcttgctgaaacctggtttatggaagcagacctcaccatgtgatgctgatttgggggagtattctcaagcaaattaattctcaaccaagaaagcgagagtctgcaagcgttctgccaagttataggagtttaggcgaggcggccaatttatgtaccggtgggttcgtgctgtaaatagaacccagggtgtgggcaataatcggtggccaaggcagggacggggtgagaagccaggctctgaagccctaacaagcctgagacgtgacccaccgggaggggatcgctcatctggctcacggaacaggctctggagttattaccatgtcttctagaccatctgaaactaaacaaagaaaaacttttgtttctatgagacaaccatggatccagttttgatgttgcgtgattttttttttttttaatagctattaccactgtagcagcagcttagcgactcggcgtctgcagtgtgagcagttttgataaacagcctctgcgggccacacaacggggataatgtatccttaagtaccgccaatgagctgccattctgcacagccaattacttactgtgcgtctgtcactcaaaggaaa

SEQ ID NO: 54006 - DNA, 736 bp, Bovine  19866880717359
  misc_feature (1)..(1): n is a, c, g, or t
ntacttgggatttgacttactggtgaatcagcctggaaaagggcagaaactcttggtgatggtgataatgaagtttcatgcagtccgagagtggaagagaaaaacccaaagaggattctatgagcgtgtgagtatgaaacagacctttatttccattgtaggactttgtaattttttttaaaaaatcataattacaggaaaaagattgataggcactcactctttccctcggaggtctcaccctttgaaatacagactgctcttggaggccttttttttattcctgtgtggcttcaaatcttattaaaaagactcaagagttcaatgttaccatgcaaacctacggctatgccctggcccgctccgagcatgggagggaaaaccaggttggctggaatcaggaccggacagtggaggccttcctaacagctacatcacttcaaactaggccttcgccatctgttccgtcctctaattataaacccaaaaataatataattcacaacactaccataaaaagtgagatacaaatgatttaagtgcctgtgaggagggcccattcgcctcactatttgcattggaaatctgccctccttttggcaaccaggatttcaggctaagaggattttttttcccaaggacaccttcagtagcttttcttaaagatgcaggcattctggactcagcactacgtgacggttgttttgtaaaagagcacaattccacacgtttaccg

SEQ ID NO: 54007 - DNA, 905 bp, Bovine  19866880740176
  misc_feature (1)..(1): n is a, c, g, or t
ncacagcccctgggggagagtctgcaattggtgagatcccgaataaagtgagtaaagccacacttgtaggcagacagcttccttctaataatgggagctggttatattgcatttcagacctaaaaaaaaaaaagagtaactgccatctcaactttttggatttagcaaaaagggggaataatgcatgatgaaaataatatccattgattgtgatgttcgtggtgagatcactacttatgagaccaatgctgatcatgtaactcacctatcaggtcctgttctcaaagttcttgtgtatctggtgtatccaaatgtagccattccacacagcacacagataactcttcctgatcctctcaacaaacaagagtgagaaacacacagttgcaccttgatcattttttccctctaacttcttcctcagcttgtaaatactcgggacagtttctctcatttgggctcttaatgctttcccactgtttgagagtcatatccacaacaactttctctctgcttctcaccgtcctctcagtgtctggggtccgaaggggcaagggctccctggtcgtacgtgtacttcagaggtgtcctggccatgttactccttaaagctctaagtaaaatgactttgctctgtggcgctctgttaaattggctggttaattctggtgttatttaccctgtaattcattagcttcaccccaccattggcagctgacaggctgtaatttcacgccttgcaataaaagatgtctcgtaatccgcttcatttagcagcaagagaatttaatgaaattaactgcagtcctaattatgccagtgaatactaaagaccgccatcaagttttctcagaaaaaaaggacgaggtccacctcatggaaggatttcaaatataatttcctgg

SEQ ID NO: 54008 - DNA, 1358 bp, Bovine  19866880784532
  misc_feature (1)..(1): n is a, c, g, or t
ncgtgcagggcgcctcggccgcccgggctggcgtcggggtcggcgccgcggccgagcaggtggcgcacgcaggccgtgtggccctgggccgcggcgatgcacaggggcgtggtgagctcgcgcttgtactccagggtccagaggcctggggagcgggtggggagagggaaggtgagaggggggcgcgggtgaggggacggtgtccgttaagactgaaatgggggaaaccatctgttaggagaaggggccaggtgggcatgtgggaagctactcgaagatgctctggccttagggacagagaaacgggtgagatccgactggaacacagacaagggatggagggaggtctgggggtagaggttaaagaacgctgacagagaggagtagagagacagcgagggaaggcagtgtgaggggggaaagagagggcgaaacaggacagagagcgtcctggagagggcagagatggagacctgggggagagaagcaacagaaaggagaggctgaaaccgagaccgagagattggggcggcggcgggcagaggggtgttactgagaagagggttttgccaaatatgagggtgactggggactcaggtaagatgtgaggagttaaaagctgaacaagcaggagcatttaaggtggaattcacactttcaaggctctgaattagggcagccggcgggcggaaagtgagctgtggatttttctggaatccaagccctctctttttgagtccctgattttaccccctttatcattaagaggagaaaacaacaggcaaaacaaactgacccacatcaccaaggctgctcaagaaaaggactcggaaagtttagttgtctttggaagtggcccggttttcagaagcaccctttgatgtgctggtctgcattgagcacaatcctgggtttgtttctttgcgctttttaggggttttgtgtgtgcacgcatatgtgtgtctgtgtgtgtgtaaggttgctctttcttgaaggatgaatggagcaggagctatacatttcacttctctgaaaactttgggctttcaaaaggcccatggaaggttgttagcggccacgagcgctcctggaaatggggagagctgtccctggtgaatacacttcaagggacaggatttcacatggcagggatgccttctgataatgatggaagaatcgataccgtggctgtaatgagctgtggaggagacccttttcacaggccacctccttcatgggacccatgctgagcggttttgaaagaccactcataattacctacctcaatgtagcacagggttctagcctgaccccgggtccccagggcccagcgtggaggttgtgcactgctgggagaa

SEQ ID NO: 54009 - DNA, 761 bp, Bovine  19866880810122
  misc_feature (1)..(1): n is a, c, g, or t
ntcctcttcccagcctcctcctcctcgtaaactatgacgatcaggtctcttcgaatagaaatgtaaaagcaaaaagcaaggaaaagaaaaagccagggcccggctcagcggcgagtgggcttgtcacgtattaatttttcattgctgtggagagttgcacatacataatcacttgattgcagtgggagttagggagctcctatggtgtcatttgcataaatcttgttaagtcaatggcagttaatgaagtacaaatgagcccggagaaggtgacatgcaaatcgtgggtggcagatgggaggtctgtttgggggacggcagctgtgtgctcttttttttttttccctctctcccgagttttttcatctctgtacgatggtccatatactcagcctgtcctgttttccttctggactcctcctgcctctgatgttcaccctgaaaacacagacctcagggcttcacctcgcacccagtaacacacactagagtgtgaacatttgaatttgtagaatcttggatgagagggttagatatcatcaccgactcgatgcatgtgaatctgagcaaaccccgggagacagtggaggaccgggaagcctggcctgcagcagtccgtggggtcgaaaagagtcagacacaacggagccactgaacaacagcgatcttggtcagttgatcctgctcacaccgttgaaaatgcctggacataccttttgtatgtgaggacaaaagggaaacaagcaaacgccccactgagt

SEQ ID NO: 54010 - DNA, 848 bp, Bovine  19866880813838
  misc_feature (1)..(1): n is a, c, g, or t
ntttgccagcttcccagatactggttaggctgaacagaagggaagaggttagatgtctaaggtggaaattaggttttctcgaattggtaacccaattggagctattgctctatttaaaacctggtgagctgctgctggatggctctggtccttccagcttgaggaggccccggacagggggtgtttatgcggtgctggtctcagaccagctgctcggccactgcgggcaggagggtccctctataaacagtcaaatctggacatacttatgagacccaagaattggtcttttttctctctttcttgctcctttttttttttttttttattcacaagactgagattgttttaatgtcataacttataggaaaaataaactacattgaaataaattaaacacaacggagacgtgcttcagacagggctcataggatatgcaaccccaggaaagaaagccaggcaaaaaccaaagcaaagcgaatttccaggctgcccccccaaaacgtctgcttctcagtcaactaaaaaagccagaacagaaacaaaaataagtggtgaccgtgtttgttcttgcacatgatgtttacctttggaaaagtgtggaaaggtggctgctgtgcgtggcaagttgcagtggaggctttgttttcttcggggaatgtaggtggaggaggttactgggcagtttggtcctataactttcaaaatacggcagctgagatccaatctatatagatatctatgtacaaagtaggatagtataataaatatttagtgtgtcttccaggtgtagctgtagctccttcaaaagcagtctttcaagctcgttaatggatatactctcaatt

SEQ ID NO: 54011 - DNA, 1021 bp, Bovine  19866880830276
  misc_feature (1)..(1): n is a, c, g, or t
nattctagatgatctgaaatagattcacacagttctcagatgccaactttgctttgtgggtgcatacagaacacgtttcttgtctctcaaacaataggtgagacatggaaaatccacccagacaagtccctgggcatttccttatttgacaaacagtatgacaatttcttatgccaactcttgcactgtcttcaagtaattttcttgaggcactctactaatgcagagatttcaatttcctgggctcttgaaagggaagaaatgccagcctttttatagtctgtaacacttatattacagatttttgcagtatattcataatttacatttcaacatttcccaatattagcaggcttagtccatcaactgataaaatggaaacaaatggaaacctcccacccctccagttcacaccatgaaccaagatgcatccttcagcccttttgttgtgaaactgcataaagaatgaataagagggcttccctggtagctcagtggtaaagaatccacatgccagtacaggaggaatgggttcgatccctgatccaggaagatcccacatgccgaggagcaactcagcctgtgtgctgcaactaactgcacctgtgctctggagcccaggagccgcaactgctgagcccacgtgctgcaactgctgaagcccgtgtgccctagtccctgtgctccgcgacaagggaggccactgcgatgagaatcccacgccctgcaactggagagtaactcctgctgaccacaactagtgaaaagcccacgccgcatgaggacccagcacagtcaaaaataaattattaaaaaaaaaaagaatgaataagaaacaaaacaagaaagactttccttgatgagccacagtgaaaactgcctggggcaaactgatctccatccaggtgtccttgtctgaggggcagccgcccaggcaacattctggggacaggactggcagcccgtgaactctgtctccagggctggaggaatcgccctgacttgatccagaaatgcaggg

SEQ ID NO: 54012 - DNA, 1775 bp, Bovine  19866880844236
  misc_feature (1)..(1): n is a, c, g, or t
ntgggttccgtgtctgggtgctggtatctgaatgcccggctcctagtatcctgagaactccctttcaagaggaggtgtttaaacagtcccctggtttaaaatacgacccatcaaaacacactgggcttctgtgctgtgcttttccatctctgatgactcctcttgtctgacaaagtatccctcaacctgaaaagcctctgacagcccaaccccagaccctgaaaatgcacccgcagaacacagtccgctcctcctgagaacaaacaacgcatcttgttttgtatcaattagtggacaccggacaggtggccccgtcgatggccttaaacgtgagagggggcgaagcagagggcagaagaggggagacggggagagaagaaagccacagcaaattagaaaggggagcgcctcattacgccccctctcacccggctttgaaggagggacccggagcccccgagatgcggcgctgagccgggatgggccggtcctccgccatcccgcgcgctcaatgctagccattagttcttcccaatcgggcatcaatgttcaacccacaccccaaaaaatacataatacgagcaataatgataacaatctgcaggctctcgagcttcagtacgtgaagtatgagtcaaagaagcagtttaacttttcactcggagagctgacaagcatgactagagggggaataaaataacattccgtccgcataaatatcaagcagcctgctcgagactgatgggccaggaatgtattcttagccatcattccggcagacaggcccaaggacactcataacttattttacaatcatttagtttcagctcaagtggaaaacgtgacaacttatctctgctgacaagatgccatatcgaaccttacaattaactctcctccgattatctgcccagccgatcattagctgggccattttcgatgaactgttgcggggagcgtgcctcggtgatggccgtcggtgccaggtgtgaggatgggtttttgacatctccggcagctattcaaatagaccgggctccgtgcccccgactcccaaggccctgcttctcccaaggggtctcccagtgtgtgtgccgggcagggggagtcctgcgccgtgctgcgtgggagctgagcgtccccgtgaccgttagcactgcaacaaaacctgtattactacggccagtgctcctccagcagacgtgtgctcctcaccccccagtctatttcagggagccaggggctctggagggacacctcccaccactcctccttactgggcttgacctgcagaggggacaccaagaattccctgcaggactcccccgccctgccccatgcacgctgtctgggggtgctgctgatggtcctgagagcaggctgagttaatttcctagtgttgaagaaagagggcttcctcagtggctcagcggtaaagactccatctgccaatgcaggagacacgggttccatccctagatgggggaagattccccggagaaggaaacggctacccgctccggtatttattcttgcctggagaaacccagcggatggagcagcctggcgggctacagaccatggggttgcaaagagtcggacatgactgagtgatggaacgatggggaatgctttaaaaggcatgctcacaagcctggagggcgtccctgatggctctgcggtaaagaatcctgccagcgcaaggagacatgggttcaatccctggtccagaaagactctgtgcgttgagctgaagggaagtcacaacagcaggg

SEQ ID NO: 54013 - DNA, 2010 bp, Bovine  19866880891935
  misc_feature (1)..(1): n is a, c, g, or t
nctcttccccccacccaggatatgtgcctcatccaatcagcaaatgacccgcaagacccccatcccactccttatatcctgggtataaaagtggactgaggagccctgttcaatgtgggttctcccttgagctggcccactgttctaacagcgtctcccgctctaataaactttattctcctctcattctgccttctgtccagaaattcttttccagatcatgacattaaacagggcagcaggtcccaccctgctcaccccgtgacgtgctgtcaactctgtcatccctgctcagcgagtgcagccctcagaaaggccccaatccgtagaggaggatcatgtagaagtctccgacgcttttgctgcgtcttttgtgatttttcatttaacctctttggagacggctttctgtcctgatcgggcaatgatggaggcgacgaacatttttaaagtgcatcttttaaaatggaagatgtgttgtttctggtcagttaaattaaacattaattttattaatctagttttcacaagcaaatgtattccgctggatggaaaatttatttgcaagcaagaaggcaccacacacgttgttccagtgtttatataattacacatctttatttaatggagccctgcttcagttattatgaatacgtaatatttgttgtgataaacataatcttttggtgacatgtgcttaaaaatcagctgagcattagtgaatgaagctcattttaattcccactttaccctctttgttttcctattaagagtattaaaagctgtgttattgaattttttttatatgccagatggtataaaatttgaggggtactgaaaggtggcagtgacaagaaggtctcattaccttgtccccaagctggttccttaaccctagatcagcaactatgaagtacttatgcttccagaagtgttctccgcatggacagggttgtgtgtgttacacacacacacgcacacacatcactgtggctttgggatggttgcactttggtacactgaggcttttgttggtgacttagccttccttacaggaatgtatcccagagaaggaaatggcaacccactccagtgttcttgcctggagaatcccatggacagaggagcctggccagttatagtccatggggtcgcagagagtcggacatgactgagtgagcacataggaatgtatccacgtgcgtgtaaccagccctgggttgtttacaagcacggcaacagcccggctttgggagacattcttggcacaggtatttcatgttgatggaacagctggcatctgcttccctggactgttgaaatcaccccacccccaatcctacaatccacattcccgttttcctgagagatcagctgatgacagagagtgagtgtttgtgacctttctgatcaccctgttcgctgctgggaaggtgtggtgttggttactgtttgctgagtgcacacgagggctcaggcaggccctgtactagagcacccacggttaactcgtctgcagggacagcttgtctgggacacgttagggtggtgcccgccggccaaagagtgggtgtgcaggtacccaattaatgtgtgccccccgacacgtggcccccagctggctcacttccgtggggggagcagtggcccttgcccttccctttcctgaatgaacatctttccttctgagctcctttccgatgggcccgcttactctgccagttggccgggtattcgagtccccgaagtccagcatctctgctgttggacaccagtccccaccagctctcagctgcgcctcggaggccctttccagctgcctggcgcctcccatcccatcctgatcccccagcccggccttcctcctccctgtagtcctcctctgacgtgaggaaggcctctgagccggcagacctcagcctccgtcttcgcggggccggcggcgtctgtgttttcgtgtcactgtctgtcttttccaggtgttttcggtccttctctgcaatgccccca

SEQ ID NO: 54014 - DNA, 1210 bp, Bovine  19866880911623
  misc_feature (1)..(1): n is a, c, g, or t
naccctcggggaacctcggggctgagtgagaggcgcccggaccggatctgggccaccctctttaaagaaacccttcttgctgcggtgggtccctcgtgcgctgggtggctggggggatgcagaccccactccattgccaccagctgcatccggggtctggcagggatggtccagcgggctgccaagggggtgacgaggttaatgggttggattcccagaaaacagcgctttagtaaataaccacgacgcttctgactggctttcagctccgttgtgtggtcaccaggggcagacacgggagccgtgaccggatgcccccaggtccttgcctgtcgttgaggcaggacggatgatattctgggaggatgtcaggagtggtcctgcggtgattctggcctcggccttcctgtctccacaaacgcggctttctctggataagacatcggggttggggggtgatgaacagcctttcccaaaagcccacgcagtcaagtctcatgcgttcatttttatgggaaactcacgccccaaatgctaaagggccaagaacttcctgagtgctcgtcaccctgctcctttcagaaacatctgtttgctttccccccgctcacggggtggggaaggatttttttcaatggtgattttaaaggagatttccgtagccaagtatattggagtggaggaatgtccttagggaggacgaggggaaattggaggagacccgcacagctttcacggtgacccaagaggccaggaagagcgctagctagcagcaaggaatttcccaagtgtcttttggcctcaagcaaaacaggaactgggaggggaggcgtggtagagggggctggaacaatatgttaggaaaacagaggggcttcctctctcggcagggggagaccctggcccgctgcgagccccgcacgcatgccttctcccctggccgcgttgccaagggggcccgggctcaggacggaggaggaggaggaggaccaacaaagaccgatggctgtttattccttaattaccgaaagcttttaagaaactggccactgtaaattccacacgcagaggagagcaggaggggacggacaaggatttatgctcacggggcaaagacaaaataaatatcctgcctgactctggatcgatattatgagtgtttttgccaacctgcggggtgctttatgagctcagaggaacagaagaggat

SEQ ID NO: 54015 - DNA, 2165 bp, Bovine  19866880918356
  misc_feature (1)..(1): n is a, c, g, or t
natgttgagaacaggatgaccgtaagtagcccaagatcagagaaagtcttcctgtctttatagaaattaagccatcagatagggtagactgtgcctaatttacttttttttctacatcgaaaaactcttctgtcttcttgctttaaaaaaaaaaaagtatatatatgtttttataatagcctgtgagtttgagtaaagcttctagaggaatccacgggacactgccttagcagtacatagcatatttcatccttgtacctaatctgcagggcttcccaggtgatgcagtggtaaagaatccgcctgctaatgcaggagatgtaggttcgatccctgggtggggaagatcccctggagaaggaaatggcaacccactccagtattcctgcctggagaatcccatggacagaggagcctggcaggctacagtcagcggggttgcaaaagagctggatacatcttagcaagtaaaacaacatcagcaacagctcactctgtatcgctttgttttccactgggaccctgtgagggttgttaattgtggctggaaatccttaccaaaggtagccaagtccagtccatccattttcttcactggcagcaagtcgctgtggagaactctcagtgggagagctcgggcgtgggggacaggcgggaatgctctttccctgctgccaagagacggggtttcatcattagactttataaatgcgtgctgctctggttctagcccggttgccggccggttgctaaagtgttgggaggaagggagcgatgcagactcggaggatggcttcttctcaggtgtgcccgtggccccagatggaaaccaatcaaggtgcgatttatgttcattaagtgcttgtcaaaactgaaaaattttctaatcaacagcaatctagcggcgtccccgtcgatggctgggagtgccgcctctgccgcagcggctatttgcctgttacaactctaggctaagaatccgctgatgattacattaggctaagctgcgaagtaaatgaaccatatcttatttaggtgccacaagcttcagtgtagtcctgccccgcagggcacttgatagcgttttatggctttaaaattagtgtagcttcccattggctgcagggcacttgcctgttatgcctttgaactcaataagcaaggggaagggggccttttgtttttctcctgtatttttctcccttgcatttttagcaattttgttttgcatcttttccagacggcgttttgcaataaaaatgtctgactaccctctatatgcctacccccatcccacctccccttcacaaaaaaaaataaaagaaaaaaggagaaagggaagaagaagtagaaaatgtcatgcatttccagaggacagtttctttcccctatcctgctaagtgagaaatagcattgcaagtcacccccaacggcttatcatgttgggatggctgcctccagtggggacaacacctatgcttcgggaaatgcccacgtgaaatcacagggcaaatatttcagtatatttattagacatgagcagtaagagccaaatttattaagggctttgggattctttcaagttctttctttattatctcagttaatcacaaaaacaattgcttgatgaaagaattattattatccttatatttaaagatgagaaatcagaacccgggatgatgaaacagtccacaagccctgacagacagagcctccaggcactcttactctgaggccatcctctggcctggagaagctctgtcttctgcagatagtcttaatttaggaaaccagagaactatgttagtgaattgaccactcttcatttgaaatgaatctgattatattactgtaaaccaccttggtgggcagtaaacagcattaggaaaacagggtcactcccaaaacagtgcatcagggagccaaaaaagtgtttttttttctggacaggcctcgtcagagttctgaaattagaggaaattctgtgatgggcaaaacttgaagtgggactttttctgtccatgttgggttaaaacggtagaagaagatagtgatcgttagtgtcctaggaagatgactttgtctgcttttctgtctttaaaaaatctatttctttaagtgcttcacattctagcaaatgcatcccaaggaatctggagttt

SEQ ID NO: 54016 - DNA, 1684 bp, Bovine  19866880981019
  misc_feature (1)..(1): n is a, c, g, or t
ngggaagaggtgaccccagcaagcctccagctcagggagggagcccagacgtgcgcatcccacctcacactccggtatgcccacctggtccagccaaacagggagccagaggtacctgagctgatggatgccgcccagtgggtatcctcctcgagagggcagaaggtggtgggagacgcaggcgtcagcccaggggagaccctgctgagctgcccgaggggagcacccgctcagctccaggccgtgctcgtcctgctgttacactgccctgctgtgcaggcatctggccacagtgcacccaaggaccgctccctgtgatggcaggtggagaagaccccgaggagcgtgtgtggtggcccttcatggcacctcgctgagcttcggcgcccccgtccttgtgagatgctgcacacctggcccgctgccgtcccgaggggctgccgtgaggacagggctggaatgggcgccagcgctggttttgatgctgtcattcaggacatgagactttgcacattcctggggcgcgagcaagttctagaatcagaacatccgagctgggagggagacagggagctggctggctgcagatccccgaagcctggccgaggagccagggcgggtgcacttctcaggagcatctctgatctgtctccttgctgctgaagagcttccactgtagtttttatttctcttgcgatattcgagatgcacccagcttccacagcggcatatagtcggcatcgttttttaaggtagaaatatatttttaagagcaggatctttccgcttcgtgcgatgacagtgagggccttgtttgtggctgggccctagtttccgcctcttcactgctcaccaggactacaaagtccttctgaaaaatgtgtgttccctcgagctctaccctccagacctttggaatcaaaatttgaattttttttgcagctgctattttaaaaaaagctccatgggtaattctggtaattggccagatttaggaactactagtatgctccatgtatttaaaatcctgcaccatgaaaaccttctatggaagcaatttagaacttaactagttctaaacttaaaaaaatgggaggaatgtttaaaaataaaaagaaaccatttaataccttcaaagatctccttacagatgcaaggaactcgctagcagcaaggtgtgattggctgagcttcagagagaggcgcttaattatatttttgagtttgaaatcctggtgaccagataataattcactctgatgttgagcaactgattcaaatcattaagtatacaatggaatcgtttttccaccgcactgcatgctgtgaagttgccaaggttattttccctctgtgtagtctcttttgaaggcgaagagtaaacatttggtttaagagcctgactctgccacccgtgtcgcatctaggaactttgatttgcgttgatcctaaagtatagctggcccacgagaataactctctggcaccagacagtgcaatccgattggcgatagtttcgcttgcaccgattggttgacgcagcaggactcctccaggacccgccttgtctcgctggcctactgggaatatcgttgttgtttagtcgctcagccgtgtccaactccttgcgacccctggactgtagcccgccaggctcgtctgtccgggaattctccaggcaaga

SEQ ID NO: 54017 - DNA, 1086 bp, Bovine  19866881041309
  misc_feature (1)..(1): n is a, c, g, or t
nacggggaagggatgtatctggaacatttgcatatcaaaatcaagctcgccggctttatttcgccctgcgaggtccctactttggaccactgggccccacgtcccacttctaaagaggcgacgttatttagaggttgtagcttcaattcctcaagtcccaagctggggcccaagatgaaaagggtaattcttgtaaaaccagaaaactcccgtgttgtttctcttgggagaagctagaagccagtgattcaggtatccacctgtttctgaaaacaccaagctgaaagacttgtgtggactaggaaatgcatcttgtaaaggttttagcaatgttagaggcttgaaatttaggaattgccaaacttaccctctgaatttcttaagaactaattcttctgtgctttgaagcacctaactcaagcaggaaaaacagatccctcagcctgtgctgagccaaagataaatgggtccctttgctgcattcagatctggagagctggcacttggtacatttctataataaatttaaataaaatatcctggttattgtatgttaaaacatgcctattaaaaaggaggccatgctgaggcttagtcactctctgattaggctcatttcagagcccataagccataaatgctcaattacactcctgttattgtattttaatttgttaagaattggcattaaagaagaaagttatagcaagttgatatttttaaaggagtaactatgcaagaaggaattcattatttacaagtcctaactttggttttgaaacttgaggtttgccccttttcagtagatatcaatggaagtaagtgaaaactgcttgagaacaaccttttttcacaatgaccttgacccttggtcctgtgctgactgaaggtcactttccatgtttttcgttcgctggcctctttataagctgcgtccagagacctcggtgtttcctcccatctgccttatccttcagcctaatctaaggataacgactttctttctatccttagtcctcatccttttgaaatcacaatttttttcatagtaaataatatttgtggtgggagtcggggggcgcagtt

SEQ ID NO: 54018 - DNA, 1794 bp, Bovine  19866881114974
  misc_feature (1)..(1): n is a, c, g, or t
naaaagctattgcagacagcactggctgcttgaggctaaagcccaaagacctcttgtcagtaaggggtcagctcatgccgggtggtgtctgagccacttggttcccgtggtgaagtccggatggtgtagtctggtgttcaaggacactgctgtagacacatgtaaagatgtaccacctaaccccaccccagttactggtcccagagttgttcatgtgggaacaagcattccgtgtggacttgtgtgttggagcccacctgggttccaccccagcagtccacagctcaggggagaggctaggcttgtccctgggttgatgcttatggtcatcttccctgaggtccctcccctctcctgtccctgaccctcctgggctgctcaaaacatgtccgttgaggagcacacaaccctggttgcggccataacttttaaaacagaaactgcaaaagtggatgcccgtgaaaacatggcttgcttgtcacacccatgtggttcttctcttcacgtgtgtcccctgcgtgtgtgacagaggagcccctctgagccagtaggccagctttgggatgacagcaaatacacggtcagttgctggtaaggaaagattaatagaagcatgttctgtgtgttcctgtaactgatttccaagagttcagtgtaaaaatctcttgcttttacacttttactgggtacaaagaaagcactgaaggacccagaggtctactgaagttcatcctgaaacatccccttttgatctgtgccgtgtgttttgtttaagtgtttgaatgttctaggtgagcatggctactttccacaaggctgccttggtgatctcagggaatttttgttttttctggcagaggactgggtaattgacaagacgccatgattgtacatcatttaatttagtattgccatttgggggacgtgcttatcttaattgcaaaaaccttcaattttgtataaattcaaatggaacacaattctgacgctatagcgatcttcaaattccaccatcaccgtaactacagaaaggaaactgaggctgggcacgtaacattataaatcatttaatttttctttagttgataaattaatattcactactccatcacattttatccaaggttttggaaacagggttaaaacatgaaaaaataacactgtagcatataaacacaacatctttagggaaatatgtttatcaaacttcttagctgcaagattctggaggactttttactgattaaaatcatttctccttctaaaagataaggcttagtgttttggtttttttggttttttttttaagacagtgaaccttcaagttggaaagctgacaggcagaacatacatatctacttgaatttgtttaaaatgtatcaatttagagggaattatttttaaactgtataaaattaagaaggcagatggcttaagtagttaggatgactcttctccagagatgataaaatgtaatgaatgtgaattatttcgctgaattatattttgtgcgcacccgtgatctgtactccgtacttactgtgtacatcccctttgtcaaaagttacaacgtatccgtctaccctgaaaggtccctataatgtgaaggtggcttgcctccatgcctgtgaaattgatgagctgatgagctgggagagactccctcatattttaatgccagccgtaccagtcctcacccccaaagagctggggcatcagcatcgatggtagcaaggagtctttgccgctgtaattgacaaataatacccctcataaatactgccagtcttttca

SEQ ID NO: 54019 - DNA, 849 bp, Bovine  19866881208017
  misc_feature (1)..(1): n is a, c, g, or t
ntgcagaatcccatcccaaaaaaaaagattttttttttcttcctgggagtaaattaaaagatgcttttcttgactaatgatccccccggtttaggaatgggaagtcaatacggctttgccgccgtcagcttcgattgatctctgtgctgttcaagtttgaacggcagttctcggggcagctgagaatcgctggaaccaattatgagccgtccgaagctgccctaatcagggtgcaggggacagacggctggtcagaggaccctgcttccctgtgtcctgtgtcccctgcaggtctgggcgacaccgtgcaaggtggtttcaggttttttttttggagaagaatctgctgggttctacttccccatggtcttgagtgtgtgtgtgtgtgtaaggatctgctgggttctacttccccatggtcctcagcctgtgtgtgtgtgtgaaggatctgccgtgttctacttccccatggtcttgagtgtgtgtgtgtgtgtaagcatctgccgggttctacttccccatggtcctcagcctgtgtgtgtgtttgaaggatcagctgtgttctactcccccatgctcctgagcgtgtgtgtgtgtgcgtgcatgcgtgtgtgctgggggaggaacagcacatttctaattatatgccactgtcagaatgaatcttctgaacaagacagaatggacggagcttctcgggaaaacagctgggccccttttcaaagaattagactggatatattgcacttggcttttcctcagatggagataaaaatttattaaaatatttctttttagtattaccttagggccacattagcgagccctccatctgtttgtgctagcgag

SEQ ID NO: 54020 - DNA, 2443 bp, Bovine  19866881223972
  misc_feature (1)..(1): n is a, c, g, or t
naatcagagtgctctcgagaatttcccggtgaagtccttcttaaatgcaaaatgttaaaaaggttttctagcagatattttccccagtcttctcaggttcagctggccacaggggggaatgtgatggactgaataaccccaaagtgtatcatttaactccgcggttgtaggaagtcagctgcaaagatggcagatcaaatgcaacgtctgccattgttgaggctggtggtccagtgatcacagcccctcaattacagcccttccagggagcacgagcagcagtcattaaatcattatgtctttgattagttgctctaactggtcattgcctttgaaatacgatagcacaatttgaagttttattaaacttttttctggaactgctgaaaaagatgttgtgtttaaaaaaaaatcgaaaaaaggcttgccatgtattttattggaggagattgagaagaagaaaaaggggaaaaaagaaaagacgaatgtttcccattatcagtcattttggtggtctcagaaagcctaaggtggtccccgcgtgcccacagcccgcttctcagagcagctggcccccagggaggggacacgagacggggcaggtcaggagacccgaacccactcccaggccctgcagccgcctgcctgtgtgagcacagctgagcacggcacgcaaaagatgagcttcaccctcaccatccagcttgaaaaacctgattcaaacctcacttttttttaagtgagaatttggtttcctttttctttctttttttcatactgatttatttgcttttggctgcattgggtcttagttgccgcgtgcaggatcttcatcgcatcacggggatctttccttgcacggactctctagttgaggcatgcaggccagtagttgctgcgcatggactgggttccctcgcagcgtgaaagtgaaagtcactcagacgtgcccaactctttgggaccccatggactatatggaattctccaggccagaatacaggggtgggtagcctttcccttctccaggggatcttcccaacccagggactgaacccaggtctcccacatcgcaggcggattcttcaccagctgatgggaccttggtctcccgacgagggatggaacccaagtcccctgcatcgcatggtggattcttaaacacgagaccaccaggcaggtccctgctctgtgtctctgttttgaaggtcaggtgttcagtccttatactacagaaccatcagagtccagataaccctgttcactgaaaaactaggctttaataaaaaaagtcagaatgttctttgtgatgctgagaacccagcacccgaaagtggctcctgctcccacaccctcgttgcatcccagacgagagtgacgcccagaggccaagaagccccaacttcagcatcctaacaagccaccccccaatagccttcccttctcgaaatgaacagctgctccttgaagacatggaaagacatttccattacttggtgatgtatttctcatctccatctgagaatgtgccgaacctagagtgggaatatttctacttcaactcacttttttttttatttcagtccctattaaaagttacactctcggtgtcaagctgaaatacccaattaattgtgggtacacttgaacccttgctctgtgactcagtgtgtttctaggccgaaagggaaaccaatgctccacctaattggaacttctggttttatggcgtatcctggagttttcgcttcgtttttattttcgatgttttccggggttaatgatgttttccgtgctcgtctgcatcagcccactatgtggaagcccttggcagttttcaaatcgtaagagctttaaagaagccgccaatgttgaaattgtgtttgctgttaggaaagttgttatgagttattggaaatggaattaaaactgtataattaaggatcgattccttatttcggagttctgtttcattaggtatttcgtctcgtgttctgtgggttcagattacagaaaagaatgctcgtcttcgaggaaggacgaagttattttgctttctccacatttgtcctattttgcttggcctctggttttgtttaatcctctcaaagacccttttaatggacatttcaacacgactactcctctgtgtggtagcctctaggaaatgaccattatgtcaggcccttcacagctaaagtagtgagttcacatcgtggaagaatcttcggggttgcatcttatgggagagaaaaaaaaaaaagcccactgccttttttttttttcccacaaaagaacagaacatttacccagtcttgttgagcacatgaatgttcagatgctggcacaaaagaaatctccaatctctaacctcacaatgaaattgctccgacaaaagatcacggaacaccgggcgcactaaagtggaagagacacaaaaccg

SEQ ID NO: 54021 - DNA, 1963 bp, Bovine  19866881225353
  misc_feature (1)..(1): n is a, c, g, or t
naatactgttgctgggtgttttgtattacggtgggtaggtagtggtttagtcgctaagttgtgtccgactctttgctaccccatggactagcccgccaggctccttcatccgtgagattttccaggcaagaatactggagtgggttgccatttccttctccagggcatcttcccaggcatctaacccaggtgtcgtgcattgcaggcaaattctttaccgacagctccaagcgaagcccaaggtgggtctagatgctgtgaatttaacgtgaagtgctttctcacagggaggctgtgcagtattaggaggtctgttttttctttcttaaatgaaactttccagaactaaatgcatgcaggatgctttgaaggatttcagttattcgtggaaatgcatgctagtatgtggggatagtttggattcctcgtagtcactgaatcacagcagactgcaaactgagaaatcaatcaatattctctgctgaactctaattaacacttaaacacgattattcacaaacgtgaaatcttgatggcgatgacctcaggtattctaaatgtaaataaaattagatctagatcccttgtaattacctgcggtgctgtgagtaattacaatggcaattgatacactcaatttcttgttgaaggaaaaaactctcgctaagtttctctaagctgtgtacttaactcttcagtaaccgcgatgtatggaaaagaatgaccaggatgctgttttattttgcttcaaattgtttttggagaatgactggtttacaatgttgtgctagtttctggggtggttgctagttgcttctccaggggatccttccaacccaggaattgaacctgtgtttccggagtctcttgcattgtcaggcggattctttttgccactgagccacctgggaagcccgtgttagttcctgctgtacagcaggtgggtcggttctgtgtgcacacacctctctttcccatgtaggtcactgcagggcgccggggagggctccttgtgccatgcacttgttctcattcagtcactctcgtgactgactctttttcatccccatggactgtagcccgccaggctcctctgtccatgggatttcccaggcaagaatactggagtgggttgccatttccttctccaggggatcttccgggatcagggattgaacctgtgtctcgtgcattggcaggctgacttttttccactaagccaccggggaagcccgtactatacaataggtccttattagtcatatatttaggagctatactttgccaccaaaggttcgtctagtcaaggctatggtttttcctgtggtcatgtatggatgtgagagttggactgtgaggaaggctgagcaccgaagaattgatgcttttgaactgtggtgttggagaagactcttgagagtcccttggactgcaaggagatccaaccagtccattctgaaggacatcagccctgggatttctttggaaggaatgatgctcaagctgaaactccagtactttggccacctgatgcaaagagctgactcattggaaaagactctgatgctgggagggattgggggcaggaggagaaggggatgacagaggatgagatggctggatggcatcactgactcgatggacgtgagtctgagtgaactccgggagttggtgatggacagggaggcctggcgtgctgcgattcatggggtcgcaaagagtcggacacaacggagcgactgatctgatctgatctgatattaaatctatgggatcatattgtttctttacttgggcccttgaattcatgtaacttaaatgcctgaagaagtaaagtgaaagttgctcagtcatgtctgactctttgcaaccccatgaaccatacagtccatggaattctccaggccaagatactggcatgggtaagccgtccccatctccagaggatcttcccaacccaggg

SEQ ID NO: 54022 - DNA, 1230 bp, Bovine  19866881267551
  misc_feature (1)..(1): n is a, c, g, or t
ncctctgctaactggagataatgaaatttgtaaccatgctggaggcctcacttcggatggcttagtgggtgcagctgcgatgcgcaattcattgtgatgtttcctctaccgagtaatatttcagtgttcatccacgatcaaccatacaatgggtctaaaaagactcagaatgaacaaccaagggatggagatgagaaggataaaataaattcccttctgagacctttagaacaaagcaccaagaacccaaggggacaaaaaaaaaatgaaaaaatcaaacaaaaagaaaacaataacaaagaaacaaacaaaaaccccaaaaacaacaagatttctgagtcctctcttgtataataagattgggtaaatccagactggtcccgcatttttaaagaaacatcttttctctaccacctctgaatttgatgatccatataaaagtcagggtctttacatggaatctgagaaatatcaaggaagccactctgcctgccccactcctagatttaaaagccgctccacacacctcaaagacttgctttttgcctggtggaaagagcttgaggcagagaatcaagagacagttctgtcacctaccagcaacctgaccctggacaagaaagccacttaacctctctctacttctgccttttcactggggaaacagggaaattaacgcctgatgcaaacttgcatgaatgttataaaactaacgagaactacccgattcgggacccggaaccgggactgcagagatgactggcacagtttcagccatgataacctctctcctggaccctggataagaagaatacccagaacggatggcaactcaaaggcaacggcaaaagatggcaagtcattaatgatctgcaaaatccccactgcccacgggatatccaggcacacgcccttcaacttgactctggccatgagcccagggcccctggggctcgcatccttccataacctaggttttactacggtggcccaaccagtgctgaacttgccgtagggggacctggaaccttgcctctcggggcagccccggctcggacaaagttttccttttaatatctgaaccaaaatccgcttccttgaaggttccacccactagtcccagtgatctccgtcagggccacccaggacgcgctgggacccgtctttccatggcttgaacacagttaggacgccctcatgcccctcgtgctggctcaccgctctccttcc

SEQ ID NO: 54023 - DNA, 1972 bp, Bovine  19866881268314
  misc_feature (1)..(1): n is a, c, g, or t
nctggactgcagtccatagggtggcaaagagtcggacacgactgaagcaacttagcacagatgtcgcaccttcctttacatttttgtgcagttcctttcgcttgaataatcaggtctgtggctttaccgtttctttgtagtctcttctgtttctccgtgttttgaaatcctcattgcagtcgccttttccctgcctcccttctgcctttgtcataaattgtattcttctgatatcactacctttatttgcctgtatcctgggtgtttctttcatctgactcatagctgtgttatgagtctgtgtgttagtctattttgacctgtaatttggcctttaaaaaaaatctaaaaagtgagccttctggacgcaggaacaatggcaaggagcttccgtggaaagcatccaaggggagccttccccttcgggggtgtcagaagcctctctgctccagaatcatccactcagtccacaagacagcttgatgagttgagaagaagtgacaggttcatttttccccctctttgtttaagccatttatcttttagatccttgtctgccatctaaattgtattgccagtttgttgggatcttcacttgccttgtcttgaaagacgctgatttgcatccaacttgagcataaaggagagagaaagttaatcatctcttagcctcttgaacagatccgcacagggtttcattgttgcctgatccgaatctgggtgaaagtccctgttcaccagggtcttggtgagaatatccctgagccccggtccagaaagcttagctctttgaaagctctttaatttatactttaggcaaatctttctatatttgcagttaacctaagctccattcatagatctttactcattaagcagcatcatagtaatgaatgcccagtgagcactaagtcgatggtactcagccttgtagctgtgagcagcaagtcagggtagagctttcttccttctgagccggtgaggttacgcaggagaagtccttttcccataggaccgggaggccagcggtgttccagcccttggtgaggtctctgcgcctgtcaggagtaccagctcccacccccggaatctccctttggtgatgctcggaccccacggccagcagcagccgcctgctcctggcttctgtgagtctgagaagagtgcttatcttctcctgccttaggcgtgagccactaggcacacctgcagcctttgctgcaatttctagggacacacacacacacacacacacacacacacattttcattttcatcaggacctgccctcatctggtggtgattgttgctgagttttcaggcaggacactttgatacattttgtgctcctgtaatcattgcagtcatgcatcctgatttttcctgccttttaaaatttttaattttttaagtgtaagtatagttgatttatggctcagcagtaaagaatccacctgccagtgcaggagacatgggagtcgtgggtttgatccctgggtcaggaagatcccctggaggaggacgtggcaacccagtccagtactcttgcccgggaaggcccatggacggacaagcctggcgggctgcggtccctgaggttgcagagttggtacgactgagcaactgagctcacacacacacacacagttgattcacaatattgtgttagtttcaggcatacagatagcagttcagttacatgtatatattcttcaggttctcttcccttgcagattgttacagagcttcatcagtagagctccctgtgctatacagcagttcctgtggattatctgttctgtgaatagttgtgtgcacctgttaatcccagactcctcatttcttttgctccgcagcccctctgtccctaagtcgtccctgcttttgatgatttcctctgtgtctgtttaatacattcctaatccgtcagcatttccctcctgggaactgtccccgctttgtcacaagcaca

SEQ ID NO: 54024 - DNA, 854 bp, Bovine  19866881323167
  misc_feature (1)..(1): n is a, c, g, or t
ncatctgctgggcatcctgagggcacacggggccactggagctggtgctgcaaagctagggggagtgcggggctgtgtggcatgtctgccttctttctagcgcagaaatgctgattccagccctgggcagactggccacgggcaaaaccagctacaggacatttggcagcatggtgttggagtgtgttgaaacattttctgtagagaagtgaatgttcgtagtcctctgggtgtggacacggggactctgtgtccttcagggcctagaatcccagcagtcagcgtcctgcggcccactgccccccagaccagcagctggggcagctgggacccagagcttgctgttggcagctccactctggggcttggttttaagggacagtgtgctctgaagaaacgggaaaaagtgggatgtggtttccgacgggatgacttgatgtcccccttgtcacaaataataactttacatcagacttggctacacgtgtaaaacacaccgcatagactgtatttatttcagtttgagtttctaaaaatgttatgttctttcatgaactctgtgaggacagaggaaatccagctcccggggacacggtagaaacttcccctcgtgaaattgtgaaattaatgtcaggagccgtgactttgctccgtcctgaaggtaagtgtttattacagtcggcatttaaatcccccgattaataggagcaattaaacaatagcttcatttccagcaaattaacaaccctaataggtaattgcgacataaatgaagataaatttgttttaatacaacgagataaaaagaatacaggcaagaacagaatctcagattaagaattcagacttcatta

SEQ ID NO: 54025 - DNA, 853 bp, Bovine  19866881394269
  misc_feature (1)..(1): n is a, c, g, or t
ncctgcatcttaaggtgaagccttaaccactggaccgcaagagaagtcctgcaagactctgcttttaagagcccgggacatacccacatccactgaagccagtcacacagacatcagaatccaaaacatggacgtagcctaaccttctctccaaataacaatattagcacagcacacctcatttaacaaagcattaaagcatcgtgctccctcagatcaagtgcatctattaataatgacttaaatcgtctgtactgatttcacattattaagaaacctcattcccatcatgtggaagaatacaacagggtgggggtgggggtggggacaccttgctaacttatgtccgaagagcacaacccagctcggggcagatcctgccaagacacaccacgaatgctgtctcatccaaaggtcaagagctgctctcatccagagtccaggagggctcttctggatgctcagaagcgaaggtgcccttgagcactgccatccacggtggccgaggggggatggagtagcctggtccttggcaggcacaaccacgggtaaacagccctggaaggacatttacagactctggggaaccgtgcaggagagcagcccactgaagctctccccgataaaggtgatggcgtctctttacaactgtcatggggatttaattacatgataaaattgcagctcctgcctcttgagacaaattgcctgttcagactgattgttttttatgaatctcacacagggagcaaaatgcttctctcctgaagttggcttggtctgatggttatacctcatcatcctttacctccctcctggaaatgagaagcttactgatcctgcagttgaggag

SEQ ID NO: 54026 - DNA, 1364 bp, Bovine  19866880167098
  misc_feature (1)..(1): n is a, c, g, or t
nagacactgatgtatagaacagtcttttggactctgtgggagagggagaggatgagacgatttgggagaatggcattgaaatatgtataatatcatatatgaaatgagtcgccagtccaggttcgatgcacgatactggatgcttggggctggtgcactgggacgacccagagggagggtatggggagggaggagggaggagggttcaggatggggaacacatgtatacctgtggcagattcatttcgatatttggcaaaaccaatacaatattgtaaagtttaaaaataaaataaaatttaaaaaaaaaaggagttaattaaatcccctttaggtaaggaccatttttcagtaaattttcaagaaaaaaaaaatactaattgattgtaaagcagtttaaatcagtttctgtacatgttttcaagctgtgtgtatgtgatgtgagtttgaaaagccacagtatggttgttagaggttgttctctttctctcacatacacacagagtcatgtttcttcattcatatgacaaataatctatatgatgaaacagaatagaaaaggggaaggacatcttgatgttgaaactgccttctgtcctagctgagaactttatcataaaaatgtaaaacttgtcatcatcacttattagccattgatggttggcaggataggcattgaagaatgttataaaaatgtaaatatatggccttctacaaaaaaagaaaccaaatggaaaaaagaaataaaaatatgtaggagtaggtgtgggcatttccatttgtgcgttttttctttactctcccaggtaacagctgtgtgactatttctgggtgacagattcttcctgatggtagttggctgctgcagcagaatgaatcacctccaaacttaggggcttaacacaacaagcatttatgatctcagttttgagggtcgggaatttggaagttgcctgagctgggtggttctgactcgagatctctcctgaagttgcagacaaagtactggcaggggccgcaggccgatgatggctcggccggagctgaaggaccagcttctaagctcatgcctgcggttattggcagaagcctcagctcttcactggctgttggccagaacaatggttccttgttacctgggcccctccaagggctgcttgtgtacctcaggacacagcaggtggcttcccccagcatgagcagacagagagtgagtgcaccagacagagagagaaccaaggaaatgccactgtatctttcaggcctcagacacagaagttacacccatcagttctgccacagtcagtgaatcaggagtcactaagtacagcccgcactcaaggggagggaaacggctccacatt

SEQ ID NO: 54027 - DNA, 1676 bp, Bovine  19866880389237
  misc_feature (1)..(1): n is a, c, g, or t
ntgattgctcacagcctcctaatcgtgagaggcacaagatgctttaaaccttctaaaaacaggagggttcaggatggggaacacatgtatacctgtggcggattcattttgatatttggcaaaactaatacaattatgtaaagtttaaaaataaaataaaattaaaaaaaaatttttttaagtcacccaattaaaaaaaaaaaaaaaagaaaagttagaaaaccattagtctaagtatagtgggctgattagaaactgtattggtgaagggtttttcatttgttgagccaatgtttgttgctaagtctccacatctcctgcccttatacacattaatgaatatatagaagaaataagtattaacctttgatattaatcacattagaccttaggctaagtaagttctttccttaactaaaacccactacaccctcaccctataggaatgtaactttatctggtaccttcggaaggtggagtctttttttaagaataatcacccctggagaaataagtgtcctggttgactgactgctgtcacaaggagagggtcataaattgtcagcaggccccctgaccagaagatgatgtaacacccctaagacttctgtatgaagtcttttgtatgaagcatttgtatgaagcaaaagatgtatgaagcatcttttctatgaagacatttgtatgaagcacctgactttgataaaagtcaggactgctgaccccacgtgacttttgcataacatctcagtgtataaaagtagaccatggaaaataaagaattgggatcagtttcttgaaatactggtctccccatgtcgttctctctctcaaactctggctgagtttccatctggagcgcggagcccgccatgcttactaattatgcttgggcttctaagatccgaccggggaggcctcagtgtctcctctccttcgggagaacggaaggacgcctgcggcctatgtaagtggtgcaaacttcgtgtcttgaagttttattggtctcctgtgtaaaccaagctactcagtctcttttctccactgaattttcctcctgagctatcctcattctattactctttacatctctaattaatatctaattgaagctattgtatcctgatcctcgccgacgccatccccgcttcgaactccctggatcagccagggctggacctcgggcagaggtcccatgctcaaaaaggccaggtttactgtgaataagtgtgactttgcccctccctacagtctcctggaatacttggtggtaagagtgggtaggggtgcaagtgttgaggacaagcagaatcatgagccagtgaaattcatgccacttctgttaatatgacctcattcacgcactaggaaattgaatcctcaaatcagtgttcacaaggtattcatgagaatcatttagttaaagagtattaatcttgcaaaggcctaatgctgcagagacctaaaattaaccatactgagacctaactgtgtaagaaaattaggggaacctagtcaaacataattgtgctgaaaagcagaaaatgtgtgaacttggttctttctcttcaatgtatatgcacaggaaatatgacatttctgccctaagttgaatggcaatttgcctatgtaatgtggttttctggtgatggtgggggtgcctacatttttaacta

SEQ ID NO: 54028 - DNA, 3009 bp, Bovine  19866880420740
  misc_feature (1)..(1): n is a, c, g, or t
ngcaatgcttattatactcagatttctcgacacttcccttggagaaaattctcccctctcaacacccttaccactacccttttcaagtgcaaaacccaaaggctagctcctattaaattctaagtcaatgttgctcttgtcagtcaatcagtcatgtccgactctttgtgaccacgtggactgcagcacgccaggcctccctctgcctcaccatctcctgaagtttgcccaagatttttaagtggggggagggagacaacattttgtttaaagcaaaccagcacaaaaattttcttccataaatgaagtcataggaaaagaaagaaaactggaaaccaaccaatatagccctcccactcaatcaagatttttgtgaaaagtccatgacctgtaagcagtacacacatacccctggctctcttctgctgccagagaagcaaaaggtatgtgaggtttccttaagatatgatacctgctggccagagacaagaattaactatgaatagccaataaatattattttatgaactttaaggccccagggcgactttattttaccaatgaactagctctttaaacaggatagatgagtacatgagcacatcagagatgccatcctatggccgttaactgtctgtgcatctttctcggagataccaggtggcaaaataaactgcagccctgtaagatgaagccataaaagatgaaaattagtttcacgtcacaatgaactatgccctgttatattccacccctgcagaccaatagcatcctctgtctgtctctctctctcaccttcctctctgaatatcttttctctgtgtctccatctgtggaggaagaaggccggaacaatgggaagaattctttctcctttgtctctctttacctggtctctttaccccagtttctctccctcaagtgtctctcctccccctgtctcactttggtatttccatttgggttttcctgttttgcggggagtagtactgattttacattccaggaaatgagaagatacagctgggcaaggagctccctgggactgaatcactattgttcccagtggttttatctgtcttctttacaagtctccttgctgcccacaaaagtgccaagctcctgataaatgggacagcgaggtgtcacatttttcccctctaaatgcagagtaaactctcacaaccttgcttcactgaaaaatgaaactataactacatgcaggaggctccttaaagaattcctttctaggttcagcccgagtagtttccacatggctaatcaagagcttcagaggaaaaatatttattctcatgaaatgatgtcccacgagataactttgtttctacagctacctgttccaggaatcctagtgacatcactgacgttagaacccacacctgtaataagaagtatcttgagggggaaagatgagcagcccttcccaatgagctctgggtcctccagacctttcctttccatccccactggctggcacattttaaacaataaatgtgtattggtaatgatgaagcctatattttatggcctcaaatcctgccaatactggagtcctgatccatcctttatccttccagaattttattaattcttgaaaataatagaagttttcttacaggtttcaataagccaccactacccagaataagagcctccctctacaactatattatttcatgcccgtagttcctattgctccaaaccaggggctggcaaactatggctcaagggccatatccaccccaccacatatttttttaaatttcagtggccatcatgcctatttgctcatgtattgtctatagctgcttttgcagtccaatggcagggttgagtagttgccacagaggctatttgaaccatcactgaaacaatcagatatacctgctttaagcaacagaacatctgatgattataccaaaaattgtaccactcactgaatatttaccatgaaaagatgctaaatgatttatacagatatctcatttaattgtcacaaccaccttataagttataagcactttcattaccatcgttttaagaaagaaaccacatacatcatgtatctatatcaaattaccatgatatacacttgaaatatcctttgattttatatgtcaatataattatacctcaataaagttgaaggaaacaagctgggtatcttataagaagagccagagtcaaatctaaaaagacaggttagagagtccacacatagtcaccacttttccaaactgtctctagatttgaggatgctaatgctctggtaggcaagagattggacttcaggaggacacagtgcaaaacaaaacaaagaaggtttattttcatgaagaaagtaggaccaaagaatgagaaagtatttgcgttcatcaggacaagagctggagcagtagacttcaaacttgtacccacttcaaactttaaaccactttcatagatttccagcatgaaatccaggaaagaaagaacaactagctaggcactgaataaatgtttgatgaatggatgggtggataaacggatggatggatggatggaagaaaaccaactgatctcacagagtcaaagggagaactgaatgtctaagaactgagaaaagtaccacaataaattcaaaaaccaacctcaacaggagaatttagaaattttctcagcagaccactatcatcaacatgacagcccacgaaacattaaatttctgggtatttccatgccagatttcaaattccaaagagacaaaaatcttattaagtcatcctgactcaggtatacacctctactagagggtggctctcatccctggttgcactttagaatcacctggggagtttttcgagcatccaaattcctgagcatcacctaagatcaactgaaactgactctttgagggtgaagacttagtgaactcaatactctgttcagtgattatgaggcggcaatcatcttacaagaccagcggaagcagagcagagagcatctcag

SEQ ID NO: 54029 - DNA, 1491 bp, Bovine  19866880467285
  misc_feature (1)..(1): n is a, c, g, or t
ncttattaattattacaattttaacttggaagcaagccttattctctgctctggcttgttcttttgtttaggttaaaactttaaagtccccaatgtttctggtttgttcctctcaggagcaaattcacctgccatcccctgatgttgttctggtgacaattagcacttcaggccctgagccatccactagccaccaaccaaatggaccacctgcagaaggacaatcggcaaatgcctggtttctgtgtcactaattctctagcgccatgtttgtgattctctggtactgtgtgaatccagatctcctggaccccacagtgctatgtgctcttcactgccagaaccggaattaacgtctagctgtccaaaagtttccacttctcacccatcccctaccaaatacacacacgctcacacagaggtaacaggactctcttgccacctgctaggcactaaccaatagcttatgttagtttcaagtctttgttttattccctttaaggatgttttctccataagcagaggaatcctgcctcttcatcttcttcccttactgactcctggacaaaagctactaacttcctattgggaactggtgatagaaaagggcgggatgaggttgaagccaggctgttcaagcccaatccccaagcccagcaaagcatgcccacccagcccatcggctttcaagccaggactcaggggcttaatttgtacacaatgacagaggttaattaattaacagcttctgtcctggttgcccctagcaactggctttggctcataactaaatcccaagttagagatatttcttaaagagattttaacttatgctagaagaaaggagaaatttgttcagcatttaggacagaaaattaactggaggtaagagaaagcttttccattgattaacatccctaaatccacatcttctaacagtggtcctgcccttattactcaggtcacagtaagaaagctcctgattgcatgatgttctattgagttaaaggaacaagcatccactggcctttaaaccaatcaaaagcatctccttgcagggccttggaacaccagtatgaactgaagctaagggatctggagtggggatgacaaaggcttcataatacctggtggccaggtttagtcaccagcagtgtttgcctaacacacgccccaaccagccagcctccatcctctccattacggaaatcactcagtgccgcagcagaaattgtttgtgccttttccaccccattaatttctctgtatttaagaggaacagcatttccatctcttagattagattttgttcattaaaccctcatctcacttcccaacctgccaaattttcatcagtagagatctgggattcagaaccacaacccattaagcacaacatcttgaaatttacaattccattttacaaaaccctctaaagataatccagctcacatatagtagcctattaaagattaaatataaattagatgt

SEQ ID NO: 54030 - DNA, 747 bp, Bovine  19866880533463
  misc_feature (1)..(1): n is a, c, g, or t
natgattctgtttttacatgtcttcatggtttttagatggatggataaacactgtaggtggctttgggtactttatttgtatttttaagtctcaatttctcaatctgtaacatggttaaatagatctgtttggttaaacaagagagactctaaataccagtctggcactaaataaatactcaataaatagtagtagactatgttgttacaaagagaaacctgaggcataaagcttgaaatttgcaaaatagtagtctgaacaattttattgtggtttcagttttttaaactatgcccaaaatctgagaatagaaatcagtctgtttgaaaggaagaatgagagaatgcttctgaagagcttaaataatgaaaaatagctagataaaagatgacttgcatctgactccagttacaggttataactcatgttttgataatcccttgtttaatctttatggctatttgaaattgagttacattctacaacaaaattaagtagaattggttttaagtttctttaaaatcaatgggtgtaactgcatggattgatattttcaataaaaagtgaactgacattccattcatctcaaatattagaaatgtttttaatattgaaaaactacatgactatgattgatcactggtttatcgcttcttactagttcaaacatttagaaaaaattgttttaggtgcatagaaacaggttaatatttggcacagagtagcaaaacatgagtttactttaa

SEQ ID NO: 54031 - DNA, 1388 bp, Bovine  19866880534390
  misc_feature (1)..(1): n is a, c, g, or t
ntagcacagaagttacatcagaggaccctgaagtcctcttcccacaaggatgttgaaaatgaatgacatggagccctttttgagggcattcactgtaacaaaatctcataagttgtgtcatctttccagtgcagtgccataatcatgatggctgatctctattactgcagaaagttcaaccaattttatccatatcactaacaggatattcctgaatgcctctgttttggctacataaatgtgttcagcacttctgtccttaaatgataaaggactaggagttacattttcaacgaaaatgcccccatgaatatatgagtgagcatctcaaagcctcgaggactgtgaaactaacaattatgcttgaaaaactccctgtaggaaatgcgatggtttgctttgttctgcagttctcttgttcctgttgtggggctatgatcatccatgtttgaaactcaagatgaagtagaccttcatcttctattgaaaggcctgaccttcagtttcctgtgatcctttggttaaaagaaataaaaggaccttttctttccaataagattgtctagcaggcattgacaaccttttcaattcctctgtcaagctagggggggcatactggagtaagatatgtccctgctgagttacctttacctatgacctgacattttaagcatttcttgttccatcctctccccagaagtgtagaatctttgttactatcctattttcagagtagaggtagaatctgatagaaaaaaaaatggagaatagacatggatggaaagaagaggtaagagtagatgatggatcaagtggcagctggagacaggccaggcaggctttctttttcttacctgctacgatcttttccccagatttgacaaacccgggtggagaatttggtgtttatgcttctttattacattgtttttaaaaaatctattattctatggcagtgtaagtctcccagtttattttcctgataatgtcattctatggtactaaaaaatagtggttctccatcaccacttatttttgaaacacagatcttcatttttatgttatttttttggttaaagccatttactatttcctagtatctatctgagagaataagttcaagctctttaggtctctaacatgagatttatttaatttttttcttctgatcaggcctaacttaccttcttcttcctgttacttctcccagcatactctgtgctccagccacaatgattcataagcacacttgattaagagtcgagtttcatgctaagtcagagccagagttcctttccagttccttttcacctcggcagcagctcttcatttcttatatttaattcaaatccctttacttccaggccataactctgtcatttctttca

SEQ ID NO: 54032 - DNA, 1403 bp, Bovine  19866880543278
  misc_feature (1)..(1): n is a, c, g, or t
nccctcccgccccgccccctacaaaccaaaagcagtttgtttttggacaaaatggtgaaaaatggaaaaccacatcaatcagtctgttctctttgacccagttcctacctacttttcctaaggtctgttcctaaggctgtaaggtctatttctttgctaaaaacatttaaagatgcctatggtatgggggtggggagtgtggggaaggatgcaagccatgatattgtctttccctgggttttcatggagtttcagatgcactggggaacctggaactataacttaggggtaggaatattttgaaacctggggaccatggatatttttatgcttttttgtgttatgattggacaatagcagcagagtgagtttagccatgacaagccacatcagctcagctgtagtaacctttgtatagtagtatcagtttctgatgtttaaatgatgaaggatagaagtgtgtggaaggtaaaactctaacctgctcttgacttcaggggcagatgacagtggcatgaatttttactacttggaatttggcattggggtttgtttatagctaatgcagctttcctgttattaagacacacctttagattgctgttccaagagttctccaaaggctgttcacatgtattttgaagagctctttgagcatcaaatggctcacacgaaagaaggcttttcatcaactgaatgtgaaggggaacatgattcataggaaaaataaaatccccccatcggctttttgtgaggaaaaccacaaaggggagctctgggttggaaaattgtgttcagttaagcttattatggcacaaagactgtagggttcttatcttcctccctgtatttatgggatccttgaaaaaggtaggtgttttttttttttcccctagctctgaaaaatgtcttttggatttttggtgtattttagtggctgtgtcatttctgaaacaaatggttattgaccagaaattcattttctttgcagttagtgaacaaacaagcaaaagcaaagagggagaatccttcccccgaggccattttctgaactttgctaagtactggatcagctgggtatagtctatctcctggacaagtcaaaaccagggaaaaccaaaaaataagctgtgtgggagatgcttcccattttagtaggaggggagggaacatctggagtttagctgggagggaaagcaagctgatctggctccctgctgctggggtctgttggaaggaagctgtcagacagcaacatgatatattatcctctgcagacaaaacaatacatgtaaaaataaatagccctggatgttaagatcctataatgcatgttgacacatgaaagcagaaacatcacaaacaggttagtctgccttgctcccctgtctcctgtgatgata

SEQ ID NO: 54033 - DNA, 2874 bp, Bovine  19866880682075
  misc_feature (1)..(1): n is a, c, g, or t
nagaatcctgtggacagaggaccctggtaggctacagtccatagggttgcaaagagtcagaccaccattgaagcatctgagcacaactccccctttggtaaccataaatttgtttgggtctatttctgtttatttctttattatttatatgcaacttttccaggaatctgttgcttcaagggaagcctgatcattgactagggttttataactcactctagctgtgttaaaaggctcaatgaaagtttttgattttcatattgaactctgcagcaatttgtgggggatcaattatgttttatcctgtagagttccggctgagcttgtgactgagcttgcaaacctgggacttgggtaggaaataggagacactttttgtttggtggtggtgagagaagatatgatttgtctttataaccctccagtgagcttttcttatgaaagcttgctttgaatctttaggcttggatctgttctgtgatcattatagcttttcaatgtaataaaaagctgatatgtacttctctgttttgtaggcttctatgtgtttcagagttttaactctttatgactccatgataagtgagtaagcagtgggaagccgccatcactatttcttcctggagagtcgaaaagagaaaggtttatagtttatccagacaacttaggcctgtgttaaaaggcatggataatcttaatgcctaaataacatactgatagtttgctaaatatgtctagcaatttctcaagcctgtgaaagccaagtaatgtttaaaaaataggtttaatagtatttaacatcaaagaaacaaatccctataaattagaataaatattgaagatgagaggcagctactgactaaagagtgggagcacaatgatacaatcaaccacatttgttctttctgacgcccagtggttgagttgattaatccgcattctgtgacataaatgagatgtcagtctgcagcattaactcactttttatacaagttgtcccattattctgttattaggataagctaggtgaagtcacaatgacaaacagcccttacattttgatggcttatatgtaacaaaaatttacttttttgcccatgccacgtgatcgatgagaattgacaggagggctatgtttatctcaattatgcagaaacactcagaataatggtaattccaactcagtctgagcatctgtaattcccaggaagcataaatggagttctgcagagtatcaacttagtaattaaatgcttctgcctgcaagagacataccatttctactcacatttcattgcccaagttcagttcagttgctcagttgtgtccgactctttgcaacccccatggactgcagcatgccaggcttacctgttcatcaccaactccagaagcttgctcaaactcatgtccatcgagtcgatgatgccatccaactgtctcatcttctgtcatccccttctcctgccttgagtctttcccagcatcagggttttttccaatgagtcagttctttgcatcaggtggccaaagtattggagtttcagtttcagcatcagtcctaccaatgaatattcaggactgatttcctttaggattgactggtttgatctccttgcagtccaagggactctgtcaagagtcttctccaacaccacagttcaaaagcatcaattctttggtgctcaaagtgagtcgcatgtccacacccagttaaggggtcagagaaacacagtcccaccaaggctctgaaaagagtgaaaaaaacaagtgatacagctatgatgtagtagcacattgaattggtaagatattatctgtaatactttactttgctctttgcattttcaataaatgaaataacaggatgatatttccagtgataagtgattgatttttatttagaaggtcaagtaggttattctgaataccttcttttattatttctacgtggttatagtatatggagaccataaccatttaatttatgtcatgcccagaaaacttacttgaacattgaattaaattgttaattttatagtttccagagttagaattactctttgcttattaggtttcttctagaatttttaaaaatttgttcaattacttgggagtctctcatagaaaaattaaaaaaattgtcatgtcatacatgacaattagaaccttcgatctacaaaggctgtagcttgttaaatatgtccaatgtgagaggcacattactagctactttatctatgttatctcatttaatctccctatcaattctatgcaatagatattatggtctcttttataggtgtgaaaacagactcatagtagttaagcagttaatgtaggcacactgcatttatagagctggaatttgcccttctccaggggattgttccgacccaggggttgaacccaggtcttctgcactgtaggtggattctctactgtctgagccaccagggagcctgtatcttacctacctaatgctttatgaggattaaattattatttgcaaaatgctcagaacagtggtgagaacagagtaagtgttgtacaattgttttatgtgaatgaaatctgtggcttttggtcatgagagtacagaattggaaatgctgaacaatgaagaattcccaagacagtaggggcataaaaacaggaatatctcttttaggtggagggaagctctccagtttttgatggaatgaaactctaatcttcagttatattttggaggagaaggtataaaggatccatctattttttaggtagttgactggctgtgacttttctcatttatttatacaaactactgagttacctgataaaaacagaatggtgtttagtcactcagtcatgtctgactctttgtgaccc

SEQ ID NO: 54034 - DNA, 1852 bp, Bovine  19866880798810
  misc_feature (1)..(1): n is a, c, g, or t
naattgcttgcttattgctttccatttctcttcaaccactttgccctgctgcttctttttttccatttagatatcaccactataagtttcttcttctgcagatacttaatggagcactgtcaatataaaacttagaagatctcaagttgttttagttttttaagcaataagagctatggttgttaatactacagagaagtgaatgcaacagcatctttacaacttttttgcttcttagacaaaaaaagatgttcatgttaactgaatatcatcagcaatgttttcaaaagattgaaagcctactctttgtgagaaaggaatacacaaaaatatgtccaattcctcacaagtgagatctttacaaaaactggggaaagaaacattctttgaaacattcttttaatctcataatgtttacttcaccatctgtacagataagaaatttccctttattgttcatgaatgttgtgaacatacactgatttgtgcagtactggaaaatacaaacacaaaacattatatgctacttcttgtggaatggaagaaatactgaaccaaatttaaaatcctaaaagggacaccgaccacatcaaatgcaggagattgtaaaaatggctgcaatagttcccttccctgtctttgcctttggtaatcacatctcatgctgactgtgtgcttggccacttgacttgctttgaccaagaggacaatagcaaacatgatacaagcaggaactcaaaaacttgcgtctttctggaaagaacttgcaagttcaggaacttgcctttttctgctacttttagtaaattgcaactaccacaatataagaaagccaagtcagttccatcaccccatagacacctaggcaactggaagacgtgtgagagagaccatcttatacctcccagccaagccaagtctaccccaatgagaacaccacccaacttactcacagggtgtgagaaataatcaatatttcttgtttaagacattaggtttgaaggtgatttgttacaaagcaaaatctgagagagaaatctaatttcagaactagagcactagtataacagagtgtactagtataacagggtgtactagtataactagtaaaacaggcagcattggttttaagaccaggtagatagcaggacctggaaaagaagcagatacaatttcagacaatgctgaaaaatggcaagctaattgttagcagaggctgacaaagcaatgaagagcctgctccagcaggctggaaaatgacacccgtgttaggtgataaagaaacaattggcaaaactatcacttatggtaacttagaagatagaaaatgagcataatgaaactgtggaccttggcaagatgatttcctagcagaatgctgaaagtgtccactggctccatctagctgattctgagaaagtataggaagagagatgggctagaggaacaactgctcagtttgcaagcagaattagaagctacagagaggagccagaacttgctggattggatgataacattgtttaacgtttcagtttctatgggtggtaaaggattctcaaaataagaaacaacctcagaacaaagatcaaatcaaggtgaccctgaatgcctgtttgttaatacctttgaaatattttaggcagcaactggtaggctctctcagctgtacaaagtgctttcattcaagttattgtctcacggaagcaggatacagctcccatagaagagacagacctagctcagaatcgcaagtgagacttttattgcatggagtagatctgaatcagtcttagagaaacccacagacattttaggagttgttttgatgcaagtaatgtagctctttcat

SEQ ID NO: 54035 - DNA, 1230 bp, Bovine  19866880802564
  misc_feature (1)..(1): n is a, c, g, or t
nttttagaaataagagtgactcttctgggcagttagacacaagtccaggaaaactattcttttcctgacaaatggacagattcagttggtacacatcatttacctctagcctttcctctttcctttctatgggggcttccctggtggcttggtcataaagaacctgcctgccaatgcaggagacacaggagactcagattccatacctgggttgagaagatcccctagaggaggaaatggcaacccactccagtattcttgcctggagaatccaatggacagagcagcctggcaggctacagcccatggggtagcaaagagttggatacgactgagcacacacacgcttctcctttctactgctgcctagaaggaagtcatcatgtgaccatgaggacaagggccacatgctaaagatggaagagcaggggattagatgaagcctgaatcactggtgatttctttgagcatctggttccgccatggttggcctgcttctgatttctgcctctataagaaaaataaaccctaatttgtgaaggcaatcaagtcagattcctgctgcatacagcttaacacaatctgaacagagccttatcttagttactgaacaaacataactcagcctaagtgagtgagttgtctgaagattcctgtctttgaccttcaaaattgtgtgttccgtatcagagactaagggtttttttttccctagtgaaaagattcttatttattgctttacaatataactatatctctagctgtatatatctaatgtaattattttttgagccattatgcaaaaaattaaaaatatcctgaggatcatgacagatatttgtgtatgtttagttaatatttttttgtgtcctttgtctttggcattggctgtctgttttatgagaaaccgaaattaaaacttctaatatatgaggtgtcttttcctgagagactcaggaggaagacagtgtcatttgttgtcaggttggtgtctttttttttgttgttgtctttagagcatatagagtcgattattttctcctggtgccaggtttgaaaggggtgctgtcaaacagtaataacgtaatattgttttagataaattttgtatcaaagtaaaagcatgtgggagaaacatctttttcactttgttgatgggttgagcttgttttcattaaaaaaataaaaaatagtttgaaagctcttgatagtgtgcgttaaagggattaa

SEQ ID NO: 54036 - DNA, 907 bp, Bovine  19866880815015
  misc_feature (1)..(1): n is a, c, g, or t
naatggtgtgctccttatggctggggacattcttccttctccctgttttcctcctcctcctctttccgtcctcggccccttccttctttcctgatgcctcttcttatttccactgcagctcttgaacctagaggcccccagatgctcattgagaaacttccattaattctatcatataggagaaaattgctctcattgcctctatgcttagatataccccagcctgagtaggagggttggtaaaagggctgagtactgggacaaccaggtccatcctctctgaaggctgtggcctacactgtccagagtaagaaaagagaaacatcatttgccagactggatcttaggagattttgttgaccacatgacttcaatcaactctcagaagatggaggtagttcagagagagaagatttaagcaccaaacttacaatagctccccagatcctttccaaaagccaacaagtccatccttctcatgaaattgctggatgacactcgctgttcacactttgttatatatatgacaaaactgatccttggtcctttgaagtctaatcttgtttttaaagaatctgaaactatgatcagactccttggctccccaatgccaaatctaaaaaatatgaagttattgattttatgtatcaaataggaacactaatattcttttcttttcccttcttatccctgtttacagagggaatttaactgggctcaaggttttcacgcaaagttatttgatcgagggatgagaaggagcaaaggaaagccattaagggatatctgatcactccaagccaccttgcctaagttgttccctagatggggaagaatgggaagtgaatggcaagaacactctgggttcactgctattttattttacatggcatgtaatatcacatgc

SEQ ID NO: 54037 - DNA, 1284 bp, Bovine  19866880863528
  misc_feature (1)..(1): n is a, c, g, or t
nattcttaaaaatatattaaaatacagttgttaaattataaagtggtaggttacattaccataaaatgctgggttattctaactacctaggtgatcactgtttctaaaataactggagttaaattgagggaaaatttaaaatagagcagcaataatcatgaaataaaattaaattcttattatccaggctagatatccaagaataatgaaaatttgaagagaaaaggaaaggtttagattggtttgaacaactcataagaatgaaggaagtaaagactaagtctttttaataaaaatagagcaaattttccactggtactcaaacaataccagaaggtcattggtaaaatcctatcttctacatacatttcagagagaaatttttacatttactgggacaatttaaataatataaatggatataggcagataaagcagaaagtatatcagaaaaatttccaagtctgatattaaaaatgaaattaacacaatattacactgtctccatgcttcagactttccgttccatcttcagtattccttacccagtgttccttctgaggtccctgctatagtatttatcagaaaaatgtatccagatgaagaactttttaattttcctagaggaatgtttaactatagttttccactgcataagataagcatgaaagtatgttagcaaatacgatgggaaatgctaattagaacattaaggcaattttttcaatgcaaaattaacataaaaataagcattacaggtggtggaacattgaaagttcataaatcagactttgcacatttggagaaaaatgtcaaatatgtattattctcttatttcctaactatactaagtgtgttattaatttggctagaaatctaaactcattggtcaccaatgaataatcagaaacttggaaatactaaacaagaagtcccatggtaaagtggtttctaatttctattttcaatttctaaaatataatcagagatcctacataaaaatcagaatctgagtctgccttgtcctgttcaatgtacatggttaaattttcaggttcaactatccctgtgctagaaactgacaaaccgcacccccctcctgctctctccccacacacagactcagtggagtttaaaaattactttcaggggtttccctggtggttcagggatgaagaatccgcctgtcaattcaagagatatggtgggtttgatcactggtctgggaagatcccacatgcttcagagccatgtaccacaaatactgaggctgtgctctagagc

SEQ ID NO: 54038 - DNA, 1949 bp, Bovine  19866880966183
  misc_feature (1)..(1): n is a, c, g, or t
ntttcttaaccccacattagcctagctgtttttctgtcctggtgctcagaggttttttccttactgacaaggccttggcacgtcagattctacctcacagtataatactcctatgtgattgattgactgtgatgttaggtaaggaaaggatttcattccttgaccagaagactttgttcattacctgaaacctgaaatagatctggcatacatgtcaccttaagttcataggcttaccacataatctgtagtccaagggcccttttgaggggacactattaataattataccaggacaataggtgtaagcaggcactatattacaagccaaccagcacaccccattaatgaaggactgctgagtgaataaatgactaaatgcccttccttcattccctgttaatgtactgtgttgaagtttaggaaattcaaacaagtctagctctgggtcctgagaatgtttggctcatccagaatctcatcagtttaagcactttgcatctacttccaagtagggaacaatgggaagatcaaagtgttatggctccaaccttatacagtttcctaaaacggaggattctagtacttacgtagaacacagatttaaaagatcatgttttcaaacactttctgtccttggaatctgtgtagaggtgtctccatgactttgaagaaaaggttgatggcattttgctatgaaacacatgacaaggtctatccttcagataagctcctgcatctttgtgagagataatttttctaaacttgtgtatttttttgtagtatatataattcagcgataaaaggcaaaaggtcaacaatgaatgtgaagctccatcctcacaatctattcaaatctatgaatgtctttagactagacatttacaatgctctcctattgcctctgattggaagccatgatgggattgtatttttattcaaataaaaagacattgactttggaaaagatctatagtgaatcccttctggggttcccagaaatctgctgaattcaaatgcatttggatgctataaatgatactaatgtgagagaagaaggactatattcaggagaatagctctaagatgatcaacctgggggtaaaacaccacccaccacttttcatgtcatttataaaatgttaactttgctgaatttctgcatccaattgagaattaatcacctctttgaagcagaagtttcaccaaaaaatatactaccttcatgcaggataaagtgtttgatttttaaaaatagctctcagtattttttaacaggaggttgacctttaggtagttttcgattattttactctcatgttgtgtcaacagcctctgtctatacataaacagaaatattcttggccgttaaattttgtgttttctaaagcatgagatatattgagtatcctatctctttttaaaatcaaagtccaaatggaaagttgactattaagcagttttgtgtgtggtattactagtgagttattaagaaagggcatattgtaatgtgctttgagggcaggctcattccttgctaatgtacatttgagagctgacccataacagctcttgtatataagaaggattaagcatcagaggctactgtgttattaaatacataattttaatcattttcctcaagcatcttaagtgatgtgattgaaatacaaattagaagcttctaaattcaatcctatacttgagactgtggatgtatatacttaatatcgaatatttggaaacaatgggaaagacataaaagaaatggggggtatgttgaaagataggaaaatgagaaaatattacattatttcaaggaagaaagaatagccacttaaagtacattaattagtaatagtttgcctgggggtgaggtggagggagtggatgttgcttacactaacaaatactttgataatggactagaatgagcttgtggagtgagt

SEQ ID NO: 54039 - DNA, 1095 bp, Bovine  19866880971993
  misc_feature (1)..(1): n is a, c, g, or t
nccccaaaatctatgaataagtgtatctttctaagttattttccatgacacacattctttttctatctttacctgttgtagctgttaaagtttccaagtacaaatgaagtgaccctcatcaggcaataaacaaattctccagccgctatttccggtctgacagttggtgtgcttcactgagtactgtttagcctcgaaaccttcatcataagtgtcatttggttttaacttcgcaataaggtaattatagtgctgggcttattaaaaacagactccatcacaggagactttgacagatgttggtggaagttccggcttgacaggcaagggggatgagcaagtggatggcagagctaaagacattatattgcaaatgctgtttattttctgtcaactataaactatgcagtaaataacacattataaaagagatccagaaataacattaagctaaaatggaaccatcaattattctctcttctttagctttcagaagatttttttcctgttcactattggtacttttttcctttattcgttaattgctttttttccatgactcccctgttctgctccagtgcctataaatcactgtaaaaaagataaaatgttactattatgaaacaagtataaaaacagtttttaaataaatttgcttttgccatcaagccaaatttatctaacttttaagggaaagtttaaagtttctactgagaacatagtaaactctttggggcagagtgcatgtatttttagcactcacactattttaggcagtagacagagtccagaattgaaggagtcagaaattttgcagtgagttttgagatgtaactttcaaatatactatgagaaggaagttcaaggttttactctaagaagtgactttgaaacatattcgcctatggtagtgaatcatacaggattttggattagctggcagcaacagaaggatgataataaatggagcagataggaagaaggagaggaagaaaagagtatgtgaaaatttatgtctaacctaacttgattccccactggcagtcatgctcacatccaagacttaggaagttagtccagtttcccttgcatgag

SEQ ID NO: 54040 - DNA, 1104 bp, Bovine  19866881038721
  misc_feature (1)..(1): n is a, c, g, or t
natattcagagttcagacttttgaccctgctgccctgcggaggtttcaacctaacattttagttgtgaaagatcagtacacaaattgggctgtaaaccaagacatttccttataatttcttgaaaatgtctcatactagaaacaaagtcaaagataacagtatataaggcacttaggctaatcctcaggaaattcttaatcatctaaacaaatatattaaatagcaattactttcacccagccttctgaccttttgagaggaacaaaacttcctaacctcaaagctcagatctttcaactctgagggtgctcaatttttctcaaggatcaataacaaagatgctcctggtgaacaggtgagcatggtgccaaggatcaatcatataagagctatttcacagctctcatgaaactccaggaatatgtaagtttcagtttctgcaactaaagacattcaatgccagatcactggaaataaagccctctgtctacttgcgtttctctgttactctgcgtctcactaggtaataaaaatgtgttatactatcgagtgaaacatccaaacttactcccattttacaacaagcacctatttaactccactatttatacctgcctgctctacatttccctgtattctcatagcatcagcttcattgttgatctcctgtacttcttagtataaaaggagttttgtcttgttggacaaaaggagttttgtttgtggtggacattcttaaagtaattcttgatccttggtggtgcataataaacatttgatgaattcatttttttttctgtaggacatatttatttgcacactaaatgctagatgaacaaattaacatagactctcccctcattcattatccagtgctgcattaaaatatcaccacaaaatttagcagcttaaaataacgcacattttattatctcacattttctgcgggtcatggatctgagcattggcctcataggctttatagcccagggaggcatccagtcaaattttgttccattgcattctgataggcagtacctacacctttagatgcaagaggaagttcgtatgaacaggcgtaggtgtgtggactacacacacat

SEQ ID NO: 54041 - DNA, 1027 bp, Bovine  19866881153908
  misc_feature (1)..(1): n is a, c, g, or t
natatggcctttggcctgaaggcattcccaaccccagacttgcccacttgtttgattttgaagacagagaggtgctaattttaattagcattttttttcaaataaatttttgctgcttggcttaaggatccacccctgttgctggaaatctatgctttctttagagtctgtagagatcctgatgatgtttctaactcttccctttgaatggagagaagaggttctgtggcctacatggttttctctgaatagagaagctctcacaactgttttctcaagtcttctctggagggaaaggaaagcttgagggttttgattttagagctgttttttcccccaagggcctgcttgggaaggctattgctcctagttttcttgaattcctaggttgctggatggagaataatgcaatgaattcatgtaaacctgggtgcctggctctccaggcacttcttctataatgaattagctcctctcaacccaattcattggtaagaatgaatgattctgtcatatagattcctgaggccttacacttgtggcctttccagctcttacttcctgcatcactcaaagtccaacaaagagaatagaagccattctgtgcatttaaattaaatgaatttaatacaaggtatttgttattatcagtcaagggagagatgggtagtcaaggggaggacagtagatattcacggggttagaaacaaccagaagcttccctatcgttatgtggagaagcaaagggagaaggtgatggtattggagctcatggcttggactcacccatagctggctgtccagtatgagctgggatcaaggaaaaagcatagcttctgctggagatgctacttaagacagactgggaaggagtgggggaattgctgtgacttctcactttctcctgcctcccagtctccttttagtgctcctgttggtcaaatccagttggaagccagttgatgagacaggatgagaagcagcctgatacagggggcaggtccctctgcagcatagtagagcaggg

SEQ ID NO: 54042 - DNA, 999 bp, Bovine  19866881174113
  misc_feature (1)..(1): n is a, c, g, or t
nttgtaaagtaggtcatggaataacagtaaacttgaaactaggaaacctgggtcttagccctagtttttcactaactggtgccatggccttggacaattttaaatcatatttcttatatatcaaatgcaagtcagacaccctatgaagctctgggtttgggacaacgaacaagagtcattgtggaactgatgagacaaacaagtaaacaacaactataatctggtgaatcctttcaaacaaggtgcctagtagccctgtggcatcaggagaggcttcacagaggaggtgacaattaatctgagaggtaaagaacaagtcagatccaggcagtcccttcccctctctgaaccatggtttcaataagaataaagcaaagcaggttgctaaaggatccctacaaactcttttggctgtgatagtgtgtgatccaatttttttatgacagaacagagctgggaaaaaaccttgaaatgctattcataagaaaagataaatgcgtgcttaaattgcagaggtgggtggggaatgagaaaaagaaacggtagtgctcaaaaagcacaagagaaagagtcagagacagcatgctcaagtgagagcatattttctagggcataaaggatttctgtttatttttaacataatacaccaaaaaataaatacaattatcccaatttctgccccccagttttcagcattgtgcagcctttatttaatgatacatcaaaacacattctctgccaatccctccgttgctaaggaacaggcagtcaagagcctaagctcagagaccaaagccatcattaaaaggctttgtgcattgctatcagtaaaatgttaattttataagcctgactgataccctcctgttagcaagttccaggaatgagaacccagatcctgctaatttggctagttctcctttattgggctcagtgtggcttacatcaaaataaataaataaaatactgtgagccaataactaggagcattttatcctg

SEQ ID NO: 54043 - DNA, 2212 bp, Bovine  19866881269242
  misc_feature (1)..(1): n is a, c, g, or t
ntaaagcatatagtacttcttaagtctctaagtgcaacgaaaataaaaatgaagaggatcaagactgcagaacagtaagaaggaagaatatctgtatattttattacattttttttaccagaaaatagctaatgcttgaaaatcactagtacaaaagtgtttgcttctcttacatgagattttccaatacaatattttccatttttcttcacatcccttatatgtagctaaaacagaagagagataaatatatggtcatcttaaatctgatattatctatttacttccaaaggtggtgtcatgtcagttatatcaatcaaattgtgttctgacactgtacactaaaaagagtatctgtaattacaccagatatctccaggggaaaaaaaaaaaaaaagatgctgcctgagaacaggtgtcaatcgagtatagaactaatttattccagtggatgtcataactatgataggtccaataactttccaatacagctatatgaccatgtttattttgtaagtcactgttactttcactgtagaattacattttgttttctgtgtctctaatgacttcactgttatcaaaaactgggtattagtaacatcaagatgtcagccactaatgcaataatcaaaacaacatgtatattctcagtctctctgcaaaactgcctttgtttctcctttagaactcaattcaagaaacattaattgaatgctagcaatttcaggattcttgcaaagtactataaggaatgtgatgttgaacaaatcgtgtgccttatcctccaatagccatctcttaaaagggtttgcaaagtgcataaagagctataaagtttaaggcggtcaggaatttaatacacatgagatattttgaactgtattctgatttagccattgttattaatacttagcattttctagctcttggagattatatcacaccaatgtcttggacccatattttgttttttttaatttttcctatttcaaataacatttgcaaatttgaaatttccaaagtgaatcataacttcaggggaagtgagctctcatgcagggcaggaaggcaaggcacatctttgaaaaaacatccttgacagtactgaagagtaaggaaaagaaagagattagagaaaagaagctgtttgtggtctggctacaaccagggcatctatcaaaggagagactcttaacctttactgctggggacctgttgtcaaaatatgctttaaatgcatgaaataaaatagtaaagaaaaaccagtggaatagaaatatcacagtttttattgtcatacagtaatacttgtgcttctttattagcacattaaattacaaggggtagcagtgtatctaataacaccaataatttcaaagtagtgttgactgtaaatgattttgaaatatctgcaacagtatggcataaaaacacccgtgatttctattaatgacaaagtcacaggtgctgctaatagagtgtctgttgccttcaacatataattgaaggacatactaaatttcacaggttatattttactgatcataaaatatactgctcttcttcctaccctctgtcactggcctgtggtacagacctaagtcctaccaatgctcagcgtcattcagcaatttaatttcccagtgcctcacaaaagcaacatcttatcaacctcacacattttgcatagaagcataaatctcattatgcccttcaaacttccctgtcactggtacaactgggctcataataatctgaactcggataaatagttctatttacccagtcttgggtctgataaaaggaccaccattacctgtcactaaaaataaaaaataaaaaaataatcaacaacaacaacaaaaatcctacaatactaaacgttattgcagtctgtcaggaacacacaaaatacaggacagagcacctagacaactctataaagacatacaatcaagcttagatgtttgcagtcaagacattatcaagaaatcaattggttaacaactgacagcaacaagaaaaacaagttgaggaaactccctgagttctgttattctaggactaggctgtcaaagctggtgctaaaaggaaaattaccttgaaaactgtgtcaacaaaggcagaacatctgttgggatgcaggtagaggcctggcttcatcaggggttcaaataaaagcaaggcatgccatttgattcacgtgcta

SEQ ID NO: 54044 - DNA, 2160 bp, Bovine  19866881350565
  misc_feature (1)..(1): n is a, c, g, or t
ntgaatattttttcagtgaagtcttgtaagttggggacagtgctcttaaatcttcttggctgagttgccatccattgaattgctgggctgagataggatcaaagtcattttttatacctaaaaaagttaagtttttattaaaaaaacagactcagtccagagagtatcttcagtcattgaaagggaaggtcactatatatttttcattcttgtaaattatcagctgaagtatttggaacagttctagagaagaagaaagtcagatttcttgctatgagaaattacagctcatgctaaaatactctcatgatttgtgtttttaatcagtttattgttattatagttaatacacctactatctctgaggagtaggttaaaattattaaccctactttacaaagtgtggaatcgagacacactcatgttaagtggggtcgcaagctcccacagtaactcactgactcagggaggattagtctggtgttcatgggctgtatttagtccatgaagtctttgatttacttgtaatgaattacactgttgcaccctctgttcctatttggaaaagaagtactgacatttgaccatcttccttttttttttttttttccttctgagccattgaagataaacttatggtggtaaaatcctttgtaaaaatctttcgtaaaatgtgcatattttgtggttgtaactttcagtttcattttaatgttaaagaccttagacaaatctgaaaattaaatttaagccataggtacatttcattgcttggcttctcagtggtaaagaatccacctgcagtgcaggagacgcaggagatactggttccatccctggcttggaaagacccctggaataggaaatagcaacccattccagtattcttgcctggaaaatcctgtggacagaggagccttgtgggctacagtccatggcattgcaaaagagtcagacatgactgagcaacaaagcatgcatatttaattgctattcttttcatttctatatatttggatgcagttaatcaacaaatatttattgagcacttacagattaaaatttgtgttgagtgattgtcagccacagactttcctagtaagtgttgtgatatttttctctcaggtgagatattgacagtacttgtagcaaattttgggtcacaactcagctttcctcagatggtactggatgacttagataagatcatggtataaattttcagcattggggtgcttaagagtgattagttcattctcataccatattgctgctttcttctctcaccgcacacttggaggcacaccttacacttcaggtacaatttgttctgcttgatcctttacattccaagctccagccatctggagaagtaccttgaagacactctactgtcttctgtacatgagtttccttaatcaggttacaatactttacctccctttgcaccctctgtcccatgtcccaggctgactccctagctcttaactccagttttcaaatcttagcttaagtactaagatttaaagatcagatcctgcacagtataaacaaaatttaaatttgtggtctatttcacaatcctaaacagaatcttcccttttctttctaagcagtcctctatggaattatccttagaaacaattaaccccaaatcctttctccagttcagttcagttgctcagttgtgtccaactctttgcgaccccatggactgcagcatgccaggcttgtctgtccatcaccaactcctggagcttgcttaaactcctgtcaattgagttggtgatgccatccaaccatctcatcttctgtcatccccttctcctcctgccttcaatctttcccagcatcagggtcttttcagatgagtcagttctttgcatcaggtggccaaggtattggagcttcagcttcagtaacagtccttccaatgaacagtcggaactgatttcctttaggattgactggtttgatttcctttcagtccaaggcactctgaagagtcttctccaataccacagttcaaaagcatcaattcttcagtgatcaggtttgtttatggttgaattctcacatccatacatgaccactggaaaagccatagttttgactagatggacctttgtcggcagactaatgtctctgctttttaatacg

SEQ ID NO: 54045 - DNA, 1976 bp, Bovine  19866881571437
  misc_feature (1)..(1): n is a, c, g, or t
ngagggaaaagggttcaggatggggaacacgtgtatgcctatggcagattcatttcgatatatggcagaaccaatacaatattgtaaagtttaaaaataaaataaaaaatacctaaataaataaaaagtggtccacatcaaaaagaaaaaaaaaatcttaaaaaaaaaaacaaaacttaaaaaagactagggtggacaaccagggatgggaaagggagagggtgaatctgggaagtcaagaacaatttttttctttttcataaccttgcctggtatctacctagacatgggacaggagggaatgacatcatccatggtagcattcacctagatttcactttctgaagagaaatgggtctcttgaatttctcctggctctcaggggacaaagggtgaaagaggctctgtcttcctttgaccagtcctcaattgagccttatttgccaggaaaaggggggcccagctctttctgacaaagttgaccaagaaaggtatttactggcaaataactgttttcagctccctaaaagccaccacaaggctccacaggtacctggtaagaatgtacttgattcaagaggtgcaataacagaatcaaaagaggtaaagtaggcagtcctacaggactcactttgatgaagagcatatctgcaggtcttatttcattttaaaacatccttgaagaaatttgctatgtactctataatggttctaaatgaaaaccattatattctatatttcattacaggaaatataatcataaattgtatccagattatacttatatattttaacattcagaggattgatgtggcaagagaggcaaaaaaaaaaaagaacaagcaagtatatatatataaactagataaccaatgaggacctactgtatagcacaaggaacaatattcaatatcttataataacctataatggaagagaaagtaaaaaaagaatgtgtatgtatataactgaatcacgttgctgaacatctgaaactaaaacactgtaaatcagctatatttcagtaaaaaaaattttttaataaaaattacattaaaaaagaatacataactctacctggtgagtaaaataattaaaacaatattctcacaaacagtaaaggaaagtggaagggacttaattgtgctatttttgtattaattttttattttaaaggtaagattttacacatagagagatgacattatacgtaaatataataatttcttctttacccatacataagaatttgcctgggtttttttttttttttttttcatactctatagagttgtacttggtttgcatttattcctgggacccaagagatacaccacagtgactgcagaaattatttatctcatgtatttgttaggtttgaatattcatctattcttgaatagcagcctgattgtgacattgaaatctcgcataatttttttaaagatgctgcttaataactaagcttaatgtgcattcaaaacagcctctgagcggccacagtcccttcagtcctaccgagcttcccactccagtgtaagtcaagcgacagcattagccctctacctctcggcccatttgtgttaagctcagactaaactctttctcgggctgggaaacacatcagtcgggccatttttcacctctcaaactaaactggcaagaaaacaggaaagagaatttatgagatgcctattgtgtgcctagcattgcactggatcagtggtttttaaactctttttcattactttttcattactattccccctaaggaacattttttcagtgacaaagaatctgccagcaatgcaggagatgaggtttccatccttgggtagggaagatcccctgcagaaagaaatggcaacctactccagtattcttgccttggaaatcccacggacaaaagaacctggcaggctacagcccacggggttgcaaagagtcggacttaggactaaacaacaacaagcagc

SEQ ID NO: 54046 - DNA, 856 bp, Bovine  19866881794657
  misc_feature (1)..(1): n is a, c, g, or t
naaccaatcatttgccaacccagaattaaagatatagcatatgtcttagtgtggtatcagtcttctgagagcaaaagaaggcttcaaaactctatactttgcagcttgtaatagcttttagtataaaaacaggggctttgaagctgctgtaaaggttagaaatgagaagacctccttgaacgatcttaagatcttgtaagaaatcacttggctgtgtcacttctatcaataaatgaccttccagtgagcatggttaaaatacagcatcaaactctaaaagctagaaggcactggcttaataaagatcgtgtttggaagtacttttgtcaggaaagggtctcaatttttttcaccagtcaaatgtatatcgaacccagtttccaaagacttctttgagctctacaattcttataatattaaagacttggagatctaagctatttctactgccagtccccccagtggatgaggggacagaaattattagaaatgcctgtcttaaatttaccagttagggatttaaaaatgctttctcaaatgaattcaacaatcacttattactaatggggatatcactagtaatcttactagtggggatattactagtgatattactagcaatggggatattactagtgtcatctgacttttgtcctagagatattcactattgaggagggaggcaagcatttacataatgcaagccgagctgtgataactgatctatagtgatttaaaatgggaaaatgtgggaaaagtgagacagtgattaattcttggtggtggatggctttgagaagtaaccctttggcagaacttttgaaaataaggagtttgccttttggaaaatgaatat

SEQ ID NO: 54047 - DNA, 952 bp, Bovine  19866881971525
  misc_feature (1)..(1): n is a, c, g, or t
nacgagattatgaaacttttagagaccaaggaacacactgatgaaggttaaagaggtaacatattaaatctacagtaaatgaaaatttaactccaaacgacaagcagtatttactgaacccatagactctagcttttcataatcatgttcagagttattaatactggattgccactgctgtacttgtaaaattatcacttaactgtaatttcactgctcatgatgatgtaattgctgagaagccatgtggttggtaattatgcaatgcagtgtatggaactgaattaatgccctgaaatctattcattgtttgatatttttccttttaattaattccactgccggatgttcactttatggtctagataaaataaaatacagcactcatattccctcacctagccctggagagtggaggcatgtgagaatggaggaggagatgatataagggactccagattattctgagttccaggggagcaaacactgaagtcctgataccattggttgtttctccatttcaattatctacaagccatcagcactatatgtggctgccagttaacatacatttaacatgtgtatatgtgtgtatcaggcttccctggtgactggcttagtggtaaagaatctgcctgcaatgcaggagaccagggttcgatccctgggtcaggaagatctcctagagaaggaaatggcaacccactctagtattcttttctggagaatcccatggacaaaggaccctggtgggcttcagtgcatagagtcacaaagagtcggacacgcctgagaaactaacacttcacttcactttacttatgcatatctattcatctatttaaaggtacattggctgttaccagcttatttgacagattctaaatgtattctcattagaatccatataaagcacagctagaaaggaaaattttaaatgtttagaaaaata

SEQ ID NO: 54048 - DNA, 831 bp, Bovine  19866882078894
  misc_feature (1)..(1): n is a, c, g, or t
ntgcagaatgactcattcagagcattcacattttttctgtggagtctgaagaaactgttatgaaaatgttaagtgcataagaagtgaatgtcacttaaagttagaattctctcatgtttacacactgcagtaataacagcctcttgtccatgttccagatctagttcatcacaaagaaagttggcctaaggatttgggtaatgtatggtccttcaaccagggaggcttctagttgtaatcctttcttaagaagtttttcccacacaaaaagttatctcactactatgaatctgtttcatcttttgaaactgaatggaatatcaacttatctctcataaatataaggatgaataataataataaattatttagctagaatatagatgaactatagtgtgggcttccctggaggctcagacagtaaaaaacctgcctgcaatgcaggagacccaggttcaatcccagggtcaggaagatcccctggagaagggaatggggttacccactccagtattcttgccagaagtctatgaacagggaagtccatggggttgcaaagagtcagacacgactgagctaactaagctcagcactttcacttttgatgataaagtgtattttgttagcacaataaaaacataatagaacaggaaataataaaatagtaatgtagaatcggttcagttcagtcgctcagtcatgtccgactctttgtgaccccatgaatcgcagcatgccaggcctccctgtccatcatcaactcccggagttcactcaaactcacgtccatcaagtcagtgatgccatccagccatctcatcctctgtcgtc

SEQ ID NO: 54049 - DNA, 1361 bp, Bovine  19866880360688
  misc_feature (1)..(1): n is a, c, g, or t
nctagcttggatataatactgtctatcctatggagactaactttttatttggtctcctcgctggcactgttagaagccagtaacatccagtgacttgattaaggtcatttcctgggctgagacagcttaggctgtctagatcctgagcagctttcaaaatgactttccttcaatcctagatagcacttgtctcgccccacttcaagtgcaatcagacattgcatatacggaagtagctgaaatagaaatctgtaggaaagtataaaactagacagattagtccacatgcacatgttccctttggttgttgataccattatattcaaaggagaccctaagcaaaattgttaaatagaaaagataatttacagatatggccatgccttaaatgctgagtactttttttttttttctgacttctatgtgtcccaacaaatgttgttttttccctgtagttttgctttaagtatgtgtgtgtgctcagtcgtgtctgactctttacgaccctatggactgtagcccaccagggtcctgtacctatgtgattctccaggcacgaatactggaatggattgctgttttctcctgcagggaatcatcctgacccaggatcgaacctgcatttttggtgtctcttacgttgcaggcaggttctttaccactgagccacctgggaagtctactttaagtatgccatagactaactaatgtcttaatttatcaacagatttgataataaggagtgttttctgagcacttatattgtgccagatactagcattgaagataagattaatgagccaaagcagatgtaatctccattttacagaccttaacagtcattaaggagttaatcgtgctcatgaaactatgaaagcaaacagagatctgaaggaaaggaatctggttttatgaacacatttaaccatggcaatgaccagatttttgagggtatggcaatcagagaagtgatcctagagatgtgaaaggtgaataagaattacccagatggaagctgtagcttgtgaggagagaattcctctgagagaggacagcaagtgcaaaggcccagtggtgagcctttgaggtgcatctttgaggaactgaaagcaggacattgtgattagagctcagagaacaaggcaggcagtggtttgggatgaggtgagagagatggataaagctaggaatctgaggacaggtggactatccatggagagggatcatgggaattgtctaaagcactttaaataggactatgacacaatccgatttttaattttaaaagaaacattcatagtgaaagaagtatagagtgtgctctcagaattaggaattatattcattttagaaatttgcag

SEQ ID NO: 54050 - DNA, 1712 bp, Bovine  19866880439171
  misc_feature (1)..(1): n is a, c, g, or t
ncaaagtctgtcttaattgggtgatggtcagtattgtgttctattcagaccttcaactgattggatgagacccacccaaacaaggaagagcaatctgctttactcatgctaccgatttaaatgctaatctcatccaaaacacatttataaagacacccagaataatgtttgagcaaataaatttctgagcactccctggcctagtgaagctaacacctaaaattaaccatcacacttcccgtacatcatttgaagaccattcattattcctgtcaatgtataattcttcaacctaaataccctagacctccagttattcctcttacaactgagtgtcagatacactagctcccaggttaccctcctgtgacttgcgctatgccttgccccaccctccctcatccccacagtcctatcccaaaggacagagctatttttccttctccatttctccaaggatgaccagacctcacttaccttttcagctttattctcctaaggcactcaggagaagttattcctgggtgtgcacacaaaatgaagaactccttcagcctccaagaatcaccatttatttgtgatattattggttgaatgcatgtattaatttatttgtgtttttcaatacacacttgagatagtttatcagactaggggaaatggcagtgtggggcttgggggtttcactgctggcttgttcagagtatagaagattagaatattaaatcctcgttgtatcaggaacaacagctctgagctgattccaagcattatgaaaaccattgaactatgtttctgaaagtcatcaaaaaaactaatatttgaaaagaaaactcaaactttgcaaatggtatagtgaaaggttctttatcctttgattaaataattataagaaatcaactttagtccatttataatttttcatgtcaattacttgcagaggcattgtttttacttagataacagtttataaggaaacctgagaaaaatcctgataatgtccatagcactcttgacatttctttgttagctgtaataaaactttgtgggtttagagtatgctgtggttttttttttttttcctgttcccatgccgttttttctgcctggagcatcctctcatgcttggcgtgccaactgggcttcagctcaacggtgtctatttctctgccttctgcaagccaactaaggaagaattttgaggcaataaagctccctgtgcattcttttattatctcacttgtcacattgtacgttgttctgttttcacatctgtctttctgtttgcaccaacaccttggaaaacatcacacagaagcacatacttttgtatactcctggcattagagattcagtggtgagcagcacagactagctcctgccctcatggagcttccagcctcatgtaaatttaagccgtattgtctttgtaaataccaatgcttatgaaatcaacaaataaaaacggacccccccactagactcctcaagaataaggacagtgtcttatggatttgtttttgtttgttttgcatttgccaaaacttagcatagtaaacaacacaaaccaagcattcagtaattatgtgttgagttagtgaaggaatgattaatttaggtaatttcgtttttgactttcaactttatatgagcaagtagcttttcagaaaaaaactcatttaaaggtttatgttaatttcttttcataaatg

SEQ ID NO: 54051 - DNA, 3076 bp, Bovine  19866880451916
  misc_feature (1)..(1): n is a, c, g, or t
ncagtagaagatgaagggcaagctgcaattttactcatgcctgacattgatggaatccttgttcacatctttgtaagtctgcaacttgaagctttgcatgtaggggacttactgtattccataaccaagagagatgatatggcttagaccaagtcaggaggcaaaggagacattgggaaatggtcaatagcccccattttcagggggaaagaaccatcagtgtttcctgttggattgaatgtggggtattggaggaaagaggagccaaggatgatgccaaggtctggagccctcgaaattggaaagatggagtcgccatcaactgggatgtcagctgagacagaccattgaaagtgctatcagggtaaataaggggggtgctgtgatactgcatggatggcagggatggagaggaggagacagtcatttccactgggcagtcaaaaaagactgttgttattcagagtccaagaggatgagccctggatgataacaaggaatccgccatgccaagcattctagagaagagctttctacacagaacaacaagtgcagaggtctggagcaggaaagcaattggcaggctcaagggagaaatgcaacatcagggaaggaaagctatgacaaacctagacagcatattaaaaagcagagacaccactttgccaaaaaaggtctgtatagtcaagtccatggtttttccagtagtcatgtacagttatgagaaaagaccctgatgttgggaaagattgaaggcaaagcagaagtgggcagcagagaataagatgattagatagcatcaccgactcaatggacatgaatctgagcaaactccgagagatagtgaaggacaaaggagcttggcatgtgcagtccatggggtcacaaagagttggactcgacttggcagctgaataacaacacaagagacagtggttgggaaatatcattcaaagccaggataatggtgcaaaggagccgtcggggaaacttcaaaagtaagagaatgatgtgactgatagatattaaaggctcattcagttctatgaagaatagattatgattaggaaggagaaagccaggaaaccagctaagaggtgagtacagttttctgatcaagagaagatgggaacttggaagagaatgaacagtggaggaaataatttacagtcatgagtccacaatctgtgtgaaaagaagtcatttttttcattttcaaataacagaaagaaattttgccttcaggattccatttcctgagaaagaggaaaatgaaagcattcaacttaactcactctcttctcagttaccctgtctctttaaagtaaactgtgatgctggtacttctccccttctctttctctttgccttcctctagggtgatctgagctaagggagtttatggagcatctttgcatagcctgaaagagatacagtctgtggggagtatcctattcccagagcctttgccccaacagtgtacagtcagtctcacctggactcaagtggaggtcttgatttctgctgggtcctctgctgcctttttatgacctcagctgtcatgtccacatgatctacatcttactcaaccatattgtggggccctttctgtctgctagtctctttggcttttcctttggcctcttctcaagggaacacttccatctaaatcagtgttttttaaccccaccagacaaagcactcatttttattgaaccaatgttttaaaataattcctttaataatctaattttaaatatcatagataatagaatctacctacatacttgcgccttccctggtggttcagatggtaagaatctgcctgcagtgtgggagatgtgcattcaatccctgggtcaggaagatcccctgaaggagggactggccacccactccaggattcttgcctggagaatctcacagacaggggagcctggtgggctacagtcatggggttacaaagagtcagacacaactgagccactaacaaacatacacatacacacatctacacacacagtttaccaaactaacctaaagtgctcaaattgtaacgttgagatacaaaaataaattaatagtagaacactgtatattttaaagcgtaaaggctcagacctgacttcagtagataacataaagaagtagtcagatgcttgtgtctcttaaataccttgtttgaatacaagagaagtaagatcagaagccatccctttcaagaagaacttgaaagatcagaggtgttggtggatactagaatttaaaatagtgctagaataagtaagaatagccctgatttataaatatacatatgataagaagaagcaaaaataatacaccaagacaaatcgcagatttttggagtgaggaaaataacgaagtgtgattctcatcaatgagctagattttctttttcaatgttggatcaaaatacttctccataatataaaatagctcaaaataatctactttctatctcaaaagcatactatacatcaaggctactccgatttcaaaatgtagtggaatatttaaaagtcatgtagaagcaagacaattctctcattgcaaccatcaaataaatgcagtagagtctccacattcttgtgagaagcccagacacccccagggcattaataccacttctattgattctggttgagttcagttcagtcgctcagtcgcatccgactctttgcaaccccatggacggagacacgccagggttccctatccatcaccaactcctggagtttactcagactcgtgcccattgagtctgtgttgccatccaaccatctcattctctgtcatccccttcttcttcaatatttcccagcatcagggtcttttcaaatgagtcagctctttgcatcaggtggccaaagtaattggaatttcggcttcagcatcaatccttccaatgaatattcaggactgatttcctttaggatggactggttggatctccttgcagtccaagggactctcaagagtcttctccaacaccacagttcaaaagcatcaattcttcggcgctcagctttctttatagtccaactctcacatccat

SEQ ID NO: 54052 - DNA, 1021 bp, Bovine  19866880467598
  misc_feature (1)..(1): n is a, c, g, or t
ntgggaagttatttattctctctgtgctgtattagcatcaactgtacaagaggataataaatgcctacagcacaaggctgttgtggggattctgatcaacgcagtacctttctcctttctgacaatagagagccgaggaggcttaaagggagatccagtcaaaaatctaacacacagggacttccctggtggtccagtggctaagcctctgtgctcccaatgcaggggacccagactcaatccctcgccagggacctggatcccaaaatgctgcaggtaagagttctgtgtgccgcaactaagacccagcacagctaagtaagctttttaaaaaaatccaacagccaacataaatatacatgagccgtaatccaaacaggcttcccgatgactcaagcaggaaagaatctacctgcaatatacaggagacacagaagactcgggtttgatcccagggtcgagaagatcctctgttggagggcatggcaaatcactccagtattcttgcctggaaaatctcaaggacagaggagcctggtgggctacagtccatggggtcacaaagaatcagacatgactgagcatgtgatagatggataatccaaacaggtgaggcaaagagggacagagcagctaagaaaccaaagtgatgagaagaataaaggccagatacgaggacagatctgaacagaagggtgggagggtgggtggccctggctattctgtggggccccagtggtggctttctcagccttttccatggattgcagagtgcaagcagttaacatgctgacccagcgtgacactccatactctaaatcattcttcactttcacttacatctatgctctcagaagtttactggaagagtacaaaattatgccttctacttcaggaaaatgcacactagtaaaagcacacacaaaaatagaaagaaatcatttgttcctgagattgatgaactcaaggagcctgtttcttaaaagcaaagcaaaaaaaaaaaaaaaaaaactgccttaaa

SEQ ID NO: 54053 - DNA, 1611 bp, Bovine  19866880473633
  misc_feature (1)..(1): n is a, c, g, or t
ncttgggcttcccttgtggctcagctggcaaagaatccacctgcaatgtgagagatctgggttcgatccctgggttgggaagatcccctggagaagggaaaggctacctactccagtattctggactagagaattccatgggctgtatagcccacagggtcgcaaagagttggacacaactgggcgactttcattttcactttccaagggtctcaaattagcccgcgggaagaacagtaccatcaaaaagagtttgggtaggtcatggtacattcaaaataacactggacaggaggcaagggccaaataatttagggccttacgagtcatggtaaggagtttgaatttattctaagtacaaagggaaactcctaaaatgtttaaaagaaggccctgacataatcagattttaagaaaatgtcctgcctactgtgtgtagaatgaactgtagaaggccaaagtgagacgaatgggatgagtaagaagactatagccctcatccaacagaaataagatgacctggatgtatgcatggggagagttgtcaaataaaatacaggcaatcatactaaatttggctttcaaataaacaaagattcaatttttttataagtaccatgcaatatttgggacatagttaatcaaaaaagtatttattgttcatctgaaatccaaatttaactcagcatcctttatttttatttgtaaaatctggaaactctatgcatgcatgaaaggacaaatatctgcataggtaaacacagaataatacatactcaggaaatgagccaactgggtatttttctcaaatggaaaactacaaggttgtgcatgaatgatttctgtatgtgaaagaggcatgtgttcaaatatatattgcttatacaggagatcaattaagtgcctaatcaatcttgacatttatatctcccattcattagtttaaaatctccaactaacttcaggttatccctctagtatcttactgaaagtgaaaccatatgtaataaattgattctcattgttccctaagctgttttccatccccatcaactgggaaccccaaacttaaaaccctggcataggattcttgcatgacttttattttcaaatgtgaattaatagaatgtataagtcctgtcaattcttttgcatttctcttaagctaggctccccttgttgttgttcagtcactcagtgctgtcttactctttgtaaccccatgggctgtagcactccaggcttccctgtcctttaccatctcccagagcttgctcaaactcacgtcctttgggtaaatgatgccatccaatcatctaatcctttgtctccttagaagcatcaaagaaaagaggggattggaactgggcagaaccctgcaggcaccccccaagtatgaagtcccctccttctacctgccttttgcttatagaaaagctgaagtctcccaagcctccctggatcacaaaaaagcaagctcaagcagctaatgcttagatcaatagagccacagactcacgcaacaacctgattcccagtggctcagcaggaaaagaaacatgcctgcaatacaggagatacagggttcaatccctggctcggggaagatcc

SEQ ID NO: 54054 - DNA, 1224 bp, Bovine  19866880480311
  misc_feature (1)..(1): n is a, c, g, or t
nctcttgcagctgtgcctacagaatccaacctttgtactttaattaaaaatagttcatggtgtaagaataacatttactcacacccactttagattctagggacttcctcacatggtcttgctccttccttaaatattttaaagccttttctattgagtacacgaacaacactaattttagctccaattgttatattttgaaaaaagctaaaaaaaagtgttaagcctgactgttttcaaagagggtttctataacaagaaactaggactgttagtttgaaagtgattggtcttattaactggagagagaagtatggcctgatggaaaaggaaaaaggagcaagtaatgattatatcttacacttccatcctaggcttcccaaagtacttgaaaccaagtctcattatcatttctttaaatagatgaagcaagagagatagccagttaagtgcggcttcccaaggtcatactccagcttgccaacatagcgataaaaatccaatacacttgattagtgtccgctgcctactcaccctctgagcattgatttcacgcacgatgaggagaggagacgggcagggtgatcttctccgtctttccagccccgccatcttgctcagtggctccccgtttattcttcactgattgcatctgagcaagctttccttcacaccatttttgttcaggcaggattcttgccagttaagaggtcataatgacaagtgtattcctgcctgttctcctttttttttttttttttggagtagatatagttctatatatagttctaatccagtgctatactgtaggtccttgctcattattttatatacagtagcatatatattttaacctatttatttcacttgctgctgctgcttctaagtcactttagtcgtgtccgactctgtgcaaccccatggatggcagcccttatgtatctttaaatttggcaaagaaaagtttgttttattggaatatacttgctttgcaatgttatgttagtttctgctgtacagcaaagtgaatcagccacgcatgtacatatatcctctcttccctgaatttccttcccatttaggtcaccacagagcactgagcagagttccctgtgctgtgcggtcagttctcattagttatacataggagtggacatgccaatcccaatctcccaatctgtctccccctccctttggtatccatacatttgttctctgtgtctg

SEQ ID NO: 54055 - DNA, 1796 bp, Bovine  19866880512438
  misc_feature (1)..(1): n is a, c, g, or t
ncaaatgagtggaatcatagaatatgtactcctttgcatcttgctgattttctgcattatatatatttttggatttttctgggctgttttattttatttatttatttatagttgacttataatattaaattagtttcaggtatacagcatagtaattcagtatttttacaggttattctccattaaaatttattacaagatatattgtatagcatagggaattatagccattatcttacattacatctttgacattcatctgtgttgttacatatactgagtggcaattcttcatgaagatataatttgtctatccattcttctattgatgaatatttgagtttccagtctgacggctcttaatgaagttttagtgtatattcttatatgcatcttttgtggatatatgttcatatattcatatatcacatgttctttcaagagatatcttcatttctcttataacgcctaggaatggaatcactgaattgcaggggagacacatgtgagctcttaaagaaactaaccttttctaaaatggtttttttttttaccattttcatattcttagtagaagtgtgtgattcctagttgttccaagtctttactcacctctgtctgtcatttcagccattctcatggctgcgaagaggctgtcattatagttttctttttcataaattaatttgaattggagtacagctggcttacaatgctgtttctactgtacagtaaagtgagtcagctatgtgtctacattgatcccctcttctttggaattcctttccatttaggtcatcacaaagcatccagtggagctctctgagctatacactatgttctcatgagttgtctaacttacacataatatcagcactgtgtagccagtcccaatctcccagttcatctcaccccatcttcctcctcggtatccatacatttgttctcttcatctatgtatagtcttcgtttctgctgtttccctattgactggtgaagaaggattttgcatgtgcttgtcggccattcatacatctaactttgtgaagtgtctattcacgtctttcgtcaatgtttaatttgtttgtttttgttattaattattttaatgtaatttgaacacttacttatgttacaaattatttgtatatggacagcacatttattatgtatttaatccatttgtcaatgggaggaaatccctgccagagtggttttcttatcctcaaatagactcagtgaagtttcagtacctttgctgcagagtttcacaccaaaaccagagccaaagcaggtgttgctaccatctgagagtgataatcattcacagatgctacatatggtatctctaggaactcgaagtctacataatgtagttctctgcattcttacactttttgtgacttaatcatccccttcctacacttgttttaatttatctgttaaaggtgaaaaaaaatccctgtgagaatatgagagtaattaatttctatgaattgagtatttaaatcatatctttttttagatgagagagcgactgtctcttttttgtaggggccattacattctatgggagcttcccgggtggcactaggggtaaagaacccgcctgccagtgctggagacgtaagagacctgggttcaatccctgggctgggaaggtccccaggaggagggcatggcaacccactccaatgctctttcctggagaatcccatgaacagaggagcctggtgggctacagtccatagggtcacgcagagttggacatgaccgaagctacttagcacacatgc

SEQ ID NO: 54056 - DNA, 1920 bp, Bovine  19866880526836
  misc_feature (1)..(1): n is a, c, g, or t
naccgccatgagggagcaacaccaccaccatcatcaccatcactaacaccagctcaccaccgccgccaccactacaatcaccatcaccacctcctctgtcaccatcgctaccatcaaccgtctcgactactgttcctacgaccgcctccatcacccttaccatcatcacctctaccaataaatcatcaccattagctggtttcccactataatttctgaaccatgagttgctctttggatcagtaatttctgatagggctcatccagttgcaaaacatttctgtgccactttgtctcctgaagctcctttcattctctggcggtggtggtttagtcgctaagtcgagcctgactcttgcaacccatggactgtagcctcccaggctcctctgtccatgggattctccaggtgagaatacaggagtgagttgccgcttccttctcctttccttctctatttgtataataaacgataatcaatagacagatgtaggccagcacccagggcagaagtgcagaatgaaggctcggggcaaggggtggaggagcaagtaccaagtaacaaggctgcaacaatgacctggttttcaacacacactgatggatttgtgataggaacttataaaagtagcatgtgcagccagggctttatttttaatgtcccagcattgatcaaaaaaaagaaaaagtgggggggaggggaattcaactaagccaatgatggagaaaactaatttcatggtaaaataattccaaaatgtatttaaggtgcactggcaagaccattttcaaagaaatctgcattacaaaacatgcacgggaattgaagactccattcagataacctccagctgctaaggaaacactgttttcttttgctctttcccactgtttcctgtaaacaattttatgaaggggaaaagcttccttaccacatctgcccttgtcaaaagaaaggcacagcatggtgcaaatatgttgttttgtttcttccattagcaaatatttcttttctctcctaaaagacatgaataaacaagaagaaaacagtggtgctgaaattactcactagtctccttgaaggagatcaatatggaagagtaatcgaaaatggatgtttttaggtcttgtcaaagagaggagcttggtgaaggcagctcttcttgtgaattactgtattttacattcactgccccaagatccaggataaatattttatgtcttaaaaacatctaaaattctaaatgatcacttcatagcctctataaacagagctccataatatatgcacagtagatttgtctttttgtttaaatggtgacaccttgactcagcatgagtgtgttgggtagacttaaactttcagtgggaaaaaatcactcaaacacagttatggattagcatggattttactttcagatggattagcatggattttactttcagcgtccctattttccttgcagaaaaaagacatctgattaaccacatgatgggggtggggtggggtggtgtagtctattaaaattcaaatgaccacgcaaaatatattcagccaaatgaccacaaaaccaaataaattcttcatcagttcaatttctatgttcttactcacgcttttttcaatttaaagatgcagtttcttgctttctgtgctttctcataattcatgagggaacccattcaagatgcctagggcgtcacatcgtacattgtttgcatgcttgcttctaagtctgatttgtcgttttcttaaacttaaggcacgaagttttcgtttaggatggtgtgtagcaatttctgacattttgaagtataaacagtctctgagaaaagtcaacatttagatatacgtaaagaaaacagaagttttaatcattaggcagacacagacctgaaagtcaatataaaaaagcacag

SEQ ID NO: 54057 - DNA, 1215 bp, Bovine  19866880538210
  misc_feature (1)..(1): n is a, c, g, or t
ngaaaagcagtacgtcaaggctgtatattgtcaccctgcttatttaacttaaaggcggagtacatcatgagaaacgctgggctggatgaagcacgagctggaattaagattgcctggagaaatatcaataacctcagataaccgcagatgacaccacgcttatggcagaaagtgaagaagaactcaagagtctcttgatgaaagtgaaagaggagagtgaaaaagttggcttcaagttcaacatttagaaaactaagatcatggcatctggtcccatcacttcatggcaaataaatggggaaacagtagaaacagtggctgactttattttaggggggctccaaaatcactgcagatggtgactgcagccatgaaattaaaagacgcttcctccttggaagaaaagttatgagcaaaaacggtccttggctaatgttgaggggaaatttgcagagtgatcaggacagaatccagactgcagcgggctgaagagaagatgagaaagtataaacaaggggagacaactcttcaaacacttctgagaaccaggacagtggaagaggcagggcttcaggtggaggggacatgggctgggttgaaaaattattttttcctgttgttgtctaacaggaaagatgtgaggaataggtgttacaggtcacgtctctagaagaggaaatcttttgtgggaaacaatgaagataacaaagaagataaagacagcccactctgaatatgcgagtttagtcaaactaaactcttcttattataaaccaactgcttgggaggagattattttgggtggaaaaatgcattgccatactcaaatggagtgtctgaaaactaattactgttcgtaacttattcatccccaataccttaccaacatgatccttctgtaatagattcatatttcaaagtgcagaatggaaaaaaatgtgccagctagcaatgacagagagaccatagtcctaggtataaacgcagtgggaaacgtgaatatggggagatttttaacacgacttcatttacagggttaattttctttttataactctcattccccaagggtactgaatgtgtgcccagcaaatcactgaaaatgtgttttgctgactttgaagtatcttcaaatgtatgtagcatgtttgataaagacttcccttgtgaaattaattgtatttttaaatacagaaaaatattactatagaaaga

SEQ ID NO: 54058 - DNA, 2841 bp, Bovine  19866880568225
  misc_feature (1)..(1): n is a, c, g, or t
ncaagagtactggagtgggttgccatttccttctccagggtatcttcctgacccagggatcgaacctgggtctccctcattctagacagacgctttacccgtctgagctaccagggaagccccaaaaggactagagaaagtgctaaaaactgtcttaaaaagtctatccaaaaaaaaaaagagatttgtattcttttttttttttttttggtagcattcagttcagttcactgttgctcagtcatgttcgactctctgtgaccccatggatcgcagcaccctaggcatccctgcccatcaccaactcccagagcttgctcagactcatgtgcatcgagtcagtgatgccatccaaccacctcatcctctgtcgtccccttctcctccttcttggggagacccaaatacactgaataaatcaaatatctggcctagtgacccaatttagttctactaatgtttatctagtgcttattttatgcaaggtactctatgagattctgaaacacagtcacaaaattaattaaaagtgactgagtgtaagcaatatctggaggattggaaagtggctggcaaatcctcaaaaaaaaaaaaaaaaaaaaaagatgataaagggcaatgtgatgaactgcaaaaagatgaccagaaggagccaggggaatgaatgtcagctgcagtttgagctacaactttattaatgatctgaaagaaggcgtacattaatgaaaattccagatgatgttaaatagggaattgtcaaacacaccagtgaaaacagagaaagaatattatgtgcaaagtctaataatagcaagaaataaaggttaggcatacagaaaagctataactgcatggcattctacattaagaaccactgtattcgacataaagaacaaagattcaaaaaaataaataaaggctaattggattgagaatataccagaggtgagagagacaagtaaaataataaaatccaaggagaccaaggtgttatatatacagaaaatgaaggaagttggaaaaccaattgctaaccaaatggactaaaaatattttgcaatgttttgcatatagaaagtataaaccatttttaaaagcctcaaacaagcagtgaaacagaaggcaagactgaaataggttattggctggagcatctgataccatgtaggttctgtctccttcctctgtctttttctagttcagagtgcagggcagctccctacccctttgaaggcagagcctcttttggcaaactgctggctgaaatgatggaagagcactacttttttaagtcagtgaaggttctgtgttcaaaccacctctggacattgggattccagctcagattgggcattctatttattaccccagaggagagatgccctccccagggactctgtcattacctactgcaactagaaatcccctcttttcatctccttctctttcttagatatactaattttatctaagggtgtcctgggattagacagtgaaaggagacttcagatctcacttctcaagcacccaatgtgcaatctcatagatgatttatggtgcttgataaggcatggattactcacctacagatgaaaacttgcaatttggtattaagcaaatgtctggttcttttgctttctctccttcacacttatatcagatggaggaagtaacttccattactattactactcggtttcatagtttggttttaggttaaatagtacaaaatactgtttcagaaagcaagactagttcatttggcaataactatatgccagaccactggcaccccattagctgttttatgccccataacaattctatgacatgaagatcaccaactccatttttggaaagcacttcttttaataagacccagaaaaaacatgttgctcttccttgaatatgattatttttcatgtattggaccaggagtggttgattaaaactgtgattgtgggaaggtaccagtttcataaggttaccagataaaacttttcaacatttgagcctgttatattgtaaaaattgtgacaaaaagggatgaagtcatcgactctataacaacgaaaaggactattagattttatttagcataagtcaacagatagaaaaatatccaagcagtgggtgccctcctccttccaggagaagacatgttaaatatcagaaaaaagcacactgtctttataaatatttaaggcttttgccaagttatgtttaatctcacttctaagggtatctttctgttttatctatattttaggatacaaaatgatgccatagagacctgaatccaagttttagataaggctaacacaaatttggtaaatgaatataacattgggcttctgtattctttcagtaaatatttactaagcataaatcagaagtaatatatctcacttctgaacttatttactgaaagtatatctcagttatttaccttgtattgatgtccttgtcctttctactttatttaatcaataagtatttattgagtgggcccattctgtcaggccatgtgggactggttttgccttcaggaaattcatgatcagtggacaagacaaacaaggagatagacagttacaaaactggtgttctggagaggaaaatatacataaaggaactggccaagattagggaaagaaccattttcgagtataagagaaaacatcatttggcttgtcactcaggtctgggaattgtacttgttcccattaattaaactagataaactcaaaattcatcggttcctgaataaagtaatattacctgatcccacctgaaaaagaatagatgctagacttaaagaatctgtttccaagaaaatta

SEQ ID NO: 54059 - DNA, 876 bp, Bovine  19866880570659
  misc_feature (1)..(1): n is a, c, g, or t
ntgatcccatgaggatgatcccttcctacaggctctgctctcagctagaagtccgagttggagaggagtcaggtaaatccttggtgggaaggtactggcttatgagaactgaaagcattccctctccctggcaaatgtgcaaagggattcatttaatagcaaataaaaattttaagaaccaaagtagtatgtcgctgataaaattccaggggctgagggaagaagtagagaggaagggagatttttcaaccaggggttctcttgtgcctctgtaaagcatctctattcaggctgccactgattcaaaatatttctaccaccaagcttccctaaggagtacattcccttgggcttcatcttgaatagtttttggattggatggggtggacgtccaatgagaggtgtttgagtggtgatgcttcaagatttccctgtaacactacccatctcttggccgtttcactcttaataagaggcttcctcctggaggcagggagttgatagccaactctacccctctccttggcgttttttgagtccctgcagttctatgagaaggcaagggaagctataaatcaatagagattgagatttcacagtcttgcaattctcaatcccaatactgatgatgagttgcataaagtagcagaaaaatatgaagtcaaaagactggggctgtgagtacctgtcttgctaataaactagaatctttaggaaatctttcaacatcactgaatctccatgccaaactatcgaatgggattaatgagctattttacatacaagactgtgagatactagatgtaaaaatgagatgctagatataaaaatgttttgaaaagcatgaaatactatacaaaattagaaaattttaat

SEQ ID NO: 54060 - DNA, 931 bp, Bovine  19866880573821
  misc_feature (1)..(1): n is a, c, g, or t
ntcaattaagcaaattaacaaattaaagtcagtttgttatctactcagtgcatttttcttactttttctacattgtggtgtacccgtacaatgtataccactgtttcgtgtgttgcaaatgcacataaatgttcatataaatgcacactatgttttattggctttaatctctccagagtgctgtgaaggatgtaggagcttcccttctgaagttgtactgccttctgggaagaagccagtataatcctaagagagaaataaagaaatgaagagagaactttttctgaaatggaaaaatgagactgaaaaaaaaaatctgatgaaaagttattggaagagaggagacaaagagaaagcctaaaacagtatttcacaatgagatatcaaaagagttctagaatcataaaataggaattaaaggaatttaagatgaaaccattaaagagatctttaagaggcacaggaaaggaaagtaggataaagcagaaaagtaatggaaaatgctttatgtaacaaactactggttaatttgagatcacgttgaagggctgggagaaagacggtacctgccaggccaaggaatggagaggaggtacccacagccgggctgtgaacgcaccattggaattaaccaataagcccaaactggaaggttctgaacatctgcacagagagtttatgagtgccaataaaaagcggattgtgagtataactcaagagaaccaacatgtattgaaagctttaacggttagaattaggttcagctgtgtcagaaaccccacaataacagtgacttaacaagatggaccttggatgcaaaggcaggctgtgcagcactgatgcttgctccacagagttgtacgatgcttcccaggtatgctcgttactccaccagcccgaaggtggagccctctatcatggctcaagcatg

SEQ ID NO: 54061 - DNA, 2386 bp, Bovine  19866880604819
  misc_feature (1)..(1): n is a, c, g, or t
nctaaaaaaacgtttcctatgaatgtttaataagaaggaattattcacattttaagtggaaaagtttgaacctaaaattgtatacattcctctatttactgagtgtctgtaatgtgcaatgcatgattatatactaggcaatacacatatcttgggcttcctggtggctcagtggtaaagaatcctcctgccattgcaagagacccaggagacagagttgcgattcaacccctgcttcaggaagatcccctggaggaggacatggcaaccactccagtattctggcctagaaaattccatggatagaggagactggtaggctatagtccaaagggtcgcaaagagtcagacttgaacacacacacacacacacacaccttacaatctcggatgaaaacatctttgccataattgtgatattagtatatataatgctatgcctaacaaattcttagtccaaggatagaataaatgcactaaattctcctccactgtggaagaaagtcaattcagttcagttcagttcagtcacttagtcgtgtctgactctgtgaccccatggactacagcatgccagacctccctgtccatcataaactcccagagtttactgaaactcatgtccattggagtcggtgatgccatccagccatctcattctctgtcatcctcttctcctcccaccttcatctttcccagcatcaggatcttttcaatgagtcagttcttcgcatcagatggccaaaggattggagttgcagcttcaacatcagtccttccaatgaatattcaggactgatctcctttaggatggactggctggatctccttgcagtccaagggactctcaagagtcttctccaacaccacagttcaaaagcatcaattcttcggtgctctgctttctatatagtaatggtggagaaagataaaggaatagccactacagggtcactcagtaggggtggtcactagccataagagcctattgaagctgaaactcaaggtaaataaaattaaaaattcagtccctgagttgcactagccttatttcaagcattcaatagccatgccttctctctttcagtttcagcctcagcctttgcatctctagagtggaaagtttggattaaatgactgtaagatcactctggcactagcgttctgtgatttttttttttttcccaaggacttttcttgggtttggcaatactaccttggattctgtgagcagaggctctcctcccccgcaatctctctctctccatctagcaaaatgtacctctcatatattcaccttgtatgttggaaccaagtgcttgacaaagaatatggtaatgtattcaacaaaagctttgtgtactaaatatagcctcagagttttaaagagcatttttttttcttttatgagtgttggcagctgttttactatgaaataggtctcagaaagagatgaggacatattctattttgagataaaagcttcatctgagatgtggggatgacactgtaataaatgctattacagttaatgaaatcagggtagcacctgatttttatttgattgtatgaggcaaattcttccaaatttccatgtatacattctcagcataaactagcagtagagcctgttgccaatcaatccgaactgtaagttggtccctgttccatttttcttagccatcctgaggtagtaaggggggaaaaaaagcaagaaaaatagaggttaagatggtgaagattggaatctccctttctttcccccagtgtccacatgaaaggacaacaactaattatccagcaagaaacatttttgaacctcagtttacaaactaaaacaaatgcttaaaaaatcatataatgcaaaatttctgtttcaatccctttgaaaagtaaatgtgacaatatggtgttagtcatcttaaaagtgggaattttgaaaccttgaacgcagccaatttccaacattcggatgacatgtgctaattgtcttttgcttatttctacctcttaactaggaagattctttagcatatgtctattcccccctcctcctttcttcaggcagaaattcccttgggagggagttgcctgagaaaatcattaagtcgaagttttatgagcctaggtgggataacatttggaggtgactgattacatgattgtagctaattgttcatgggactcagagagtctctagcatctttaagaggaaatctttccacatgcaagccagcagaaatattgcagctttctgtaaggggtgtcacggagaaatatttcggaggtaaccttgcatcagcatcactcttttcattttctgatgaaaataccactgccccccatcccaggctttgtcactgaaatataatatatagctataagg

SEQ ID NO: 54062 - DNA, 1129 bp, Bovine  19866880608748
  misc_feature (1)..(1): n is a, c, g, or t
ntgggtaaaaaagggtatgaattcttttgtaactccagtaatttttttttttttgcctttcatgaaatgaaaggaatgtctaatagaaatgtcagctgatagattatcaaaaatcattttgaatgctaggtgactatttggtttttggcatttaactcaggagtttaaaaaattgagtgacattgctgtaataaaatccttccatttctatctacctatttatgtaaagaatgttctaggcacgtccatgaaaaatgaaaaacaaacctgatgtagaacattgtctaattctggcaataagttatattatccatggacccatggaataattgaaaaaacctcattttaattaattaatagttccatataaatgctctttgatataattaataaatatgtcaaaatataaaatatgttacattgtgtttatcaattgcatgtaatggtaatttaatgagaattcaatccagaagaaaaatgttatcacttacaaacttatggttccaggagattaaaaaaattaaatttaccaacatatttttttgtagagatgtatgataaggtgatcaataaaagactttcaagcataaaatatatcacatcagactgaaattttgctggcacagtagaacagaataataagttccaagactgaaaagaatgatatagcaatttctgatgttaaagaagagcttattcatgtatttttttaactggatgaaggtgggaataaaatcactagtgatttcacacattttaaacattggacatatttaaaagaatgaagtacctgttgtactttttaatgttgctacaaaatttacaaagcagaggcaattatatccattgccaatgatatctagtaccaaattagatggtaatttttggatgtcaacttaaaaatattagaaagatttttcaaaatcattttagcaggtacatgacaataaatgttttaggactactggcttaggatgaaaagagaaaggaggttagtccccagaagcgtcattattcaaaggtcttgctatcagtaccttcaccagcgtaacgaagaaaggaagcaaaaaaaggcttgctagatgtaggtttggtcgggttgtctctatgggactggaattaagccatt

SEQ ID NO: 54063 - DNA, 1430 bp, Bovine  19866880636156
  misc_feature (1)..(1): n is a, c, g, or t
nggttgttaaaacttaaccccatttttttttccagttttaaagaataactgtcttacaaaattgaacaaatcagaaagttttattggcagtgatattgtgttgcttaaactctggttgccttggttactcttgaatattaaaatactctgggcttttagatagtgaggactggtcttctacttattttgggcccatgattgtattaattaaacactctctagggctggggaagaggaaatttatgagctgtctagaagggaggatggctatggcagccagcagttcggttaatttctgagcccaaaagacaataacatcattgatatggaggatcattgtcgttgagacggatatgagtccttttctgaatgtttccggtgcacaaaggcacatctctgaccgattatttaaagttattattttagaatagagcagggagcacccagtggtcctcacccatgtctgttcatctgttctttaattatccttctccaccctcacccctttctcagagataacctgctgaaagtggcgatggtcacagatcacttctgaaaaggtagccgttcccacatgtgtatttcaggcctgttattgtgtctacgatggtgactggctgcagccttaccccagaatcagaatttcaaagctgaaatgaaacattaagtgtttgctgagctcagcccatgtttttcagatcaggtgaccgacgattagagaagtgcatttcagttctgaatttcagatttacagcatagtgtttttgctctcgttccagttgagactgcagacaatcctgccttttccatgtaaatcaaagtctcttatttaaataacaccactgtaggaaaattgtatggtagggttgggagttttagaagtctctcttggtagagttatgaaatcacagagtggaaaggaaccttgaacaaatatataatctttcactccagccctggattccaacagacttctcatacccacatgctctcttattcctttccaatgatgagctctcaaaatgtgtgggggaacgtccctggaggtccagtggttaagattccgtgtttttactgcagggggcatgggtttgatccctggttggggagctaagatcttatatgctgtgcggtgctgccaagagttaaaataaataaatacaacagcaattaaaaaaatgtgtgtggggtgcaatgtgagtatagcagggcttagaagcaagggaatctgcgtaaagaagcttgttgtgttcatttagcccatttttgttaacccacctagttagaattattgcttatagtattgctgaaagatgggagcatagctttgaggaagaattagaacttacttatgataaaaataaaacgacctgacttgtatgttagtctttccactcttattgttttatgtaatctgccacaaaatccat

SEQ ID NO: 54064 - DNA, 1306 bp, Bovine  19866880645683
  misc_feature (1)..(1): n is a, c, g, or t
nctctgggagttggcgatggacggggaagcctggcgtgctgaagtccatggggttgcaaagatctggacacaactgagcaactgaactgaactgacccttattttaaaaggcaaaataccttttaaaattttcaatttccaaattaatcaagatggttttacatctgtttgcattttaattttgttctagtttaaaatgtaacaaacatggtcctgttatccagccccgggtgtttgtctagaaaatgtggaaacaccttatcttagctttccaagcaatgatattactttaattcagatgctgcactttgaaattttagctaaatattgaagttcgaattctctgctcatgcttcattagtggtaattaggtaacacaaatgcatctctgatttatgcatgtctaaaaacgattctgaaaagccatcttgttcagggttgattgttcttgtgtacgattttgtcctgcgaggctatcttcttcaaacactctgatcaaggaggccacctttgagagataacactggcagactacatgtactcttcaaagtaacattatagaagcagttctagaaattgagaagacagatatttttgtgataatgagaggctgggactaaatttatagaaaacagatttacactaagacagtttttttttaagatacatttctaaattaatttctgacatttgggagtattttgacagtacttcatttgtataaagcgttatgtgtagcagcctcattgacttgtttttgtttagtctggtttttatgtgattgtttttacctctgttgatttggtgaaaaataatttaacttttttttttgttttttttttttaaggctctagctggcatgagaaaactctgaatccagccagggatttttgtatgccctaatttgtgcattgcaatgagcataaaatttgcatctagttttatttttcaatctctttactggtatttgtgtaatgcaaaattaaatgttgcagagcattaattaaccaaggagaactataatcatcaacagaatctatataggaaacctgtgaaattcgtagaggctcagaacttgagagtaaaatagccatgttttgaaacagtatcactgagtttgcgctgcaaccaaatgacacagttgagcagaagagacccaagtgttgaaggagacattttttcatattccagggaattgtaagtttccctttttcatctcaaaatattgaccaaaaatagagacagaaaaatgactgaacttaaggttaatattttgggggaaggctgccttaatatatagggccat

SEQ ID NO: 54065 - DNA, 1336 bp, Bovine  19866880661589
  misc_feature (1)..(1): n is a, c, g, or t
ncacgtgcgcgcgcatacacacgcacacacacatgtatttactgtcttaactttttaagtctgagttatattctagtgattttgtttccaaattttatctaactagtcccatttaatggatttctaggttattttcctgggccttcagaagatcccatactgtcactatgaaaaataaaagagtgagttcaaatgcctaggaagaggaaaccaatttttaacaaacttctgcttgaattcttgtttaccagttctttttgtctatcacttcttcctgctgaggttttaatcaaggttactaaccttttggtttgctcaggactgatgttttttctggcatacaggacttttcagttttaaaactgggagaatcccaagtgggggaaatgggatagttgatcaccctgtaacccctttaaaagatcaaatgaaaggaaaactaaccagttccaacaactgcaagtgacttcctcaaagtgacacaactgagtggctaagcacagccagtagtgaagaaaggagttgagaaatggtcctgctcatctcagcttagagttccttctgtggcctccaaaaaataaatatgcagtgtctcctctttttaacagcatattttttaattaaaaaaaaatcttaaaaaaaatttggccacacttcaaggcatgtgaggtcttagctccccaactagggatcaaacccatgccctctgctgcagaagctcagagtcttaacaactggaccaccagggaagtcctgcagtgtctgtctctaacacaaaaatgaaaggaagactttggattttcagaataataatctacttcttaccatccagagtgataaaccgctcaacctaaaagagtagtatccacacagggcttggattagctcctcacgaaacagcagagttcttctattatcacttgaagaaagtggccatcaagctggaacaaataggccaggcagagagagcctctgagaaagaagaggatgcgaattttacaatgtttggagtcagacaggctagaggcctggagccaattatgtcacggctctgaatctcagttttctcatctgcagggccttgtagacggtaggtgtttaatacatactggtccccattctctccctctccatagcggggatgacaaacattccacaaggagcaggcaagcaagttgtaacttaatgccgctccacacggtacctgtcccgggaagcaggcactgaacagaggctgcagagagtgtgtgaccctgccccccgcacacagacaggtggagagcaagctcactgaacgtcctagacaggcagatccagagacagagatagggccgat

SEQ ID NO: 54066 - DNA, 1178 bp, Bovine  19866880674779
  misc_feature (1)..(1): n is a, c, g, or t
naactaaatgcataagattagccactctatatatgtttctccatggtaacttttattttatctttcagagcttcacaattttacttattattgctgccatttttagagggaaaaaaagagagacaatggtgtcataaattagcaaactttgagattttcccaattagctaaaatttgtattagtctttttctgtttgttttgcctttaagaaaatgacaatctttggaaattacttaatggaagaaatgcctttatgtgtttgatatttacttctgtagctgtcactgtttgtatttttaaaaagatacacttacttatttaaacttagaggaattagcttctttagaatgctgggaattctttgtgcataactgattaagaaatctcatttacatgatggaagggccttagaaaaattttggtaacagcccaaagagaactgcagttccatttataatgagaaaggtgctatcaggttggtgagtgaggcttattgctttaagtaataatgtgctttctcttagacctatcatgtaaacaagatttttaagcattgcaaaacagaaaccacatagacatgctatactgcttaaatctgaggtgtatccaggagctgactatttgctctaagagtttacatatggctgaaactttccaggaattttggtcattagaccagtcattctcatcccccagtgctgaccagtgatgaatttgttttgttggtttgcatgttgtttttttctggttttgttgtgaattcatgtatttaaacatgtttgtagtttgttaaagactgatcatgtttccccatcattcttatcttaaaatcctactccccagtatgatagtattaaggggtgagaccaggcttccctagtggctcagtgccaacataggagacagaggttcaatccctggtccgggaagttcccacatgccttagagcaagtaatcctgtgcaccacagttgttgagcttgtgctccagaacccaggagcacagccactgagcccatgtgcagcaattactgaagcccaagtgccctagagctcctgctctgcaacaagagaagccaccgcaatgagaagcccacacactgcaacgaagagcaacccctgcgcaccgcaactagagaaaagcccagccagcgatgaagacccgacacagccaaaaa

SEQ ID NO: 54067 - DNA, 2688 bp, Bovine  19866880701948
  misc_feature (1)..(1): n is a, c, g, or t
nctcagccttctttatagtccaactctcatatccgtacataactactggaaaaatcatacctttgattatatgaacctttgttggcaaagtgatgtctctgctttttaatatgttatctaggtttgtcatagctcttcttccaaggagcaaacgtcttttaatttcaaggctgcagtcagcatctgcagtgattttggagcccaagaaaataaaatctgtcactgtttccactttttccccttttacttgctataaagtgatggcattggatgccatgatcttaatttttgaacgctgagcttttttactctcctctttcaccctcatctagaggctctttagttctgcttcactttctgccattagagtggtatcaccagcatatctgaggttgttgatatttctactggtaatcttgattcccggctgtgattcatccagcctggcatttcgcatgatatattctgcatataagttaaataagcaggacagctccatggcacaaactaaacaacactcagtcctatgccatggaacattgtaactagcctgagccacactgtgaaaagtcttagaaatgtctttcaaatacaaagttccacctgaaaaggctttttactgggaagagcagtcctacaaaggggccccctttcttgttgcacttgctgttctgactgtgtttttcattctaatgggagtcagcctgctcatattttctcacattgttttgatagttctaaactgtagattcccatctttggggaattctcccacatgattacatgggatataaagtagcagttacaaaggaataaacttgtcccatagtaaagatattttcagctgcttggagaaatcatttagaaagttttggaaacgtttctatcatgttggataagcattatttacacccttataaggaggatgtcaccaaaatttagtacttgacttgagtatatattataatattttgtgtcagaactttctcattttggggatatattttcccaaagcagcaggcagagaagctagactttcgggtcatttgttattttgaattttatctgtacatttcaaagtttcggcttgaagttctagtattattttattgaattttctagtactattttcaccttgatattctagtattactgttgcataagagttagactacagaatttacacattctatacatttttgtaagccattctatcgtaactgaactttgacgttttggtctgacattacaacattctcctaagaaacacattgaaagcaaaaactaaaaatgaaccccattttctttttttctcatttaagtataattgctgtacaatattgtataacttacaggtgtacaataaagtaattcaaagctttgaaacttatattccatttatatctgtgtgcatgctcagtatgtccaactctttgcagccccatggactgtagcctgcgaggtcctgtccatagaattctgtccatggaattttccaggcaagaatactagagtgggttgccatttccacctccaggagatcttcccaacctaggaatcatacctgagtctcctgcattggcaggcgattctttatcgttattataaaatattgtctatattttccatgttgtacaacatagcctgtagcttatcttatacctaatagtttgtacctgttactctgctacccctataattgcccctccctctatccctctccccactgataaccacaagtttcttttctatatctgtgagtctgtttcctttttgttatattcactggtttgttgtattttttttttttatatcccacctataagtggaatcatgtagtatttgtctttctctgtctgacttatttcacttaataccattcaagtccatccatgctgttgcaaattgagccaattttctaagggggaaaggtcctatttaattatgttagatactttttgacgatgtcaaagccacagagaacaaggatgccactgactgtcattgtggtgaaggtgtgctccaccctgtcactctgtagcgtaaccaccctttcccctctttttctctctgttgctgtattttctttgtgtgcctccttatttctgcctctgtctccttctgcccctgggtgtctccttttcctgtttacctcctaagacttgctgaactgtgctggcaacatgcattgctaagcagctgctaacacgtgttcagaatccacttcagatatctgaagtttccaagactccctacaagtataccagttgtccacagccactggccaccagaggggcaaaatggggtggccatcacaggtctgttcagagtcatgctgcttgggttccaaacccacctccaccacttagcagtgatatgacctttgggcaagttactgaacttttccaggccttagttcatgttccgttaagtggaaataacggtagcgactacttcataaagttttggaatcattaaatgtactcagagatacagtactcagcatgtggcaggacacatgagtgctcaagaaatgtgagctattatcattagtccaaaccaccctacaaccccttccatttacttgttattgtagaacacaccatgttcacatacatgatcacgtcttccccaagagtggacactcatctcactcaccgggcggaatgccttcccacacctttccaa

SEQ ID NO: 54068 - DNA, 1537 bp, Bovine  19866880702806
  misc_feature (1)..(1): n is a, c, g, or t
nctcaggcagattctttaccaccgagtcaccagggaagcccggcaggaacagtctttgtcacgagttttgtttttccctccagttcccagcccatgctacttcacaggagataattttagtgaagagcctagaactgttgctcatgtttgagtctggtgcgccattttcttttcccaaaaaagccccagtgactccccaagctttccccctaagggctgccgcttttcacacgaagtttccctggggaccagccatgagccctagaaggttcctgtatacccccttccccttgaggtagtctgcttgcactaaaatccttacataaaagttatgttttcagatctcagatgcttcacctggctcacaggtggtcttattctcttttacctctgcttaaggttcccaccttggataattgtcctattggattcttggcattattccttccttctctcttatccattttaacttccagtgtagttttatcatccttgtgaccgtattttaaaggtggaacatcatctaaataacatgaaagaatcgctgtgtgtgatagaggttgtgtttcctgagaacacaactttgtggtcattatttcctgcaactataatttgaactctattcttccgacatggcgtgttgatgaaatatgccagagtgaagagtggaggcagatgtgaatagtggaggcagctcatattagcatagataagatccttaaattccagtagcatcattcatacattcatttattcattccaaaaacatttattgataccacttaagtgccatacacttttttttttttttattagattctggcaaattggagatagacaaagcagactgcagatgactttatgagataaagaaaataatgtctatctgggagggtgatggtttggatgagacgatgtatataaagcagccacatagtggttgcttaataaatctcatttgtcatccttttccttcagatactaaacatgataataaatacatttttaagattcttgcaaaagatcatctgaaaggaaaatactttgaaagacctttttaagtagatgattttaaagcatcactaaagctttaaattttctagtttgttttcttagcttttgagttgtaaagtaagatgcattttgtaagggtgcaaggtagaggagttctctttcaggcatctaaagtcacctttctctttttctgcctctcaaacagctttaattagaaacagtggtgattttctcttcctctaaaccgtcggcttattccagctagtgaggttgtttgtgacaatctgctctatgcagacactttatcttaaagaaaaatagcttcattgaaactttattttaacttctttcccttctcgtgattttatatcccctaataaacctgtgacatttcatctagcccagggattctgtaaattcatgtattagaaaactaagtcatatgatgtaaaactttaaggctgttacactgaattcatgaatttaatcttgtaattgtcgacgttaatgggtctgacaatgt

SEQ ID NO: 54069 - DNA, 1052 bp, Bovine  19866880773398
  misc_feature (1)..(1): n is a, c, g, or t
ntgagaaagtttaattgtaatcctattctccttcaaagctgctagcaagttattcaaacaatcacaggaaatcagaatctgcatgtctttggacttcaggggctaaccaatgggcattcttaggcttttctctaccaaaattgagtaagactgtcagggggttgttttcctggtaagccaagcttctacatttcaggtaacatatattacaatttacaaaattctcagccttttgaacaagttatagtctagcttttaaaattaaaaataaaatgatacacacagaagcaaagcagaaatcagaagctaaaaaaaaaaatcaatagatgtttaatgattctcatttctttatagctaacactcagttatgaaaatgaattaatgctgactaggcacttggccacataatagcccactaattcccatccagtgagcttataattaattttaaaaataatgtacttcagagaaaatatttaactatccagagatcttctgtggttgttcttttctcaaataaagcaatcactaccctgtacacaaaatctcaccttcactacagttgttcaacaacatatgtggatacatttgcctgtagccaaagctctatttgaactcaatgaagcaaactaatttacatattccttgtatttagacatacgttggccctaaaagccaaagatagtttccatcatctacttatcaaatatactagattacctgtcatattgttgtcagtgaacctgtcctgcatgaatcatatagatccatctggaggtcacacagagaaagagcaacagagctagcaacatgaacctcaggatggtgcagaaacactgctcagaaagctgtgtttcagaacaaggaaggcacttccgaacccggagaaataaaggctgtgagatgattggcagctgaccattgagagggctgaagagaagccatgaccttggggaccagccaggtttcagctcaagtcaaggagatgagaaaaacatctagagacagacatggaataaagagaaggaagagtgcagggtggctcacgaaga

SEQ ID NO: 54070 - DNA, 2900 bp, Bovine  19866880792655
  misc_feature (1)..(1): n is a, c, g, or t
ntgacttacgctttgtgcttctgttttctacatctgaggttctatttataaaccatttagtcatatgggccactggatcgggaacctaattagagctgtgtattacggcgtggtggccccaaacctggcagctctttcctccgaggcaggctcgtcattgcttgtggagtgctggctgcactcgcctccccaggctgtgcactgattgcatctcagaatgcacaagatggaatggcttgctcacaccagcctcagtgactggagacaggctttgggaaggtcccaggtcaccatgcagggctctgataccctaacagtccgctggcactaacgatcttcaaggttaaagcccatttctcctcccattttggatggaagccaggatttaaataaaagaaagaatgagaaaaagaaatcaaatagaaattcagccacaagagtcaagggcaagtgaaattgattttaaagggctggcttccagccatagaaacaaagagggtttgaggtggaaactgttgctgttggttaaatcgcagccattggggaggggagaggtctgtaatgagaacgtggacaaaaatgcttcatttttagcttggccggtgtcctgaagactaaggcagtgacgcactctttgaaattaaaaaaaagaaaagtgctcctggagtagttctgtctgcctaaaacttaagcaagaggcactaaaatcaggacaaaatgggagggtggtgggaagaagaacacagcttgaaatccttcgactccacattgctcttctagggtttgatttctctaaaatcatacactttgcatggtgtaaatagcatgtccaaatttagacattataaccccacttttcaattgcctgcaaacaatgtaagatctatggacaggcaacagcctgaattcaagtgttagctttgccacttattagctgtgcggcctcaagcaaattgcttgacctctttgagcctcaatttgttcatttgtaaaatgggaatatacgaatcatatctagataatatgaactgagacacgtaaagtggtccaaggcaatatttgcacataataaagtcaatataaatgatttgcttttgttattaaatattaatattttaagctgcttatcttaaatttttctcaaaaatcatctacacaaaatattcatgtgccaaaaaatgaattttgaagcatattaatataacatacaaaaattaattccaggtaaattatagctataaataataaagtctcttcataaatctagaggaaaatgaagaaaaatgtcttcagtactgtgtggtaaggcaaaaaagattttaagaaggacataaaaaggatatactataaacattatcaaaaaattagactactttaggatgaagaatttctttagtcaaaaaacatattgaaagaggaaaatgcaagctttggcaagaaaagatagttgcaaccatacaaaggagccatatccagaatgtacaaaaattcttgcaactcaacaagaaaatatcagacaatacagtagaaaattggacaaaagacttgcagataccttagaaaacataatttccaaatgctccaaataaaaagatgttcaacatcactagtcaccagacacatttaattgttaaccacattaaaattctttatgtatctgaccagaatggctaaaaaaaaaaagatgcagtgtgtacacactgctgtatttaaaatggataaccagcaaggtcctcctgtatagcacagggagctctgctcaatgtcacgtggcagcctggatgagaggcaagtttggggaagaatggatacatgtatatgtatggctgagttcttttgtggtccgcttgaaacgatcacaacattcttaggtggctttactccaatataaaataaaaagttttaaaaagatgcaaaatactgagtgctggtgagtatgcacagcaattgggactcctataactacggattgaagggtacatggaaagaactattttgggaaattgttcaatagtatctactaaaactgatcctgtgtgtgccctatgacatggaaatttcacttctagatttttattcatagggatgttccccaaatggagaaagcaatggcaccccactccagtactcttgcctggaaaatcccatggacggaggagcctggaaggctgtagtccatggggtcgctgacggtcggacacgactgagagacttcaccttcaattttcactttcatgcattggagaaggaattagcaacccactccagtgttcttgcctggagaatcccagggacaggggagcctggtgggctgccgtctatggggttgcacagactcagacacgactgaagtgacttagcagcagcagcagcagcagcatatgccccaaaaggtatgtatgactgttatatcaacattatcattaatagaataaactagaaagaattcaaattccaacagtataatgaatgaataaattatgacaaattgtttatcctacaatgaaatactataaaatagcaataaaaatgaatgaacttttgttatatacagcaatggggagaaattaaaaaaaaaaactataatgaaataagccagattcataaaatagtagcactgactggctcaatttatataaagtctaaaacaaacaaacaaatatatgatattagaagttagacctatggctgattcatgctgatgtttggtagaaatcaacacaatacgtaaagcaagaggcttccctggtcgctcagctggtaaagaatctgcctgcaatgcaggagaccccggttcaattcctgtgtcgggaagatcccctggagaagggatagactacttactcactctagtattacttgggcttcccctggtggttcggctgtaaagaatctgcctg

SEQ ID NO: 54071 - DNA, 1409 bp, Bovine  19866880815675
  misc_feature (1)..(1): n is a, c, g, or t
nccctttggactgggaaggttacacgtaaagcaggttaagatatagggcagactcaggacaaaagtcatagttttgttgaagagaccagcaaaagactagtcaaagtattaaattgctgagaagtctaagagaaatgcactgttctgagacctgaatggtccacccagatccagcaggctacgggcactctgagatagcccttgtttcatcttcaagggttgggatggttcactaggcctggtttcccagggcacaggtaggctcagcttccatccggaattctccagtaggtcttctcccagatggaggaagcatttctctgtacacagagaacttctggtgcctcatcaggggtctcttggtttggatttggagggggggaggttgcctgggaggcagcacctgccaggagatggagggataatgggtggggggggagtcccactgcagtggggtcagcctggcaaaaggaacctgggggctggggctgtgcctggtttagtaggtatttaataaacacgtgttacataacaaatgaaagaaggagttatccacctaatgtctgcatttgttcacagagagagtctccattattctttgcactctcctacaaaatgccaacacttcatatggctcagtattatcgctttcatctctgggacctgaagcagccaactctgggtgggctgtgctgccaaagtcttgctggtgggtgtggggttctgggtaacccagggccagctgcctgcagacagacctctgctgagtcaggcccccaaatgaaagtagccggctcagcctgggcactgcactatggtttaatttctaaatttattgttaaatgacactgcctaatacttcatcctatttcttttggctgtctttttagcctttttcaaaatgttaaactgtacatttagtaggctaattatatatagtgggaacattagaataatagtcattgcaatagacattaatagcacgaagcaattacttactatgaacagaattggtttagctaccatgcctcccttatatgtcccagtgactgagaaagggctcagagtggcatttagggacatggactgtagatgcaggttcaaatatagctctgccacttggagccctttgcttgaattctaaattattttctttacatcttcttcacattacaaaatggtaatcataataaggaagatgcagctatttcaatttaccacttcacatagatattaaaattaaacagtatctttaagtgcttcaccttgagtcatcaatctgacacttattgattgcttactctctgtgctcaggctgctaccacaaagtaccatagaccgggtggcttaaacaacaaacatttacttcttaacattctggagcctgaaaatgtgagatcagggtgcca

SEQ ID NO: 54072 - DNA, 954 bp, Bovine  19866880815690
  misc_feature (1)..(1): n is a, c, g, or t
nttgaatttagtttccttctagctggcttagttcagcagcctgaccagaggcgttaatcagttgaagagaccggctatgatgaaggctgtttctggtcctgtggttgaagagaaactcatgactgtgcttcatattttcatctgcaaaatggggatgagcacccacttcccctctccccagccatcatttcagcattgctcatcttggaaactggctgtggaataagcagaattaacaaggcgggcagcagggaggtaggaaggcccttgggttgctggttggaagctgaaagctggaaataattctctctgatctattgcctggagagcaccatgagccagctggcctgagaagataagagaactgttcttctccggcctgggtggtactgttacctaacaaggagttgggcaagatgcttagggagcaggacttttactgtgtgccaaagtctgcctgcttttcatctggattccaatttttatcctttgccacatttaaaacattattttagatgttccctggaggaagggaccacaatttctccagttcttttcagacaatttgtcctaagtgtaaaggactgaaggtgggggatggaaacagacattgaattagccaaatttgagaatgaaaaaaaaaaattgctgatattttaaaagcataacttggagtcagtagatttgcctaatttctctaatgcccttcatcccttccttggtctgattgtatgcttgctcttgcagtcatactccgcctgaatagaagcagagtctggaaaactaagaggaagaagagggaagctgttggttttcactcctgtaggctggtggcataagaacagaaatgagcaatactgtgtcagcttgactagcgtatggttccatttgttggctccaagacctatctagatgtttgcagtaaagatattttccttcaacgtgattcacatt

SEQ ID NO: 54073 - DNA, 1370 bp, Bovine  19866880832308
  misc_feature (1)..(1): n is a, c, g, or t
ntggaggagcctggtaggctgcagtccatggggttgctaagagtcagacatgactgagcgacttcactttcacttttcactttgatgcattggagaaggaaatggaaacccactccagtcttcttgcctgaagaatccaagggacgggaaagcctggtgggtgccgtctatggggtcgcacagagtcggacacaactgaagtgacttagcagccgcagcagcaatgtggtatagtcaggcccgcaccactgggccattttttccctagagacaatcagtctctgggttgtgtatgaaggctactcagttaaaaagcctgaactatttgtagagagggcaggggccatatgaagaaggaaaagagagaggacattattattggtgataagaaaataagtgaagggtattagcaatattagttaattgaattttagcaaatattagcaaattgaatattactgcatcagtacttttctgacctttctcagtgaaacagcctaacagaggccagagaaagggactggtgcatgctcggattagactgaccgtgccttgggaagtcagaatactattactgaaaattgcatgttacactctgcaaatatgaggtctgactttcacgcggtctcataattttcagaaacttaatgcagtcactagctggtctcagataattatgggggaaaaaatgtaaagtgacttctaagtgcaacactttttattttccacaaacatactgtaaagtaggggacaggtaaacaagagtcctggagtgatttctgatcgctgttttcttgaactcatgacaccagcacttagtgtttttctgcaggctgcctgaaaggttcacaaatccaatatccccaggagttatttcattagatttcctaactttcaaacccatgtgcaatgcccttattcctttgctactcttattgactgacactgattatgccatcagcaaagcttactaactccactgcttcatttagatcattaatggtcaatagagggtctgagatggttcactattaactgctttgcattcagaggacctttcattcagaggactttcctttgtgtttcactgcctgcttagcttggctctctgttgggaaaaggagaggagagtgagataaatcctggatcattcctacatccttcctatgtggacaccagccctgggactttcagagaccttttatgagcctgagcacacagagtgcaaagaagtatccagggagtctggctcccggtgtacgaatgtagaagccagaggaaacatggccagcatgaaccactggcatgaactacatacagcccgctacagtagctctccagtgtcagctctttggttcagcctggctgga

SEQ ID NO: 54074 - DNA, 1328 bp, Bovine  19866880837898
  misc_feature (1)..(1): n is a, c, g, or t
ntgaaaagtgaaagggaagttgctcagttacttatatttacaactaattttttggtataaatcatagattttactgtacagtcctgattttaatattatttttcagtctgaggtcaagtactaggatgctgtctagagttttctctttggaaaatgtagctactgtatataattataatgtttgcatatttatgaaataaattaatctttttgaattattaccatagctacccgtagtgtatgcaaataatttctcatctttagtatttatggatgcaatattttaataaagtagcaaaataataggcaaaaaatgttgatatgtttaaactctaacaatttcatggagacttattacaattagtttaatggccctggttagaatctctcctcttattttgtccttgttcggatgtatacttcaagggtcaaacacatatttatccttttaatggaaaatttctgtcatttgaatgtggcaagattgagatttatctttaaaacacttgatggaaacacttagcttaagttgcaaaaatgcctaacatcacaagcttgataatcccaggttgggtctctttaaaagaatctcaaactgcaaaccatataaaatgatttcccttaccttgcaacttctggcagcataggtggtacaaacagaaaatagttatttgcttggtgacaatgtggcagttctataaatgtgatgtacaaagtgaacacgtaaatagtatttcagaaacagagaaccatctaagactctgttgattatagtataggtgctggacattttaatgggattgcttcttaattaccaaactctttttgatagccatgaaaaaaaattgaattggacagtattgattccaagcacttctgttcctctttagggatattctgagctggcaaaacacatacagatgggcagacaagactgcttagtttgccctctgctgaatttgatcaataggaacctatttctgtatcagggagaagtagctctgttaatttaggcctggaaatctcatcattagatactcttgagtaagaagatttcacatgttttagttaacatataaattccaggtaggcatttttaacagtaaattttttatcttttttgtttttgacatgtcaggtgtttctttgaggattatttttttctgaataaaaatgctaagagagccttagctagtgtaccatatccctgttctactctatgctgctatagtggaaacattttttccatagtattgcatgtagttttaggaactgggaaaacagaattttgaaagaaaagaactatttgaccaatagcaaggtagtga

SEQ ID NO: 54075 - DNA, 3936 bp, Bovine  19866880893975
  misc_feature (1)..(1): n is a, c, g, or t
natatgctaagaagtcctgatgaaggtaggaatatatagtctacaaagcatcaaataagcctcgttggatttgttgcttgatgagccagtttgtgaacttgacctttgacatattccacaaaacttttataatctagtataaaattgtaatggtgaatgaagcaacatttcaaggaaaatgagacttaattcttgctactccttatcctcttgcttatatttgtccaatccttcccttctctccttagacctataaccaaacacatgggcagtaaatcaggactgtttgttcaggctctgcatgacagatacctaacttctccccctcaaggaaagctggactcataaataacaatgttctagcagccctcaggtaccctaacctcactgtgtagactgctgtcttcagttcacttcctatttctgaccagattggagatttattttaggagagatctgaaatgccagtctctgatatcttgcagtttcagggttctgggcacctagcagacattcagtaaatattggttgattgattgattgatttgattttcacaccttctggttaggaaagtgccagagtatcttacattgtccatgttggtcaacatttatatcacattcttttttttatttgacagtgttggacactctcagagggaatgggtcagaataagtttcaacatgtacaggcaagcagttcaaagtactgatttcttccttacatattctcacaaatgagcttttaaatattattaaagaacctatttattagcaaacagggacaaagcaggtacacattctgaccctgccagaaatagtcactggagtcagatatacagtattctgaagtcaggataccatggaaatttctgtaggtggctttttgcagctggaggtcttctgatgccaggtctggaaacaggagcagacaccagtcctcacagcggagataatgatactgtgatactttttataccttattcagtcaaggatgttgttcaaaacaaaagttttgtggtgtatgtcaaaggtcaagttcacaaactggctcatcaagcaacaaacccaatgagacttatttgatgttttgttgactgtatattcctaccttcatcaggatttcttagcatatcaggagtgtaacggatgaattaggaaaacaataaatcatacataatgtgttgttcttccatgtgtgggaaaaggaagcatgtgagctgggtggaaagaactcagggtcctaggcagaacttggtttgtattctggttcatggagcatccttgaacaacatgggtttgaactgcctggatccacttatcagtaggtaataggcatgcatgctcagtcattttcaactctttgccaccccatggactgtagcccatcagcctcctgtgtccatgggcttcttcaggcaagaatactggaaagggttgccatttccttctccaggggatcttcccccaaaccccagggatcgaactggcatcttctgcattgacatgtggattcgttaccactgtaccacctgggaagccagtgggtccaattatacatggatatttttcaacagtaaaatgttacaatgcttcacagtccacatttaattgaatctgtaaatgtggaggaactggaggtctaactgtaaattatatgaggattaacccccaagctgttaagtgtatttctagaatattttaaacaaacccatatcttaaacaccaaggagaacagttctaacgtccttaacgtggatgaccaaaccatgaatttcaccagtgaaaacttatttctgacagtcatactaactagcaaagtttctgctattgactcaggctctgataacagaatctcctgtatagggtggtgagactagtatgtgagctatcatccccgggctgagaattcctgattagggcagttggttacaactgagtgtgacgtaactagatggcatccattctatccagctactatttatgctgtgagaagagagctttttatagtaaatgggctttcagtgaggttcattttgtgtgatgattagaactcctcctgcatggacagggttgttttctaaatgctaagactgaatgaaatgaaagagaaaatttggaaagcttcttttttgtggttacatgcacagcaaactcatctagaatgttcacaaaggagcaaagcgacacctgttcggaactacgtttaggtaagggttggtttccctggtggctcagacagtaaagaatctgcctgcaatgcaggagagccaggttcaatccctgggttaggaagatcccctggagaagggaatggctacccactccagtgttcttgcctggagaattccatggacagaggagcctggcaagctacagtccatggggttgcaaagagtcggacacgactgagcgacttcacttcactttccagtgttcttgcccagaggatcccgtgcacaggggagcctggtgggctacagtccaagggatcacaaagagtcggacacaactgagcacattcaaactgcaacagcaagagggaacagtcccctcaacactcccttcactcctgacgtcaatcacaagttgggaagtggggagagaatgggtttccaaaaccagtctcagtttcagcaattctctagaaggacttagagaactcctcgaacgctattatactcacagttatggtttgttacagggaaatgatgaacatcagtcaaaggaatagatacacagggcagagtctaagaggatgacaaatacgaagcttctgttgtcctctcccatggagtcaggatgtaccctcacaggattgatctatgacaacacacgagtgtagtgataagcagggaagctcacctgtgctttggtgttccgagtttttactggaggacttccctggtggtccagtggttaagaatccacctgccaatgcaggagacatgggttcaatccttggtctgggaagattccacatgccacagggcagctaagcccttgctctgcaactgctgaacctgcacacctagagcccatgatctgtaacaagagaaaccacagcagtgagaagcccaagcatcacagctggagaaagcccacgcacagcaacaaagacccagcacaaccaaaaataaaataaataaataaaatttttttaagtttttattggagcttcatagcatagtcctgatttcccagttgttgaactcagtctgcaagccacctgacgccacgtgacccaaactcccaccataaatcacacggttggtttttctggcatggccagcccccactctaagattgtcagatgtgactagtgccacaccaatccagtgtggccagcccccaccctaaccaaagacacttcactcgtgtatgacaaagattacttcccagaagctgagggcaaagccagacatctttgggggaaacaagtccaagatctttactacaaagtactgctatatgaatgacggtccttaatccaacttctctggaaccagatctatcaacccatttatagatagacaggaacaaagggtccaggttcaagaaaggagctgtaaaaaacagagaaacgaaacgaccaagtaacatcatcttaactatattctttccacaagagatgtctcatgattcttaatgttatacccctgaataactctcctgagatcccagctggttttctaaggcaatttcagcaaaattaaaaggttaagacacactgaaacctcaccctgcttctttctattaaatatagtttcagaatctctttccttccccccagaaatctgtgttgagaactgaagagatctttactgcagaataagcagctctatacctttgttttgtggctgacacctttcagaagaaaaataataatttagcatgtctcttctatttaagttgcttgacaaccagactacccaa

SEQ ID NO: 54076 - DNA, 1851 bp, Bovine  19866880951122
  misc_feature (1)..(1): n is a, c, g, or t
ngatgctgcaagatatttaaagggacagaaattctttttaaagaaacactgaaaaagggcttattcagccaaaaaaagaaattgctgattggggatttaattatatcggaggactgagtgtgtgagggagttcttaaaccgaggagtgaccagctgtttcaaaactttacaagaacagatttcaagtgaacagacttaaatggcagtgaatgagatttagagtagaatagaataacaattttcagacataaaattttgatggttaaataccggttcaataacagatggaagaagcatgattttgtaagaacacgggtgttggggttaggtacctctgttttagctaccatctcccccttttagctgtatgatcttggacccagaacttaaaccctagactccttatttttaaggctgaaatgagctactataaataattttagcagatttaatgtaaatttagcagatggagaagagaacttgccactcagtaattgttagtttgattgattgttactcccttgtataatttcatttcttagatgtgtctaaaagatacagccagtatgctctgctcaatctaaactggcatatatgatattatttgaagttcaaagaaatgatatttccagcctttttagctctgaagactttacattttctatcacaaagtgattttggggcctaaatgcctaaccttctgagaatccaggtaaaacagataggctgtcagttcaatgcaaaattatagggactaggtaaaactctttttgctgtcagaataatgcaggggcttgtgtttgggaaaaagcctgaattatttgacaaataatagtttataaaattcagctacggttaaccaccgtgtattactggatttcacagaaatatttttctattgtagatttaaactccttaacagataataaaccccgacagaaaggcatgtaaaatctagaggctcgttcacggaatccaaattgacgttgatcactatgccttcagaaattgctgtagtttgcctgctgggtattcactccctgagacagcgttgcagccagtgtctttgcttagctttgggcactaatttggggtattacacttttaagtttgagaaaatctcacagtctttcaatttcccatggatgaatttaaagtagccctaatttctggcttcatgggggttattgattttaagtgtatgcagatgtatcctagacctcaccagcatgaggaatacaaaagatgtcacatttaaattaaattcaaactgctccctttgcctggtacactgtagtacatgaaatttcttccttttggattctttagaatgacctcctttcgctaatgtttttccaggacagtgcctccgtaagcctgtgctgccaggctgggtactgcctggcctttgttccattaaagagagctgacttcagggtttccctggcctacggttcctgttcctcaatgttgccacgattaaagcctccatcccaaatatctgcttgtgttgccacctgggcttctgctgccctctttgctggcctcagagggccctgatcttctctttaccaccatggagatccagtcactccctagagcagcagctcagaaatgacccaggagaagtacaccacccagacagacttctcattggtcactcactcatggctcctctcaggcttcccaggtagctcagtgataaagaatctgcttgccaatgcaggagatatgggtttgatccctggaagggggaagatcccctggaagaggaaacagcaacccactccagtgagatcccatgagcagaggaatctggtggactatagtccttggagttgcaaagcgtcg

SEQ ID NO: 54077 - DNA, 2477 bp, Bovine  19866881015099
  misc_feature (1)..(1): n is a, c, g, or t
ntgtatatatatatgtgtgtgtgtgtgtgtgtgtgtgtgtgtgtgtgtgagtagataactgagtactcctccatgacttttcaacacaaattaaaattaatctgagtcttctgatatattgatcagaagtgcagtagttacccattgggggagcctctctctcttaaaatttccatgaaacctgagggcttttccaattcaaatagggactgaaagttcagctcaatttccaatgtaagagtggagagattgaatcctcttcagtttgctaatgctattgcttgcggctgccaagttgggtggctgttgacaaaaccctgctccctgctctgacagatgctgctaattcacatctctacactggccaagggcactctgccagtgttgacttttgagcgaggacaactttaatgtctcagagccacactcaacaaggttgccctttacttggcttcccaaggtcatggttcttgctattcggttaatttcattccttttcagaactagaaccgattattttcttactgcccctggagacctctacctggaagttgggcagcttttctctttctgttcttaaaacacaaaaggtctgtctatacccattttccagtcggttcactattctgagacatattctgtatgtccctctagtcactctcctcaaggttttcctcaaagaattcaaaattattctttgattcattttcttgatagaatacatatgtaagaatcacagtagagcacttcggctacatatatacctaataatgatcatcacttaaattttagaatgttttacagggtttaccattattaattaatgactcattattttattcttcataaccattctcaaaatcaatgttacggtgtttctttgtgatggtggtggcacagtatggagtaatttttctctctgggcctatagtttacataaaattgttaccctcttgacttttatatatcatgggggaaaagttagcatgccagaatatgaacattgtttcctcagtagcaaaatatgacatgcgtcctggatttgctttgtcaaaacctctgacaaaagggtgagttttctcttcgttgttgttgcttattttttcttatggtcgtgtcttttaaacttcaaatgccatgtgctagaaattacagagaagtagaatggtaaaaagagataggtattcaaaattagggcttccctgatagatcagttggttaagaatccacctgcaatgcaggagactcctgttcgattcctgggttgggaagatcccttggagaagggaaaggctacccactccagtgttcttgggcttcctctgtggctcagctggtaaagaatttatgtataatgcggaagacctgggtttgatccctggattgggaagaactcctggagaaggggaaggctacccaccccagtattccggcatggagaattctatggactgtatagtccatggggtctcaaagagactgagcaattttcactttcactttcataaaaaaatatgagataaatagcatgatttattgaaatgtcaatatctcatatatttaacataaggactaaatattattataaatcttgcatagtaattgattacctaagaactcatggtcttaggtagtttcttaaaagttgttagttcaaagtcaggactcaagtagaatatccttaatctctgttcaagtctttctaccatgctggtcagttttagtctgatgtgtcagaacaacctctggagcttattatgattagaaatgccaggaattgccacatatttagtaaattactatctctgaaggtggagtctaggaattagtactgttatcaaactcaattggaagttttgcagtatcaaatttcaaatcaccaaaacacatacacacccactaagaaaaggctaagaagaagagaagtgtgcctttgagcacaaatactggaggaacccattagtgtggggttttaacaaaggggtaatggcgtgactgatttctatattgttactggtcctgcaagtaacctacgcttccttgtgactagtattgtccagacaccttgctttgagccctctctttgatgcatgctaaagaatgtagcaatatgaagaataattaggaatatttttgctgtaagaacaaatagactttgactgcttacagtgatgggcccagttattttactctcagttccgtgcagttgctcagtcgtgtccgactccttgcgaccccatgaactgcagcacgccaggcctcctgtcttgtaaaggcatcgctccattctctgcctcattgtctcatggctgtctttgcttcttgtgtctctgtgcccacgtggcattttcctcttatggcaccagtcttgttggattagtgataaagttgcttcagttcagctgctcagtcatgtctgactatttgcgaccccaggaccgcagcacaccaggcctccctgtccatcaccaactcct

SEQ ID NO: 54078 - DNA, 1525 bp, Bovine  19866881023043
  misc_feature (1)..(1): n is a, c, g, or t
ntatcttaacatataaactaacaattagaagttacttagggctttctgtaacttagtttgaactgtgagaggtcatgactgtcctccttgaagtgctttcccagtgtccttgaagtagatctttgtgtgtgccaaagagcctgattttagcggtcatccttcgtttggtaacagcacaccactttcccttaatggactgactgtcggtgtaggtgccctgcccttcgtgggtcaaggactgagtgtgtaattcaagttacacttactggctgtattacaaagaataagaaaatgaaaatgaaataatattaaaatcttttatattattaatggatcaagtaagaatagtataaacatggcagatttatgaaatgttctatcaatgatgtactcatgcaactaggaatggatgtgtaagaactttaagatatattgctttgccttttccaatatcacttcttgcattaaaaaattaaaggtggacacatctaacataattatcgaaaatagtcctatctaggcagtgaggaaagcattaaaaagtactgatgttcatttccagtaaaaatgtgccacttttggaagaaacatgacttttagaatgttaagtcttctatttttaatttgtggactttggaaattattcgataattcaaaaagagagttccgagtcccagaataaactcattgtttgcacctcctagtggagataatctgtaatgacagcatcagtgttcccactaggtatgtccccaggatgatttaattaggccaaacgccattggtgcccggtttacttcttaaatggccttgtatatgggtatacttgtcaggtacaagcaattaaatctcctgtctacacaggatgccctgtgatcaaaattcacattgtaagctcctaaaatacttatgatgcttggaggaaatgttttattcctagtgactccctcaattgccgacttacaagctaatatattgctgtgcataaaccatgcattcaacttcagaataatccaattaccctttagaaaaaattaaatgcacttccagtaataaggcaaacatgctccacttaaacaaacataaaagtttgcccaaattatttaagaatggcctaaaagaaatctaagtaatggatgactggatgatggagaagatattcatctctagggagtataagattctcaccagaagaaccctgtaggaagatcactagtctagggaaattgttttgtgaaacaattacctggctctgcaaccttgggctaagctaatcctatctggctatctctaactctccattcttttatcctaaaacaaagatgatttatattccgcctagaacataagactgtgaacatatataaaaatgaaaacttttcttcttaatttctaatacatgccaaacatttaatctcaggtttctcgtcttaaaatttagtgcaagcctcaaagtttcactcttccttgtccaaaccagcagtgctcacagttatggggctcggagtctcgttgccatcgtagc

SEQ ID NO: 54079 - DNA, 730 bp, Bovine  19866881086096
  misc_feature (1)..(1): n is a, c, g, or t
ntccagttgacctttctctgttacctacagccaaagacattatacaaagctcaaagaaatggccatctcctgaccccaagtcctgtttgctctagaaatgcaatatggcacatgtataaagaacaccagcaacagagtcagacataggaatctggataattcagactctgccagggactgtatgaacttggataagccacttgcactctaagcctcaagtttctgtcaataaagggacaatagccactattttacagggcatgtggaaagattctgtaagagaaggcatgcaaagtgtactcagtaaatagtaaccaaaatacaaacacacatacactctaaaggcaactctggtagctgttttcaaataggaaacaaatcaagtgagaaaataaacaccattcaagcagcaggataaataaaactggaaaggcatacggcatcctggacaacatctaagtataggacttaaagcctgttttttttttttttttttttacacttcatgcaagacaaagtacaaaaatatttctattttcttctgatctcttaagaacttagcatctgaggggaggatccctgaggaacccaggatctgagaagtaagtactcgatgttttagggcttggagattatcagagaaggatcgtataatgaggatgagatggagaagccggtgatgtaggtagggcaaaaataaaataaaataaaattgaatatactgatgcag

SEQ ID NO: 54080 - DNA, 997 bp, Bovine  19866881086878
  misc_feature (1)..(1): n is a, c, g, or t
naataagttcatctgtattgtttttctagattccacacatatgcatcaatatacacatttgtttcgctctttctgatgtggaattcacagatgaccagtatctaaaaagtgattcttcatgatttaagggtgcctgtccatttttcccatgttgctttatgtataatatataaagttgtgaaaaaagagaagggggatggcatgtttgttcttatgaggagaagaaatgtccaggagccagaaaagtagcatctgctcctgctgcctgtgactaaaattaagccctaatttagctttcaactaaaattatcataattgaaataaaactaacaaactagaagtgacttgcaattttctcatcatttagaagagaaggggccaaatggtaacttgaggatagtgatcttcttccctgcagggtggccttatggtattaggtggataaagaccattgatggagttgtacttcttcccaagtcctccaaatccatgatcagtgagtttatatggagaaaactcaaggaggcgatggaaatgagcatcttgggaatgctcagaacctagagaattatgtcatttttctttatttgactgttctttggttcttccttaaagagagactttcacatgcattcacactcactcactcactcactcacacacacacacacacactacatacatccgtatgtggattacatatacccatttatggactactatagatataagattatatacacacacacatacacactgctgctgcatacacacttcagacacccgtatgtaatgtgtgtgtgtgtgtgtatgtgtgtgtataatcttacagctacagcagtccacaagtactgatttaagaaaacaaaacagcacttgctacaaatatgtgctccaaatatgtgttcaatacaaactgtaaatattaacacaatgatgataatttaaaaatatacaaccagaagcgagcactccagggttcggaaagaagccaagt

SEQ ID NO: 54081 - DNA, 1145 bp, Bovine  19866881104212
  misc_feature (1)..(1): n is a, c, g, or t
nttcgttctccaaggacgttacataggagtctctggttatggcttctgatgagatttgccactgagtgcttcaaaatggcagtgaggatttcagttactcctcaaatgactcctttcaaaacagaaacagaaaaaaaaaaaaaaaaaagactaccagagctctccctgacatagtatcttggggtcgtgtgggtgtgtgctcagtcatgtctgactctttgcaaccccatggactgtaaccctccaggcttcctttgtccatggagtttttcaggcaagaattctgcagtggtttgccatttccacctgcaggggatcttcgggacccagggatcgaagctgcatctcctatgtctcctgcattgtcagggggattctttaccactgcgccccctggggccatatatcggagactgaatattcaacttcacatgttttccttcttcctttgtcctgaaaagtcattctcatgccggagtgagtgcttggatcttttactcactgttttctttgcaagatagttgtctaatgctcttcctcttcagattatgaaattgttgtttacttcttcattcaaagcctgaagcatatctgagtgtgtttcttgacctgaaagggaacttttagaggaagagagcacaaaccttcacaagcgcctggttctatattgtctctcaccctgaagttttcattgagattgtgaaaacattcagttctaatatgttttcctcactcttttgcaattgtgcatagcagtgttgttatgcaaatagactgtgttgaggcatcaatgtgtacagaaaactgacagagaaacacaaaaggtttgaaagtgagccttgttgaaattcaaattggggtgagattcatcacatgctatttcccatttgaagttttctctgacacgagagtgggtcgtttttatttctgatcgggacatcatttagttaacttcaacactgccagtggccagcagccccagcatgggcccgcagctggttggagggcttccggatggccttcagcatccccaactcagggaacagatgccaagacctcaatttctcatagtgagtgggatcttggatcaatctggtctcaaacctttgatgcttctgtgagtctgcttcctttctgtgccaagg

SEQ ID NO: 54082 - DNA, 1333 bp, Bovine  19866881108999
  misc_feature (1)..(1): n is a, c, g, or t
nataaaagaacaaaagaagtccaaaaggaaagctacttttaacaagaaaacaatttaaactacaaagtatcaataatataacattttagataaaaacacaaaatttaaacttattttacagctttcttttatgtcttttttaatattcatttcttgcattaccataaaagagcatacacaattttatgtcaccaagaaatcattccgactggtaacacttgggaaaggcaacatttctttatatgatcagttggataaactgactgccatcggcagttcacatctagaattcaatttaatgaaatgaccaatgattttctctccaagctatccaagttgtgtctcattacccgttaagaaccaagaattactaatcaccgggtgaacagaaagccatacatgaaacatcacaaaacagagccctgcttctttggggaatactgcttgtacacagcatcaccaattggacaaaacgggcccatgatatttataagctgctgttgtgatgcagtcacagagaaaggtaggatctgaagagcaaactgccttcactacatcctcgtgggtgtctgttagtcccttcagtcgtgtctgactcttggtgcccccatggattgtagcccatcaggctgttctgtccatgggactctctaggcaagaatactggaatgggtagccattccttctccaggggatcttcccaaccagggattgaacctgggtctccagcattgcaggcagattctttaccatctgagccaccacatccttacccagtcctgaaaccttgctccatctctgatcacctgctccttccatgaggtggagtggaggtgagggaagggatggggattagatacaattttgtcaaactacattcaggctggcaccaaatatctgttatagcccagctcacattctagcatcatatctctcttttttctcagaattcagttgtatttcaagagtctaaacctcaaattcttaactttgctcctaaagttataatgctcctcttactttcatatataagcctctttgcctggttttctgtttaagattttggagataaatatttctattctttgttggtctcctatttatgctaactggacagacattcaggtcacaatctactcagggctccaggctcagttatattctgaccagttctgtgctttcaataatttacttccacagtgtttagtaaacacctttaaaataatggtttgtggggataggtagcctaccttagaagctaacctagttaatacagtctctataagcaataaagcttttttgaacattgcaataatattaccaaaatgcaagt

SEQ ID NO: 54083 - DNA, 1758 bp, Bovine  19866881194290
  misc_feature (1)..(1): n is a, c, g, or t
nttgtgtgaactacccccagactgtggattcgagtgtggtcacagtctgcttaggagcccgcagtgccctatgcttgagaaatgtttaatcgcacttgaaaagggcatcgtactgtagaaaaactgaatgatttagacacttttttgtttagattcattctaaaccataaagaagatcgattaatcataccaatatcttctccacctaaaaactctcattttctactttaaaacatgatttagggttttagtagaaattagaatttctttatttcctttgcataaagcatttcaagatctgcgtcatccaaatatatcacgcacatctcagtcctatgcttagataccggttaagttgaagtcagatgaactttctgaaatccgagagcacatgatctaggattcttgtcaaggctctcaagaaaagctgaggatggaaagtgagaatctaaatgtgtctgttgattacaaaaggcaatcatgacaagaactgtgtttcttgcttttcctcttgtgtaagcagagaagaaagtggtgtgttcctttcagggaagattcaggatccatttttctctagagtaggtttggagtaaacgttggtagaatcagttaaaggtagaaaaatgagatttaaaggatttcttcttttctagaggcatctttgcttaacccccagactagtatagtaccagcagttacccaggctcctcctctgaaagtgttagttgctcagtcatgtctgactctttgtgaccccatggactgtagcccttcaggttcctgacccagggcttggaccctggtctcctgtattgcaggcagattctttactattaagccaccagggaagcccaggttcatgctctgacaacctcaaaatgtggagtttctttgtccccccaccctcagagatgagttctgctgtcagaaacagagcagatccatcccactcctccactcgctggttctgagacttcaggtaacttacatcctctccgagcctcaggtaatcagctgaaaaagaaccggggtggtgatccctgcccagtctgtctcacagacttaacatgaggcaggataaagtggtgtgtatgaagtgctttggaaactggaaagcactctgcaacaagctctaaagagaaattaattatttgtcaaatttctctttctctgcctgtgctctcaccctgctcacctttgtttcttccttcctttctctgttctctctgtgtcctactcacctctgttctcttcacaacaagctcacttccttgctcttagatcctcaccctgtgtgcttcatcaactccccaactgaaagaatacgaatgggggaaaagatctgttactactgttgaaagtttcagcacaatgctctttcctattttctccttcttgtcctcaagtatattattcacagggcttctcatacactgtagaggctttataaatattcctattcataataacccagagagtgatctatttctgcatcagcgatggtatttactagttacctatatcactgatcttcaggggcttttctcctggggcaaatgcaagctcattatggtgctctgttaatctgctttctttcctgtacttcctagtggagactgattggaggctgaggttgcttgggaggttatgatactgagtcattagctttcaaatctgactccttgaaaccaaacagaatgtattttctgctcttgcgacaatatttttcaatatcataagattcacattcctgctttt

SEQ ID NO: 54084 - DNA, 1033 bp, Bovine  19866881253109
  misc_feature (1)..(1): n is a, c, g, or t
ntttaaaaataaaataaaatttaaaaaaataaataattaaagcaaaatacgattaaaaaaaaaaaaacctctatataaagattccagtaggttgcaaaccccacactaacaccaggtaggaaggttttcatcactgttttacagattgagtgtgtgaatgtgagctaatttacatagtaatttgtggtaggatcagttctgagtgtgctgtgtactcagttgctcagtcatgtctgactctttgcaaccccatgggactgtagcttgccaggttcctctgtccatggaattttccaggcaagagcactggagaggtttgtcattttctactccaggggaccttactgacccaaggatggaacccatgtatcttgtttctcctgcattggcaggcatattcgttaaggctgagccaccagggaagccctggtgggtagaatcagggcctaaacccaaatctgggcttcagaactgatgttctttgcctcttggctttactggatctaggaaatgctgttgagacagaatcagccaggtaaaggcctttctttacctggaaaaaaaataggttcacattaagtttggaagtacaaatgaatgtcttgcaagagtctgctcatttagctatcagcaattgtctggctacacagagttctataggacagcgtctcagatgactgccctcaactgttttctacctcacagcactcactagcaagttaacctgtcccgtgtatcattagtaattcatgacttatttgcgaaagtgcaggaacagcactactacagacctaatacaatgaatatcctattaggaagaaattaacaaatgaattgttgctgatcaataggtgttgaagagaaaattacaatgatagtaaagcctaaataatttatacacgatattgattttttcattacattaattattccttatagcacacataaggaactaggagaataaaactttcaaagcaaagaaatttatctaccgtagtggattgtagcctgaagtatgaatttaaaagacaaa

SEQ ID NO: 54085 - DNA, 1466 bp, Bovine  19866881270044
  misc_feature (1)..(1): n is a, c, g, or t
natttccatgctgctttgtcaaagcaaatttaatcacagccagaacatgtggcatccatcatttccacttcagaagacatcaccggggacagatcagcgacaaggagcctggctgccatgtctgtcctccactcataggaaaattaaatttaactatagatccttgataaatgaggccaccaaagccatcaaacatgatgactaagtgctcagtattaaagtaatccccagaggcccccaaactagaaagaagcacagtctcatttgatctggccttgaggtcttggcacacattcacacccttgcaagggacagataaatatgggcttaagtgcatagccccagggggccagagatgatttttctagaaatctttgcttggcctttgcttttccagaatcactatcacagctctccctctcacatattctatctgtcttttccttatacatctctttgctttctctttgttctttaccttatgagacattgatcatccaagccctagaatgactattgtaccttgattgcttttaaactgttccttctcccacatttcacagtattcttgccccagctccaactcatggaaaataagactagaaatgttgttttgtggaatgcccaaaactgtgagctgtttgagggcagggactatatttcgtttttttatccttagaatttagaagtttgcatatggcacatggaggtagcttgattaatgtctattgcatgaatgagtaaatagtaaataaatgcttatgaaagtcagctgagggctctaagagccatatatttttgagtttgatggagatgtatacattgactgtattgttaaatgtctcaagaataattatgtatacctatctctttgaaattgtttaactgtctagctaatctagctaattgtttaaaggtctagctgacctttgtatgcctctgtttgctcatgtttaaatggtgtgtttaaccatatctattccatgtgtttattatgagatttaaatacaataatgtattgaggttgagtagcacatggcctgccatgtaaacaaagaatcaatatatattagttgccatcatagtcaaagtcatcctcacttataattagttacatgctctttgctcagcaccagtgtttgtgttgtagaggaggtaagaaacttattaaattctctcttttcttagaaggaatttctaactgtctgagaagacaaaaaataaaaaaaacaaatcaaacacatacaagaacaacataccaaggaaatgcagaacaaccctcaaaaggcacagaatttcattgttgggcctgctcaggtgtgtaggtatggggaactctgcgttagtgggagagaatctaggtcgtagaggctaagtcattgcagcagagagtcctgaatgacatggagaacaggggtgtgcctggaactgggtgggcccaggaggatattaaggaggccagccta

SEQ ID NO: 54086 - DNA, 1463 bp, Bovine  19866881273738
  misc_feature (1)..(1): n is a, c, g, or t
naatcgcttcagtcatgtctgactctttgcaaccctatggaccatatcccaccaggctcctctgtccatgggattctctaggcaagaacactagagtgggtttgcatttccttctccaggggatctttgtgacccagtgatcgaaccagagtctccattgtctcctgcattggcaggaaggttctttaccactgaagccacctaggaagccagtcagaaattctagccatttatcctctgcccaaatatttatggtttaagaagttcatcagattattgtctctagtagcccctactccaaatagaatcagctaatttgtccaaaactgggagcttggtcacataaattatggtacatccataattggaacactatgctcctatggaagaagattaaataaaatggaaaatacattcccctcatatttttaaggttttgctcagttgttcagttgtgtccaactctttgcaaccccatggactgtagccctccaggctcctctgtccatgggatttcccaggcaagaatactggagtcggttgtcatttcctcctccagggaatcttcccaacccagggatcaaaactgtgtctcttgcatcagcaggaagattcgttaccactgaaccacctgggatgcccttttaagttttaaatacttattaaaaatacaatgtacagtatgatctcaaatctgtaaaagaaatatatatttaactgtggttatatcctagtgacgtgattctaaataattttcattctcttctcttgtttttatggtttttcattgctcatattttccataatggcaatctactgcatttctaactggggttaggcatggggatcaatgattaaaaaaaaaaagaaagaccagctacctccaaagtattctccctttaatgttaccaagtaccctgggaaaaagaggacacagagccttggagggaagaactatgggctttcctctccccaacatcctcccaactaaaaagagtcaagatctttgggtaataagtcagataaaaattcctcagtcaaaagggtctggctgctttgtaagtaagtcaccgtcagggaggaggtgacagcagctgggtggggggaacgcatggtttctgtgtggggcaagataaggatatgtgaatgttcccattttctcatcacaatgccggacatccttaaaaccaatggctctgacagacgccattgtcagcccccgagagttctttagtacaacatttaacaatcatcgttcccaatttcccatttgcttagaacatcattcttaaatcccttaatttgttttcaagactggaataaaaggccttttcatcactgtgtcaaagggcattctgattgccaagctctaagtgctgtgattccccctatcagatacagaacagtgcagataatactccactgagataatgaagaatgggcggtccataatgagcgtgccg

SEQ ID NO: 54087 - DNA, 1206 bp, Bovine  19866881280340
  misc_feature (1)..(1): n is a, c, g, or t
nacttttgcttgggtgagtttgagatatcattgagttcaatatattgaattttaatctaacagagtctatcaccatgaaactcaaatttccatagctccaaatcattgagtgatacctaattcacctgtttcatcctttattggtgttctaagttcttacaagtctgtcacatcaggaggtacctacagagatactgctgtcaagaaacagattatctgtatctcttagtgttcataccctagaactgtgtttaattctctctagcatttaccttagttcaattcagttcgatttagccattttttcacaaatctaggcagccttgacacaatccctcggccaagagttcacaagagaaaaatcgggactggttcacacaatagacaagaaatgaaatcagaccattcctggctggcatctttggacaaatgtgccatagaagagtaagtgatgcatctgttagtccataaaactggagttctaacaagtcatatattttctattctactaggacagagaatcagaataagaaatcttaacttcacagatagaatactcatcggtctactcaatctattgcaactatcagaaaccatgctttatatgggatatccctgagactataaaaaattcagattgagcacaatctggattataaaatcacaaggtagggatataaaaaaagtatgaagtcataaagaaaacccacagagagagtgtggcacaaaatatacagggaagcacatgggaagtctggaaggagacacgcaatgacacataaatagaaaatatgtgggaaggcagtccctgaaaaaaggcctatggatgtgcaggtgcttaattgatgctttagatggtagcttaataaggagacatccttagaagttcagagaaaaaaaatatgtatgcaaagtagaaactaaaaggttcatagaaggacatgaagtaacaacagccagagagaatgaagacaggcaaagatgaggaccatcttgtcataactgctcagattccattttcatagagagaattacttaataaacatatctttgccatataaaaatgattcatctcaaggttaaagtgtttatttattattattctattactacttattactttattaataaattgtgcatatgtttgggaatttctgcattatatgtcattcgagtgcccagctacttgttttcaccatgtcatta

SEQ ID NO: 54088 - DNA, 1543 bp, Bovine  19866881345174
  misc_feature (1)..(1): n is a, c, g, or t
natataacccataagccatggggcactgtcatcatgggaaatttgggtctcgatgtcttgacagacctggggcccaaactggttttgcaagtgtaaatgtacaaactggaaaatattgagcaaattgacactgaacctcaatttcctcatctgtaaaatggggataatgccttgcctttctggcaaagaatatatgagatagcataggtaagattccccagaactacatttagaaagtactcagcagacaacagttatttatgtccctaatcatttgatcagcttggaagtggtgttctcagcagtatacttactcttcaccagatatcggatagaaatgtgatattgcagaagctgctgcaaggtgaacagaattcaggcaagtacaaaaggcagaagaaaagtgttttaaaagcacactgaagaacaacctcaaagagcacgtttatccctgcaaaccactgataagcagccgctgccgccgccaccaagccacagaacgtgttaggatgcctcccttgtagcagcggtgctagacaggatcatgagaacgaaagccaggacccccgggtaaatcagatctgatcatagccaagacggccctgtgccacaagccgagaaacagttttcatagcaaagtacatcgcagaaacggttaatcacagtggcctcttcagtcacatccaacccacaacacaagcctcatcacagacagcagcatccttgaacttgaaggacaataaactaaaaaatggctccatcggtccactgtgaataaaggtgaagaacacacactgagagttatgagaattcacacttagatctataaaacaggaaagggaacttatctatcagcaaggctgattagaaatagatatttaaaggaacatttgggggcagagggagtagcttttctcagaaaagtgttttacatattggcccgcagagtcaaacataacagaaaatagtcgactgtgcacaatttacttggattttcaaatatctttagataaagctttaagtcctagggtgttttatacccacacacaaaggtctccatagtggaaggcatccaggcattactttgaatcacatcaaacttgcaagacccatccacagaacaaccaccgagtgcatgacaatgtaaagtcaaagcttaaacttgtggacgtgtgccacgcggctcagcaggagaaaggtcactagagacaggggagagaaacattcgatcgttgtctacaagcacgcgtgctactgcactcaggagtcctgctgctccagaagacccgatagagcaaattccaatgacatccctggagctccaccttcctcagatcttgaccctgagatgatggaccttgtattctttgtgctctaagcccgcttacctttcctcttcctcttttcacagagggaacatacttcggaggacctcctctgttttcactgcacagatggaaggtgatgcctcaagaaaaacagcaaggctagtttgttcgtcaggaggaaaaaaatatatacgcatacatatatgcacatatga

SEQ ID NO: 54089 - DNA, 949 bp, Bovine  19866881375585
  misc_feature (1)..(1): n is a, c, g, or t
ntctgggttccccttctgcaagtcccacttgctaagagggaatgttgatctgctgtagtttggcctgacagagcaaagttacaagataattttttattctaacaacaggagaagagagcatttaccttcctaggtggagggtaattttcaagttaaacagcaggcaaaaaggcaaatctaaaaggaaaaataaaatgaatctccccaaagtctgactgtgagaaaagatagtattaaaaggagttcagcaaagacagctacactgcaactcaggatcacggaggtgaagactctccgggggactggtactaaaatataaagaaaaaacctggagtgtaagagtccattttaatgctagctctatggagagaagcgtgacagagagcaaagaaaactgcataaaaagactatgaagtgtatcgtagaaatggctttgcaaacctggtttcagacccaggtaatgaaaggaaaaacaggtgtggctaaaacgtggtcacaaggtacttgaattggactagtgacttgtcatgggcccagatttctgaagcaatgttatagacaaagctttttctgtgttattcattgtagacttatctgtaagtctgtgaaaaagcagtaggatccctctatcctttccccttctgggtctacagatgtctgaagtccatttgtggaatcccctcaatttagttcaagcaccccatttcctcacaactacttttctttctatgagactgaatatacaaattaaccatgtgccaggcaagaatactctgatgggttgccatgccctcctccaggggatcttcctgacccagggatcgaacctatgtctcttatgtctcctgctttggcaggcaggttttttttttttttttttttaacactaggaccacctgggaagcccaaaatagaccaggctagaccatatatataaaactcgacccgc

SEQ ID NO: 54090 - DNA, 4013 bp, Bovine  19866881484492
  misc_feature (1)..(1): n is a, c, g, or t
ntatgaaatttaagtcacttgtctttaacaggaagttaagtaaattaaatcgtgtatctagtaggtagctctttttatgtacagagagtgcatgcagaaaaatacacaaaccaaagttctagcatgatttggacataaagaaactgaaatctaaataaaaatgaattaggtgaaaaatccctggaaagttgttttatggtgacagatggaccgaatgccttcagggacaaagcaacaaaattgattcttgagaataaatattgatttgacaggaagtcagacaaactaattatgtgagtaagtatatctactgtattttaagcaaagtggtgccaaaaacaagctgggaagaaatttactgcaggtagttgctgatgtaactttggggtttctccagtccacagagatactcttataacctggaaaatcacaccttctctcccagaagttctcccacatgtctccatttctcccaggtttcatgctggaaatctcaggcattttgacccccttctctcctttggttcctctttgtcactttcctttttgctcttgtataaatgctgagcatcagttgaacaatagaaacacagacctcgtctcctgaagcttgcttttttattgggggttacttctggctgaggctacgaatgctgtgagaatgatcttagcggagtggggtcttgctatggtcaaattctggtagaatcactgccttattaatttttatgatgtataaaagtcactgttttaccttttatacattctttttaaaaatatcattttccattattacaggatggtgaatagagggccctgtgctatacattagaaccttattgtttatctagtcactgttttacttttaaactagagactattgtgcattctgtgtccctattgttttgccaagtcaaggccaagttcctgatttcataattcgaagatctctatcggttgtttactccttccctattcacagatcttagccccagttccatcactttgtactgccatccatccacctaatctattcccatctgactcattatttctctccccacaactatttatttcacgagattcaccaaaagccacatttgctttatctctctcttccggggtgtgtgtttatttatagatttgtttcttcttctttttttttttttttgtgaaccatttgagactaaattgcagacatgatacatcaccctctaaatacctcagctgcatctcttaaaaataaggatgttctcctacacaaccattatcacatctaagaattcagcactgatttataatattatctaaaatacagtacatattcacatttctccaattttgggtggaaaaagtcatttctctttctttccagaatccaatcaaagaactgtattgtgttaggctgttagtctctttaatataggacactcctggacgatgttttgtgacactggtatttttgaagaatatacatgaagtgttttgtagaatatccttctattttggtttgtctgatagtttgcttatgattatgttctagttaaaccttttagcaaaaatactgtgtaggtaatacgctgacttgttaccttttctttcttcatgttgctctcttggcttgaaacttctcctacttctgttttgcaaatccattttagttaaattcattgttatgtggccctcttactgtactaggtgatctggttgtgtgacgggaacatgaagggtatctttccagggaagctttatgatacacactctccaaggaatctttgattaatactgtttccagtgatcttgtctgcctgaatttctatagcactaacagtggcctattaactgtaagatgactttgactacttatgttcaaccttgtaatatggtataatgtgttagtatataatatgttagtgtatatgaatgtattgaacaagtttccttgtccagtaagactctaagttccctttaggcagatgtatgctttttcccatttttttctcttgttggttatagaactcagcactgtgatagaccaaaggcagtgtttaagaaacattttttgagttgattctggtaatgtcttcttcatttgaagtaattgttaacagtcttctgcactgaaaagaagctgtagcatagataatacaataatatatagctttggaatgcattacatgactcttgaaaaatcatccttttatgtcatccttattatgtttgcctaagaccatgatcactttgtgttccttgagtatacatttgaacactgtggaaagataatcagaagtgtgttgagtgattcagatttttaaattaactatgggtgatcatcaaagcaaataatccacacctgcaaaattaatcatttaaaccctctgtctacatgtaagattagatggttaaaccgttatgctattcggtacaggaatcattcttctcatggagctatttatcatctgtctgtgcatgttggttaacacattttcctttggaaatcaaaaagacagcacagaatgcagagaattataaaatcatcacatccatgttgaacagaatagagtggggaggctggtataaaggttcttaaattttgcattgtgctttattattctacattaggggaaaaatatggttatagtcatgggccaactggatcactccagtttcccaaaagccctgatatcatctgccccatgcagaactaatcaattactaaaaagtgaaactttgatgctttattgtttgcctgtttattcattcatttatttagtttggatccaccaatgcacagaagctttgcatgatgctctgaacagggagttccataaagcctgtattttcttccactttgtgcattaggggccattgtaggttactgtgccaggtctcttgattgctggccatctggtatagccatggcctctgagtcttagagccatagagcccccagcatgaatttaccacccattctggtataaaacaaccatttggctaactttgatgatttttaaactgtcaactaccccctggtctgccttgactgtcacaaattcatctgtggtttggtcactggaaaataagcttcaaggtatttaatcatatgcttctggttacatccaaacagtatgtgttgcatttgaatttctggagcttaatcaaggagcaagtgtgaaaatattctatatggatattcagaatgggtcaaaatgcttgttgagttattttagtaataagttagatgtggttttaagaacagtgagtgcatggattgtaattagaagagtttaatattcacaaggatggagtgtcatagtttctaaaggattgccatcatacttatgcctaataaacatattctccatgaatatgttaaggcaatattagtttactaaacaagatggtgattataagcaacaattaattaaagtgatttcaaagacttctgcaaacaaagcacattgtataaacaaacctttgaattagaatgggccgtaggcctagatatgtcaaaaaatgtgatcatatctaaaatttctgacactagaaaagaaaaatatcattcatcttaaacctttttaaagcctctaaaacttcttgccattgggtaccattcttttttccccagttccattgagatatagttaacgtacatcactgtatgatttttaagtgtacagcataaaggtttgactcatatatgtatatgtattatgtacatagtgaaattattaccccaatacatttgattaacattgtctctaaagatacaatacaaagaaatataagaaagaagggaaaacattttctccttgtaatgagaactcttgggatttactctcttaacatctctcatacacaacagtgtgtgtgtgttagtcgcttaggcgtgtctgactctttgtgactccatggactgtggcccgccaggctcttctgtccatggaattctccaggcaagaatactggtgtgggttgccatttccttttccaggggatcttccgacccaggg

SEQ ID NO: 54091 - DNA, 973 bp, Bovine  19866881529756
  misc_feature (1)..(1): n is a, c, g, or t
nacaaaccttctttagaaaaaaagctgtctagcccaataacaacaaaactctgaaacaacaatatgaataggaatatttcaggtaaattgctagaggctatattttgttttctaagtaattgcatttctcaaggattgatgatagccttctgaaaaacaaggcactgtaagctcactttgaggaagatttctcccaaaggctgcctaattcaatgcaaatatatctctaaaagaaaacaaacagcaaagtgtccctcagtaaccctcattctagggcgtttctcaaattctgccttaatccatgctgtggggtgagattattactaacccaaatgtttcttcaacatgaaacctgaagataatttgcctagaaaacatggctctgttgtattactttggttcaaatctacacacaattgaaagagaattttcctgtccttattatttgcatgcagacaatcaaataataagaaagcaagacagaagatcatgtcataatattcctcatctacctaagggcaacacaggtgtttgcataagacctgaatcagcaggctcagtacactgattcttaggcgggtggtctagaacaccaatgacattattcacaagcaatgaccttcactaaacaaaaatacccagtatgaaagcaacttcaaaaagaggacgtgaaatacaaaccaaacacttttttgtagtagaggatagttcaaggtcagtgtgtgttactaaccaccacaggagagagtacaaattcaataaacatacccaaatgcaatatgcctactcaccatgtttaaaaagtagccaatcaataacaaagagaaagagtggtggcaatgcataaccaaatctataaatattcattaggcagcacagtgtcatatgacacaaaactcatatgcttggaatcccaagtatctatcaactaccaaccgtctgaccttgggcaagtcttaattttagaatcact

SEQ ID NO: 54092 - DNA, 1521 bp, Bovine  19866881590728
  misc_feature (1)..(1): n is a, c, g, or t
ntattttgaaactaaattttacaaggatgtagaaaatgaaaaaataaaaatcctccaaggtataacccacagagaaatcctctctttgcagtttggtgcagttgagacatttttatgttcatagtcatccaaacagaaattttcttctcattttgggccatttaaatattgactcattttatttttgcttcatttttgcccagtcttcaaattttaatggaaacttcttttgaataaaatgtgtaatatatatcattcactttatgcattggggtagaatcgtttcaattttactagatactctggttagtattggttgtgggagagaacatgaacaatttatgaggctcaagagacttaagaaaatataagtaggtaatatctcttagacaaactctaaggagtaaataaaaagctatcactttaattcattctgtccaacagaaagaagttataagtgaaatatgatgggatcaaaatgtgtgcttctaagatggttcatctacttcagacctgatgattagtgaattgttatatttttcagaatttagtcattatttcaaaataagattaatgtagaagaggctcctataatccacagggacattgttaactaattattttccatttcttctgtacaacatattccttatctttaaagggaataatagatctccactgataggaaagattactctcaggtcccaaaacatataagaacgggagtggaggcttttaaaaaacctgttgataaattatttaaaactgactgagttaggaaaccaccagaagagaaaatatttactaaatgaggtagaagtcttaaacccatcaatgctggaatactttaaagccccttgcctgctcttcccacctctccccttatccaccagttctccaaatgtcagcttgaaccctctggccaaatcctgtttcagggaatatacttgtggccttggcacagcaggcattaaagatgccattaagctgacatctgctcctggacacgtgaaccttaaatggcctgaaagataatgtgccatgccaactaaagagaaataaaaagcaaaaaaaaaagaaagaaaagaaatgaatttaaagtatacttaaatgaaatttgaatttaaaggtgtgcactggtgtgtgctcatacacacgtatatacacactcatatgttccacttgctttagattcatagcactggtacagaattggaatgccataagagctgctctgatagtgacatatgtttcacattatttttaaagaactcatccttatactctttttgccaaagtgttatattatcattggtgccatttatatctctgtgacctttgcctgtacagagaaaagttctcttcatattcttttcaaataagcccaaacatacatagctaatgcaacaaaggtatacgtcacccaacatgatttgtcatcccaaagcactgaaattctttccccagaaccctgactccaaagatgctctcagtagctccatctctaaaacgcattggaaa

SEQ ID NO: 54093 - DNA, 967 bp, Bovine  19866881735739
  misc_feature (1)..(1): n is a, c, g, or t
nttacaactctttttcctggctatgatttattagaccgtggtactataaatcatgctttctgattccctcttctctttctgaaataagtgactcattctgtagggccaagcttcctcctttttattccttttatttttcattttcactgaagaccttgttttcatctatcccagttgtgttcatgtcatttttcttgttaattctctcactatctgggagtgctcatttaaagaatatttctataaaagtcatagctcatctaagaaatacaagaagtaaaaaaacttaatatatgtgagtccttaagaaaaatgcataggttttagtgtataagccatatttttgctgggaagcatgatataagtgaaattttatcttattttgatttttttctctttctgtaaagggtgtaattttcactgggcttggagaatgtgaattcaaattacaagtcaggtcataagcaatgtttatctctttaagtcaaacttctagaaaaccataaagaaaataatcctattttttttttttttttttaacaacactgcaggtgaataccatacgtatttaggagctaggagagttttaaagtgaatgacggggtaaatcaataactcccacatggagggaagaaatgattttctattcagggtatcaaacaaaactaacgtgatattaatggctgaatgaacaggcttcccatttgcacttgcatgagggggaggttgaggattggcagttgctcatataaatcaagtctggtaagaactgtatgaataagtgtttgacattttcagttggaaaggagcagcttgtcttcagttctaaaaagtcttacccttgtgacagtcatcttttttcctcttttgatgaaccagatttttaatatcaactttgcataagcaaatgcactgtaggccagagagcagagttttctgaggcagcaaggtagccaagacgacaggg

SEQ ID NO: 54094 - DNA, 801 bp, Bovine  19866881872867
  misc_feature (1)..(1): n is a, c, g, or t
nctgtcctgatactgcattggaaaatctccctgatactccatccagaagggctaagcaaaatcaatatggcaacaacagactgctgatgcattccagcttttaagtgggatgttgttatgattaactatggcccagctccttacctctctattatcccagtgctatctcaaaacacctcagtcgctcatcacattcaattaactctatatgcttcctaaaaatgcagcataagactgaaagaaatataaaaggggaaaaaaaaaagatcaattacacttagctttcagcaagattggaataatacggttttccctttttgtctattttggttaaagaccaatcaatatataagaatatcttgtgttttaaaataggggctgtgaaaatcatttacacaatctgttcttttaagtgccatatgcttagctagaaattatacagaacccttgaactttttttccgtattactaccccaaagaggaaagaatctttttaaaaactttataacacctaattatattaagcaatctgtcactgttgatttttcataatccagctactaatgaatatgtgtatctctctaattattagaggatagcaggagaaggcaatggcaccccactccagtactctcacctggaaaatcccatggacggaggagcctgggtaggctgcagttcatggggtcgctaagagtcggacatgactgagcgacttcaatttcacttttcactttcacgtgttggaggaggaaatggcaacccactccagtgttcttgccggagaatcccagggacagg

SEQ ID NO: 54095 - DNA, 791 bp, Bovine  19866880354223
  misc_feature (1)..(1): n is a, c, g, or t
ngagaaccatgaaagaaaaagagagagaggctccttgtcacctcccttttttataagggcattaatcccatcttgagggtatcacagtcttggctatgtctaaatacaaccgcctcccaaaggccctacattttgatactctcctattagggggttaagttttaaacttatgaattttggaagagaaaactcagtccatagcaccaagtaaccattcagagtagatgctgtgaagaccacaatgataggtgaatcagagtatctccctgggaaacttgctgcaagattttaatgtatacattcatgcagagccccatattatttttacctcttagtagagccaactaaaacattgggagatcaggtgatttgtccaggaaatgcacatgaaggacacatgctggccaacttgctttgtttgacaaagattgcaaggcaccgattctaagagatctgtacatatgactaggggactctgttatcagcatgggttatttggcttttgtccatattaaatgttttcatggtaaaagcaatgatataaaaaacttttaaaattttaagagaaacactaaatcattttaaaactcgcatggttacatctatgtgtatttgtacacagtaattctcttatattgtgtgtatatatattgtttgtatataggcagatatgtatacatgtgtggatatgtatgcataggtatgtatatgaactcaatttttattagtgatagttgtgttctacaaaaactagcatatattgaatcattgttcctagagaaaatacaagg

SEQ ID NO: 54096 - DNA, 2127 bp, Bovine  19866880395022
  misc_feature (1)..(1): n is a, c, g, or t
ncaagagcatcaccaacaggacgaacagcagaggctgggaaggtctcttacttacattaaaaaacaggttgtctcggtcaacaacgttggcataaccagggtgtgtgctatccgtggcgggggggtgggggggtgtgggtagggtggtgaggggggagatgcatgcgcactcgccaaccggaaggccacagcccaagccctactttcaacgctgcctatcctggtgtcaacagcctcaagtaaacagggagaaactttgccttacaatcctttttatggatgaataaaatatcatgttaatgaaacataaaagggcaaagttgctggctgggggaatctctaatagagggaacaggggaatgctagcgaaaggactggtgagctcctagttggtaacagatttgccacaacgcatcagaggaggccagaaatacacaattctgcctctctaatggaccaggacaagctcaagcacttccagggacataggggtcccagggtgaagacagcattcatcagagtattccatgctgttttatcatccaacctcctcctggggaactattcaatgggcaattaagatttataatccaaatgatctcaaaattctatctctgggaagtcaagtccaaattaaatcagaccaggcttttaggcttccaaggatcacattttctcttttgagccagtgcatttcaacactcggaacttctcctcttacagattattttcaaggccatctctggatgcaatctcctatgcaaaatctgatgtataaaatgaaaaaggaaactggtaaactccagctctcagagaaagaagctaagtgggaggcactctaacttccttaagcagatttttcaaaagttacttattttaacctcctttctcataaatattactggaactgctcctaacccaatatacacagagaaccttatgaaacaaaaatgtccaaaacttaagttattgcatatggaaagactaaaacacaccggcagggctttgaaatataaagtgtataagaatagtatataatagacatctattatttagaacattttaaattatcacacttctcccagtgttaacagcaccaaggcagtgaaacaggtaactgacacacggcccagccctgcacctctcttctctgacttctccccagacttgagacaacattcatgcccaggagggacccgcctgaccagcctagccctagaggcaaggagaggacgaagaaggaaaaggaccaggaactcacatttcggtgatgttctcaggatctgcactggtagcctccagcttcggaaatgccacgatgccaggagaaggatcgccgcaccagatccgagaggcgctgcacttgcaggatgtgggacaggcaagagcggccctccagaagcccacaatcaaccagcagaagccccagagccgcgccatggcgggtccatgccacctggtccaggacgacattcctagccaccagtgccagcccgagtcagcctgagtgcgtgtcgctgagctgtcccggccggtctcccctgcccgcgccgagtggcctttgccgcgctcaccgctgtctcctctcggtgctggtctcaggcgcgcagagccgagcgtgtcaggggctgagcgtgtcctgtcgggcggcaccgttcacagtggcaggggcatctcgggccttctcacagggggcgctaccgccgctcgcagctccgcggcggccgccgctgcatggcccaacgagccgagcaccggcccgcggcgctcccgggatgctctggggctcaggcttctggctagacgcgcgctgcgatccgggacgcacctcggggctgaggacaaacagatatgcgtaaggctgagctcaagaccccatacgccactaattggggtactctccctccgcgctcgcgtcacccccaccgcaagcccagccgggatactggggatagatgagtgcccagttccggccggccccagaaataaacttgcccctcgatggcactgacgccgcggggcaccactgtgcccactctctccctgtgcctaaggctgaaggagggaaaaatggggcaagggacaggatcccatagcaccggccagggtaggactccttaaagggag

SEQ ID NO: 54097 - DNA, 2811 bp, Bovine  19866880408381
  misc_feature (1)..(1): n is a, c, g, or t
ntagggtcagaaggtcacagggcttttcaattgttttatccaatgtaataaaaacttcctcagcgtagagatagaaggtatgaaactgagatttcaaacggctgtgctgagctgaactgtgtgaatgccttcactaggaagaaaaagtgtttttaacttgtttgcaagttgtattgaataatgaatgatgtaaataagaccgcctaatttattaacaagtccaatctggcttatgcaaccacaatgaaaacaggctgtagttcttaaatgcatgtaaagcacaattcaaggctctagaactcccaatggaggggctgagaagtaaatatcagagtgataaaatctgatgcctttgaatccttttaaatgccagaatattttagtacaattaactgcagcagtggaaaagcttacgcaggtgaaagagccaaaattaatgtattaatgacataacattacaattgcttaacaaagccaacaatgaattgcacacagaggcttgagcagcagaagctacaaatcctatttatgttgtactaagaggaaaaatattagattggtctccaaatatcaatcccaaatcagcaaatgtcaccaaagaaatttacaaataaaaagtcattgctggtctgcataaaatatgggcaatataaaaatgaatgccctttcacagccatgtgaatacacttaacacgtctgaacagtacattaaaaatggttaacgtggtaggtagattttatgtcatgtgtttctttttttttaattttattttattatttaactttaccatattgtattggttttgccatatatcaacatgaatccgtttctgaccatgatttttaaaactccatgatctgttttatgtttgaaccatatctcttaccaccgggtgagacagaacatgtcttttgcgaagcattttgacatattctgaaacttaaatggctgattacataactctaacaacagactttactcttgtatcctgtttatgtgtgacaatagtattgtttgtaaatttaacttagcactgctttgggataatcatctccaaataacagaagctggcacattttggcagggtgacgtcaggcaggtgtgaagtgtaactatagatggatatagacctagacatgggtcacatcagtgggtaaagaatatgagacagatactgtgaagggaagatttttaataaaacagcttcaaacaagaactctgaaaatgaaatgtcagcatggcttaaaacatacatgtagaatcaaaaaataaaattctctcccttaattagtctataggtatattttttaaatgttccaccatggcttctctctgaaccttaaaaggcacagtgattgcgacttttcccctgtgtgcttagccgctcagttgtgtccaactctttgcaaccccatggactgtagcctgccaggctcttctgtccatgtggattctccaggcaatttccccaacatatagatattaagagatttactatttttaaatgatatagtaaactgcttcagcaagttctaatcacaatttagctacattagtcctacttttaaaaaaccgaaacataatttcagctaaactttattaaactagaactttaaagcaggttattttaggaatatcattgggtctaacaacaaagtaaaaaaaaaaaagagtgtaatttcgttccaactgtagctggtatccactggccaagaattgaaaagctgttcaagcaaatattaatatgtaagaaagagagcacagatggtgtcatactaaggatgagagtgaaacaagcccaaccactgatgtcattttgatatcaaagcaccagaattcaaaataattatatgaagtgctttccaaacaaggatctcaatacattttacagataaagacactggggcagaaactgacgagtctcaaataaagctgagggaacgagcaaagaaaagtacttcttctcagagctcacctctatcagcttgactcctgtttctaaactaattccccattcctatacactgagcttacacacctctccattccctgaatctcaatggattttcaaatcagaagaagaaaatgagtagaaattaggaattatgattactattattagatgaataactgtgacaaacgctttagtaaatgtaaaaaaaaaaatgtaagcctgaaaataggaacctgccatcagataaaagggaaataacaacagttgtgagaactgatacaggaaaactctactcaaatctgttatgaataatttcatatctatcaggcagctaagaccactcaggcgtaaaatagtattttttaaagagagttttcctccaattacggccttaaaaatactaaactgaaaaaaataataattagccctatgtttcctccttcattatctatctagaacctaaaacagagttttaaaacaatcacaaaagaaaacaacatctaactgtttttaggcactcctcgtggtctcaaaatagtctgaagggctctgaattccatatggcttcctccatctaactactgacaccccatctcatgaaaaatacacaaatcccgacaaaaggccacagactctgaccaacctgacgagcctctaccagcccaagccggggtcggcgtggtcaggaccctacccacccttcctctccagctctgcctgctgctctccttgccagaaggattgctatctgagcatcctggatccagcctgacagctggctgctcccggcacatcttagcactgctgggccggcacgttttcctctggtctggtgtcatttccttctgcctgagcc

SEQ ID NO: 54098 - DNA, 1375 bp, Bovine  19866880452894
  misc_feature (1)..(1): n is a, c, g, or t
nctgtgctaaggggtgctgggttccctggcacttagaaatatcgctgagctatagcagggaggataagttccttgaagtgatggaacttgaacttgtctttaagagacattccagagcaggtagaaaaatagatcaaactttccaaaaggcatgagtaggtttggcctgggtgaggagccacagctgtttgctggctgaattcagggcatgaactggagattgcagaagcctgaaacacaaagtgagccatcagaatgagccacagggtgtcctgggggaggggttatgtgtatggctctagataagccactccaactctctgaatttaggggcattatttataatatgaaggcaagccgatgtctactcaagagggtaattactgggctcaagtcaaaccactgagcagaaattctttgtaaaggtaagctgctgtgtggtgacagatgattatggtgggaaagtagtggcaagtggttaattacagagcaaaaattccagtctcttgggttgaggaaaataaaaactgtaagccaagtcagctctccagttaagtggattttcccatgttgtatcagctccttctggtacatttagtgaagagcacattcctgaccaaggttgatcactggaaggtctctcctggcaccaccgtgtgtctggcaatcagagcagcagttctgactccccatgtcatacttgggatcactttccatctcacaaatatttaagcaagagtgtgagggccagctgccaagttgcacaatacaggacaaatacctcattgtgtttgtcgctgcacagtatgtggtgttgtgagatccaaaaccacccggtgactgtgactggaatgcgacggtattctgtaaccagggtggctctttctttttattttgggggggccacttttgtgacatgatccaaactcctgagaaaaggtggcaaaacaaatactcggatatgttctaagtgggtttagaaaactcgtgaaccctgtctgaacttttattagaagctcccaccactggcccatttgacattagaacaaggaaagcattatttataatggcatgtgtgaaatctcagagggggtcttggaaacattagagtgaaaaatctgtcccaaagagactgcaagtgtaaaataaatgatcagatgggaaaacatgtaaatcaaaatttgaatccttttttttttcctccgttaaaggacacaggagccttttctttggctatgagcaacacaggacagagaacctgtgagagaagtggttgtaatgagaggtgccctacagtaccggtcactgcagagggaggacgtgaccgccctccgtgggaaaccagtagtgttgactcttcttaatgtatctagaa

SEQ ID NO: 54099 - DNA, 1611 bp, Bovine  19866880454686
  misc_feature (1)..(1): n is a, c, g, or t
nctgtataacacagggagctctactcagtactctgtggtgacctaaatgggaaggatatccaagaaagagtggttatatgtatacatataggtgattcactttcctgtacagcagaaactaacacaacattgtaaagcagcttatactccaataaaaattttctttttaaaaagaatttttaccatgttggaaacctgaattcagttcatcctcattttagttcaagaatctctgacccttggggccaagagattctcttgggtggtcagaggtactcaggtttcatcaatgttaatggatggaaaaacaaccaccaggagatttggagtcattcagcctagataaccaaatggccaaagtgactatttctagccacttgctttttttgcagtgtcaggttgctgtaatggactatacacactccctgcaattaaacagtctggtgcatttgacctagagaagatggatgtgctctattgaatgttgctgtctgacgctgctgccttataacactatatctgcaactgaggacaatgtatgagcagcctgtcctaaactagaccacgaaaaatgtagtctttattgtacttatactccctcaacatgttctagaacaatgccactaattcttagtacaccaattcatacacatacataagacaaaatgttcatgaaataatgcctgtcatcactatgtgtgacatactctgagatgtcctattcttttgtttaaggacaattatcacgcactgtatcaaaaacttcacaactcacgaatgggtcccaacccacagctgtaaaatattgttccagaaaagcaataagaactaccatttcatttatctaagaattcaacaaaggcctgtcaagcactcagtgtccaagctgctgatgttgggctcagacatctgttctccatgaagttaacagtcagtcaaggcttcataacaaaagagatagtaggaatcatctcctactatctttgattttgaaggattgtctccttcataatcaaaggagatagtaggaagaggttgcagaggactacctctgtctgaggaaatgcaagaaggcgttgcggaagcgaagggcttgagcagtgccctgaaccatgaaggggacggtgacatggacacgtgggcatgactgctggagggaggggaactggagaatgtttaccaaggggctgggaggtcccagctggggtctgagtcctttgagatcctggagattgtgaatcttctatacaggagacagggttatcttagaaatcctgtccaatggcctgaaagtggtcatgattaaatgtgcaagtaaattccttccgtttagcctcaagtaggagaggagaggcctgcgttgggaggcacactgaggaaagaggtgtatgcagggaagccagggttcaaagcaagcacagggcgactgggaacaccagggagaagaaaggacagttgttgtgggtaccaccctgggacctctccagactcccttactgctgtacaccatcttccttggaagaagtgatcagatgcacacatggcttgcacactccacaccaccctgtaacaaagctctggcagaaacaaagacatcaacaattccagaac

SEQ ID NO: 54100 - DNA, 713 bp, Bovine  19866880458548
  misc_feature (1)..(1): n is a, c, g, or t
ncgcaatcatgcttgcaccatagccagtggatcaaatgattttgccaaggtgaattcaccctgtcagacattcccctgtctttgagacagcttatgaactgctgcacaatttctgccagtgctaccctagcaaaaacgtccttggcttacaaatgtctgtgcgtttgtttgcttaagggacccagataacctgtgggaggcagccgaagagacctccccgtgagcaaaaagagctgaaaaggcaagacatcatacaagtaccagtaaatggagaccaggatgttgatagaacatacttattagtgactcatagggagcctaattctccttgaaattaatgagaagcacttgaacgtctacctttaaaaaagaaaataaaccagaattttttttttctttcagtttcttttccctacttgaatcaggaaaaccaggattgagttcctaaattttccagtttataaacccgtgaacccaagcaaagtacacacaaagcaaagaagtacacctgagaaagtagttctcagactttcatatgctaaggcccgcccaaggagctcaccaaaatgacaaattcttcaatccacttgctagaattctgattcaggtattggcattttaataaccccaggtaataattcccatacagggaacagggaaaccacactttgaactagctgaacactgacccaaaacctgcaagacttcttttt

SEQ ID NO: 54101 - DNA, 2563 bp, Bovine  19866880473368
  misc_feature (1)..(1): n is a, c, g, or t
nattttttaacttgaagtgattgaaagtgaaagtgaagtcacccagtcatgtctgactctttgcgaccccatggactgtagcctaccaggttccaccgtccatgggattttccaggcaagaacactggagtgggttgccatttccttctcgaaccctggtctcccgcgttttaggcagacgctttcccgtctgagccaccagggattgagaaattacaactgttgacagatttaacctaaaggtaacaagatcccatgtttctttctttttatttttggctgcactgggtcttaactgctttgtgtgggctttctctggctgcagcaaatgggtctactcttcgctgcactgcgcaggcttctcgttatggaggcttctcttgtggagcgcaggctctaggcacacgggcttcagtagttgcagctcacgggctcagtaagttgcggctcatgggctctagagcactggctcaatagttgtggagcacgagcttagttgcttcaggtcatgtgggatcttctcagaccaggggtcaaacctgtgtttcctgcactggcaggaagatttcctattcacagcaccagcagggaagttcaatcctgcattttgtgaattagaaaaagtggaagctcaagatcagaaacaaaaatgttattaccaaaaaatacactccattttgtactgctgaacttgagaattgtgaagtttgtatccactacacttagatttgctccaaggactcaggtatgagtgcaatccaagcagaactggcctttctcatcatcctgaatttctccaagtcttcagagattgttgaactgggaagagaagggagatggggaaagacgtggaatgaggcagcacctggaaagattatgagaagtacaagtcggaaatgagggaaggaaggaaacaggaggatgcaaagaagaaagcatcatcatctgtcttttctgaagtcccagaggggacagattccctcgctcatcatttttcaggctgggggcaatgcaagagggaaaggtcaggagttccaggatagtgggaagatgtctgcagatgatacagaagagatggatcagatgcatgctttgcagggagcatctagcttagaaatagtaattttgagaaatacaaaaataaaacactttctgtataagagtataagaaagatatgtggtgaaataggcaatgcaactaacttccaagcgcctttatatttgagctgccagagtgatatgatcatcttcttacatccaatgtctgatagcttattcacttctagtgctgtggcgcaattccagttcagataattacactctcttacctaactcctcttggaacatctattaaatatgtttcccatccctctggcccctggttatttcttattccaaatctctagtacccaagggatggtgagccatgttaagcagcatttatcacatatcttgaaatctctgaatgagaaatgctgtaaaagtgcccattgatcttctttagcaagagcaggccagcattccataggtggtccaagtcatttcctagatctcccctccttatttgcaagcccctcacatttatcttgactgtttcccacttccttaattgtaaatatctcaagaacaaggagtatatctttttctggtagcttctagcaaattataaatacaccacaaagcctggtgacagattacttaatcacacttgcaccaagctgcagccgagtcctctttgggcctgtcgtaacctcatactccagaacctccctcaccaagtctgctttccaacctatctaaactaaaatagctattaaaaaccatttttccttgtctatctgacatggacaaaactacacagtaaagaggaaaatatgaaaaagatggataaggtgagaaagacatgggagcgctcataaagggtgtcactcaggaggtgcttacaaacatccctgaatgtgcacataaacctacaaaggagtgaaacgatcaatcaatcagtggagatgtaagcatagggccctttgtggttgcagtggcagatactcacttagatggaaagcataggaaaaaaggcgtttgggtctcaattcagaatctagggaaagtcaccccctgcccccctgcccagctgtactcagagcagctgcttgtaactgggcctcaggaatgaagggaagcaagcacactcaggccatctctcaatgctgttttcctccacatatcaggttcattctgttttcttttgttaattctctagacatggaaggtatctaagagttcccagatgatatatctgcagcttattcacagcctggagagagatcctaaaatgagccccgagtccaaatgacctaggaaggccctctctggtcctgctagagtcacatgtccaccctgggaccataggatatcatcaccaggagagtgtgaatgggggagacaggctggggtagctcccgggtgtgcaaccccaaaggtcaagagctaagaatggactaaagattgtgtagaattgaatgcattttagcttaaatatccagtcagtcagatagaacagaaa

SEQ ID NO: 54102 - DNA, 3356 bp, Bovine  19866880498575
  misc_feature (1)..(1): n is a, c, g, or t
ngagaaggaaatggcaacccactccagtgttcttgcctggagaatcccagggatgggagcctggtgggctgctgtctgtggggtcgcacagagtcggacatgactgaagtgacttagcattagcattagcatcactgtttaatttcactttattgataaaatgaagaatcctcatttctagatcccaatgtgattcctaaacatgatttaagcttaaaaattgcagttttaagctttactgagagaagacttctttgctcctgattggagagaatgtaaaatcaagtgaaaactacactcacttctaagactaaggtggttggctcttgaaactgtatagagagcacaagcaggggcaacaggacccatgagggatgtcacttgaggtgacatggagcctgggaagtccttctgcctttatctacaaatgatggggaagtcctagggtctgcttactctctcttagctacccccagaggagctggggtagagttggtggacaagatgaggactgagattgccctgaggtttgcagggaaacaagctgaatctggggctgttatggaacaacagcatctgctaagttctggaatcaattgataacagggaaactgtcaagatctacctaagaagggaagagagcagtggcttgggccttcacttgcaggcatgaacaaactgatgtgcgtgtgtgctaagtcacttcagttgtgtccaactctttgtgaatggaatgcagcctgccaggctcctctatccatgggattcttcaggcaagaatactggagtgggctgccatgccctcctccaggggatcttcctgacgcagggattgaacttgcatctcttgtctacctgcctgggaggtgagttctgtaccagtagcaccacttgggaagccctgaaaatctgactgaagactacagatctgccttctggcccagaattgtgcatcttctcattttgggagctgttcttgctcctcctgggagtgttctggaatcagaagggggagcagtagcaagcagagtgctgtggactgagtgtgtccctccccaccaaatttaggtcttgaagccctaacccctatgtggctgcatttaaaaacagagtctctgaggaagtaattgaggtcaaatgaggtcacagagtggggccccatcagcaggattagtgtccttataagaagagacatcagaagttcatactctccctgcagtcacacaagctacacaaagttgctaggaaaccagagctctcaccagagactgaactggctggaaacttgatgctgggttctagtactgtgagaaaataaatgtcttgttttagctccccagtccatggcattttgttatggcagcctcagcaaatgaatgcagagagcctttcctagccctgagtctgactccatatcagactggaggcagaatgcttctggagagacgggtcctggtgtagactctgccttctaacctgtgtggtctctggtaggtcacattgcctctgggaccagagattcctcatctcttaaactgagatgaaaggacatgcttggcttaccccagaagattaccaggaaatcaaattcttagtgtaacaacagctaatatgttttgaacttttgttattaatgtgtaccaggtgttatcctgagagctttatgacatatagttaaattcaccttttttagtgtacaattgtgagttttggcaaacagtcatttaactgccaccacaatcagagttcaaaacgttgtcatcaccaccctcaattccctcatacatctgtaagacaaactccccacccaaattcccaggccctgacaaccataggttttctaggcctatagttctgtcttctcaagaatgtcatgcaaatggtatcacactgtggtaccacaaagcttttctaatatcaactcattgaatcttcacaaacatattctgaggtatgtaccattattatacaattaatagatatggaagtgctatgaaaaagcagaaaatgtatacaaacagaagggattttcccactatttatattattatttcatggtgaacaaagacaaaacgaattctcattgggaaaaaaaattcagaaaatattttgactaacccagaaaccacttgacttgaaattagtgtcacaccctctatgaccagattgataaaagataacggaagattttctaggctgtaaatgacagcgatttcaggtgaggcaataatcatttcccactggaagagagagggtgaccaggttatccccggcactcctcctgaccccattcattcatggctgtgttcatggagctctgttcactcacaacatctaggaagggctgaatcacttcccatgaagtatcctctggtttggtagccacacaccacaaaagcagccatcactctttgtaataggagatgtgatcctggatatggtcataaagtgttcacagtctgaccacagcagtcccaagttctccaaggagaagattttgcacaaattgtttctctctctcttttttttaaacttcctattacagatgcagtacataataaataaatacataaggtccaactatttcttaaaatttacagatatcatgaatttttaaggaacagctcaggagaaactgcagaaacaaagcaagtgggtgtagagtgtgatcaggagatctaggagtttcttcaatatttaatgcagccaaaagcctctgacagctaatcatcccttaatggggcttggcctttggcctgcctgtttctaagggagtaaaatgtttggcttccaaatgagttatcactcactcactaaagaccacaagttgaacgtggcctcccaggcatcgttgatctttgctccttgagtttagaaggtcccacattagctgtgttgttgttgtttagttgctaaatcatgtccaagtctttgtgaccccattgaccacagcccaccaggctcctctgtccacgggatttcccagcattggagtgggttgccctttccttctccaggggatcttcccaaccaggggaatggacccacatctcttgtgttggcaggcagattcttctttaccattgacccactttattcgcctttaaattcacctttacaaagccagctgggcacttgctttggatctatagaggggctccagcctgccaccatgcctctgagattcacagaggggagagtaagcatcaccgtggttggagaatgagctgtggggaggacaagaatgatgctttgggagataaaagaattaggcaaaacaaagggcaatgttggcatttgaaagaggactagacaagtgaaatttgagagacgattcagagcaagggactcagaga

SEQ ID NO: 54103 - DNA, 778 bp, Bovine  19866880564516
  misc_feature (1)..(1): n is a, c, g, or t
nacccgaggatcgaacctgtgtctcttacatctcttgctttggcaggtgggttctttgccacaagtgtcacctgggagtatctgtattctaaaaagaccaatgtacaaaaaactgctttttgctctccctactgaaaaaccactgctctaaatgaattcttttatttcttcagctcaaaagacagactcaaaaggcctgaggggaactgatctgtcataactggtgtgaagttattattgtgctcaggagatttacatggaggacctggctacccttgttattaccatctcagaaagaaatagaacttgcattctgaggaagccagtttcagttttccaaaatcccacaaacccttcagcttgcaagagaattctatcggcagtcccttggagctggctgcagtcttgtgttaaaatcatgatcccattaaccatggacctattaatcttcttatagactgttagacacaaaaccgcaggcagtgaaataacagctggttgggagtgatgaaactttaaagggcacggttgagaggcctggtgtgaaatcacgccaaagctcagcccttccagcagcaaactcgattgccatcctagacaggctggctgaaacacgtactgagctggcaagagccaccagataggtgtgaggagcctgggatgcccagctagtcatgtaactcacagcacaagccttggaagaggcagccaaaaaataaaatcctgaactcgcacagattctgaccagcccacacacattttctccctccacttccca

SEQ ID NO: 54104 - DNA, 751 bp, Bovine  19866880651947
  misc_feature (1)..(1): n is a, c, g, or t
ntgagcacaaagccctggaaaggccttcaagattgcacaggcaaacaatctcctctctgctatcttggcaatatcttggcaaatcgcctatgatcagctggatctgaaatttgccccaggtcattgcagacaagtcctgagctggttgcacttaatgttccaactttgacacattccacttctctttgctagttaagagctttagtcttggaattcctggggcaagataagggtcaggatgacttcccccatcagggccctttggctcagtgtctgccacctctgggcccagccagtgcgatattttggatcactggacagacactgagaaagactatcctttaggaaagatctgctatcaggctcgacgagggaaaggaaacaggcttctttgtatggatgggatgaacacgcaataggtggatggtttagaactagaagactgaccctggtatgcttctcctattttacaattttccctataaccaactttgctaccaaaataaatgctaaccaacagatagtcaagatgaggccagatcttggaaatgcacaggcaagatgtaaagacagtgttttttcatgccttctaagcaattcctgttcattgtctctgtacccatagaaaatactgaacaaattagaggccctaggagatcacacctgattccaatcctagtaatgagatacattatctgcactcatttggtagctacaaactctactttttcaattgccggcacacagtctg

SEQ ID NO: 54105 - DNA, 645 bp, Bovine  19866880748525
  misc_feature (1)..(1): n is a, c, g, or t
ncaaatattgttggccttctgacagcatgtggagtaacatgacaactcttgcattctgggggtaaatgtgcagcctggaatctgctgagaaatgccttcactgcacacttcccggggagctcgggtagtagcatgctttgctaacctcgaaggaggggacagctgagccaggactggagcaaggaagcccatggagggaaggtcttattgacaagaagaaaccttagcatagcacatttccattttccacctctgggtttaagctctaggtgataggggcctgtcaaaaagcaaatcataaaacaggaatggttaagaatattagaaagaacttgtctgtataactattcttggcagaatttccactgtttacaaacaccagtgagctaggctcaagatgagcacaaccagtgagcttcccttggctttgagtgtttggtggcttctaaattggctgtttgagaacttgcttgcagaagtaagccagagtgtatcattaaaggcaatttaaatacacatccccttaagagaatgctttttaaaattacctataatagcagttggctgcctcttacatagtttaagacagctagctggggaatgtccagttgttatccctccaaacagtgataatccccatataag

SEQ ID NO: 54106 - DNA, 2585 bp, Bovine  19866880881468
  misc_feature (1)..(1): n is a, c, g, or t
naagctgattatatcacgtgtgagattagtctgtcgcctttccttgacctgcccttgagtgcgagcagccaggcattgctctcctgaaggttctgccttctcacctgaagatgatgtttggtcaccccttagcctacttcccctccagctgaataaactcctagttttcctgaccaggactgtgggtgatataaatgcaaagcaagcttgctggtaatttctgaagaccccaagaggataactcgcagaatgagaccagttctgattggttgagttttcattagcagagatcgttaagagcctgacccatgaggctctccgctggtgtgagcctccgatgtgtgggtgtgtggtcttcccagatgctattagttgctgctgtctctccatggtggtttactttataaagatcactttgtgttccttttctgcagaacctatttttttttcctccagggtaattcccacttaaaaataacgtgcaactttagtgatttcatttagagaggtgatgaagtgaccactaacatatttagcaaattgataaaaactcttccacaaattcctcaaaaaataaacattcctatcttcaaaagtttgaccagatacagcccatgaagaactaatcacttgaatgtatactttttgtcattttattgctccaggattcagttttattcaagttacggtgataggcaaaggttaaaatatgaccccagggcagagagagaggtcattcactaagtcattgctatgggatagaggtggcatatcagaccatcaagaccaaaaaggagtttctgggagcaggtaaagttgtcttcgaaggatacttcaacatcaggccaggctaggataagagtaactcgggttagttgccctctgagttgggacagcacttggagggtagagctagaagagcttagaggaggcaactgcagaagtttgagtaaatgtgcaaggaggcttggattatgtaacagtggacatgagaacgtgggcacattcagggcatgctttgcaggtcgacctgaaagaacctaatgacgacttggatatgggcaatgagggagaatagggaatcaatggtgaatcttagctttgaacaaaaatatggtggtcagtgggcttccctggtggcttagacagtaaagaatctgcctgcaatgcaggagacctgggtttaatccctgccttgggaagagtccctggaggaggggatgacaatccactccagtattctttgtcctggagaatcccatggacagaggagcctggtgggctacaatccatggggtcgcaaagagttggacacaactgagcaactaacacacacacacgcacagagtggtccatgaagatagcggtgatatttagggaagaagaagggagagacagggattcaaacgggaaagaaatttgaggacatttaagagtcggacaagactgagcaattaaactgaactgaactgaacctttaggtaagcagaagacacactaccattggaaaggggcacagattgttttgaagttcaacattcttaagttgggaatcatttctgatctttttcccccagtgttcagttaatttgcagtagcttgtttgttctgtataaaccttgcccttctctgtagtgttcttgtcttcatctctgaagacaaattcaggactgaagagaattgttatccccgagtctgtgttcacagaggagattaggagtgcttgaagacctttatgtgtttcatgcaagctatttccgtaaatggagtcaagtagatattaaccagtaaatgtcatatgctaaatgccaatgatctgtacctaaatggatgatttggtataaacaaaatataattggcaggcatagagaccttgggagggaatttgcaggaaaaaaaaatgtcatagtgggttgactgagggattgagaggcaggaagcaaaatacacaaagaaagaataggaacagacaagcattaaggacaccaaggctctgaaatcttttcccaattcccaatgtccctggtgggataccaccaggctagttttcctcctcaaaggaagctcaaactttttagtagtcaaggggtgacctcagcagagatgtaatcatataactgatggaatattgggggagtcatcaggaaaaacaaggtaatgtggagggcgcttcctacttatgtactgacagagagaagtgtgctgggaccatcagcataaatcccaaagttcaacatcatgggggctataactcagggtcctgagaaactcaggaatgcgtctgtgctacttaagggactagaagttaaagaatctctctcctgccccctcctccttccattgacagaaagagcaagggacccatgtagtcagactcattttgtttcctgaatccatcactttctggaaaagaaaatatcagttatcgctgtcgagttgtgtagattggggaagtagggatttcctcctgagcagaactcagagaaagtggctaatggctttagctggcttgcctggctggtcatccaccaggtggatttgggaaagtggtgcaaaacaaggggcaaaaatcaaagagaaaaaga

SEQ ID NO: 54107 - DNA, 2722 bp, Bovine  19866880882410
  misc_feature (1)..(1): n is a, c, g, or t
nagagaataagagagaatatatcctcaaaaacacatttgggcatctctgaaaaatgaaccaaaagaaggtataaaattgggagataaactagaaagactcttggctacacagcctggaacaagacaagtgtttgtgaaacttccaactctagaaagctttaaggaaggatatggtcattagttggttcaaagtcatagtaagcacttaccccaaagtcctaaatgggctcaatgaaggtggaccaaggtcaggagagagattatttcaaatgcaatatttgtatatatatatatttttttttttttttttttatcagtaggatagtttgaaatttccaaggcttggcaccttgtctaaatatcctaattctagtaactgtactgagctgaggagcttgaaaatggcttggggagtattaggtactcatatgaactctactcacttcagtatgttagatttatttcatcactgttctagaatgggcaactgaggctcagagaggccaggagagccaggatccaagctcagttctgctggcttcaggctgctttttgctctctaaacagccatccttgtggttttctttcaggcctcatgcaattaacaaagaagataaaaacatagggaaattgtacttactaagattctgttacaatgccagctataaataaagttctagaatcttgtagagttaaacagtggatggtaagtggccataattatgaagaacggaagaacaatttataattccggtcattacttctatgcccgtgtaattatactctatcctttcatctatgtgacattatagatttttacaccttgctcataaggcagtgcatttgtccatcacatgtcctttgaatgcctcttgtgtttacgtagatgatgatttctgttttgaactaataatgtgtgtagagttacaaggtaaatagcctttcccttttaatcactttgacttactaaagaacttcctgtaaggtatggaaagcattccttaaaataatgtcagatgtttggatacactaaattttcattataagaaaaaaccagaatatattgttttcccagtgtcttggttccagttgattcttggcatggttgctataattcttaaccaagctgttatatttggtatgccatgtatgccatgcatactttatttaaaaaagaaaataaactgtgaaatctggtgtgtgtaaaaatgcactctcttgaaaattcagagttttctacatgtataaattgtacctgaaccaaggaagtatgaagggacttcctgtgttactattgcgtgaaagaattgaggcagagagaatcttgtctttcagatatgggtaaatgcttaaagcactgaggctgacatctgttccagctgctctaagatattgctgtggggttagtcagggttgtgaggtgggatgggctttttctaaaatgagctcttttgagcaaataaaaatgtcacaacggtggagacttccggaatttgggggttaagtcaagtcagggttcagctggctatccaagtctgaatgcatatgaagtcaagtcaggggttcagctggctgtccaagtctgaatgctgtgtctatgggattgattttgcacttttcatgtttcctattgcaatagagtaggttctccatattatcaagactttttgaaacgggtcacctgctgctgctaagaagtggtcagaggggttggctgtggtattaacatcccgggggttccacctgatggggaaatgcttttggaccatggatcctgttcttggtggctggaatggactggtgttctttcagactagtgagcacgtctgggacattaccttatgtaccttgctagagtaagagatgaccactggaatatgagttggattcacttctgaagggtctgatctgggactttcaatctggtcatgtccctcataggctctccaagggcaggtgaaccaccttccagaccccattgcacctcagatgttctggaggagaggcatgttttatttctcatttcaccatcataacttctgagatgatggaagtccttctgttaatgttatcctggagaaaggtcccagagaagaagggcacttttgagtggaggacctccttcctgccccgtgatagtctcctgtttctaaactcgggcacacacacttttctgcataaaaggctggggccagacaagaatcttggaagcctggcagcttcctaaatgtgcctgaagcagccatggaggcagaactgtagtctgggagcaggtccctgcgcagctgacagtcatgtccttgcttgtgcgggctgggcagtgaggaggaggtggtatggcggcaacttatgagagagggaaccatcacaggattggggagtggccacagtaactggactccttgaagagcaagagttaagccctcaggatgtggcctttggcaatttcaccttgtctgcactagagcatcaaatgcagtccacctcccaagatgtccgtttccagatagctcaaaggcctttggtttttgatcctgttctcagtcagatttggataattcatgtttattgtagtcagagagtagagattatcaacctcacttctctttgttttgctttctagaatatttggtgcttagctgaggtttcattatcttgtgcactttgctaattgaatggagatgagatttatgaggtacctctattcaagagaaggtaattt

SEQ ID NO: 54108 - DNA, 1546 bp, Bovine  19866880973450
  misc_feature (1)..(1): n is a, c, g, or t
ntgatgggagtgactggcagatagctttatggttgccaactataggttataagacattcttcaatgaatttgtggcttatcagcaactctcaaagttgatctctttaaggcaagtgggtggacccaaatttgtggatggtgtgcagcaatacatgtcggtgagtacatttccttcccaatatacttcaacacatacatacattcatcaaatagctgctggtgcctctgtgtgccaggtaccatgccaggtatttggggtacatcagagaagaaaacaggccccaaatctttgacttcacaatcgggctacgttgagttaatcacagggcatgcatgtgcacatgtgtgtatgtgattgtgtgtagaaagaaacacggctaatctttaccactatgatcatttacttttgagccactatcagtgcaagtccatgagctgggattatagccaatagctcaactgataaagaatccatctgcaatgcagaagaccccggttcgattcctgggttgggaagatctgctgaagaagggataggctaccgactccagtattcttggacttccctggtggctcagctggcaaagaatctgcctgcaatgcaggagatctgggtttgatccctgggttgggaaaatcccctgggaaaagggaatggctacccactccagtattctggcctggagaattctgtggactatatagtccatggggttgcaaagagtcagacacaactacgtgactttcactttcacttcactttcacatcagatatttatggaatgtcttctttgagcactgtgctgtggatggctgccacagtgttaaatgagtgataaagcctctgttctcatgggactcgtcgtctaatgatcatgaagttctctttcttcctgtttaagaaactgtttgatctctgagaaactgcccaagtgccgcctagtgcctatattaaagaggcagtgagacacaacaactatcctccaagtgaatgagggaagaaaaaaagctcaggccctataattatggcacgatttcaggtccatagcctgcaaggagatgctcatgtctacttggccttgaatgggatgagggaatccaggtgaggctgttatctcagccatatttgcagctgagtctccagcttctacttttctgaagaacagaattgtcacacatggaaactctaagggaaatggcgaacatttcctaccaccattactcatcaaaacaatctgcttggaattaacgtcctaggcacatatttggctttaaagggaaagggaaggaaaagcatgctgttcaaggttctgagactgcccacctctgaccatctctcccagcctcccaaacaccaaacacgcagattactcccacgtgttacacaaatataacagcatactccagggaagtattgatttgtatttatggtcaggggcattttgacccacacatctgagatgaacaataactctgcaggtctcctgtttctcagtgttcattcttcaactgaccacacaatggagcttggccaaacatcctcatc

SEQ ID NO: 54109 - DNA, 1044 bp, Bovine  19866881055817
  misc_feature (1)..(1): n is a, c, g, or t
ncatcagaaaagataatgcatttgcaacttggcatggatgcaataaaactgcagcaaaatatacagatctatgggcttcccaagtgactcagtggtaaagaatctgcctgccaatgcaagagacttgggtttgatccctgggtcagcaagatcccctggggaagaaaatggcaactcactctagtattcttgcctggagaatcccatggacagaggagcctgccaggctaccgtccatggggtcacaaaaagtcggacacgactgagagactaaaccaccgagaatgatggggaaaacacaatgcttagatcttaagacaacctggggcaacaatgtgaacaacttagcaaactcaggacaggggaggaggtgaagggtagagaggtgcagtatattggccgtaagataaaaagaaagaaaagaggctccatggactttaaactctttttttaatgtcttaaatgttaaggacatattctgcaactttccagctctaatgtttaagcaacgatgttggtacagagacttcccctttctctgaagcctggatgtgagtttagcagtggagaggttgggaggttcctagcgcatctgatccactacctgtcacatcagcagtttttgatgaaaggctttttaaattgcttttccctggaaatgattcttcccaagcagctctccttgccttctcctgcttgtcgtcctgtcttggcagccagattatcaaaccctagagagggggacggggaacttgctctgtgtgtctctggagccagtggccaggtatttgcggccaccattaagaagcagggctcagaagagcagggtccatctgtgggaccgccttggcttcttggtaaggtttatggcttttaaactagagcttatcgcctctttaaatgttaaagaaggaagtccccatgaacccctgatggcattcaattatggtcttggttataaaatgtttcagatctttggggagtgtgagccaatcgatagactattgcagagaaggatcagagccctgtgaaggctgatctttg

SEQ ID NO: 54110 - DNA, 4246 bp, Bovine  19866881090767
  misc_feature (1)..(1): n is a, c, g, or t
nctcttggtcttcctggagcgggtaacctgggaagatgttgtgggtgctttgacacttgcaacattgctttataaagctcagtaaatgtgtgcacttcaactggctcctcgaactctcggcactctgaagtctgtctttggagaaacagatctcaagttcacctaggaaaagtgatgtgcttatcttggaggaatgaaaggtgttcaagaaagaatcaaagatctatgatatatgattcttttcctaggattttctgaaataagacaaaaaaatggcaaactttttagagtgggctgggctatgggaaggcttccctggtggtgctagtggtaaagaaccctctgccaatgcaggagatgtaaaagatgcgggttcaatccctgggtcaggaagattccctggagaaggacatggcaacccactccagtattcttgcctggaaaatcctgtggacagaggagcctggtgggctacagtccatggggttgcagagttggacatgactgaagcaacttagcatgcatgcatgcatagacagggttggggaagtaggatttgacatgattttaactagcaaaaaataaaagtaagggtttattattatttatttatttattattcatgagtatttagtatttctggtaatgactccatcaagaagacctacctgctgcccagtgggctctgctaaccttacattagagaccaggcctggggtcagtctaccactggctcctttctcctctaacaataagctcactacctgccatctggcacttccctgcctgtgtgtttgaaggttaatacactcagcttaccttgatcagctcacatgaaagggacaacaccaacagtacaattcttcttgcagagtttgaaaactgctctccattatttttggaaaagatcagcaggaaccctcagctggaaagagccccagacttaaaggaggccaactggggactgaacagaaactctcccacattaggactataatgggggttcattatttcccttcctagcctctctgagcctcagttttctcatctattaaacagagtaataatatctatcctgtggcgctgacagggattcatttgtttttttatgtgaaaatgcaactcgtaaggcctggcacataaaaggcattcaatattggttgttttagataatcaaaaatgcacacattacaaagggggctcatggcattaaggaaaaggctgagtgaaaacagagtatttaaaatctcaaaaggtatatctcgaatttatcaaactcatactaaaattccaaatgtggggaaatgaagcaatatctactatctaaatttcacttttattttaaaattttatccaatttttttctagattaattctcaattttgctaagatctcctgacccgcctctcctttctgcctttttaaaagaatctttctcattctgtcttttctttctttctctttccctttctttgtttcttttctctttctctctctttggcagtcttgttcattttatcactctgagtcacatatgaaaaaaagtccatcagaagataagagtgcctgtctgtacagatatttcagcagacagcactggatggttagtgctggggatgctgaagctggctgattctgaggaatgcatctccaggggcagatgagatgtggtgagggagaacaattaggtcaggaatgcaggaaagaagagaagcctgaaagctaatcagcccagcagctaatgtacacaaaatggcattttgcaaagaccagaggtttatacaagatcccggccggaaggaatctgagtctagggctgagttaaagtgagcagagtgagattcttgccctgtgcaaaaaatttaagggaacaccccagattcagtcattaacatgaataatgttttttattctccattatttattatcactttttcattgagttgatgtacagtatcatataagtttaggtgtacaatagtgattcacaatttttcaagattatattccattcatagttagtataaaatatactaaaatattaaagcattacaattaatgtcctaatgccatgtttttaaaaactaaacgttaaaaaaacagtgaaggaaaaaatatgaaaattttaaagccaagatttgaccttggatttgtagcactcaccctagtccctgctttctcaagtctgtctatttaaaatttggaaattttcttcagaggtttttcactaatttttgtcttttaaaatattgcattcaaatgtgatttatcttgatggctgatattctttggtgctcctttaaattctgcactttaattgagggcctcacccatattacgctaatgctggctctgccaggtgcagtggaggctgttggaaagcccagaggagcttcttaggagctaaatgggagtcaatgaagacaacttctaggatgctgttggtagtgcttttaggaatcccagcactgaactaaattctcaagtttatgtaagaataattattagttggtgataaaaagtaggcaacggacaccacaaatctgacactcttgtctttattggcataagagtttggctctgaatgattaactacatcacaaattccaatacaacagatttcatttccatcaacgagcctctatagtaaagatttccaagctccattatcattcatacatatgcgggacaagccctggagattctgaacatagtaaaagaatgcagatcatgtttcaggcctactctcttcaaacataagaaagggaaataaagttaagcaacacatagcaatcagtagagtcccctccctatcccacctccccagatcctggtgcagcatcagagggcagagctgttgagatcagcactgaaaggcagcaggcaggagcccagcaagcagtaagaggctcattgcttgttgtggggaagcaggaagaccttcgagacaggaccacactaacactcagactgggtgccccttagctgaagtgtctccttggggaacgtcatcaatgtgaattcatacaagccccctctttccaaaagtgggcataaggtatgaggaccacgtggattcatccccaatcctacaacccctccctagcttagcccacacacagaagcttggcccttgataacacagagctctgctaagagaacaaaagagggccccctgggatgtcaacaccaaggaccatactcacatatcagtgatcagaccccgatctggctaagatttgctttaatttaaaacttgggattcaatgtgcaggaaacatcagagagtatatacaaactcagagaagacacatggttcaggaagtgagtgatacggttattccctctgctacttggccatcaacttcctcgaagtccaggagttcaggaatctaaggcagagctcctggtcatcaaaatcttcctagttttcctcttcagaggccaatgctaataaaggtctaggtagggctctaggcaaactaaaatcttatatgtacacaaggaaattttagtcaaaataaaggttcttaagagagataaaaatatcctaaaaatgacaacacttggggaagaagaaaatggccctctctaaataaaagctaagaaccgatacagaagcacaactacttctctggatatcaggtactggcattagttgaactaggaataaggatgaaatgtcatcattagcatcatggttcctgaaccttcataaatagagaaaaggagggagcgtggtagaacaatatgaacaaaggaatttatactcatgggccagaggaagtaaagccaggatagagacaatgtgaggccagttcgtccagctggccgggtactctattaatagaaagtaggaatttgtccctgggtaacagtttctctctgttcattagcaacaaactaaaggccaacccacttgtaaaagcaaactcttttcaggaacaagggtggagatgagtattaggcatgagagcataaatgaatctgaaaatccatccttctttcaggaaaacatgttgggtggccactcagtggtgcagagatatcatgtaatctcctgtaatgaaggcattccataacatggagaccagctcttttaatataattagatagtgtggcattgtatcctgtcccccctatatcaaccacttattggaacattaggaatatggcacttagtctaaatgccatcattatctaataatcacttgggttccactttaatgcacccagaaagtcaagg

SEQ ID NO: 54111 - DNA, 1773 bp, Bovine  19866881137318
  misc_feature (1)..(1): n is a, c, g, or t
naggagatatcaaagcatgagatgctgaactactttagagtagacgtaatgaagaaactgggaccatggaagcaagagttagtgggtcaaactgtgagagagcaagtagcctgaaataaattcatataccatgccaggtttttaataggaatttaggtgatgctttcataggctgagcagacctttccaaacaggctggaaaggacaaatggcaaagccaaacacttcactttctgtaacccattcttgttttctctaatctaatgcagattttctgcctgtgtgctttttacacactgaggtctaaattatttttttcaatgagtaattccttaaaatatgtgggatgtgattgcatgtgtgcatttgtgtgtatgtaattactcatctatatgtaattaagcaaatatttttcctaatccatggttttttctattttattttggaaacaaaacatagtttgtttaacctatagttcaaattgtataatcattggaaattgctaattttttcattgtttcttaagtcatttgagagtgcatgatactccaatgtcctttttctccataagtgaaagaattgcatttttaaaaaaatagcatttcacttcagtcattatgtccacagaatgaaaaggaaggagttctagagagagaaattgttttgaaatgtctgtgttgtgaatcatttagcagtttaacctttaaaatgatagtttctgggttttcattgattagtctaaagagggatctatacagccaaaataattaaattgtctcagtcaaaaaattagctaaactctatgggcaagaaggataacaatccagttgatggatcagcatcatgtggaataactacccaagagagttaatttctgaatttctagccagtgcctttgttattgcatacacattctaattagtacaaatgtaaactaaagaatgttttgcattttcttagtgttcccatgcaatagcattttcccttttgattggattgaattatgaattacacaatcccatgccataaagttttactattacatgtcagtattagaggtttaggaaagggagcagagtttggtggcctttagccaaagtggctcttagaaaaactcacccatggccacactgtgaagactgacacacagcagtttccctcggctgctcttactggcaaagcacaattgttcgggattctttctcagcagaaccttgaccttaaattgtatcaaaggaggcatctaatctaagtccacatggtagccaaatgcctcttctgtgtgtgctaaggccttctcatcctcacaaaaatccttatgcttttttcagatccaccttattctcgttttgccaatctctccatttattttccttcttacgaactcatttgctaattacaaaatcatacttttgcacacgtgccacggaatacaaaaatgtagggtacagaatgcagagatgtccagtacatagtatttgttattgttgttcagtcactaagtcatgtctgactctttgcgaccccatggattgcagcacgccaggctttcctgtccttcacccgctcccggagtttactcaaactcatgtccattgagtcggtgatgccatccaactatctcatcctctgtgacccccttctcctcttccctttagtctttcccagcatcagggtattttccaatgagtcagttcttcacatcaagtggccaaattattggagcttcagcttcagcatcagtccttccaatgaatgttcaggactgatttc

SEQ ID NO: 54112 - DNA, 2344 bp, Bovine  19866881167301
  misc_feature (1)..(1): n is a, c, g, or t
naagagacaaaatgctttggtccactgacctcagccagcctctatcctcagccattgcagtaaaggcacaaaggcacacgtgtgaaatgtacagatgaccagggatgaagcaggcacctgagccatcagcatgtactccaacatatcgaggttgatctagctgtcttcatggctgaatgtccaacccgcccattatgggggccaataatgagctcttagtattggcatgaggcaaaatggccacttggtatcaagttgtcaagtcaactatgttgaacctcttttactttctcaatcctgcttccttctcttctcatccataagcattcatcccaagagcgctgtttaataaacatcttacatgctgatctccaacccagcatttgcatcccaaggaaactgacctgtgacaaatgtccgcccagtgtcacgatctatgctgggtgacttgcatgtgtcatttctgctattgttcacagtaccctgtgagatgttttcaatggtgcctacctttaagagttgaggcaggaagtctcagaagttaatgaacttgtccagggttctatcactctcaggttcagagcgacttcaaaggccacgcctgggaagcctaccatggtagctactcctgttgtaagaaaaagaaaaggacactgatgatcatttcctccaatagaccagacattttgctagatccttgtgcctacaaatcattcagtgtcactaaccaaattaaagtagagagggttatccccattttaaacatcaaataaagccaagtataagggacttccactagatgagcaaaaaagttggttgtggaatccattcctgtctgaattcaaaggcagcacactctcctccaggtcaaactgcttactcagatcaagagccacccagagagagcctgagagattggagaccctgagacacgtatttacctagaaaccacacaaactatgctgtattcactgacttatcaactgaaaagatggctatcttctttctcagtgagtttcacagattttccaaaggggtctcccaacagcctcctagaccctgcagttacctataataagtgttgttgttgtttagtcactaagtcatatctgactcttattgattccatggacagtagcccaccaggctctgtctgtgggattttccaggcaagaatgctggagtgggttgctgtgccctcctccaagggatcttctctatccagggatcaaacttgcaactcctgcatctcctccattgataggccaattacttatcactgagccaccagggaagctctaataataatggtgcttacataatttttgatccaaagcatgatatgtaagagtatcatgggacaataggagaaaaccagatggccatgagtaaatggagaaaaatgctctccctactattgcgaaaaaatgttctatgtttcttacatacactcttagttcacaattagtgcctcaaaccaaatcacattgtaagttgggttttaggagagagcgcttcactgaatggccctggctttaatgcactaagttttcccctgaaaattcaaccacaatcctggcctcttaatcacatagccgcttgagttccactctgatataaacactgcacatttccgatttgtggaattgttttcctttaattaaatgaaggggggaggtgtagttattttcaactctccgcacaaattactacccagtggaaacagaattgtgtattgtaagtagtactcattctatttattgtgccgtctattgatgtgtgttggacttgttctattttggaggcactgccatggtaactgggctcctgacaaaggcctgtgtcagagccaaacttgtacatgcagaacttcagataagtgatgaaataaagaatcaacctcagtaggctcaaaaataacaatttggagaatcatgttttgctcctgagtgttttcatccacaaagttgggaagttctgagaggcaaatcatgggatttactggacatcaaactggatctgagcaaaagggtggaaggaagtctattttcacagtctcttagcacccccctgtcaacttctctggctctgcctttgggttaggctcacagttttagggaaaaaatacaagctggtgttcagcctttagagaaccagggtgtctttagaggatttgccttgactccaccgccctgagatgtggccctgaatctgcccttagatagctcaggggcttcaccaaaccaggattctgttgccacttctatacatggaagaccttggaaggcacaggtgccctaatgtcaggttccccctgaagctggtgcagggaggagatggggag

SEQ ID NO: 54113 - DNA, 1200 bp, Bovine  19866881211297
  misc_feature (1)..(1): n is a, c, g, or t
ntgtggtattggagaagactcttgaaagccccttggacagcaaagtagtatccaaccagtccatcctaaaggaaatcagtcctgaatactcattggaaggactgatgcttaaactgaaactccaatactttggccacctaatgggaagaactgacttatttgaaaagaccctgatgccgggaaagattgaaggcaggaggagaaaaggatgacagaggatgagatagttggacggcatcaccaactgcatggacatgagtttgagtaaactctgggaattggtgatggacagggaagcctggcatgctgcagtccatggggtacaaagagtcagacacgactgagtgactgaactgaactgatgatgttatatggagttccactcaatggtgaccttgtgcagaatatcctggaacatactgaaaccctctgtttgcctctatcggccctcccctttgctcttgggcacattccaggcaggggaacatgattctgtggcaagggtggtccttgtttgtttttctttctttaattaatcctaagcttctttgtccaaaatatctattccaaataggccagcctcatcacctcctttaactcttcataacagccagtttcctgttttcagtgatttctaacaaaatgtcaggaaaattattccagtggatgttaaaatgcttacattttaatttcctggtttataaaatatttaaatttgtaaaggcactaactccaagaaaacatgagaaataatgaaatggggatcatctctgaagccaagctacatacaataaccaacccttactgagtgagcacttgcaaggagccattcattgcctcatttaattttgaccccaacttactattattatccccattttacaaataaggaaactgaggtttgttagtatgaagcatcttggcaaagacacacacctgggaagtggcagaccggaactcaacccctagtctgatgtcagtgattgctctcaattactgccaggggctcctaacaccagtcacagctgggcctggctagtaacaatgcttttggcatcagcactgctgaagcaaaatatattcattttctcaaaattattagattatatcctttctacatttttttttttttttttggtttttaagcactactcttttcatgtaatagagatacattagggcattaatgttagcttgtcc

SEQ ID NO: 54114 - DNA, 1594 bp, Bovine  19866881235836
  misc_feature (1)..(1): n is a, c, g, or t
nactgaactgaactgaactgaggatactcattaggattgaaagactaccttggagtcctttccactcagtactggtgggaaagggcatatccggggtcaactttcaggtattccacctgtccttgtgaccttgcttgtggcgttgtgccttggatctctctacggttggtaaaataaaggtactttaagttatttttaagggcactttcatctctggtattttgtgacttcacatattttggcagaacatttactatgttctcactgccttttgaagttccaccctaaagtgatctggagtagtgattgtaataaatgggcttaagagtgattgtagtgtgggtgtaacttgtcccttaatcttactgggcagaggacctgggggaaatgggacctggctgaactgaagaacttcaccgttttaggaaaatggagaaatttcttagtgacaatatgaatcagaaaccatatgggctgaagtaaatttggaagtccctaaaggtagttatcggagaaggcaatggcaccccactccagtagtcttgcctggaaaatcccatggatggaggagcctggtgggcttcagtccatggggtcgctaagagtcggacacgactgatcgacttcactttcaaaggtagttatggacttccctggtggctcagacggtagaacgtctgcctacaatatgggagacccgggttcgatccctgagttaggaagatcctctggagaaggaaatggccacccactccagtactcttgcctggaaaatcccaaggatggaggagcctggtaggctacagtccatggggttgcaaagagtcggacacgactgagcgactaaactttctttctactttcactttcaaaggtagttatggggcttcccttgtggattagatggtaaagaatccacaggcaattcaggagatctggatttgatccctgggtcatgaagacctgcccagggaagggaatggctatttattcactccagtattcttgcctgaagtattccatggacagaagagcctggtggactacaatccatgggattacaaagagttgggcatgacttagcaactaacacacacacacacacaaacacaaaagtagttatagttcaaaattttcttaagaatcacaatcatatttattcaagatgtactgaaattttgaattacctgtttggctccagcctcttccttgcctcctccatctctgttcatagcaggactggagactctcagccaaacatgccacctgaaatcgcctgttattcagcagaggactgagagattggtgatgagttgggggatcactgggtggctctaagtgcccctctcctccagcacctccactataatccttctactatggggaaccatcagggaacttagactgaattcagtcactgcactacagaaaagaatttgctcaaatgggtttttaaaataaaatacataagctttgtggttttttgttttgttgcttacaagtattttattttatatcaaattctaagaccatagaaaaatgttaacagcatcattattctatgcaatcaattttaaagacacatataaacaga

SEQ ID NO: 54115 - DNA, 1455 bp, Bovine  19866881235911
  misc_feature (1)..(1): n is a, c, g, or t
ntcgtggcttctcaagaataattccggagttttccttccccgtggactaccatgttcatacatgcagtcgctcagtcacgcctgactcttttgcgatcccatggactgtcgtccgccaggcccctctgtccaggagttttccaggcaagaatactggagtgggatgccatttcctcctccaggggatcttcccaaccagggattgaaccttcatctcttgagtcttcttcgttggcaggtgggttctttaccactagtgacacctgagaagccctatggattaccacagtgccacccaaagtaccagttcaatggagacaagaagcttacctcagaatgtgaatcaagacctgtttccttcatcaagaaaatctccttgtgaatttctgggactcaaaagtctgcttaatgatgtaatggatttacattcacttgccagttctttgtcttgttaacagcaaccagcagtgtgaggagtggcagccaagtctacagccctcacctgaagtagcactagtccagagctttgccagggagaggaaattctaagagtgtaattagtttctctctctctaatgctgcttcctcacagaaggcacagagtgggagagagggcagcttttgcatcagaatgatgcttccagtctgcacaaaatataccattttctttctaatcatacgggaataatttttctccacttaaccaccagttttgtcctttgaagtcagatcttgtgttaactccaatttgcacagaatggtcctctaggaaactttctaatcactcacaggattggcctgtttctaatgcagaattgccttggtccctgaagtgagtcacatgcacttatttggtacatttaccaaaggaaaactttttaaaataactgaaaatcagattaacaagaatctaagcagaaacatgacacgacttggctctgctccctattcctgggcaggaggcatatatttctgggagcggttgggacatttctttaaggttaaaggaaggagccttcagtctgcttggcaagtctgtcaaagtctttcacagcagtgcactgtcaggcatctcaaggcatctgctcgagacaggacaactttttttttggtccaaatgaaaccagggatggaaatggcagtgagttaattaaaaagtatttagttgagacctgccaaggttcaaaacattatcttggacatatacatgtgaaggattggattaaattcattagagggattagaaataaggagaaaaataaataccaaaaaaaaaaaaaaaccaacaaatgagacataaactatataaatgccaaaaatacgttttcttcaaactctgaaaatagatgtgccgacttctctaggaaacatgtattttaaactgttggaaaacaaaacagtatacctcaaagtaataagggtgtgagtgttagaagtaagcctcctaacagcagg

SEQ ID NO: 54116 - DNA, 1075 bp, Bovine  19866881242104
  misc_feature (1)..(1): n is a, c, g, or t
ntataattaacatctcaagtcctaacaggccggaagtgttctgtcacccctaaaaatacaaagccccatgttggtcttcttcctatggtttattaagaatttctccagttccctagttcctccatgacctctctcacctttacacatattcatcccagatgtggataatcagcactatttttttttatccaagttgtgaactctaccctgtagaaaaatcataagattaccatcagtggacatcttagtcagtttgctttttaatctataaagatttctacacctgttgtctcaatgcctccacggtccccaactctgctcccggctcccccatagcaaggggagtgtttgacaaactggaggaagaatggattaaataagggaggaaggcatagctagcatgataactgactcccctaaatggaaatacccaggatcccaagagagaagactgttgagtgggaaagcagttgtctctgttgtttatgggagggggagatttggggaaagagaaataagaagtaggatcagagagaaatgtgggattcccatcatcaataaaagaaaactcagacagtgagagagttgaggagagctgggtcaatccaggcccacatctgttatttctgacccaaggaccccttattcacagaaaccctcaagatagtcaagccttctggttgaagcttggggataggggagggccaatgggagtaccaaggactgaaatgctttagggtgtagggggacaccaagggtcatgaggcgggacaccacatgttttgttgcagtactaacaggatggggcactaagcttacccttctgtgttaagtttacaatcacctctcaaatattggggataggaagtgatggctaatgtgagaagttgggattcctagataatcttacaaattttatttcagccaggtgagaatctgtttctctaataaacagggaaatccctccattttcccccttcttcttgtttgtgccctggttcgttctcactggagtcaggaaatatacacagatggtaccattcccattaacctgccctctggggctcatggcttc

SEQ ID NO: 54117 - DNA, 762 bp, Bovine  19866881270523
  misc_feature (1)..(1): n is a, c, g, or t
ncccactgcccacctcctgctgtgcagtctggtttctaattgtgcagtccacagtcccaagggttggggacccctgctctacatagcctgggtgccaaccaaatatatatggctagtgaagtaccacactctcagcagatactttttggatggatggatggatggatgcacagaaaaatgaacaaagaaacaaaggaataaacagtgtacactttttctgcatgcttaaaatcatacactgatcattaatattctacttgcaaagaatgctcagcaaagctgctctcagctactgtacacaaacgtggtccaacccagtagagacatccacagcatatatacaaaatctgggtaatggtaaccttcacagtctctctatccacaatggcaattagataattaatagcaaatagaactcattgatttaaaggtatattaccacaatggggtatctgcaggtttgccagtgaaatattcttgctgttttcatccagacagtacaaatcctgagtttctggactaggtttagtctcttgaagagtcttgatccacataacgtcacaggagcatgtaaatgggttgcccaccaggattctacatggaacaaaaatgaaattcaatcagccttctctttctcagttttagctataaaagtgtctaacaaagcactaataacattatgaattccttccatctggcaatctggtggaagacacactcatctttatagtataactacttattattcaatcattaattgaa

SEQ ID NO: 54118 - DNA, 1569 bp, Bovine  19866881305786
  misc_feature (1)..(1): n is a, c, g, or t
ntgaagcagttgcttgggcttccctggtagcttagctggtggaggatcttctgcaatgcaggagaccccggtttgattcctgggttgggaagttcccctggagaagggataggctacccactccagtattttggggcttctctagtggttcagatggtaaagagtctgcctgcagtgctggagacctgggttcgatccctgggttgggaagatcccctgaaagagggcatggcaacccactccagtattcttgcctggagaatccccatggacagaggagtctggcaggctacagtccatggggtcacaaagagttgtacatggctgagcaactaagcacagttctccagtgaggatacgtgaaggtagagaaaccacttcagtgaagatgcgggtcggggatgtgaagggaaggtttgcttgagaacacatcctgccacctccatggagagggtctggactttgggacaaggtgttggagatggctgagcggtttcttgcctcagagacacaagacagagcagcatctgagccgcacggtcatgttgctgctcctgtccctgaatgtcctgtccgcagccagtgtctgagacggactgccaagggcacatgctaattttccagtcatttggtcaagtcccatctcatataccacagaccccggggcctgtgtttactgaatcaaaaatctctgctcaagcataaactaatgaacagacaattctctcttcttttaacatttttactgtgttttggaggaagaagggcaaagcctcttttgtgttggtttgccacccttccatctctttctaccagttctcatcctatagtaattagtcttgctgaactgataaataaaatgtagattagattgctttacggattagaattcagcttcaggtaagctcacacaatttctctgaagaccctggagctgggtgggaagcacagaggtgctagcactatttggactttcgggggagttctaggtttttaacatgaactatgaatcctgaactaagatagtctatttcccagatggctcagtgggtaaagaattcacctgcaatgcaggagatgcaggagacttgggttcaatctctgggtcaggaagattccctggaggaggaaatggcaacctactccagtattcttgcctgaaaactcccatgtgtccatgcctgccagaggagcctggcaggctaccatccatggggtcgcaaagagtcagacacggtaggtattgctgagtagtaataatagataatctatgagggtgcttcaggatattcagatattacactctgaggaaatatttctctctgcatttacctaggctcctggattcgggggaggccaactacctctctatggccctcttgctctaaatactgttgagtttaatgctggtgagctcctttgtcccttcaaccctagaggtgggaaaaacttccctctgtggtcagtctccatgacttgccacctcttgtttgtccctttaacctacgcaaatgtctctacatcatccctatatttcttcatgtgaaatcacctggggtgaattttttt

SEQ ID NO: 54119 - DNA, 861 bp, Bovine  19866881313058
  misc_feature (1)..(1): n is a, c, g, or t
ngggcttagggacacagggcttggagaagtaggcagataagcctgtctggcccacctgccagaatcttgtacaatcactctgcataattattcttgaaaatacaaacattgctggggctgactgacaagtattgttccagcagggagggctgtcagggcaaatcaatccaactctaccacatgccagagtgtagaacagatataattttggctgttaggggctgtcaaagcgaaggatgtgccgtatgtgtattttgaagtgtggtgttccctttagtctaacagcttgaaagatttctggggctttccccctctctggctgttttctacaagaagttttgagtattttaatttgaaataactcaagtcttttatctaatgtgaatttcaggttagactaaacccaatcttacctttcctcccatagctgctctgcactcattcaacacatgattttaaaatttgatttaggaggaaaaggtcctttgctgccattggatgtcataaggggtatccaagtaggtacctggtgcactcccagcaaggcaaactcaccttataagagtctgttttgtccatcactagacccagggcaaggcttagcccgaagggtcccactgggcctcttgggagtccctgaaagtccacttcctccttcagtggcccagcatcaaagctgaggcccttagaaggggattcactcaaaacctttcctctctctgaatttttctgcttcatccatcttattggattctcagtgacttcccagtcattgtcccactagtttttcttttccttccttccctcctttttcccccttccttcccatttgtggtacctatttaatttctttctactatt

SEQ ID NO: 54120 - DNA, 1081 bp, Bovine  19866881376545
  misc_feature (1)..(1): n is a, c, g, or t
ngaaggcaaaatcagcaacattgcttataagccctggaaagatggaagtttccaagctgtcataaataaggatggaagcacttgccaagtcagaaagttggccaagtttgaatccactcaatccttatatcttggagctcagaatggaacaccaaccttttgggatttgtaataacttctcagcaaaactttttgctatttataaggaagtaaaaacaaaaagcaaaaaatacaatacagaaagttttctaaaggagcattaaatcccagtgagcagtggggaggtgataatagtataatgtgctggaattaacttctaatttaatcaaacaaagcttaacatacgcaatattccttttccgtgtgtgtgtgtgtgagagagaattattacgtctttccttccttcctttctctttctcactcacataccatctcacttttcaaatacgtattccacccagccaattgtaaatttaaaatttaactgttaaaattaaagaatagataaagcatagctgtgtgtgtttatgttggtggagaggcagccagaggaaaagaaaaaagaggaaggaaaagaaaaaagagagacaaaataggtaccaagagctgggacacctttcacaaatttatagtgggtcaaaaagaattagcaccaccaaggtgaagagcagaggtctcatggctctctccgagtttgcagccgggggtccctcaagagaacaaaagagcactgtcctcagagagtgagggccagaagcatgaattcctaagcagacagatctcattagtggcttggacaagttaactttttcaagtcttttttccctcttgcaaagtatgcatgataacagtgtcaacattgcagacactctaactgtataaccagggcccaggaggtcaaagaggacgtctgttttgctaactgtggtatcttcccagtgcctggctcatgtctgatctataattgatgattaatacttaccagattttgaataggatctggctaggataaaacaagataatgtattaaagaatttactgatagttccctggggctcagaggtaaagaatcgcctgcaat

SEQ ID NO: 54121 - DNA, 737 bp, Bovine  19866881379088
  misc_feature (1)..(1): n is a, c, g, or t
ncttcttccttaatgagagtccctttgccatctccagccaaggtcaaagtcacatacgctaaggccagtgcttggaacattgcagactacttcttactcccacctgtgcttttctaaattcttccgttcctactcctttcttccttcttccctgacctaaagaccttgtactctgcaagggaacaaggaagtggccatgtggggcaacagaaagccacaaatatgcagtttcctggaaacgtcctttgttgaatctgcccctctttgctggatccaacataccctgtttctagacctttgcttctctcctgctttgcttgcctgcatctgcccctcaattaagcaaatactttgtttcaaacctccctggctgcacaagtcagaccaatactctctaaccaacttactccttgtatatgttcctgaacctttagtcttgagtggatgagaaactcagaatgcaataactagaattagaaaaataaagattttttaaaagctagagaagttataaagtaatatggatgacagtgtaggatgatcagtacatttccaaagctgagcaggtcagcagagtaaggtaactggtgtggtccagaagggggagctgttaatgcctattctggccccttttagactgtgactgacactttctcatgatgcaaagagccttgtctcatattaatgggttactttctgatcatgtttcatagagaaatatacatatatatttaatt

SEQ ID NO: 54122 - DNA, 683 bp, Bovine  19866881594788
  misc_feature (1)..(1): n is a, c, g, or t
ngctttggtccccctgaatataagtgagctccttgagggcctgactctgcattatttatccataaatacccaacagtgcatagaaagcaccctgctatgtaataagtgctcaataaatgcttgttggcaatacttttatcagtaatgctttgagtgtgtgagtatgtgtatggtgcacagttaaaacattgattgctgcaaatgaggaagacattaaagaaatgcgtcatggagcaaatgaatgccatccttaaaaaagcaattagatcccttgttttgaaactagtgttctgtttatttttctttgttttcatcagattacaaatataattgatgttcattgcaggaaagttttaaagtctagaaaagtgaaaagacctttcactatactattttaatgactggacgagttacttatttgacacgctgccttcccaaagtagttcacctccattttcttgttcattgaatcatcccttcatcagacttcagctgctgtgctgtatttagtctctagtcatatctgattctttgcgaccccgtggactgtagcccgccaggctcctctgtccatggagattctccaggcaacccaccgggggtgggctgccatgccctcctccaggggatcttcccaaccaccagggaagcccaagaatatcagagtgggtagcctatccctt

SEQ ID NO: 54123 - DNA, 1190 bp, Bovine  19866881648989
  misc_feature (1)..(1): n is a, c, g, or t
ntgcttttacgtcagcctgctgtgtatctcatcgtgaaggcataaaaatttagctaattctgggagaccagaactttgcctttttatctgcattctgaaatatgtttatgaccaaaacatcttatgacccataagatgcttttccaatcgcataagaacataattgtaaagatgccctaaatttccaatctggttgcagcacttagcctgaccagaaatctcttcctattatagaaaatatagttgaaaaatgacacagcaggaatgttcagcaaatttccttttcttgattttttcaagctacccaggtttaatctctcacaaaggagcatttaaaacaaagatatacttgcttcttatatgaacatatatttccatttagtattttcagacatgcttatacaggaggagaaaaaggtctgaaagagctaagagagagccttcatcttttgtgtgcagtcccgatcaatcattccatttaccacatgatatgaagcacgggtttgactgcattagggggcttattgagctcagctctttgagaccccatttactcttctagaagtatgtgctttgattaataatagatggttagccacatagttaagtagaatgattggcaccttttattgtttgtttttaagactaagttcgtgaaactggctgaccagagcagaggtttgttgctgggctggctaacaaatgcctgcctgtttgtaaactcagaaagccctccttccaaagatcaaaatattggtgctctctggacatttgctccattatttgtggtgctcaaatccttgtgaatgctatggcccttgagtcttcttttcctataaggataggtcacccttttggtaactggaaaagttgttgctggcatgatcttccctctaagcagacagcataattagaaatttaccactgatttggtgcagttgggcttccctggttgctcagatggtaaggaatctgcctgcagtgcaggagatctggatttgacccctgggttgggaagatcccctggagaagggaatggcaccctacttcagtattcttgccaggagaattccatggacagaggagcctgacaggttatatagtccatggggtcacaaaaagtcagacaggaccgaatgactaacactttcactttttttggtacagacagtcttcagggctacataaag

SEQ ID NO: 54124 - DNA, 1223 bp, Bovine  19866881955771
  misc_feature (1)..(1): n is a, c, g, or t
naaccccttattgttttcctagcgactgcaccattttgcatggaatattttatattaagcttttaagggaaaaggaaactcaagacagaagctcaattcagttgtaggaaaacaaagacaattacatttgttttccacacctgtgtttgttgactgaagaaatgtatacctgctgtgcttgtttgaattaaagattctgctttttccctcctgaggtttgaattcaacaacttgcccttctttttttctcatctgcagagtgccaaaagaagataatttgcatggatttttgcctttgcatcctgcatcttagcactatgaaaacacagcctttccctgccttctcatgggtggagaagtaggctgcagccctgactgtaaacactgctttttcttctagccctcctcctccttcttgacatctttgttgggctggatcttgcagaacagtctcctttactctttgtcgttccttgattcctgttcctgtttgctttctacttctctgaccacgcttcttcctcctcctgttccagagatgcaccaaggatatgcccatggccttcctctcctcttggcagtccagcagcccctctggcccacgattcttagggaaccctaggaaagcagatcagaggccaggagtcagaaacctgttgacactcattctgctgtcagtggccaacttcatggtatggctggctgagtgttggtaaaagccaggacttagatgactcagaggttcccatttgggcaactggattgtgccaccacctgtgatggaaagctagaagaagataagggcttcggttatagacacattagtctgagctgcctgcaggagatctaggtggcatatgctgcttcctatctctcacatctcctcctgttctgatcccctgccagtgccctgatcactgctcacctgggctagctgaatagcctgaacaggcctctctcctagtttctacttcatatcccaaactctagggttaatcaccctagagtgagaccttggtcacatgctactctcccctacaagtcctggtgtctgctaccacccagtcatgtcacatacatcatcctatgctgcctttacacagtacacactgctacacagtcatgtcacttactgtcgtcatatgtcgcacagcacacacagccacacaatcatatgacacattgtcataatacactgcatgtcacatagtacacactactat

SEQ ID NO: 54125 - DNA, 3690 bp, Bovine  19866880468442
  misc_feature (1)..(1): n is a, c, g, or t
ncttctagtaccttctgtccatcttcattacttttcttgaagctcaaataactttatcttgtaaaaagatccattttggggacttccctggcaatccagtggttaagattcctcgtttccaaagcagaggatgggagttagatccctggtcgaggatctaagatcctacatgccacggggtgtggccaaaagacttaaaaaaattaaaaattaaaaaagttccttccttccaccaaggatgaagatattcttagcaaagcattactattattattattattgacaagtagcatgatatgcttaacatcgtgtgcctctgtctgagataattatgaattgacttggaattaaatcacctttcttaggtcaaaccatttcccatgagctttccctgctgccagctaacctgaggatgatgtaaaatggaggaggcaagtctggggacccatgtccctctgatctgcaatcctctcttgagtgacacatgctttggacaccctgcctgcatattccatttctgtttacccttttatgcagcctgagttcactcaatttcccgtttttcccaccaaatgtatctttttgaaagcttaagtttacctcatgttcaagctctttttgaatcatgtcagtttctcactcagtttctgcttcatttccattggttttgctaagttaaggtccactcttgactaaataagcaggaatgatattgacaagatggaaatatggcacagatgtcagaaggatgtcacccctcattcctgggggaggagggcttggtggcacccataaagaccaggcatatcctaggacgtatgatcgtgatacataggcagttaccctggtgcagtagctaagccatgtattttaggaggagaaataagaaattttgagataaaaacatatacaaggtaagggttatacataagagccaaccagttgtttaggagaggcattggttttctcagttaagaaaaagtttattctgcatgactttagttaattttttaaaactagattttacttctgctattgctgtaggggactagagagacattgaaaactaatgcttttttccataaaggattttcttcaggggtgtgagattggaggagtctttctctccagttcattcatatgatgttgttggtgaggaagttctgctctagggaatagatggatcagagctttgatttttatttttctctccaatttctgaaaaccctgtccatattgaaatggacctagaataactcaaggccttactgtaagcactgtccatagggtgcagccacagcaaccaattttatgggaccctcttggtcagagcaagtggtgtggctaagagaatgggctggtgaccataaaccattctgtatattcatcctcatgcaggaaaactaagtacccttaattgacattgaacttctttcatagagaattgtaccgaaactaaacacattgtttttcatgaaattcatagtagacctattatttttccactctatatagaccaaataacttagacaatgttttccagacttagtgtttactggtaactggccttgaactaaaaatggactgaatgactctaatcgtgactgaaatgaaaatgtaagtgattcaggccccaggtggccttccccaatgtttgatttcaagtctaaattgaggcatttggcccaatagccatacagaggtgaccttcagccttacccaactcttcttttctcttatgtggtgtaaatcaagtgtgtaaattaggtaattttctccatgagttattagatcagtatttaggatcagaatagctatgttctttaccaagctgttatatatatatatatatattcacatacacacacacacacacacacacacacacacatatatatatatacacttttaacagaaaggtcaagatgttttagtaactcaataaaatgttaccaattcaaatcagacacatctgcattgcaaaagctgccactattctttggctatagagaatctatctttctaaccatttagtagtgacgacagaggatgagatggctggatggcatcactgactcgatggacgtgagtcttagtgaactctgggagttggtgatggacagagaggcctggcgtgctgcaattctggggtcgcagagtcggacacgactgagcgactgatctgatctgatctgatctgggttgtttggggaacccataagataaattaaagaatgtggacaagattaaaaaaaaaaggtaagaaatgtcttcctagaagttaggaggaacaaactaggatataaagataaattttctgtaactttgggaaagtaacatgagaaagaaatatcagtgaagaggaaagaggatgaaacaaagaaagttggaggtaatgctgtggagaaaaatggggattgaagaagagtcttggggataaactgttgtttgtgcttcctgatccaggcattgaaattatcctgaaccagcaagatgttgactctagggtacacagaacagaatattccaacacagctgcctgtgaaacatgtgtcaagacccaaggtcccagagggctaggctatagatagggatcaacctaggggagaagcagggtgattaagacttcctgaactttaggatattcaagttactggtgcactgactgccatcctgattttaggtttatatggatgtagtctgtctctttggttttagaagtttccccagctgttctttggttgctcctttcttatatgttcattttggccaagcatcctccatggctggacagcctgtgatcatagagggccctccttccttcttatcctcagccagagctcattcccttttgtatcggctgttttccttggaagcgtgaagcattagctttaatcagtttatagagcccctgacctaattttacatctgcaataagatcactatgaattctctgcttccccatggaggataaagctctgcctcccccacctcccttctgtaatctttctttgtgatggacgttagagagcctggcaggttctgttccacactgcattgcttcaagagaaaatttatttatatattaatattatataaaaaagatttctcatagggagccaaagattgaatcatagtcagaaacctaatttgagattgaaggccggatagtagcaggcgaacaatgtcaaagagcaaaagctctgggggtgggcaacgcacaggcattaaacgtttgctttgcatcgtacacctctctgttccttcggcatgttggcacatgttgcgggccagccgtgtgtatcagttttctcttgccatataacaaattactgcaaatgtagtagcttagaacaatattcatttgttatcttacagttcttgtaggttaggagtcgggcctctgcttagctgggttccctgctcagggaacaaggctgagatcaaagtattggctgggctgtgttcttatgtggaggctcaacaagggatgaatctgtgtccaaactcccccaggttgtttgctgaatttgtttctgtgcatctgtagaattcatgtcagtttgtttctttagggtgagagagtgaaacactttgctgaagtttctatcctctgagtgagtgaatgagtgaagtcgctcagtcgtgtccgactctttgcgaccccatggactgtagcccaccacgctc

SEQ ID NO: 54126 - DNA, 1571 bp, Bovine  19866880507822
  misc_feature (1)..(1): n is a, c, g, or t
naccaattagccagcagtaatcagggctagaataaaacttgcccatctgtcacttagagctctactgtcacaacagcctctactctagcatcagaagtccagtttaagggatattcgcatcaacctttagagtccagagttccctagcctgccaagtgaatgaatattcagtcacttcagtgtgtatttgatggtagttagcaacacaaagcaagcccaatgcccaaagaatgtgtagaggaatgttaattctagaagcgaccataacttgattttcatgatttccttgagtttaaagcctggaccacagtattacattaccaagttatttgcatttgaaatataatacctgggggaggggtgacatttaattaaattacagtgctaccctcaggctgcagggaaccagactggcaccaggctgtgtgtggaaggtgctggatgtgcattttgtgcttttcctgaaaggcaaggactgggaggaggaaactccaacgctccccaagaagcataccagtgctgagcaggagcagttgactggtttggacttaaaaattcagagtataaagtgcatgtgtgagcgtccattgaatgtggaaaagagcacatacctgcaggcttcagtctccacattttctaaatgtcctaagagaagagaaagagtgagaatcccttggcttatgacagacatagcccagcctaggtcagcatcttccccagtgagaaaggaaactcttggcttttgagtcaatgtagctcatgataactgggggactgtggtgcccttgctcctactctcttgagactccatggtaatggttagaaaaggccaccaaagtccccactgatcaaaagaccttcctttccatgcccttaagcccccattcactaagcaggtacagaggtgggaacattcaagatgtctacacagaactctagccatcttatctcctatagcatctgttttcaactggcacagatttttccctcctagggggacattttcaatgcccagaaacatttttggttgttatgattggggaggtgctactggcatctgttgggaagaggccctggctgaatatgctgaaataatatacaaagcatgagatagcccctcacgacaaagagtcgttcagccaagtcaacagtgctgaagttgagaaaccctgttctgacagaagatgagattatgaaagagtggattctagttactgagttggctatcaaaatagaaaataacctgtaaaattgccagtgtgtcattcagagtccaactaggaaagtgggggccactttggtatttaaaaggaaacaaagttttttaaattgaagtatagttgatgtacactattgtgttaatttctgctgtatagagagagcagttcagcacacacacatacatacatacattattttttagtgttctatttcattctggtttatcacaggatatggaatatagatccctgtgctatactgtaggaccttgatgcttatccattccatatataatagtttgcatctactaaccccaaactcccaatcctttcctccccacctccccacct

SEQ ID NO: 54127 - DNA, 830 bp, Bovine  19866880877449
  misc_feature (1)..(1): n is a, c, g, or t
ncaatgcaggagacacaggtttgatccctgggtcgggaaagaaccccctgaagtaagaaatgaaaactcactccctgtattcaagcctgggaaatttcatggatagaggagcctggtggtctacagttcacagggttgcaaaaagtcagacatgactaagagcacacacacacacacagaaacccaagacctattttcaaattttgatctccagaattacaataaatttgtgttgctttaagtcactttgtttgtggtaatttgctacagcaccatagaaaattaaaacctttgtgaattatcaacaattaggtagtaataccactccagtactcttgcctggaaaatcccatggatggaggatcctggaaggctgcagtccaaggggtcgctgagggtcagacacgactgagcgacttcactttcacttttcactttcatgcattggagaaggaaatggcaacccactccagtgttattgcctggagaatcccagggatgggggagcctcgtgggctgccttctatggggtcgcacagagtcggacacgactgaagcgacttagcagcagcagcaggtagtaatacactgatacttatcagtatcaaatgaaatatttagataacaatgtcactctcaaacatatgagttataaaaagtaactatgatattgaggtgagcaatgaaaataaacaagaatataacactgctatctggaattaatccaattggaaaagcaaataacaacgcagggttacgaaacacacaggctatcgatcagcccaaatcttgtaattgtcaagaacagggtaaaagaacaaaactgcaga

SEQ ID NO: 54128 - DNA, 787 bp, Bovine  19866881125970
  misc_feature (1)..(1): n is a, c, g, or t
nctccctaattgggaagggtagcgtgatacagaaatagactgagattgcccaaaggacactgcaacttacaccaaaccaatgagaagtaaccactgctttggtttcacaagctccatgtactaacctcatggcagcaagcagcctagtgtctgagagcttcattcactcattcacctattcatctagccatccattcactcattcactcaacaattaacaatctacaattcccttcagatatcaagggatgtgtcttacctccgtgatggaactgaagaggaaggaacccaacagggagaaagaaaccaaggctgaaagcctcccctgggtttggtaagttgtatttgaagagccagccctttcataaagagaagctaggtgagtccttcagcactgtcatgggaagtaaaaacagccctaagtcaaccccagccatgagcggacacggacagaactgtgaaaagaaagtcctgagtgtatgatcagcaaagatacacagctttatcctaccaactttattaagaatcaagaaagagaggggaatattgtgttactattatcatgataatcacatctacagatgaaactaaattgggaggtgttcctaacagcagttgaagactggcacacaataccaagctatacacagatcttggtaatatatgtcaaaagtaatacaatgaggcacttgttgaaaaaatgcagatgatctaactggggatgaataaacttaaagatggaatttaatgaaggggattccgggggcaataatagagaaaacaacca

SEQ ID NO: 54129 - DNA, 1945 bp, Bovine  19866881137618
  misc_feature (1)..(1): n is a, c, g, or t
ngcttaaaacttacacaatcccttaaagagtagcagcaatctacattattttgtttgaaacttgattttaactatttttaaaaatcagacagggaaaatcttaatctgagaacaaccacctgatgatgtattcacttattatctactcagataatattttagataaaatgtagatatatgtagataaaatgttttgtctacaatcatttcccatgtgtatggctttgcagcatacgaaaggacttaaaagaccttaataccttgttcttgccttccaagagcttacagtctcatctaattaataaaaataaaaagataaaatgacaatgtaggatttaatcagcagttcaaactaacacagtgaaaccatatcaatgtaaaaataatgtccaacaatttgtacctgagttcaggtaacgtcaaggtcactccatagtaaggagttcactgaaaggggattctctaaatcttgagtaaggtccagaatcttgattagtgaaaggaggacatctcatacttaaaatgcaacatagatggtaaataaatctctgaaaggagaaattattcttattctgtggaacattaatcataagggttctatatggaaaattcacaggtgagtggaaaatgaacttggaaatttctggggagataagccagaattaagtgttttctctggtatcatgggatgcatctgctctggggtaagccccacacgtcctgggtcctgccccagggtgagtatccagctggaatccccaggagatggccacacagactagaatgcagtaacccacatctcatattttgaagacaaagactgtcatatgactgtagcattcctaaattcccaaacatttgtaatcatgtatcttgggaattctggacatcacttttctcgttactgactgagcccaaattcacatatctaaagaccaccagggtatgatcagtgagtccagtattggaatgacacacacaatccaattataaatgactgtccagaagttaatttttttagtgatgtggataattcatctgaaaagatagccacaacaatgaaagaggaggaggagggaatggggggaaagcagagggagtgtcatttcattctgggatgtgattgagaagaaaaccccaagaatgaaatggcctttactgggtcctaaaatcctacacaatgttcattcgttcattcattttctcatttactctaccacatccaccccatgtgcaaggtgaaatgtttaggctctacagaggtagacaccatcctagtctatgaggaccttaagccagagaatcccacaaatgaaaatttaagacatataagcacaattcaggaaaagccgaaatggagctacatacactcttattgggcagcaacaaaggtcacttctgatgaacctattgtcccaggaattactaagatcttcttctctctcttcatctaacttagacttccaagtcaagacggggttttagccaccatgaattcctactatgttccagcaaggcttattccaattgaattctcatgttgactcatctttccctgttaatttctttcacttatgaataacctcatatttttaaaagtgtatatatggcagactgcctcccatgaaagtgtaacagaactgttaagtgtcattactattcaaaggctgcttttttcagacacctatttgctatttacaaggaagtccctgggtacacatgaaagataatatcagttacgctgtaacaataataaagaagacttgcgtgtaaaagcaacagctttcacttcttacatattaaaagctttagcagtgattatgatgaacaaaacagaaagggataatttttcttgtgaagatgagaaaattaaaataatttgggaactatggaggagccaaggggtggttaaagctagttattttaacattccctgcctcattac

SEQ ID NO: 54130 - DNA, 2661 bp, Bovine  19866881179539
  misc_feature (1)..(1): n is a, c, g, or t
ntacatatctggatttttcctaaatttggatatcagtggatctgaatgttcttgcactgataaaaggaagaaaaggaaagaaagagggaaaggagggagaaagagagaaaccaatcaaaggatgtcagtgtcagatggactgcatcatgtttgagaaaggtttgtataataatgaatgttatgcatgcacatagctcagcttctgacatgactttgatgataatatcagttcccacatctcacatgccagaagtccctgctgccttacctggaggtgcccactactttcttctcacaagtcacagtttttctttgtagccattatattttttcacattctgctttccatcacagctattttgctcaggtggaatccctcagtgccattctctcatcctccttgccctaccacatggtggatggaatcgggtggaacacggccattcatttgggcaaggctcaaacctgctgactagatgatggattccctctagtccagaaacaagtaaaacctgaacacaagatcagggcagtgcagaagctggagggggtttggggaggcggattgggagcagtctccccttggtttcatttttgaagagtggcacctttcaccaatttttaaaggacgcaagattttacatgaagattgtcaagatgatgatgataagggaagaagcaccaggaaacaaaggtcactgtgctccaagtatcaggtgaggccttggaacctcacggcagtatgtcaccatgcggcccttttacatccacgctcccgtccatccactagtgtatataggtgttataggctgaaactacctgaccgccacccccagccccaagctttcccttcttgtaaaaacctgtgtactcccacatgaggcccagcctgcttttccccacattgccctccacgtacccagctgaactaaacccatggcctcagaacccttgagggtccagccctgcctctgactctggtttctttttctcttactgtgctgttttcacatgagcttcctggatgtccctcaaacgttctgatcatgttcccgtctcagggcctttgccccttctgttccctccgcctgaagtgttctattccatatgtgtacatggctgatatacttcctcatttcttttaaatgtcaccatctcatcaaatgtcaccttctaagggaggccctctctgaccacccaagctaaacacattctccagtcaccctctctctccttactctgctacactatttttcacatgccgctaagcattgtgttacgaacatatcagcttgttgtctgctccccaactagaatgtaagcttaatgaaggcagggactttgactctttagtcctttgctgtatcccactgctggagcagtgcccagtacatcataggaactcggttaatttgttgtgtaagtgagtgaacaatgagtgattttcactcatccatccatttagtgcataccggttgagtgcctacagtatgcaaagacaaagacatcatagtccctgccttctaggacatagcagtcttgaggagatagacataaatagatacagatatataaacagatatttatgaagaagatttgcaggtgcagtgatagagttatggcccggatgttttctcaaatacagtgtcagagaagcagcagataatatgctgacattaagtatactcccttgcttaagaattgaagccacaaataaatgtgtgtgtgtgtgtgtgtctttagtgctttggcattataggatttcatagagtttggagaaaggctcaaaatagcttttcagtgatgttacagtatgacagaaaggtgaagaattcactttctttcccctcaaatgaaatagaagcagtggcatttctcccaggtgggcccaggcattgtacaagacccacatatttttcagtaagaggctcacatttgctgtgatgctagaagcttctaatgggcctctgagggttgtaaattatatcaaataattttccagatactaagctgttgttttttaaaggatggagatgggaggggtgaagatgaagctttccttggatcatgaaattataccttcttccagccacattcaataaatctttttgaatgtcaaatattcattcattcagtatttactgagtatcaactatgtgagaagtgccatatgggaccatgggactgtccttagttggcttaaaatccatagatccttactggaaaaactgctagaacttgatgtagctttttgctattgttttagcatttatattaaattactgtggtttttattatatccttattgtagcaagtcaaataaaacagaagtatataaatatgtgtaaaggaaaaatgttcaatgatccactcttccccttcattcctaccaccccttgtaattaatctttcagtaatttgttggatgggcttccctggtggcttggtggtaaagaacccacctgttagtgcaggagactcggatttgatccttgggtcgggaaggtcccctggagaaggaaatggcaacaaactccagtattcttgcctgggatatcacatggacagaggagcctgcaggctacagtccatggggtcacagagttggacacaacgagtactaagcaacaacaaatgtgaggatatctttctgtatcatta

SEQ ID NO: 54131 - DNA, 892 bp, Bovine  19866881270072
  misc_feature (1)..(1): n is a, c, g, or t
ncataaatactgtttcagctactgaggatattccatgaagtgggtattctgtgtctcctggttttattctctctgctatcttcatgccagcattaccaatttgggtgagacctgggttcattagatattcaagcagcatttgtttagtcctgggagtgaaagggagtaggtttcatgtagctttctcttaatgaaagtttattatgttataaatctgatgtaatttcaggggcttgctgccttgcatgatggatgcattacctggcctaggaattgaaagaactgtctttgtaacatactcaccacaaatcccaacattggacagacctactcgataaatcttctggatactctgtcttcttaaagtgtatatatgtgtgtatacgtatgtacacacatgtgatctgtatatacatattttaatcagccaggggaccagcagaagacaatatgcgcacactcaaatagggtaactgagaagagtttaaagaaggaaccatttgcagaggtgtgagcttcgtttatggaaaccccgaagagatggtgaagcaccttggggtagcaaggcacaaaccattaccattcctaggcctgaaagtcccaggggagggtgaggttgatgaaatctgacaagatcagtagctgtgggagagggctggagctatggtcttcaacagagaaatggaaccaattctgagccagaaagggagggagccagaggaataagtaccacaacctcactctcctcctgcctcccattcttttattgagccctcttattacttaaaccaaagtagaagctgcatgacaaggatgagagtgttgcagtcctaaaggtcatcctgcaaggcatagtgagaatggtcacttcagttcagtcgttcagtcatgt

SEQ ID NO: 54132 - DNA, 2320 bp, Bovine  19866881332429
  misc_feature (1)..(1): n is a, c, g, or t
ncaagatagactctcttgcctggggttgatggagacttcctggggcgggagtgggagtggcgtggagggttgccagactaaatacaggatgcccagtttagttcgaatttcagataaacaatgagttttttttaaaacagtataagtatgtcccaaacattgcatgagacatacttatactagaaaggttccttgtgtatctgaaattcacattaaacttggcatcctatatttttatttgctaaatctggatagcctcaagtgtcctctggtgtggggagaaagtttctgcgcctgagacatctcagagctctaggaaaaggcagctttctccaccttcttcctctttggcttggtctgagacttggtttcccttcgatttgggactaggctaaggcggatgaagaagttgcttcaggcacaaacccaggaactgagatcaagaatgaatgctgtattgaaaaaaaattctttaaaaataaatgatcctgtattaaaatgtattttattttactcccattctatcctatcccatcctattttattttttggctgcacctagcagcgtgcagaatcttaattccccagccagggactgaaccagtgcccatagtgccgagtcctaatcgctgggccaccagagaagtccccaacatacttcatattttaaaattgtaaacattgtgattttttaccataagtattttggttgagaatgttttattaaagtgtactttattttaatgattaagttttttttttttggcacgcttttaagttttgcttctgaggtggtgagagtgttaaatgcaagcttgaagtcttacaaagactgatgccagaattctttacttagaattgaaatatgagtgtttctactttatttgacctcgaatttacacataaatttggagacacctatgatcttcccttgtcagtttgaacacgatggtgacactgaacttgagtgaaatttcttacctccattgctttctctaagaacatatttttggttccaatttccttctttcaaaacaacagagactctggtctcttactgttttagatgtgagatgacatctgaggataagatcctggttttgcccagtggtagaatcttccagaagaagcttggagagcttgctgggcttggatgcatggagcagaactcatcactactgactgcatgatgatttaatatcatcttcttgagtatttaaagtgtgatttgtgggttacggttcaaaaaatgtcccaatattacatttagttgattgatgtacatgtatgaaataaacggtatttagcaatacaaataattggtttccttagggtgattgtcttgttagtatttgtactccatggtatctaggaattcttgataaccatgggtatacaacccatgatgggtgtatataaacgctgtatttcagactctccaaatgggataaatgtagttaatgctagtatattacatcatccattggactaaggaaggcatatgatattcacagagaaggcatgtgtgcttgggtatgcacacacacacacacgcacacacacacacatgctctttctttttctcttcaatgcatagacatttaaaggcagggattattagaagactgaaaaatgcagaagagaaaaaggcttgggcactactgactgatgtaggtttaaggtgtgaaagaatgagtgaacaaagatgcagacttttgttttgcatcttttaatatcttctcagtattctttaaattttttaaaaatttattttcatattaaagtataactgctatgcaatgtaagttataggtgtacagtatagtgattcacagtttttgaatgctggctgccgtctatggggtcgcacagagttgaacacaactgaagcgacttagagagagagagagagagatactccatttataattactataaaatattgactatattctacatattgtacaatatatccttgtagctcagtttatacaccatagtttgtacttcttactccctcaccctgtctttctcctgccctcctcctcctccccactggtaaccgctgttttgtgtctctatatctctgagtctgtttcctccttctccccactggtaaccactgttttgtgtctctatatctctgagtctgtttctttttttgccatactcactagtttgttgtattgttttggttccatatctaagtgatatcatacagtatctgtcttctttgactaatttcacttatgataatgacctccaggtccatccatgttgtttcaaatggcgaaatttcattcattcttcttttttttta

SEQ ID NO: 54133 - DNA, 1010 bp, Bovine  19866881746924
  misc_feature (1)..(1): n is a, c, g, or t
nctattcaaagcttcaaagggtccatgcaggctcccatatactttgcccatttgagttatttcaatttattttaggaaaagagaaaaaaaaaatcttacaaagctgacattatatagtaaagtttcagggatatgggagctatttaatcattttgtgtgttaccctggcttttctgcagtctctttttcctgtggttttgttcttgtgctgctcattagcacctccccccagagagtgggcaggagcagggaaaaaagagataaaactgaaatcagacaattttatcagtcagcctgtcaacaagttgaatatattgagaacccagggggtgcagaggcactttttagtagctctgataaaaggtttggtgggggaggaggtcaaaactaatggcaacattgagatttttttggattatcaagggatggtattgatttgggccctccacatctccattagtgcacataatcaaaagtggggcaaaaagtattaagcatccatacaactctcttaaagaagactctaaaaaatttatcacttttatccccatgactttgggaacttgttgggctgttcaaatagaaaacaaataaaattaatttcctttgctttgtctaaattcttaaaaatcacactgtaagaataaataaaattcatcacagcagtttctctagcttcccaacagctttctacttttagcctgtttccagaggggcaggacccatggaaaggatatacattcgagtgaagcaagaagcaagatcactgccaccaaaatgagctgaagcctgacaatgaaggattgagtttgccacagatccagtaaaattaacagtgtgtgctctgcacactgacatggatttccaacaaactgtgctgtctacacagagacaaaaactctacatcatgtcacaaggccactcaacacatgaagttggctacttctaagcctgaatgagaaagaaataactgtatcttctctttgttattatgggaattttaaaattat

SEQ ID NO: 54134 - DNA, 865 bp, Bovine  19866880188243
  misc_feature (1)..(1): n is a, c, g, or t
ngtctgaggcaggtcaggtggtctggtattcccatctcttgaagaattttccacagtttattgtgatccacagagtcaaaggctttggcatagtcaataaagcagaaatagatgtttttctggaactctcttgcttttcccatgatccagtggatgttggcaatttgatctctggttcctctgccttttctaaaaccagcttgaacaactggaagttcatggttcacgtattgctgaagcctggcttggagaattatgagcattactttactagcgtgtgagatgagtgtaattgtgcagtagtttgagcattctttggcattgcctttctttgggattggaatgaaaaccgacattttctagtcctgtggccactgctgagttttccacatgtgctggcatattgagtgcagcactttcacagcatcatcttttaggatttgaaatagctcaactggaattccatcacttccactagctttgttcgtagtgacgcttcctaaggcccacttgcccacattccaggatgtctggctctaggtgagtgatcacaccatcatgattatctgggtcgtgaagatcttttttgtacagttcttctgtgttaccatgttaaaagtcttacctaagctgtctttccatgtaagaaagcccaggaccaactgggtaattatatctaatgtcaggattttgttagaaattccattcagcccccacactaagccaacatagcctgtatcagtaataaagatgctattttggcctcagcatttactcttataaaaaagaaaacctttcaaattactctgaaagaagtagagcagggtattatctaatgccaactcctttcagagaacatgtccag

SEQ ID NO: 54135 - DNA, 3171 bp, Bovine  19866880203154
  misc_feature (1)..(1): n is a, c, g, or t
nttccccatctattacccatgaagtgatgggaccagatgccatgatcttcattttctgaatgttgagctttaagccaactttttcactctccactttcactttcatcaagaggcttttgagttcctcttccctttctgccataagggtggtgtcacctgcatatctgaggttattgatatttctcctggcaatcttgattccagcttgtgcttcttccagcccagcgtttctcatgatgtactctgcatataagtttccactgtttccccatctatttcccatgaagtgatgggaccagatgccatgatcttagttttctgaatgttgagctttaagccaactttttcactctcctctttcactttcatcaagaggctttttagttcctcctcactttctgccataagggtggtgtcatctgcatatctgaggttaccatgtgtgaaatagtgagaagttgctgtataacacagggagctcagcctggtgctttgtgatgacttagagaggtgggtgtgggagggaggctcatgagggagggttatatgtatacttatcgctgattcacgacgttgtatggcagaaaccaacacaatattttaaggtaattatcctccaattaaaaaagaagaaaaaagaggtactccttcatctaagcccattgaattattttactttctattctttgactctctttttatgtaacatgatttcataattttctgagctcctcctggtctgattaggaaaagtctccagagaattctgctcaatggactgtctggggacagcatcacaatgtggttcagtaattccttgggtagactgcaggttgcaagggatgtttcgtctaagttgttttgtttccattcccacctccaaaaggaatatggcttcaggctcagacaccttttgcttgtgaggctgagctttgccacactcagggagtagcacctgttttagtgttcatacacattacttatattaacctcaggctaggtctttcacttttcactttcctgcattggagaaggaaatggcaacccactccagtgttcttgcctggagaatcccagggacggggagcctggtgggctgccatctatggggtcgcacagagtcggacatgactgaagcgacttagcagcagcagcagcagcaggtcttcaaattaaatttcaagtaaatttcttaaaattcataagaattcctgtggtccttgttaccgtgcaaagccttgactgaaaacacttcatctctgtgtcccagtgcctgacatagagacgtcatgagagaagccagtatggagtgaaataggttgatttcccttgactttgaagacaatttcacctcatcttgggcagatatgtctccctgacaattttgtataggtagatatgttccatattgaataatattttaaatatactagctttttatatttactactagtaaatacactagacaaaagtacaatgacttacttggtgggacaaccactcaatcatatgtccatacaataactttacatgggcttcttggtaaatcacccccacttcttcatctgggaagtgaaaattgaatttcactggctcctgaggttcttccaccactaaaattccttcactgaaacttaagtttttatgtaacagtttatattaagttataattgctataattagcattacagtttgtcttgaaagaattttaattctcaagacttacaagtacattatagtgattatgagcacatattttggagttggacaagcctgggttcaaatttcaattcatttatcaaaagcaaattgtcatgcctctatcagactcatttttctcattgataagtgaaggtaataataagatctgctttacagagctgttgttagaattaaatgagataatgtacatacacactttttaaaatactgcataggggttctctaggcaagaatactggagtgggtcgccatttccttctcccagtggaccacgttttaactcttcactgtgacccatgttgggtggccctgaacggcactgctcatagcttcattgagttatacaagcctcttcgccaccacaaggctgtgaccccctgaagagagagaaaaaaaagaaggggtggcagaggataaggtggttagaatgcatcaccaactcaatggtaatgaaattgagcaaatgggagatagtgaaggacagaggagcctggaatgctacactcccatgaggtcacaaagagtaggacatgacttagcccctgaataacaaccattaacacatacacatttaggacaatacctgtcatgagtagctatttttcttactgtaagcacactgggattgagatcatgatgaagaaaaacactataaatatatttgtttagtttcagattgaagataatgactgcaggaaaagactaagtaactttatttattcagctgtacttcagattcactagaactctctcatctgggtaagaaaatgtccatggagatgcgaacagccgttacacatcagaatggcacttggattgataaatcatcccttgctgttgtacttttcaaattagcaaatgaaagagcatcttttagcaatggggtgatatttataaattaaatttattgatacacatggtcttggttattattttaatcttcctctctaggtattttgtaagaaaatataagtcttgtgtttacttctgtttgttaatgctttgataaatcagacatttttagtattctatcaatggcaaaagtctaattaccttattgtattctgatttatttctttccttactttctttgcatctgcagcccaacaaatgagtctctaaagagatatatgttatgatacagtgtcagtgaaattaatcctaatcaattttaaagttcacgtttttatttgatgactttcaagggaatcactaaaactgagattgacttggtctcttcttttgttggttaaatattgttgtttgaaagcagtggatccaaagtgaagaaaaaggccctttttatgctttcaactctgttccatttccaaagaaaaactgtggcaattcctcttgcctatgtataaaatgaggctaattggtcaaaaagaacacagaggctctggtgggcttataaattggcatctcgtaaggccagaagcctaattc

SEQ ID NO: 54136 - DNA, 3035 bp, Bovine  19866880573030
  misc_feature (1)..(1): n is a, c, g, or t
ngatatgaacttcttgagagcggaattcatcttattaatctttacatcttcgtgtctaagataatgagacaatggcagggggagaaagtagaatggagagacaagtataagagtggagagaaagaaaggaggtaagaaaaaaggatgaacttagagactacccagtatatgaactttccaaatgcttatcgaagtaaactaacctataagtattgttggtttctaattgatttaaaggagacaagaagtatatctttttatctattactgccaaataatcaggtaagtgcttgctggggaggaaaaaagtctgaatcaacagaggtgttctaaatgtatgtaactttttctttaagagcctagtaacatcattatgattccatttgttaagtggtaagtttaaaaactactactgaatcataatgctctcctattctatgtgaatctcttctttttaacaatgtgttaataagacaacatgtttacttatctcaaagtagtctctaatatgtctttagcaaatctgcaaagggctggttccagaactacacttaaaactctttaccattacataaatacagttactatgagaagtagggaaaataagatttcccactatggagaaaaggcaaaacaaattgataaaagaagatatctttttttaaaaaaggaaaattcacatggtactggggcatcccaggtggcactagtggtaaagaacccacctgccacggcaagagacttaagagatgagatgtaagagatgcaggttggatcccaggctggggaagatcccctggaggagaagcctggcagtgcatgggggtcggagagtctggacacaactggagtgacacagcatgcacacacatacatggtattaaaaactcaagcttgcacttcccctggtggtctagtggttaagacttcgtgctcccaatacaaggagcatgggtttgatcttccctggtccaggaagatcccacatgccacgtggtgcggccaaaaataattaaataaatctcaaactttacaaagaagtaaaaacaaaaggtctatttctctaccctttccaatccccaatcccattccccacttaatgttttcttagggatccttcaagaaaaagatgtgtgtatataagaaattcttactttttaatacatacaacatcatacataaccttttcttggtatcttacattatacacttaatatatcttgagaatctttccatatcagcacataaaattaataataatattctatcaatgtttaccaagcacttacaatgtgccagatgttgtttacagtgttaaatttcttatacctcatttaaccttcagaaaaactctatgaagtgggcactataagaggacactgaaatttcaagaagttcaggtcatattaatcaataaggaatagccctaagatctgaacttagagcacttactcttaaccactgttctcctcttatctaacattgactccatgaaatggataagctgcaacatatttaaccactctctactggtagacatttaagctatttctggtctgcaaagttcatcattagaatgtaagcttcattgagagattttggtctaaatcaagaattacaggcgatttttactttctcttttgggccttttgtatttccaaatttcctgcagtactacatactaatctacagcaagaaaaaatagacatttttagataaatttcaaaaatagagcaaccttcccaagcttatagggtagatgctgggtttgaattcagatccataaaactctgaaggcctctttccatggaagagtttccaaaggtaaataattctaattatagttcatactgggcttctctggtggatcagtggtaaagaatccacctgccaatgcaggagacataagttctatgctggggtcaagaagatcccttggagaagaaaatggcagcccactccagtgttcttgcctgggacagtcccatggacagaggagcctggcaggctacaatccttggggtcacaaaagagtcagacacaacttagagactgaatgacaacaaatatttcatattaatgatttctctattctccaaaatctagcctatgaggtcagttaaagatacccagcgaaaatgtctgatacacattaacatattaataggaacactataataattactaccactggtacgatctgtttcctatctttcatgaatggttaaataaaactcccacctgaggcactgtcattcctaagttatcctgcattaaattttttatgaatctaggtccagagaggaccagtaacaactaaaagtccaagaaaacaaaaacacatacaggttgatttgtgaaaccaaagaacagaaataatccttctctataatacacttcacattttaagtcagagttcctttaggggaagaatgaaaaaaaaaaaaaaaaggatgtaagatgactcatgttcccatctgacactatctggggataatatttaagttaagattcagaaagcactgtattaaaaagacttggaggtctccatcattctgatctacagcatttcactattatctcaatttcctcacctaaaacatggtggtaacaatgctccctacttcatggaacatattaaacatagaaaaaaatttaaagtcttagtatttgtaaaaattatcactgaacttaaattggcaactaaaaagaaaactgaagggggaaaatccgtactgtaaaaagtcaatcctcccaaaaggagataaatataccttaattccactagttcaggaaaataaagccagaatctccttacccataaattctaacactgtataccaagataagataacatacaaattatattctggtgtaaactgtatacaattagttgctaaactctgttcatcttaaagacttctcaaatctttgtcccctgcttcagtttcctacactacctgcctcagttcagttcagttcagtcgtttagtcgtgtccaactctttacaaccccaggaatacaacacgccagg

SEQ ID NO: 54137 - DNA, 1616 bp, Bovine  19866880590160
  misc_feature (1)..(1): n is a, c, g, or t
naagaaggaggttttgaaggctctggcttaagtgaggttttagagaagtcaggggaaatgacaggagagcttgtttcccagggctgccttcacagattactccaaacctggcttaaaacaaacagaaattcattctctcccagaccggtaggccagaagtctgaaatcaaggtataggcagagatgtgcaccttccaaaggccctaggggtgaacccttgcctcttcgacctgctggtggctctgggcatcccatgctttgtggctgcataactccagtctctctctgtcttcgcgtgaccctctcttctgtgtgtcccaaatctacctctacctttctcttattaaggatacttgtcattgaatttaggctacacctgataatccaggattatctcatttcaagatccttaaattaattgcatgtgcaaagactacctaaagagacttgcattcacacgtttgtgtacatacatcttttggggggccatcattcaacccaccccaacaggtaaggagggatgtaatcagaactaggagcccaccctgaaggagggcagagttgcaccagtgtctttgggtctcgtttggcatatatgacacatatgctgatatatggtgcagagggggattgagaaggtcaagtcggggaataatgatattaatagttgtgacagccaatgtttcaggaatggattccttgagaaggatggatgaaatggttaaaactaagtggccagtggcaggtatttctctaaagtcagtgaattctggaggtcttctgccgagggtgttaggagaccaactaccaagactttaaatattgatgagagaatgacactgcaatgatctggaagttccattaagacccaggagaaggctgaccctctttttttatccctctcagccagggagcatgggacctatgtgggaagatagtttctttctcacttctagatgctactcatggtttcactactccacagagaaagtacccctccacacacctcaaaaaaattctttaagccaatggaagatagggcaactggatttcaaaatttttacctcccccctttaaaaaaaaaaaacaagacaaaatttttcttttttatgtttctggattttctttctttcagatagctacatctctgtatctatccaaaatagcttgcttgagagcagggaccatgtctatttgctccttcttttatctttagagtccagcaaagaactcaattagcagagtttgtcaaaatgaatgagtggatgaaagaatatataaatgaatgtgtgaatgaaattgtgttttcctagtttcatatgcacggaaaccaccagcaggactgtcttttagcaagtgttgaagatgggctcacttgatctgtgtcccgtccttgaattcctgtaccagtatggataatagctcagcgccttgtcaataagtacagcgtgttccatccgcagctgccaaactcttaacaagccatctgacggaggtgcttgtgtgaaggtgacacttgcccccaccaatgtcatctaaggaaatacccatcttcccttaagtgtctctcctccctgccttcacatatcagtgcactgtaaatgatgatgagggag

SEQ ID NO: 54138 - DNA, 2075 bp, Bovine  19866880605785
  misc_feature (1)..(1): n is a, c, g, or t
ngagtgattgattttgccaatgtcaactccaggcagcaaacaagaataaaaacatttcaccagggcaaggagggatgatcaggaccctcaggccctcagaaaggtgttcacagatccaaactctggaaattttgatgtagaacacctaatctcttgctttgcagggggggcaggatgcaggcaagaatttaaggattgataagagcctctgtttttcaactcccatcaaaataatccgtgcacaggtttacaaagctctttgctccacctaaaggacaaaggtgaaggtcatagaaaacttcttatggggactcttacctgtgattctgaagtgtctcctctgagactgattttcttatctattcagggtgggctcttactctattcaactgtttaggatttttaaactcttctctccccctctcaggagatgaatggtgtgcaaagtgagaagatgataaaataacatgtttcccacttgtcaggcctctctgtgataagcctgttcccttcctctttttcttactttcctttcaaaaggggtcattcgagagagagagagaaagaagaacaataattttattattttattttcagaaatgctgttataaacttcatcagcaagaattgttagaaagtattagaaggcaggtttcccatccctgttattgaaacagcaataaaagtattacaaggcttttggaagacaggtagtgtgaaagtctggaaagaagctatttaccatctgcaccccagaaacatcaactatttcacctactttgagattcgttaagaaaagactaatgtaaaatagaaacaccattatcttaccaccttccaagaagaaaggtatattttatgtattttaaagtataatacataaactctacattgaactgactcaagcaaaataacactaggtatttttgtaagtcatgaaactaagaatttttgaaaataatgctgcttatacacaaaagaaaacatataagagtttgatttataaaaaatccagtctcacaaaaaccacttattaaactttgtaaaccttttaaatcagttcaagaaaaataaacctttgacccataaactccagacccaatttaacagatattcttaattgacagtatcaagctcaaaaataaaaacatattctatcatattaactaaaaaagtaatcacataattaataggtgaaaacagagagaaagattgcagaagattaagattaagccctgcagaagcgaatgttctaactagaaattggtttaattaatagcacattttacataatgattacagtgtaattgcgctgactagcagagtgtcattaaatatatccatgctcctttacaacaccctaaggctaaaaataatgagttacattgaaaatcactgtgcaacaggttcataaataacatttaagcctatacaaggcgaatacttataaataataaatatttgccttttgtaattgaagaaaaaatgacagccttctttttctactaccttgtagattgccatgttataatgctgaaaagatttttccccttgctttctctagaaggtgttgaataatttattcaaatgctaatattccacgtagcccgactttgaggaacaaatattcctacataaagaataaatgccaggatgcttattacctctcttgctttactttatgccatgaatcccccccaaactaccacagtctattacagttgtcagaggaagtcagtggtcaaattttctggcagggaagagcatttttctttatttaaaaattaccccatctccccaaatgttcaacatgctcagggttgttatgaagcagcagctgctctgtgacttcaggaaagaaggcaaagatgtctgctaacttcttaacttctcactcttctgctgagaatcaataacatctgatcacaatggctgcagttccttatccatacacttgactctggcctgggctcaggtgtacaaaaggtccatgtccaggagcctcatcttcttcatcttctcagttccaagaggaagtcgagttcctctggtgcctaagagaaagcagagagcaa

SEQ ID NO: 54139 - DNA, 1370 bp, Bovine  19866880658361
  misc_feature (1)..(1): n is a, c, g, or t
nttctgggtattctttggaaggaatgatgctaaagctgaaactccagtactttggccacctcatgcgaagagttgactcattggaaaagaccctgatgctgggagggttgggggcaggaggagaaggggatgacagaggatgagatggctggatggcatcactgactcgatggccgtgagtctgagtgaactccgggagttggtgatggatagggaggcctggtgtgctgcgattcatggggtctcaaagagtcagacacgactgagcgactgaactgaactgaatgaatatatttcaatgctactctttaaagaggacttcttgttttataaatatcaatatgtgtaaactcaactaattcaatatccttgtaagcaaagtcagagaatttcagtgattttgtcaaggtcaaacatcttgaaatgagaaaaagaaccaagatctcttgacctcggttccatgattcttccactgtcccagattgcttaaaccagtatcaatgcacagtacatatataagaaagataggaaaagagtagaaaactggtacacttacttaatgatgtgtgtatatcaagatggaataaaattcacagtgtaatttcagacaataaagctacaaatttctaacttcaaagttattttgaacatgtccacaaaaatatttttatagtctccacataatgagatacactgtcttaatagccacttacatgaacccatgagcattaaaatataagacacaaacagctcagtatactatctctaatacctaagacttttctccatgcagtatagaaggcccccaaattgtcattagcatggtaagttgctcaacataaatgtcctcagattttcaaattactttgccatatctgacctgtcatggagtcaaaagaagaaaaagcaaagattggaaatatcctgatatgttgaaagtgacagtttctttggggtttgactttctgaattataaattcctcaggatggaaattttcttcttcatttggcacatttatcagctgcaaactattacatgactatgtaaaaattggcaataaagaaatctcaagaatatggaatagaaactgacatgtagtaagaaattcaataaagtatttgataagtgaatgaatgaataactcttattttcttcaatcactttccaaatgatatcaaacaaattgcattcacaaaaaattacagtatggttttatataggtaaactttgagctttcttgaggagagtgagctctctctaatttgtgctttatagagtcttctttgaaatataataatctatgttacaataacgtaattaatacaaaggtgttgtatcactcctttttctttcagtgatgcaccatttt

SEQ ID NO: 54140 - DNA, 655 bp, Bovine  19866880691485
  misc_feature (1)..(1): n is a, c, g, or t
ntaacttccattcacgggcagtcatggaaatcacttcatcagaaacagggaagaaaggaaagaaggaaggaacagagtggggagggaggaggagaagggagggaaggagggagggaatgggggaaggagggacgaacaggagcactgtgtcatgaaacactaccaaagacagaagacagataatacttctcagtgatggggtacaaccccacacacactactttcctcttcctaagcgacaatttatatcatgtcagtatatacagagaagattgtttcaactgcccttctagagaagtacttaagaaaaagaatggccatagatctttactctttctggctttcaaagggctcctcctggggctttgggacccaatattgtttgcaatctgttcttccctggaggatgttagggaaaatagaaaggcccaagacaggtaatgcttggtgtttaatgatgataggcagaggtgggaaagcagagatcagctttttcctctcggcagagcctgggctgttaggaagagggaatttagtgtttgatttgctcattctccattcctcatcgaggctttggtcccaaattgctaaacctccattcaacagttaaattaaacataactaactttgttgatattatttcacagccgaataa

SEQ ID NO: 54141 - DNA, 1952 bp, Bovine  19866880705804
  misc_feature (1)..(1): n is a, c, g, or t
ntccacttgtgtttttggtatcctctgctctgtagaggctttaaaatttgtcttttatgaatttttgtggctcatgctcagaaatgtcttccttacctataaaataagatctctttaatgctttcctgttagttttatttttattatttaaaacttgggtttaatctagaattcattttgaaaaagtggtgaaatatgaaatcagccttaaaaaaggctagtcaggtatctcaacaactcaacactctttattgatctaccttctctatgttaacttaaaattcctctgaaggagtattacaaatgcagggtaaagacttactagatttatgtggaactttattagtggagttagtagtcaaaagaacctggtctaaatgcgtgcgtttcaccttcagaggcaaattgaatttaaaattgtattacttatattagaaattaagcatagcttaacatttagttaattcccatttcacttgaaaatccaaactccagaagagttaagtaaatatttatgtgagttctgtactattcattcattcagtcaatgatttattcataggagaagctatcctaagcatcagaaatagagcaactaactagatagataaggtccttgcactcatggagtttgaccttaagtaaaggagatatataaacaagaaataatatgtaaacaagataagttaggattattttaagcagattatttgagttgtgaatggaataacaaagtgatgtcatgtttgagagagaaagtgagcctttctaaaacttaaaagatggaaagggactggttatgtccacatccacaaatctaaaacagtagtaatccaatgcagaagttgaggggtgggaggaaagtatgatgtgttttgctgtgctgtgcattttgcctgtctattttaaacttgcaattttctcattgaaatttgtgggcagattctttagtttttaagtccccttgtgggcccccaaagacattcagtgttcgtaacatttatcgttctgcattataattatttgcccgtttgactctccttccagacgtgagttctatgaagtcaagaactcccttattttcagtatctagtatactgaaaatatactcagtaaatgtatactcagtaaatgtttgtcacagtgaggaattataagcatattaaaggccagtctgttgtcaagggctttggatcctattttctcccaccatttcaggaatcttacattcttgtttagtgtgtgcaaactctgtctcacctacattctttccattaggatttaatcacacttcaacctttccagtcttaaaaagcttcccaaatccccatgttttgtctccaaatatctttctccctttctcaactctactcttcagaattttactggcttcatttttttaatgcctactactcttgaatcttacttttgtctgttttcagcctaaaattatcagtaacttgtgctcagttgctcagctgtgttcagttctttgtgacctcatgcactgtagccctctaggctcctctgtccatggaattttccaggcaacaatattggggtggattgctatttccttctccagggaatcttcccaacccagggattgaacccatgtctcttgtgtctgctgcattgcaggtgaattctttaccactagcaccatctggatttgattaattttcctgtagtgctaaaagggtaagaactttaagagcatacctatggtgctttacacttctaccagttatttcagagaaaaggttaagagttggtctatgaaagccttatttgcaatagccaagatatggaagcaacctaagtgtccatcaacagatgaatggatagagaagctgtggtgtgtttatgtgatgttgctgaattcagttgacatttttcatttctttcctcatgtggtccctgaatagcaattgatgcttaactctttaatt

SEQ ID NO: 54142 - DNA, 1377 bp, Bovine  19866880718585
  misc_feature (1)..(1): n is a, c, g, or t
natctgcaatgattttggagcccccccccccaaaataaagtctgtcactgttttcattgtttgcccatctatttgccatgaagtgatgggaccagatgccatgatcttagttttctgaatgttgttttaagccagctttttcactctcttccttcactttcatcaagaggctctttagttcctcttcactttctgccatgagggtggtgtcatctgcatatctgagtttattgatatttctcccagcaatcttgattccagcttgtgcttcatccagctcagcgtttctcatgatgtactctgcatataggttaaataagcaggatgacaatatatagccttgatatactcctttccctatttggaaccagtctgttccaaatttttgaattctaatctactctctgaaatttcttagctgcttgacttttggtagagatatctagcttctctatgttcagtttcttcacctgcaaaatgagaataataatagctcttaatttataagattttgtgggggttttaagaattaatgtaagtaagatacatggaacagtgctagagacacattttctttcttttttgtaaaatttatttaattggaggataattaatttacaatattgtgatggtttctgccatactagacatacattttctgctcttatgttgtacagatcactaaacatcatatatcctgttgttaccattcttactgtaatagtttagttggctaacagtaaaagaataactcctccatgtgaatatatgtacttcaagttataactatgatatttagagatatcctccataaaaagtatggcaaaaagattggtcagattgaatttagccagaaagttaatcacagtatcacctatggaaatatatttgtcagagaatcctgataaattaaacagatttcaatgagctaccagtagatggctctcttaatttgctattttatttcagttcagctttgtgcttttatgcattaagtcacacaatcaaacaaccccaggaacagggcagaaatggctctccaggaattgtctaatatatttgtctatcttctggtagggtttataatccacagttgtaaattaatttgtagaggtccttcttcagtgggtacttctgagggttcttttttctttattttttaagaaaatcattttggaaatattttttggagcctagaattttgattattttatatatgtcatgatagatggatgaacataatttatgtcttaaattttcatggagaatgaatttcccatttttcttgatatctcatttttttataataaatttagatctggttatttctaaagttaactcttcccttagtctttctctgtattggaaaactaaatg

SEQ ID NO: 54143 - DNA, 1325 bp, Bovine  19866880773527
  misc_feature (1)..(1): n is a, c, g, or t
naagatgggagcgatggcacaggacactgaatgtaatgggggcatttgacccaaaatcttcaacgtaatttctaattcaaagcaaagggcttgctcttcagattatcagcaccatcagggtggcagctcccattgtgaagaacttacttctgccaactgtgttaaggcatgtcatgtattgtctcataatcctcctgggctatgaggtacataaatgtggggcatctgaggctcagcaggtgcaaacgattagttcaaggccacacagcagatgtaaggatctgtccagagtcccaggttaagaagtactgggtcacacccacatctactagtctctgaaggatcccagttcacactggcacctgaagggaggcttgggtcacatcgcatgtcttcctgagttcctcactgagaagttgagatctaagtataccagtaacctggggactatggcgttttttttgaagagcaaagctgaaaacctccagaccttcaactcaaacagcctggccaaatgacttccttttttggattttccttctaaattttatacctttattttttgccagttacagaatccatggaataaaagaaaaaagatttgtagtggtaccaggtagaataagggaggaagaaaacactgacattagaagccaaattaagaaaggggcttcccaggcagtgctagctgtgaagaatatgcctcccattgcaggggacataagagacacgggtttgattcccaggtcaggaagttctcctggaggaggccatgggaacccactccagaattcttgcctggagtgtctcatggacagtggaacctggtgggctatggtccatgaggtcgcaaagggtcagacacaactgaagtgactaagcacacacacatgcacgcaccaggtagaataagagaggaagaaacactgacattagaagctaagctaaaagattagaaaaataaaaaaaccatggcatgaggcagagtaacaccccaaggaactcctagaagctgcacattccccggactcctatagcgatcgttcacttaagcccacatcccccaaacctagagagaatccaggggaacaattgagccatccatttagcataacttattttaactcctggcccgaagccaggcttgtagctctgtactcacagtgtgtactcacagagcagtgaaactgctccacatccgggataacaaagcaactgttaatgggagtaattaagagccttggggggtgatttataccttttgttactgttcaggttcgaagttaccaaagacaacaattattagtatcacagggtgatcctta

SEQ ID NO: 54144 - DNA, 1224 bp, Bovine  19866880874405
  misc_feature (1)..(1): n is a, c, g, or t
ncgagaaggaaaaatattgttgttgaagtttaaatgtaggtctcttttcaggataggataaacatacacaggataagagaatcttagtggcatgagacagacaagactcgcttcccctggaatataaataggttcatgagtcttcctgtcaccccctcagcacccacccacttaccggacattcatctacttcagttcagttagacagttcagccgctcagtcatgtcctactctttgcgaccccatggactgcagcacgccaggcttccctgtccatcaccaactcccagagcttactcaaactcatgtccactgagtcggtaatgccatccaaccatctcattatctgttgtccccttttactttcaccttcaatctttcccagcatcagagtcttttccaatgagtcagttcttcgcatcaggtggccaaagtactggagtttcagcttcagcatcagtccttccaatgaatattcaggactgatttcctttaggattgactgggtggatgtccttgcagtatgagggactctcaagagtcttctccaacactacagttcaaaagcatcaattctttagcgctcagctttctttatagcccaactctcacatccatatataacatgactactggaaaaaacatagctttaactagatggacctttgttggcaaaggaatgtctgctttttaatatgctgtctaggttggtcataacttttcttccaaggagcaagcgtcttttaatttcatggctgcagtcaccatctgcagtgattttggagcctccaaaataagtctgtcactgtttccattgttttcccatctatttgctatgaagtgatgggaccgggtgccatgatcttagttttctgaatgtggagttttaagccaactttctcactctcctccttcactttcatcaagatgctctttagttcttcttcactttctgccataagggtggtgtcatctgtatatctgaggttattgatatttttcctggcttgtgcttcattcggcccagcagttctcatgatgtactctgcatataagttaaatgagcagggtgacaatatacagccttgacatactcctttcccgatttggaaccagtctgttgtttcatgtccatttctaactgttgcttcctgacctgcaaaaagatttctcaggaggcagatccagtggtctgatattcccatctcattaagaattttcca

SEQ ID NO: 54145 - DNA, 2657 bp, Bovine  19866880903292
  misc_feature (1)..(1): n is a, c, g, or t
naaacacattattgaaaatgaaagactctggcataggtaggtatagaaatataacacagctgttaatcctccataaatttgtttttaataacactgatgttttggttgcatataataactatttcattaaatctaaattaaatgcatggttaggcatatttaaaacatgtaaatgtaatgtgttgggagcatattccattttatgtttctacactgttctaataattttccgaattcaaattgactaggtgtagggaaatacctggtcatttatatgacaccttctttctgatatcattaagggctccagaaatttaatacccctgagttctaaacacaccactagtcagtgtgcaggaaagacaatgtgtttatctgctggaaagaaatgcttatggacccaaatgaaaggagggaaaatgcttttaaataatagtaaaatatgcattttgctttttaaaaaaataaaacaaagaattgaatactaaaacaagctatcttggaataacaatcaagagtgtgttgtgcatgatttttcatttatggagagcaggaggcattaatatacttgcctatggcttgtgcattactattcccagctatgcagaaatggaacgtgatttacagcaacacattctttgttgctgttccaacatacctattgtcttccctgcattctgactggctggctggctgggagaggggatggtgctggaccgcactccatcattatgggtgtctacaaatagagtaggtgtatgtgaactgggatttttcagctttgtataacaagcaagccaatcagagcacagaaagaacaatagctgaaggttttactgctctttaagtttccccactgattcccattgcgactgattatatcacagaagttatataaaaatcacattaaatgccaactaaatcaagacttttcatatctttttttcaaagcaatgaaattcaggacaaacactatactatgcatgaagatcaccacctagagatctaaactcttcattccagacgtcatatttgaaaatggaactagagaaaagtgtagtttattcattttgttattttctgtggtgcttgcaccgctgttttgaaagcccaccataggagagctcaattaagaagcttcataattttcactggttaactttgattaaataggctgtcttggaagagcattgagtaaatttaggctgtaaatcacctgtagtgagttctcaactctgaaattctggagtattagttgcttggccaagccatttctttcagaagggttatactttaccagctgatttggaatggatgcacttcattttatcagagcaagaacaagagacagaaacttctttctactggctggaacaacaggtatgtggaaagaaaagattttcctctctactgtcagctgtatcaataaaagggtagatcagaggttctctttaaccaagtttgttttttttttttaaacttactaattgttagctagctttccaggtcacggtgtttgccaaacattagaaaaaggataactaaacgaacaggttctccatgatgtgctacttcttagacaagaacaacagtctcttcaaataagcaagctctttcccactgagcaaatgggaaaaccaagcctgtttcaaccacggctggtaaatcaaggagctgaacccatctgaggtgatagctggcagtttatagctactcacatcactccctctttcgtatttttaagggcaaggctgaaaattcgataacatttgcaaattctgtataatgaggatcagttttagtttcctgctgtatgtcatcaggcaagttcgacagtcttctaaacctcagttttcctcatctctgaaacgggtatagtaaccacactcgccttactgactttttctgtagattcagtgagatagtgcatttaaggcacttatgcagggcctgacatgtaatactcaataaatgttagggcttaatgttattaacatttttcttgggtgtatctacattgtttaacacatgtctgtttaataaaaacagcttataagtttttcctttgacttttaaaactttatcagcaattaattaattccatctgaacatcagtcttgtcagttgggcatagcattattttatcctccttcgttgctgagaagggtgagataaagaggaattgagtagcttgcacactacagcgctaatgcaagtcctagaatctatatttttgactcatttacttctatcacaagagtggggctgggggaagaaggtccaaagcctccagaatacaaaaggttttctctgcggtgcagaactatttgcagattccagttaaggggttataaattttgtgttgaggggggtaagtctgttggtcaagggaagtggcagcatttaaagacagatagccaacgttgccttccaaaaaaaaaaaaaaaatagtgtcagcagcattcacacttctgaatatattaagtttgtaaatccagggtgcaaattgtttgtagaatctcaattaaagcccttataatattgtcattcgtaatcagctcactatgaaaacagggcttccagagggcaccaaaatcatttgaacttgcgatctgtaatagattgaaattcagataaggtcagcggtcagagcagag

SEQ ID NO: 54146 - DNA, 1144 bp, Bovine  19866880949108
  misc_feature (1)..(1): n is a, c, g, or t
nctcataaaagtgagatgccaagtcttatttaaaccaaaaaagcgacagtaactggttaaaactccatcctcacatcaactcaacttgttctcagggtttcagggctctgaaaggagtagtttataggcttctaatgaacagaaatatttaaccattcattattactgcaacatgggccaacttgagccaacttgagcatttttctcttgtcctttaaggaagttctgcctgtctgcttaccttttcatttaggtgatctttgaacacaaaagaaaatgccagtgaatgaacatgagataaattttaatatgaaaagtaaagatacttacataaattaagaaattatctccctatgtctccctctctttcatcagagtatataagcattgtactcttgcctggaaaatcccatgggcagaggagcctggtaggctgcagtccatgggatcgctaagagtcggacactactgagcgacttcactttcacttttcactttcatgcattggagaaggaaatggcaacccactccagtgttcttgcttgaagaatcccagggacaggggagcttggtgggctgccatctatggggtcgcacagagtcagacacaactgaagcaacttaacagcaacagcagcaaacccccaaagaaagaagtctctgttaacggagaattctgttctaaaggctacttacatgcttttgcttccttggcacaccagaactttgttttaaattgatcagtagtctccatctaatccagatatccatacatgatggtaattacagggattcttccattcagaattttatgtacccaaaagatcccattttagggaaaaagtgactatctgtttcaagggttcctaataccgcagacatgcatctttagcatttaaacgttttaaattccccaactttaactttctgtgaagaaaatctgttaaccactctatatgtagaaaaaatttcttctggttcttcttcctttctgccacaaatgatttagcctttcccactccgcccagctggaatgactacaattgttcttctatattcttattccactttgctaatatctcccttacagcatctaattcatttctctttgtgttgtagttagttatatatatgtttgcctgca

SEQ ID NO: 54147 - DNA, 1196 bp, Bovine  19866880990192
  misc_feature (1)..(1): n is a, c, g, or t
nggatcaaacccacgtctaatgtgtctcctaggttggcaggcggattgtttaccactgagcccccgggaagccgctgaatatacatatcctgcccttactatgtttcttgttccttttctcaatctttttatctcgtattgccatttacattgcttaacccttagctccgaaagaggacaatccaagtaaatattgcttgtactctccctttcttcatatttgctacttaaaacctttctaggtttaaaagctgaacatttttaggctggttttagttccgtgcatgaagatagaagactggcaagtataggaaaagagggagtagaagtgagtgtaacagttgatgtttctgtaaacaaagaactgagatggagataagaaataacaacagagatgcaggccaacatattgagagacattcaaggtcaaacaagggattgatatttgttactaaaaaaggaagcaggtagaaaaggttgctgctgctgctgctgctgctaagttgcttcggtcgtgtccgactctgtgcgaccccatagacggcagcccatcaggctcctctgtccctgggattctccaggcaagaatactggagtgggttgccatttccttctccagcccttttgattatatgacttcaaatgagttcctgaatgcctcaggtccctcgcctataaaatggaggttataatagtatgtaccttatatgggtgtagaattaaatggaatgacacttgaagagtgcttaacataatctctggaaagtcatgagtaccaataattatgaaaaaaatattgccattagccatatttgtgttattggttagttgatcaaactcgcatctcttatgtctcctgcattggcactcgggttctttaccactaacaccagctgggaagcccattggttagtgacgagggtacaaaatgagacagaagcttcactttatgactttcttggattgacattgagactgaaaatctcaagtggatgggaggattggatgtgtattgccagaaagctcagcaagatgtgttgtatccttcttagccttaagtcagtgttaaaaataggtgaaatgtacctgtactgtgtgtgttcaattgtgtccagatcttttgcaaccctgtggactgtgccctgccaagcccctctgtccttgggatttcccaggcaagaatactggagtgggtt

SEQ ID NO: 54148 - DNA, 2855 bp, Bovine  19866881065811
  misc_feature (1)..(1): n is a, c, g, or t
ntttccaaagggaaaatacatttaatatacaggctgagagtgatcactctgctcttactgcctcctttttaatatcagagttcagcatggatctcttgcctgtcctaggtctttgcccttgtggctgactacgggctcaggagacagatactctctcaaatgctccttgactgagccccactggggagcacggaggcttcacctaccatgtctaccccatcccaaactctggctgtctcaccgtttgggtggtagggcttttcacagcaggtgagtgtggaagtggggtaaacaattcagaatactgggaggaacctggatctgggggctgggcccaccagctctggacccgggccctgccacatcccagcattgacttcatcacacccatctctaaaataggctaactattccccctggttgagttacggagaggaatagagataatgaacagaagtagaagaatctgacatttcataaacaggaataaaaatatcaagatgatagctctgtattttgaggtaagcagagaagcctcaaactgaggatggacaatccatcagatgaaagggagggttgagacaggacactggaggatgaaagctggggggtgtctggccaagtcaggagcacagccccactgatgtaggcagcaggttatctgcaggtactgtgaggagggtccaagggtctgtctgagattagggagggcacggatgaatgaagaagcaagacttttaaagctaggaagtgtgacctggtggccagaggcagacatccgggctttcactttttctagtcctaacagggagagcccatcagactctggtgccacattgccagggtttgacttctgaccttgccctccctcactagctgggcaaccttgagccagttacttaacctcgctgaacttttagtttttcctctggtaaatggaagttataataatatctacctagctttataagattgttacgacaatttaataaaattaagatgtgaaaaactcttaaatagttcctgacacatagcacaccaaaaaagatgctgatatttttaacataattcattcctttaaacaaattcattcgacaaatgtatccagactagacactgtgttaggcacggcaaagcagctgtgaagtggtttgcacagcccttgccctcatggaactgaaagcttagcttccaaggatttcttcttgttccttgccaacagctcagccaagataaggttttggtgtttattctcagatctgtgatctggactataggccttttctcaggtttcatttatttcttagcatacctgcttctcctgcaggtaattgagagttgttgggacattctataaaaagcttactgaattgagggtactcaatcaatgttgaataataacaagagaaatgtataatgtataaacagattatgttggggtcttaaactttccttcatctcattaatatatatgggagcacatttcctctgctttgctgtccaatgtgggctgtcctccagccagcaaggaaggccaggctccactgagtcccgcctggggactggagagacttggggtgctgctcgggatccaagcaggggccttcttcacaagtgtcggccgtttcctttcacatgaagagttgccctttgtttaccctttatggtctactgggcttcccaggtggttctagtggtaaagcacccgcctgccacttcaggagacataagagacaagggtttgatccctgagtcgggaagatcccccagaggagggcaccgcagatcactccagtatcttgcctggagaatcccacggacagagaagcctggtgagttatggtccatagggtcacaaagagtcagacatgactgaagtgacttaccatctatcaggcttagaacagagcaagttcttctgtcattttgctttatccttaaaacaaccctgggaagtaggttcttctgacttctcttgtgtcttaaggaacaaagtcagaaaggcatgccacaatttgttcaaattcacccagtacagctggggtgggattctaaacccaggcataggcttacactaccacatccccttttaacaaatctctccagcctctaacatacttgttcctctagaaaacacgaggccattctcttctgcataaaatcagctgtatattttaaggaaaccccaaagccttcagtgcagaataccctgttctctatacaggaattcctatcacgctttgcaaatctcttattgacttgtttattttcagtgactctgctactgctgctgctaagttgcttcagtcgtgtccaactctgtgtgaccccatagacggcagcccaccaggctcccctgtccctgggattctccaggcaagaacactggagtgggttgccatttccttctccaaagcatgaaggtgaaaagtgaaagtgaagtcgctcagtcgtgtctgactcttagagaccccgtggactgcagcccaccaggctcctccatccatgggattttccaggcaagagtactggagtggggtgccatcaccttctccattcagtgactctaagttctatcaactactgtacctcagagcaatgcttggtacgaaacagatgctcaataaatatttgtggactgagtgaatgaatttatctctaaatttgtatatcatttaaaggatctatcacaggagatgcaaaataagtgctcaattcttgtttgtccaacatatgtatggaattacggttgcttcatttagtgcctgcattttatcattcttgctagttaggtaaaaaacaaaacaaagaaccacccagacaacagactaaccaccactcaggctctttttaaa

SEQ ID NO: 54149 - DNA, 680 bp, Bovine  19866881217159
  misc_feature (1)..(1): n is a, c, g, or t
nccctttagcttctctctgccccagcacatatacacattcctgccaaataaataagataaattaaaagcctaaaaggtagatagtgtgcaagttctttctccaaagcgtaatcaggatgatcatccctatttgagaaatgacactaaatgttaatctaattgaatctaggaaatgtggcaataaaaagttaataatttacagagaaattgttcttcagaaaattctaagtgaatgcccactaaatgaatttcaggaattgtgctcaaaggcacataagatatgtgacaacagcaacggcttactttgaatatgtttttcaccacacccaaactatttgttttaaggaggcattctggtacatatatgtgtatgaaggcacacacagtttgtttgaaaactatgtagaaaaaaatgagaaaatagctccttgagtcaactgaaaataacaggaaaccacttgagtgtttaaattttaacctaaagattggtttcaagtgtactcaatgctgtttctaaaatcagatttactacaattaatacatatagaaaatacataaatcttcattgaattttttcttctttaaaaaacattatttattcatggctgcactgtgtctttcctgctgtgcctggctttctctagctgtggtgagtggcggcaactctccagctgcagtgt

SEQ ID NO: 54150 - DNA, 911 bp, Bovine  19866881270972
  misc_feature (1)..(1): n is a, c, g, or t
natgcagatcattaggaatctttttgtaatctctgaaatctaggctttcgcatcataatcctagcattttcctaagtcgtgtgtgtctgtgaattactttgtctttgggggaaaccgaggaaagaggcagattattgcctgagctaaggaaatactggcacttgttgagtgtttgatatggacattaaggtggtaaaaaaagttaagatataagattgattgagaaacaaaaactgagatctagacacaagattataatggattaaaggtggtcacaaaattctttgccatttttctcctcagtaaatggaatgtttttcctctagctgtaaatctgagctggtcttttgagttgcttttgctcaatagaacttagcagaagtgattcttgcaagattctggtatgagctttgagaaggcccagaagctaccacatttgtgctctcttaagtgttgccaggcactaaaaacttcaggttagaatgacaagagataacttgagagtgatcttagaagtaagagaccattttggatattctagtccaagacatagctgactgcagctttaccatgaggagcagaagaaccttgtaactgagctcaatccacctgcagaaccatcaggaatgacatcgttcttacgttaaggcatgatatattcaggtgatatgttatatggcaatagataactgaaacagattttacattaaagatctccattcatttttttctcatatcttaccctccttttgaagttatagcaactggtagttatcacctgtattcctatgcctcttgcagaagtgactcaataacaataacacaaaaagccaagatatgaattgggaggaaggggtagaatttttcaaggagctcagattgattccctctgctattagggtttttttttt

SEQ ID NO: 54151 - DNA, 1610 bp, Bovine  19866881342616
  misc_feature (1)..(1): n is a, c, g, or t
ncattggagctttaatatatcaagtataaaagtaataatacataatttaggtcaggtaaaaaattaaaatgtaggctagaatttatagaattgattttgtaattttaaagcatcagtggtgaaattgtaagctctcttgtcctaagacattataattccctttaatcagcaacaatggctaaaacatgtgatctaaaattgtagcatttgcttacaaacagaaaaaagaagaaacaaagagaaactatatggacttgcaggccataagaaagccttgtgttacttagcatttaaaatcgtcaaagatagaaattaaaagtacaaaagttgaagcattggtgaccacagcaaggcctccagacatgagtcagccacaaaaaatgctcaaactcatttaaaaagctctttgtcatggtccaaaaaaacaacatttttagtgttttcctttgacttcacatcccgctattgcaagtacatggctaattattatctgaatgatatctattattcctgtgttccaaccggatatgatccaaatatggccacaaacacattatagtgtgcagcaaaatcaaaagaataattctgtttttaagggttaatggtagtttcactcctcctcagtttgaaacatggacaattgctctactgttgtctattctaggcagctgtgcagaatagtaaaggtttggagatctttgtaggcaggagaaaaattaagcctttgtatactttttgttcaatatattctacccaacacccatatgtaagagttggacttgggagttgcaacaggctaaggaaagtttgcacagatagacagagttattcaaaattctgtgcctactaagctctgaatcacaaagtgcaattgcaaatcttttagaaattatatataaaaaatcctttctctaattctgcccactgtattctgtgggcttcacatattatttttgaataatgaacacatgaaacagaactagttgaaagttagcaattacttcacctttttcagttctcaaactggtgctgttcttaagcctctgaaaaatggagtggtcttatgaaagaacatgtccatgtgtagaaagaaaagcgaaaataccagtttagttttagatatctgaaaaatgaatttcaaataattgaggactgtggccacaattgaaaaggtagagttaaaatcatttgtgcctccatttggtttcccaggatgtactattctgtatctttctttatgtcccctaagcttggcatgaatgcaaactattcctaacacatatataactgggaagagtgagccaaggtgacagggaggtggaatatgggataagaaatatcactggatctaggattttattccatttgtcactttggaaatcatttctaagaaagatttaaaaatccgaatgccctttcttatctcactcttgtaattgttgggaaaggaataataataatagctacctcttactgagcacataatatgtgttaggcactacctttctagtatcccatttaatcatcacaacagcttcacaattaagtcaaatgcttaccgtgcctgaaagggcccgatatacttttggccccagtgacccctctgctct

SEQ ID NO: 54152 - DNA, 952 bp, Bovine  19866881458127
  misc_feature (1)..(1): n is a, c, g, or t
ntgactgaatatgcatttcccgctctggtcgacttgctaggctggcccagaagtttgttcaggttttccataacatcgtatggacaaacccgactgagctcttgggtcaacccactatttccactggttcgatattctccttcttaaaatcacaggtgctttgacatggatggacctggaagacgttatgctaagggaaatcagccagtccccaaaggacagatgcagcaggattcctcttacatgaggtccctagtgtagtcaaattcataaagtagcatgatggtggcaggagctgggggcaggaaggaatgaggagtcattggttaatggaaatggagtttcagtttggaaagaggaaaaagttctggagatgggttggtggttgatgatcacacaacaacatgaatacccttgatgccactgaactgtacactaggaaacagttaaaatggtagtttcatgttgcatgcattttaacaaaatttaaaataatcagctaggtcccaagctgcagaaggctgtggtccatgtctccccactctggattcctctcccggccttccatttccagctcttttagtagcaggataaatacttgtggaagtgaagtgaatggcattgttgcctcgaaattgagaaggaaaattagaagcggactcttcgaaaatgcttttaacacgtctcacgtttcaccttgccgctgtctcttcaggatgtaagtggaaaaaaacgtcagacctcaaagccaacaagagaaggcgttttctgggctcagatgaagaaatctacaaaattaggaaatgtttgtgctatttctggaagccctggacaggctcagttcacctccaagtgatttacctgtggctctccgtgattatttacttggctcttcagttcaagacaatcacaggaatgtacggcccataaattagaatagctatgaaacaca

SEQ ID NO: 54153 - DNA, 1451 bp, Bovine  19866881474476
  misc_feature (1)..(1): n is a, c, g, or t
ntcccttaatttggacccctgaattagaaatagcagtcaagtgttggaaacagctgtagtgcccggcctgacacaagtccatttgttatacaaggagaaccaactgagattgttttcctgtcaaagaagacttttctctttatggaataggctgtcatttataattttaagcaggcacggatttgttaaacagctacacggtaatgggtttctataagaagatccacagacccatagttctggaaagaaattgagcttatgagatatttaaaaacctaatgggaatggaatatttggggtttcttgaaaagatggtttctgctctgcacattgtcaagggaatttaacaataaatccattgttgtgtgtctgagagtctgtttgaggcaattatattttcatacatcctatggagttgatcttagggaaatccaccagggcaccaagcccacattttcatgtcactgcactgcgtgggactccccagggtgaacatttaacggtagcaggcaggtttaaaaagagtcaggaaaacagctaatttatgagtggtcttgacgagaatggactgcagcattccacctggcaaagaaattaatatacacagagtacagtccaaatgagaggaaaggtgtgtgtgtgcaaagtccttttcacttcactccacatgtacataccctattatgatgtcacactccagcagcgttgctctgaagtctcaatggtctccctgctgttaagcaccgttgaaaacacatttgtcctgactgttcttttcttcttatgcccctctcatctgtgtaagatgaatcactcctggatccaaactggctctgaggacagagctaggtcctgacgaggtaaccagcctcctatggcttaaacattttaattaatttcaacactaatgcacaaatgagagttaatcaccccactgcagtgctgtctaatttactaagtttattcattaaaacttcccttactaaactttgattgcatgtcatgcttttttggaggcttttcagactgccttaagggttttaaagtgatatcttgagcagctgctgaaagctttcagtgtttgcttaaaaaggaagaatggggagaatctgatcagcaagaaatcttctctgtgctgaacaaggagccttttaggtggcaggaggcctgtaaaagcaggtttgtttttaagcaatatataaaaaggaaagagaaacttaagtatctaataaaagaaataaaatcagtcaccttagtacttggcaaaacttggaaatacatttcagggtaagaggcagccatcctttaaaaaaccaacagaatgatagcagcactgtgtattcatgtgaggaaagatattcataacagatttgccaaccttattattttggaatcaatatattacatatcttaggtacacagttttgctcattaaatgctagtacctaaat

SEQ ID NO: 54154 - DNA, 734 bp, Bovine  19866881585842
  misc_feature (1)..(1): n is a, c, g, or t
ntttcccctttttttctattgagttcttaatttcattgttttgtaaatgtgtttgtatattaacacattagccctgtgtctatgacatatgaagcaaatattttcccccaggatatcattgttcatggtgctttttatgatagaaagttcttaatcacctttatcgtttaacttgttcccactggaaattccattgtaaaattccagccctcttttactgtcctttcctctttagccagggagcttccgacattgacaccacaaagcttttcaaaaggagtctgctactgctaagtcgcttcagtcatgtccgactctgtgcgaccccatagacggcagcccaccaggctcccccgtccctgggattctccaggcaagaacaatggagtgggttgccatttccttctccaatgcatgaaagtgaaaagtgaaagtgaagctgctcagttgtgtccaaccctcagcgaccccatggactgcaggcttccaggctcctccatccatgggattttccaggcaagagtactggagtggggcgccattgccttctcccaaaaggagtctaagtcataactaaaaccagccaccaaggaaaattaatcatttggaaacaaggccatggggcttcattggatgcttcataaaatgataaccattggctggatttgatactggttcaaggagtgtctcattttcatagataaatcccttcttctagcagatggtgtgtcaga

SEQ ID NO: 54155 - DNA, 1096 bp, Bovine  19866881656496
  misc_feature (1)..(1): n is a, c, g, or t
ncctctcttcctttcctccccctcgacccctcacaccgaccttcggcggcctccacccagtcctgcacacctaggctggcggagcaaactctcactgcgcgcccgcggggaatatctttccgtacaggtaaaaccgaaaaccgatttttccaaaactgtacccggacggcgcctgctctcagtacctgggggatgagagggaaattctttgtacatatttgtataaaaattattgactttccttttggggtttttatttttttaagaaaaaaaaattcagtagatttagagctctgaactttcattttttctgaaggttcactctccgcagttttatgtgagaaaaaatgtatagagacgttgggagattttaaatataaaattttcagaagacgaaagtcattctatataaaagtctgtttatatataatgaatatatatggtattctaaatgttattccatcgtgttgtacacaactttgtaaataaaatttttaaaggctcagcttaatgtttcatttaggtgtctgaggtaaatgacaagattttaaaataatatttgcattttattcttcccagatgagtttcaaggaatgaccttttcaaacttcgctaattcataatttgagtgtaagaaaaatttaattggaaaaatatgcctaatttaaattgtactaatattttcttttagttttcacataacatgggtgtgtaggtgggtgattttcttcctatcaatacgttacatctaaatgactagatatttctgaagataaagtaagctgccatttaaaaaaccaacctaattctaaacttcagcacaattttaattatttttaaacatcagacttcatctttcacaatggaaactttccaaatgagagttcttaatcatttcagttaacctttcaaaagaatgttaattccaaacatttccctcatcttagcatttaaagccttgattttttccaaactattttcataccctaagtggaagtggtaataaacccagttaactttttaaacatatgtaatagcattttaaattttgtagtgaagttgtattaccctatatgaacttcatagatgatacata

SEQ ID NO: 54156 - DNA, 1559 bp, Bovine  19866881660474
  misc_feature (1)..(1): n is a, c, g, or t
naatgctttatgttggtgatggtggtggctactctgtattgtacttggaaaatccagtcttgaaacctgtatctgtgggaactcttgggctctgtgaagttatgtgggcatggattcaaatcctgacttgctagttctatgatgtctggcaagccactcatactctttgtttctcagtctttgcatctataaaatgggtacagcaataccctttgctggattatagataggatttgagataatgaatatagcacactggaatgtggcagcatctccataaatagcagacattgctattataagcagtatctagagaatttctgcaaaaatttaccaagtccctcctcctcttttgaagtggcaagtctgccacacagccagttattgtcactgtttgtgaggcaggctgtagaggagaccaccctcatcttctctgttgaagggttccttctcctctggaaaacaactggctgcttgagccagaggcaggcaagaccatcatcttccacaatttgtcatcagacttgatggatagtattcccaagttaatgccataaatgctgtttggaaattacaagtccatactgctggtggtccagccaaaaaaagaattaatttataatcatgaatataaatttcaaagatagtattattgtcattcagggtttgagttatggtacatatggggagtggcttgtagaatagaaaactatgtcgctataactcagtgtaattccaaagacaatagttatatctatcattttgttataaatcaatcgatatcctgtattaagtgaacagtccttgcctcctcagctgcacagaggggagtggcagggaggcctcagagctttgtttaaggtattgccggccatgctgactcatgctgacaggaaggcagaaaagagatgcttcagaaattcttgcatgaactccaaatgccttggtccaccggacaacgtggccagatctataaacattttacaaaatgaatgacgtacccaagggtttaaagatatgccttttgcttgcattttgtataaaagaactacgtttccagaactgggaattatttactaattgcagacaggattctgactgaaacagcatcaatcccagaagagccagtgtgcatttgaaggcctctctaaatgccatgaatcaggcagtatatctttcctgttaatctatattggttccctcccaaaggcaattgaccctggggaaaggtaaaacagaaagaatctgagcaccactgagctagcatataactggctttgaaagtgcactgctggggagaagaatgccgaaatatcacagggagcagtagcttgaggagaaaagaagatggtttgaagtcagtggaaagtaattttgccaagtgcagagttatctagttaacctattgttcaacataatgaaaaagcagggctattcgggagtgtgttacagtgtgtagtttgtcaattacccaatcagggggcattgttcattcagccaggatggagggcattacccatactattttattactattaagcctcaacttggcatatttt

SEQ ID NO: 54157 - DNA, 1690 bp, Bovine  19866881670307
  misc_feature (1)..(1): n is a, c, g, or t
ntagttgggtgcacaggcctagttactcgcagcatgttgaatcttcctggatcagggactgaacccatgtctcctgcattgacaggtggtttcttaccactgagccaccacggaagcccgtgttagcattattctcttttgatgattgagttatctcaaatttgattagtcccttcaaagtagttcctatgacctttgtatatgtccatattggtatttgggcaccttcttccttttttgtacaataaatgttgcaggcttaccttatctattctctgcttgaggcttggaatcagcactttgaccacccttttttaccgccagcacccttgttcattttagtggaaaatggtacttagaaaccaaaattgggcattgaaaaaactcattactactggagtatcgttgctttcgggccctttaaatggacacacacacacacacgttttaaaagaaatcgtgattttataggataccttcaagttcaaaaccacagagttcaactttaccttccctcagtttatatttgtgtctcccttttcctacagggagaattctgattctcagccatattaatatatttactcatttatatttactctgtcttacacacatatatgcctggaggagggcatggcaaccctctccagtattcttgccctggagaattccattgacagaggactcaggcaggctatagtccatggggtcgcaaagtcagacatgactgagagactaagcacgcacgcacgagtacacacacacacacacacacacacacaccacacacacacacacacacacacacacacacacacacactctagttttggaattactatactgatactccctcctacaacagatttaccaagtaaagatttctttgccagtttatgtccttggaatatatccctctaaagatgtatagtcaaagtagatgttcagagttatttgaattattttttctgtgattatattatcaatttaaaatatagttaagttcctactaaactactttttaatagatttcctgtaaaattggttatctgtaaaactactaaagtagacataataatttaaaatgatatcataatatatagtaataggaaactctagaatagagaatatgcagtttttatctttataaggctttaaactcatactttattttcaaactggtgttatttttttattatttaaaattaaaaatgttgagaaaaatgacatcaaacaatcccagttgtaagccagaacaattgtgtttgtgaacattttaaacaatgctcttcttttgactgataatacaattcaagcattaatctttaacaacagatataattgttcagggtgctttaactcactcctaaaaactatggctagtgttttcctgtatttacacccagaatagaaagatattatataagtccttgttcttcatatttaaagaatgccttttcatgtgtgaatattctcactggaaagggaaaaaatatttctcttaataattgagcattttatatttctaatgtgagacataatagccatattcagtcttgcattctgattagttataaacatcttgctgattaaaatgccgggttaatggggacaggaactgggttttgtgcttattgtatttcctataccctagaagtgagcactgcaatacggagaatgaataaatatg

SEQ ID NO: 54158 - DNA, 1387 bp, Bovine  19866881736238
  misc_feature (1)..(1): n is a, c, g, or t
naatgccaagggaacacgttggtcctggccagtcaatctgcatcttagaagcagatgggccagattctcctgaggtgcttgggagtgcatagagagatggattcctgaacaaaatcaggttctgctggaaaggaagacaggtggggaggaggaatgctgggtgggccaccaacaatgttcatggtattctagatcttgcctatcatgccatgccaccttttttttttttttggtcccagtttctctttataggatgggaatggttgtttttgttttacttggaggtgagagaactgaacttggatttataagctaatttgatttatgtaaatattgtccctcatagaacccgaagcccagcacttgactcaatgccaagaacgtagtagatctcaaatggcgtagggtggtgcattggggaaatttaccatccattgctctgttagtgtcccagttctgcaagactgtcttgtggggtggaagggctgaggaaaggagtttgtgattattttggacatacggtttcaagagtaattaggaagataccctcacctccatccttcaagagctctttccttctgcttcactagaagaaagtcaggtatacaattgtctgtgtcttccactcaagccatcctggtttccctgagatccctacagctggacatctctgtcttttaaagcagacccatcccttagtgcagacataaagacgatgaaatccattaacgggtcctgaataagttggggaaaaaatatgacaggataagtatgatgtaatttaagtattttggcatagcaaatggaaagaaattacattttctattatcttccaacagttattgaaaatgaaatgaaatatattctatactcccccaaaaagtcaagattttttttttcccacttaaatgcaatttttcccgcagtttgttcatttggtatgcatttccctcctttcatgacatggaggcattctgttatgaaacattcaatgaaaaaaaatggacaaaaaagtatactacttctttaaaatatattgcaagaatactcattttcagctttttattgcagcactagctggtattcttgcatgcagttttgtaatttattctgaacattctacttaaaccttttttcaatagcatgattttattagagtcagctcactggactttcccaaaaaggtatttaagatcaaataaaaccagtgcttggaaaaatatcattacaatatgaaagcagttacaaaaacattagtactgcaaagttttatttcaaatggctgagcttgctgtaccccgggttatggtacttctacttctgcagacacacttactggggaaatggaaaaaactgtcatcttagcagtttttgcacatggtggggg

SEQ ID NO: 54159 - DNA, 1384 bp, Bovine  19866881762605
  misc_feature (1)..(1): n is a, c, g, or t
nacacacacacaaagagtgtcatgggaaaagaaagaaaaataagcaaagtgaagggagagggtgcagatgatgtggcaaaagaaagccaccaagcagtggtagcaagggacttgttgctggaccctggatgtgaaatcttgtctggctatttaccatctgtgaaaactttggcaagtcaagtaactgcttgaactttggtttccacattgatcaatgggagtggtaggtggtaatgctaatgaaactacagcattgtgtgaggaatcaaaccagatttccaaagaagctctttgaagggacaaaatttatgcacatttcaggcaaacctgaggccattcaagtgaagttaagggtctctgggtggaggagtgtggggtagagaattacagatggagtcaagacacaaaacttgacatcccaggatgactgattccagttttcaagagcagcgagagccgtgctaacactggcaaatgattgccatttcccttgtcaggcagtgacaggagttagttgacctgaaaattcactaatagttccattagagaagccttggaagtagccatctttttactcatcctggtcaattaacaatgaattaatgccagacgtattttcaattgagctgaatgctgactttcccccattttgctaaaaatatctttttatagagagacagccagctaggaaatatccagcttttcttcccaaggatgctctggagtatttctgaaccaatgtcagctctaggcagtggtgaggtagcaggtcaaatcctgactttgacagaggagactcaggttcaagtgccagctcccccacacacccgcttcatgctcttggaaaaataactgaaaccttacaaagttcagcgttttcacatgtaaattggaagtgtagagatgaatgctaaggttgctttcagagataaaatgctgtgagaacattttaaagaggtttcgggtgtgtcagtgttatggccggctagacctggggggatgagggaggagccctggatttcttctatgtacttggaactaagagtccagaccctgcactacatctcaactcttcattttagttcagtggttctcaagcagggaaggtgagtggaggtggtctgagattgggggcagattttgctccctctgaacattcagcaatatctggggacattcttggttgtcaccatcggtgatgctgttggcatctagtgtgtagagaccagggagactgccaaacacccttcagtgcacacaacacatccccacaacaaagaatcatccagcccaaaatgtcattggtgctgaggttgagaagggcctgccctttattattggataataaagccaagtgatagcttttttgtgttctcagtgctct

SEQ ID NO: 54160 - DNA, 1598 bp, Bovine  19866880446927
  misc_feature (1)..(1): n is a, c, g, or t
nttgcgtggcaactgggaacatgcctgatcacataaggaaaattctgattgaggccaagccgtgtctgaagccatagttcaactttgagctttgcctctgacccagatacatacaacctagggacttaaaaaccatgtgtggcagttatatgtgggaataggatggaattgacattctctctctgtgtggaaagagatgaaggtgccgacaaaaagactacacttgttaggtttcagactgttcagccagctgaactccattaaaactggggccatggggtaaagaaatggccacatattggcatttcaaagatcccttacatatatgtgtaccacagacatcttctgaattgtagcaaaatccaaattcatcggatagtaagactcaataagaacactattacttttcttagaaaatgtttaggttttgctatttttcacttgatgtgagcaactctctttgcattcagaatttattctaaaattaccaggttgtcatatgtgtgttacctctggcttatttcatttgacttgaggaaaagaattaaaaacaaaccatttttctgaaattaccaggttgttgtatgtgtgttaccctaggtcatgtcatttgactggaggtaaagaattaaaaacaaaccatggagatattattttattccaattctaactgctgaacactgttctcacaacaacaaaaaaagcacaggtagcaaaacttcatctcccccaaatgcacttcaatacgttttaagtgtaaaaacctaatttaaaataatgtcagcacctttgggttgtagaatatgaggctcagcatctttaaattatttaagaggtccacagagaaccagttatgcttataatgtcagatttactcaaagaaaagggagagcaaagcaaagtgttgaataagggtttcatatgcagtttcattgttatttctacattcagtaattgtaatagtagtcctactaaactttaacacaaaacaagatatgcatgtgcataatgttatgggatctatttagtgtgttttgtggttttaaagcaactatttgtgttcaactgctgctacatctctttttggcttttgtttactaacaacaagatctatcagaaacatactaaaaaaattaatgcctctgccacctttaaaatttgttatgatttcctttaagtaagagacaggcaatctctaaacatatatagtatacagctgccttggtttcctcttttccaatgatctgggggaaaaataaacttttttccttcaggcaaggtatactatataaataattttagcagtatattaatctataaaatttccattattacacaaaataaaaaataataaaatatatagtgtaatgctcagaagactctttggctatctggaatggtaagaaaggacactgaaaatttttgaaaccagaatctctatccataatgaacatgataaaatgatgagagtttattgccactatgttaattactagagtttgccagacttcccaagtgggtcagtggtaaagaatctgcctgccaattcaggaaacagaagatgcaggttcaatcgcgggtagggaagatcccctaga

SEQ ID NO: 54161 - DNA, 1420 bp, Bovine  19866880481194
  misc_feature (1)..(1): n is a, c, g, or t
ncttatttgttgtgcttcttcctctcctcccctggaatcgttgcttcactataataagtaacattccttccaattatccaagctcctcaagtccacagagctgacccccatgactttagaacagactcactgtttagagtcattaatccgagattataaacatggagggagattcatgagaaagggatgaactcatggttcctgaagaaagacaatggcatgcagtgttttctcagaggttccgtgctgtgtgtgtgtgtgtgtgtgtgtgtatgtgtttgtgtgttttgattttgaatccttcctctttcctgagaggatatttcctctcatcttctgaactgctattatcctctgcttgttctgaactggagtggtcagtgacacctattgcaactggtgtgttgcaatggtttagtttttccttgtgtctttacctggacagcagattccagaaggcaacaccctaccttgatggagcagtgtaaaaaatcaggcagatcagatttgaaagcttttatccactaggcaatgccaaaatttaattgtaaagtgcttatctttcctgtaaacctattgttttttttttaattaaatatgttgataaacatcattgatgactccatataagtcaggaccactgagacatgtttatatgaatttaaggcattacattatttctatagatcatcctgaaggttttgatgttctctgatctttcttcttgacttatacaaactttttgtttttgttttaatcttaggggaaaagaaggaactacataaaatagacacctatattctataatgttctatttataagttaatgttgtaattaggaatcttgaactcatttttgtgaacttgatatgtatccaagtctttcatcttcactagaaatctgattaaatcttctgagatctttttggaagttgaagagaaatagcatcctgaatctgcatgattttgatactgcattacataggaaattaaaacattctttttgttgctggaattggctttagaacaaacagcatgtgtcccccttggtctggagctctgatgtcaatgtgagctaaaatattctccaatccatttccaacctcagctgcttttgctgcttccttataaagattatacatacactttgcaaatgaagaaaggaattagtgatgctctctcatttcctgtctccccacagatggtgataaattcaaattcagaccccattaaacctgagtagagaaacccagcaggtggctgtactaatggaaaatcctggctttggaataatgggaattacaaccgacagctcttctacaccacaaaaaagatgatgtatccttattgacagtgtcgcatttgagtccagaaggctgatctgatagttcattcctggcacaacggaagctaaaagcccc

SEQ ID NO: 54162 - DNA, 1176 bp, Bovine  19866880532299
  misc_feature (1)..(1): n is a, c, g, or t
ntacttcctcattccccttggacatattcttttctggaattattgaggcattttcacataatactgttctaaacttgaaaattcaaatgcatcgacattccaagcataactggaacaaattcaaatgaacatcagatttccatttaaatccaattttactctttctccttcctctgtttcaagtctcagaacactctttcctcttatagctgagctcatctctcaagagtcaaggaactcacttgggtcatcttcctacctggggcagcagccatcttcaagggccttcgtctgtgcctgcataccaaggagattcccacagcagagccctggcagtatgctgagatgagtcctgaagtgctccctgaatgtaaatgacctgaaacaataggactgcaattaagaagaaggcctgggtttctacgagtgcaacattccaacctttccatacactgcctgaactgaacacgtggcaatcacacccacttggctggcagcagctctgccatctttctgtgtgtgtgagacccattttatcagtagcatgacaatgaagctggaggatatacaaaatgtgtataggttctagtttgaaaaatgaaaaaagggtctacaattttttcaaagattctaacaagagaggcaacagaattggtaggcagggtatgggctctgggttcaaatctttactactcagcattttgtgattttctgcaaattccttaaattctcttgtttcagtttcctcctatctaaagtacacataaaaatgtatgcctcagagtgggggcttggtgtatgtgtgtgtgtgtgtgtgtgtgtattcatatatatacatatacatagtacatatttattattatagtgcattttaaaactctaagggtaagacagaaatgtgtggtatttcagacttaataaagagaagtttctcttcttctttcaaatcagaaagaaagattctgtataatttgaagaaagctttgtgcattctattttcatacttagtcacacataggggttcacttacatttgagtacagcaccctttctgccagtcccaggtaagtagaatacagtagttacagaaatattttaaataacagaacagcaacaaacatgaataatagacacataaattcatgttctgaaccttaactctgttctcaacattccg

SEQ ID NO: 54163 - DNA, 1078 bp, Bovine  19866880536523
  misc_feature (1)..(1): n is a, c, g, or t
nttatgtaagaagaaaaaagcagaattaaatgataactattaaaagtgatgtgtgaggcaaactgaaattgattttatattccattaagcagggcttgtgatgaggggttaaaagactatactctgaatttaatgttaattgtgtatagagaaaacaaaagtcatactccaaaaagcaaagatgtggaaagttctaaattttaacaatttaaagggctatagatgcaattcacaagttgctgatttttttcttttctgtttttttttttggcttcaaactttgattcagacttgtcttctcccagtgtccactacatgaagtaacagacagaaactctaccctgggaaaactaagccaaaatgccagggtgtcaaaatagttacagataatggaaattagatgaagaggctactgaacaatgttctctggaggcaaataggtctagtcaatattaagcaccaggacactgggcagaaggctatttacagtctctgtggacttgtagggaagattctccaaatatagtaccaaatctctgcttagtgggcatttcaaggccaaaaggaaggttgtatctatcatatccaaatactctccaattcttcctgaaacttaggccaaggttgggaagaaagttgttataaagcaggagacttcccacaacacagatgtgcattactgactccagtgacatgtaagtagtagaaagatattgaattcagggtcttagatttgaattccagggtagtcacttataagaagtctggtcttgagccatccttttacctgctctactccatcactgaaaggatataacactaacattttatggttaaataaaataatgtgcagtgcatgatacatagcaggtatgtaatgtagcacaaataatgctatacttagaagaatattaatattattaattattaatattaatattatactttaggattggccacagtcaatcctaaaggaaaatcagtcctgaatattcattggaaagactgatgctgaagctgaagctccaatccttttggcacctgatgtgaagaactaactcattggaaaagaccctgt

SEQ ID NO: 54164 - DNA, 1649 bp, Bovine  19866880567042
  misc_feature (1)..(1): n is a, c, g, or t
natctttagtaacacctttcatatacaaagagtttggcagtaacaagtctaacgaaggctggggaatgctgtcatttctgagtgtttttgtttatagctagtattttataaaccctttgaagaggtcacactttccacggatacttgtgtaaataaggcaaataatttttgttgatatatgagcaagaaatctaaagagaaaagagaacactggctgactattgtatgttttggcaattcagaagtaactgtaagagagtgaaagatgctaatgcggtagcattctctttccagatgttcatcttctggacttattttctttgcttaaaccttggtgaattcttggaggtgtgaatttagttggaaagcatatttttgactggtgataacgtcatggtccacaaaaagattgaggaattttctaattggggaattagaaaaatagctatgtatggtaaataacctatgagggaatagttacagaaacaaaaaatacacttaaaaaaggataacaatactttggaaatttcagatttcactaaaaataactagtaagggatcactataaggcaaacattctggagccctcaactttcctgtaggtgactcagaatatgactttacatgtaaatttctgacaattgtaaaaccatatgtacaataatggataagacttataagcatatatagatgtaaaataaaactaatatctttgaattgctaagataataaaaggaaaaaacaaaggaatcaacaagaagtcattaaaaaccaaaagcatggagaaatatgatagaagttgtcagttatgataataaacataattggtttaaacttatctactaaaacagaatgtcttgccaattgtcttatgagacaaaatctaattacatgctgattgcaatagatatgtaaaacaaaatgaggttgaaaatttaaaactaggcaaaaaaattagttgaaaattaaacactaggcaaaattacactgggcaaggtaaaatatcctgaaatggaatatgaatattagttgaagttaaaacaaaacagcctcaaataatataaaaaagtatcatcatatattgataaaacttataattcctaataaagatacggtagtttttcatgttagagacaccactttatttttgacaccaggagtatacaatgtacaagcttgataagaccttgctcttaatcaaaataatactctaataaaaaatttaataataaatacataattaaatttttctgtaagataatatctataagcagaataaaacgcgagtcaaggacaaaatgaaggggatactgcattaggaaagataatcagatggcctctctgagaaagttcaatttttgctgagacctaagtgatgagattccagatgagctatttcaaatcctaaaagataatgctgtgaaagtgatgcacttaatatgccagcaatttggaaaactcagcagtggccacaggactggaaaaggtcagttttcattctaatcacaaagaaagacaatgccaaagaatgctgaaactattatatgattgctctcatctcacatgctagcaaagtaatgctcaaaattctccaagccaggcttcagtagtacttgaaccatgaacttcctgatgttcaagctggattt

SEQ ID NO: 54165 - DNA, 3122 bp, Bovine  19866880577882
  misc_feature (1)..(1): n is a, c, g, or t
ngctcctatagtggtggcactctctattcccccatccccctcttccattttaagagaatttttaaagtgctggctcgttgatttgaattgttctttggggcttcgatctgtcttatgttttgtagtaactggtactcactttggctttgtgtaaataattgcagaggccattaacagaagattaattgttgacagtttcattactcttggaataaatagaaagtccatgagctgagattgaagaggcaacagaatagctttgaaactgtagaagacagatttccaggatatatttttgagatggcaatgtcagacaaataggtatagtatgaattcctaaagttcccaccctaatgtccctcaaatgacataaatgaattgatggggaaacagaagcataaaaccaaaggaaaaaaatcattttcaaggcaggaattctcattagtgaatgcaatagcacatttgaggtaagtggaaaaaaattcagtttgtcaacaaattgtctcatcaacacaaagtcaaactaccagtcttgatagattctcgcactaactgaccaagttgattgtttatattataatgtgaagttaaaatgtcaattcttgtcagtcttccacctgaagtagtattcaatacacacaggaggttactatagtacctcctgatgtttctttgtgggtgaattcatcaggtagtattggtgacccccaaaacctcaagtgtgatttatcagctgaaattctaattgattatattgtcaacagcctttgtagtcaattatgcaaaaccacagggtcaggttaattgaagatagcacttcagtccagcatgctgatgttttactctaatccaagaggagtaaatacctacataaagattaccatactggtcagtccagaatagccctaacagcccaaatcttcataagtaaaaagggggtatgacccatcacaattgatcagagtcattgattgacaatccatgtttttgacaagttcctcttgaccactaaatgacttcttatttcgattagatgtgaagggcttacaactcaggcttaaacttggacatttttctatctaaagaaccattttgttacccttatattgttttcctctctcgctaaaatgttgtgatttgaatggaaggcagtgtttgcagtgtttgaaacagctagtgaaaggtttttagggagaaaagcatctaattactagtgggaaaattcctttagctctcctcttttttgaaagataaatgaaggagctgtaaatgtttaactccaattatgtttccatttagttgatgctattgaggttgatttgtatgtaaccagagtgagttgttcatgtctagaatcagggttttttcttgtaattgtagagatcacagtggcatttacacctgctaaccataggctttcattacaatgattgattgcttgcattgatttatttgatatgtgggcatttctatggtgtgagttttctctgtaaaatgtacacagttcatcatttgggctcttctcttgcattgccattaaggaaattttgggcatgtttgcttccaaaaggcttttcttgattaggtaaaaatgtattgcctttgaaggaataagatatgaatcactgaatgcttttctgggttggagtggtggaggggacacttaatgaaaatcatttttattaacatttagatgtctttttgacttgatagctgtggttgccagtttatttagacatctgctcctctggttgaaagcagacttaaaatcagagggatgttcaatgtttaccacttaaaagggtagaagcaactcacattggttcttcctaggctccggattgtactctgaagctccttttgcgctatcataaatgaggtcattgaattaaatcaatccctgcttactaggaaatcccattaaaaaaaatctttactagatttgtaatctagtaaattgaaattgtaaactagatttgtaatctagtaaattctaatttgaaagcataagaaacttacatacttatagttagttgtattgtgtccccccaaagacatatccatgtcctaacccaagtacctgtcaatgtgacattatttgagaatggggtccttgcagatgtaatttagtcatgtttctagagctgagactcattttggatttcagaagggtctttcatccaacaattgctattcttctaagagagggagatttaaaaaacacggtaaagaaggtcatgtgaagatggaaacagagactgagtttgttgcctcattccaggatgcctggggtgaataactagaatgtcaggaagtactaaaagctgcaagaagtaaggaaaattctcccctatggcctttgagaaagtgtggccctactaacaccttgattttggacttttgggcttccagaacagtgagaaatatttctgttgctctaagcaccaagtttgtggtgatttgttgcaggaacactagaaaatgaatacagtattcatgttgtagtctgtgtgaacagcatcctagatttgtgtcttgtaccaccctgtactacttgactggacagcccctgaccttcatgcttagaaaataccagctgcaaaatttactaccaaatatttgcattcgtgcaacttgattcattggaatcactatgtttatactttgatttattttgaaattttagtcaagaaattataagaccatataaagttttcctgggcttccttggtgactcagttgtaaagaatccgcctgccaatgcaggagttgtaggagagcccagtttgatccttgggccaggagtagaaaatggcaacctgctccagtgttcttgcctgggagatcccatgaatagaggagcctggtgggctgcagttcatggggttgcaaaagagctggacatgacctagcgactaaatgataacaacaaagctttcctagttaaatttcaattgaattggtcttgagaactgggtattttacttaacttaattaacagctcactttatgttttctatgatggtctctttaacttttatacaatggttacaaatttagcatttcatataattgtatttttcattgttctgcccacagagccagtatatacaacaacaaaa

SEQ ID NO: 54166 - DNA, 1131 bp, Bovine  19866880581827
  misc_feature (1)..(1): n is a, c, g, or t
naaaattggagcccctgagagaaacaaatgtttggaactgctaacccttctgccctatcatattccaactcaatcagatggtcacacccatcactgccaaaatatgccatgttattgagcacagagacaggtttccagcctcacaggatataggatcgtgtgctggggattcatatgagttcacaagaaaggttcttcatttgcttgtacctgatgccgaggtttctaatgactccttttctaagccactattctagattttatttcccagggaattttagattctattctcacctaactttacttattacattttacttgcatgaatcaaattcagggtcactaaacacaggttcaatatccaacaaaaactatgtcccaactttttgctgtgtaaccaacttaattattccaaagcttaatggtaacaagagaacaaccagtttagtatattcactgttcccatggaggaattcagacagggactaaaaggggtggattgtgtctccaccttaccgtcaactgggaagactcaaacagtcagggatgatacacaagtgaggtttgaagaccagagaacctgtatgtgacctatacaaggttctaacaatacagaggcctcagggaagtcagacatggaactcagggctctaagagcaagaattcaagggatcaaagatgaacattcatcgcttcttatgacctaactcagatataaaagaatgtcaattctgtcatgctttttattggttgaagccaacataggcccactcagattcaagttaagggaacacagaaccaaaatgtggattcaaagaatgttcaaaatttttcagtcatgctttaaaactaccaaaatctacatattaatgtgaatctttttatacatttttctctcttcatgcattatttctgtaaactgcctattcacatagttgctcattattatcactaattgtttatcactcattgattattggaatctttatactttttattctaaatttttgagagtgagatgaatgcaagcatcttctctttgtattttaagttagtttgtgatatcttttctggtattgtcaaattaaagcaaacaaaatacccaatgagtaaatttgactgagtatagaa

SEQ ID NO: 54167 - DNA, 1127 bp, Bovine  19866880612294
  misc_feature (1)..(1): n is a, c, g, or t
naataaagtttatttataggaaataaaatgcatgtgaaatttacacagaaatattacccaagggtctgagttgacctactttttttttctgtaaaaattagaatggaataatatgagtagctgtccctgaggtcctttacaattagtcagtcaatcaatgcatatgtttgacgctctagcaggtaggaggcatcatgcaaggcttgagaagaaagagactggcatattcatctctgaccacaagattgcaaggaaaaacatggaaagtaggatgtgaagagacagaagatgaattttcatgttctaacactttctctttcctagtcacatggctttggtaaaactgcttatccctttcaaacctaaatctcctcatctataaatgaaagaaatattctaccctacagtgattttgtgcagatcagtaagataatacatatgcataatgttttgaaaatgatggaaccctattctaatgaaaagtattatttttaaaaagttgggctagatcattctttgctgtgggtctgttctgtgccttataagatatctagcagcatcaatggcctctacccactagaagccagctgcagtcccatccctaggttgtgataaagagaatggcaaattgccaaatgtcttctgacgggtggtgtgcagggaagattttcccattgcttgaaaacattatatacatgttcaagaactaaaaattcagaaataaaacatctagtgtctacagatgtcactgacaaaaacatggtaaacaaacacctacctaagaagaggacctgtttggaattaatgtttgagggggctctttcagacatgttttgcatggtcatacagacagactactttttccttgaacaaccaatactatctccatccaaagtagtgtgacctctttggcactttctcccattatagtggtctcactagttaaaaggaatatttatttattttctaagtgattatagaagttaaatgctaaacttctcatttttatcagctttattaaaatatctttgaaaaggataatccagtgaaatggatcaaaaggagagtttatgttagaagaaccaactgggaaaagctaaaagaaaggaggagacaagagcggaacc

SEQ ID NO: 54168 - DNA, 792 bp, Bovine  19866880617333
  misc_feature (1)..(1): n is a, c, g, or t
nttcttaactcctgtgactgaacaccaaagaacgcaagtgcaaaactgatcatgagtatgtatagctttctaacaaactgtcaaactgacttccaaagtggctgaagaataatgaattcagttaaaaagaaaaaaagactatcaaaatgtattttcaagctatggaaaaatatccattattcaaagaagaatagtatttattcatatttcaccctattttcttgaaacactcagaaagataaattatttatccttcatactcagtctgtgggagaaattaatttgaaaattgaagaacatagagacacaaacatttagttccattttaagggtaatttatttgtagagatttagcttttccaaacattagtattaattaatctttttatatttaaaaagtacttcatcattttttataacttatttctcatccaaaacatatggaccacccaaaaacaactggaaaaaaaaacaactccttttattttaggctttatctgtgccagttctgcaaataattttgtaaggctaacaagactcccataattctattaggcatgtaatattgtattaaacctctccacatttaataatgtcaaaattccattgaaatgtttaactcttacttaatctcatggcaccaagctgatggaaaacttgcaaacttacatgggagaggaatgaaatgtaagctttctaaacaccttttatatgccaggaattattcttgcttgcaaatactgtatatccttcttccaacaattctgcaaggatgggacactatttttgtaa

SEQ ID NO: 54169 - DNA, 1943 bp, Bovine  19866880658197
  misc_feature (1)..(1): n is a, c, g, or t
ntctgtctggacaatggatgagtagtaaccatcaactaaacttttccctaatcaattcaggtaaaaccagtgtagttataagttctcagttttgtgagtcctgacaatacctttcctaaatcctgcttatagcactcctctaaaagacctatcttcccctttccctagcttattgggatctgtccttgccaagaatgtttttcactatttttttctgtgttttgcctatgtgttaattaagattaataaattactctgctgtggcaagcagtcccacattttagtgacttaaaactacaaaggtatattttccccattaagttatatgtccattgtaggggaacagaggatatgctcactgtactctttcaagaatcaaggatacaagggactgtcttgaatacagctagtcatggtaacaaatgaagaaaagagttctctggaatgtctcacagaggcctatgaatactcaaccagaagaaggacgcctccttcccactcccaactccttgtttagaaccagtcacttgggctcatgggaatagggagtagtgagaaagtgcaatcctgtgacacaccctgaaaatagagagcttggaatgttgaggggcagagggagagcaagattggtatgtatcagagtctctcttcatagctacaatatgtggaagcatcagtttggataaaaactacatgatttggggaaaatacaggttattcaggtcatacagattttagatttagtaaattactgataaatcttttatgtccttatgaattttttcaactcttgggtgagattattacctttaaccagaagctatttgaactgtatgcaatatatccttacattttcaggtgaaaatattctaagagagcactgtttttagttcagagtatcagtatgtgtcttgtagaatcacaattttttaatggaatgtgacttgtgggcaagaaaaaatatgtatagctaacaaatcaaaaggaagaatggatttaaatttatattagaaaaataagaaagatccaaaggaatttgattatctaataagtgaagatgtcccaggaaaatgagaagttattaaatctaactggcaaaaggggaaaaaaaaagataccgtttgctttctttgtaactttaataaaaacaatgcagtgaaactacaagaaagcttattattacactacaatgagcttaaaatattcttatcaaattctggaatagtatatcataaatttggtgtgatgcaatcacttcagctgtaaaatacatcatcatatgaaaaaagagcaggtcatggaccgattcattaattcctattttcccacactttatcctctctattcaaagccttatagagataaaaaataaatcatgtagtcactattagggcatatgtgtttataatatatgcaatatataatataaaatttataaattatgatatacctaatcatcctggagctagaattttgttagtatatacatcatgaagtgctttgtgtataaattgaagaaatggtgaggaaaggaggaaaaaaaataaagtttatttttttcatgttaacctatctctgcaatcattaaccatgatggagaatcatgtttccagttattttgataaatttactttacatttataaatatagcaagattattactccataacagggaagaattttcatttttatgcatgtaagggtaaggataatgaagtggtgagaagggagagttttgctcagcctttgatcttgacagtgctaacagaatctatccaaaagtggatgtaaataatgctagtctatcatcagagctgatatgggaattgaaaatgcaacagttgttattcccctagctttcttttagaataatagctttggccttttgaaggccaaagggaaaccttgctgcaaatactgagacattttcctctagaaatctg

SEQ ID NO: 54170 - DNA, 1166 bp, Bovine  19866880743647
  misc_feature (1)..(1): n is a, c, g, or t
ntagagcttgaataattaatggaatgataccctttagtgcagagcaccatatctttaaaatataggagaatataagtgcactatttcaatatttaagccaaagtaagtgatgtagtttctgcatgtgaactatatgtctgggcaaaggattgaacaaatgcttcataataataaaatggcttttaaatgtgaattggtctcataaggcataaggatttccctaaccaacacaatttattcagagtaagattagcaaagacaatttctgaagcaataatattcattacctccacattttataatattgctagttcagtgtatctgaagtggtccagtgtgtttagattgaactttcatcacgtctaaacagcttaactgatagttacttgataactcttttatgaagcagtttttttattaatgctttcatatttctggtttatgatgccattaaagtcatcatttgtcacattagtaacagagagattcttaaaatatccctagcagcaattcaggatggcttttaatgtcagcataaattcctgtactactaaactaactatttgaaatattaacagcgttgtttgcaatttcaaaatatatatgacaacctaagtatatgatgtagatccctggttcaagggaacccagttagaaaacctaaagaaatgaagctaaagtattttggcatgacctaacatttgcttaatagcaaagaaaatacaaggttcctcctttggttgtgcaacagattggtgaagtttctgccatagaattgtgtattctccaagggcaaaacaatttaaaatgggaagagataagaaaaatctaaattgtctagagtgctattctatagtgaatccatctcagttcataaactcacagctatggtttccaattttttagaagctaaaacactgtatcagacattgttgttttctctcctggcattgcatcctgatttggggacattttctagaaggccatggataagacttcagagatctaaaattagactggattaaatgtggtttgctaccacaggcttgtgtacatatgtaacaccatcctaacacattttagctgttctgtacttggaaataaatggagtattactgtcatgaaccccactgttgggctgctttggagtcaggcttcacatgatg

SEQ ID NO: 54171 - DNA, 1336 bp, Bovine  19866880804362
  misc_feature (1)..(1): n is a, c, g, or t
naaaataaaactaattcatgaagaataattaccatttgcaagaataccctttctatgtacattatatatgtgtatgtcacttttaattcataaatttttatcttacattagttcccaaataataattattttttttactgtttgtgccagacattatttacttattaaagatatagtaaaaagcaagatagacatgatttcttccctcagtaaacttacataggatgaagggaaacatttacatatttattatttgatgtaatttattcattttatatattttgctctgcatattatatggaacatgaatacatatcacattatttctagtttaaatatgtttattttactgaagacccatagtggttatctatgcaatagcacttaagacatatcatattcatgtactgtgaatgtccaacagaatacagtgaattgtatgaaatgagtttgtataataatatcagtgccatcagatctcaagttgccttctttccatcgtgatatcagagtcttcaaagcctatgttacatccatattttgaatgtagggaaagcaactctatgattaagtatagattttatttttattttatggaggtctattataatgacagaaagtcatttttgaatatggcaaagactatatggcaagattatttaatattttttgacagtcagctttttcactgaacacccccctgatgtttattgccagtcaacaaactgcaatccttcagtatcttgtgatctgttttctctcatcactttgtactgtcaccataatgagtcgagtgagggtctaaaactacatctagtctaacagaagcttgagtctcatccatcgataaaacagtgaatgatattgaggcttaactataaataccttcactgatgaggagtccttatctttcataggagcccatttccacctctggacagagctaaaaatttctttattgtattcagatgaaatctctcttcttgtagcttccatccatttcccccagatctgtccattgaggcctctttgaataggtataaaccattttcttctgaagaatccaatttagaaagccacatgttcttctctttcacagcacttattataactagcaactaactaattacatatgaagtcattgactaaaaggctctctcctaaaatcttctgtcttttttctcagcacttttacaatgaaagctcttaataaatatttgttgaatgaaggtgtgtgaatgatgacattcataatctatcttgtcttgtgtattaggtagggtaaaccagaagcagtaactataagaaaatgtgtgccaagacttattaagggaaa

SEQ ID NO: 54172 - DNA, 1174 bp, Bovine  19866880812459
  misc_feature (1)..(1): n is a, c, g, or t
nttctgaaaataaggactctggaatcaacagaactagaattgaatcttgtttttgattcacacaagctttagaatctttggcatggactgagtcttattttcctcatttgtatattgggcatatttataattatcttgtaggattattttgaatatgagaaataatatgtttaatttgttttactttggggatctcattaaattataactgatttttattactatagtcaggattagatcatcacacaaggcattccataacactgctccacttctgtgtctagattctgctccatttttctgtacactaccctaatcttttctctgtaatttggccatattctttctaccagctcttgcctatatccctgaataccctagaaatctcttactcatacttaaaagtgaaagtgaagttgctcagtcatgtctttgcaactcctggactgtagcctactgggctccttcgtctatgggattttccaggcaggaatactggagtgggttgccatttccttcttcaggagatcttcccaacacagggattgaacccaggtctcctgcattgtagacagatgctttactgtctgaagacagctcaaatgtcatgtcttttgtgaaatgtttccttattcttcaagatagttgatcactccttcttatgctagcccataactaagatataaattttatctttgtatgttgagaaacatttttacataagtctccttgaccaaaatataagattttccaagacaagaagaaaatgatgttaattttacatccttagcaccagacatagtgcctccacaataagtgtctgctaaataaagagattttaaaaatagatgataaatatatgattactagatgactgatagatgcatcacattcttcttttcatgggcctcacaggttaagatacactaagagcagaaattaatattgattttcaaaagcagggttttaaagtaaaatgcagatttttaatgtagcaggttatatgtgaagtatttttaaaatatgattgagttggcttggtttcatatgtgcaattagcttcttcttccaaatatgtcaaattattcagtgattgccaagatcacacttagtagcatgccctatagtaaggattaagaactcttataacattcattctacggagccaaggaga

SEQ ID NO: 54173 - DNA, 1127 bp, Bovine  19866881202901
  misc_feature (1)..(1): n is a, c, g, or t
ncagatgtggaatccatggatacacaggccaactgtgctgtgcccttttatataagggatttgagcatccttgaattttggtaccccttgacagtcttgctgactcgatggacatgagtttgagtacgctccaggagttggtgacggacagggaagcctggcgtgctgcagttcatgaagttgcaaagagttggacacaactgagcgactgaactgaactgaatgacagtcttccacccaataccctgtgaattttgagggacaactgtgctctcaatggcttggaagttgagtggatgttgtgggacactcatttcagagtacgaaagaaaactaaaaatgtttaggtcatcggaacagaagaatcaaatcaaacagcaggtgttgctagactttagtcacagtttagaagaaacagaatgagacaagaaagagaagggagacagaaaaagattcaaggcagttttgaggactgatatgcaataatgctaaagagacaaacatatcctcaatagaaatgactttaaaagcactggttagatttgaaaaacagcatgcatatttagcttcatcaaaaagagggacagacagagcacagttattaaaatggacttatgtgtgttcagtattacaacttattcaggcacaagcaagtcactcctggatcatctctgagaaagatccattattcttacaataaaatacaaggtgaattgaaagccaggtgaatgattagtttaaatgaaataaactgtttctgcacaatgttaaaaccattttttcagtgtctatttacatgaaacaaatatgcttatatctaataactcaattaaaacagatctatcagaatattcattatttaataaattattagctttagtttcattactgtgtatgctgaaaagttttttataacagtactttaaaaatatttattcattgaaacttttcataagctcagattgagtctcttgaataaactggatgaataattttgtaagaaaaattataattaattttcatttacatgttcaatcaacaaattattctaagttctaaatatatacaaatgaatgaaaaataagggatccctgccatggaaagaagttcagagaaaaattaataca

SEQ ID NO: 54174 - DNA, 1769 bp, Bovine  19866881252790
  misc_feature (1)..(1): n is a, c, g, or t
ntttactaattaataacatataaaataattttattgtttttgatactgtgaaagcttttagacttggattttttccaattcaaaattatcaaaaatacatgttttattatttgtgaatacacataaaattaaaaggggtcctcttattgccaaaagctggaaaccactgtcttagaagataaacatgaaaaatcaattagatcaatttttcatgaacagcctctcagaactcagcttctgaagccccttcctgcttgttcattacactgaggaccagtgttatgtctgtggatgactgaagttctgactgatgttactgagtactaattaatacctcattctgtgaggtagaaatctggtggaatcactctgaaactaattttcagatatgcttgtcccacctcaacagatgctgtaccactcctaatatgaagggttatgttgtataatgcaaagggttagtctagacatgtcagtctctgtacaagtcaattagcaatctctactacagaagatttgcattcactatagcatatagaaagtacttgcaattatggatttatgtaagtgttgcttgtttattcatacattagtgtttatatagttgtcaactccatgagggaggggattctgactgtcccccattgccagtgtgttacaaacaacaggcatgagagcaggccattaacatatactgagtggatgaatgaatggatgaatgaatgactgaagcagacagatctaaaattcaagtatgtcaaattatctgactgatgttggccaagctattcaacttctctgaatctcaattctttaaacttgtgaaatattaacctcactattttaagcatgacatgagatgatgtgtataaaatttatagcaagcatttgataagtgatggctattacagatgtctttcaaaaagtttatatctaaaaggagcactaaagaatctaaaggaggtagtgacagacaatgaagatacttagagtctcacaaaggatactcagtgtctcatcaagaaatgaaactgaggaagagggctaagaatgtcctgctaagagtaatgtaatgcatatatgctaagttaaagcacagtaattcaaaatgaaatgtctcactgagaatgccttgtaacctgagtgtgtgtgtaaaatgatgggccgatatttatgaagccaatagttgcacacagagactaaagcaagctgacattttaaaacccaagagtatcatagaaccaaagtaagttacttgatatgaataaaaaactttaatacaaatatgtacaaagtagaggaaggagttttattctctctacttatgtagtatgcattcagttcaagtttccattgcacactgggttcgatccctgggttgggaagatcccctggagaaaggaaaggctacccactccagtattctggcctggaagattccatggactgtatagtccatggagtcgaaaagagttggacatgactgagctactttcactttcactttcatttttcatgaccctggagtcactcactcacttttgcttttgactgagctcactacagtgtccctttccattaaattctatcttgatttgtatggtagttagttccatgcttttcaaaataggtttatcatcccaaaatacttctctaaacacttgcctattttgaactttgtacagtagaatcatatgatatctatatgttttggattttactaaaagtgggaaaattagaccacattatattaatgaaggacatcacta

SEQ ID NO: 54175 - DNA, 1644 bp, Bovine  19866881270995
  misc_feature (1)..(1): n is a, c, g, or t
natcctgcccaattaaaggaagccaaggaaaatgttcaagagctacaaccagacaatagtcaattactttttaaagaaagctgaattgtttcttataactttctttatgaaatatttactcagcatgactaattgctgattgaaaataattctatagaatagcaattgcttattctggaaggcagtgacttaaattttatgtccgtttcttttgcttacaggtaagtggttatttgcttatttaacaaagctaatgtaactaagatgaaaatttgtttcccctttgaggcattatacttttctataaagaaatatcaaagaaatttaaatgtggtctcaattaaatgcactggcccagatttcaggcctgagctgaatttctcaaatcatagttctcatgcttcaatattcctgtgatgcttattgctatgcaggataacaggctaagagaaacttcaacactggtggacttaagggaggtagtaatagctcccaaatgaccattaaaatagaaaatgatttgaggtgcaggaggaatttaacttaaattctgcagatatgcacaagtcagaggattctgcacaggttgtttcaggagaaaagtcccagaaaaaaataataatattagaacattcgcatgagaatgatggctggcaaatttcatccagtaaatactatgaagttgaaatccaaagtgactggtaaaaatcttcctcttttttgattaaaacagcagcctccaacaaacattacacagaatcttcaagtcactggtcactattcataattaatgttatttattttaattcttttaattcacttgtgatcattatattttgacttttcctctatcattgccacttttctgggcttcaaaagccaatgccgctttccctcattattccaggtagtgttacttaatgtcagtttcaaaaatggaagcacagaaggatagaaaatttcctgctgtgtctgtcttggttccagaaccttacaggattgattcgtatggaaatacaaaccacaggaataatgtttcagaaagagaaagatgcagaaaaatctttattgatgagtagagggctaggtcattgcattcacatctatcccattgcaagtgaaatttacaatttaaagaaaaaaaaatcctataaattcagacataaggatggagaggcagattctggctgcccctctgggtaggacagatattttaattcctgagttgtttcctacagacacagatagcaccatagcattttatttaattgtttctcatgatatcagttgcctgaaggtaacatttctacatattatgataaattatggagaataccatatgtggttaaactagcagtgtcttaatgaacagatataagcaataagtatgtggatacttctctgtcattcacaggaaaaaatcaccagtgatagcaaagttaccccgtaccttttgtacagggaaggtacagtttccctgtaccttccacataacaggtaatataaaatctcaggacctttatctaaggcacttttttatgcggtgtggtggtatatagtcagttttctgaatttggttgaaaattctctttaaaattgactaaggttcagctattaccattaaaggagggctatttaaggcag

SEQ ID NO: 54176 - DNA, 1102 bp, Bovine  19866881319408
  misc_feature (1)..(1): n is a, c, g, or t
naacaatgcatctatgcatctagttaaattgagatggctaaatggatatgaatattgcattcaacaatatgctctcgacaaaaagaaaatgagaagagacgaggtcaagaaatacagtgtataccttttgctttttctgtggttggcactgaactttgtctaatctcccctttactataaaaggagagaggggagtcagttaaactgagtttctcttatgccaacatttgtaacactaagaataactttttgactgttagttatttgtccctcaggtttctctaaaaaagtaattaaactatcaatatttgagtgggtttctttttcttttctctcttgccctattttcaaaccttattttcattagtattttgctgttcttcagggaaatctatggggctgaccccaatgtggctaactggaggtggaatcactaactagatcaatcattcactccctctgttcctgagacagaagaaatccaagcagtaacattttacactaacttctctttggtgaatactgaaataattcaggataagcaagttcaagctggaattcatgatgaggtaagtccattagcactccagcaaactcatgtgaactctggaagggttttagggactgaactaagcctgctaattatttttagactgaatcatattagaaattgaatctattccctcttgtaccaggctctggatgtaagatgctctgggaggagtgttaacccttcagggcctacaaggtcctactttgggtgggctgacatttaatagcaaagatctcatatttcaaatgagtacctctgggtctcttccttatgtgtgggctttatgtgattgatacttcccttctcaaaaaaaaaaaaagaaaagaaatataatcctgatgtacttccatttacataagactggcagctacttttgtctctttcataatttctcttattatctagtacagaaagatttcagatcctgcttaatgttattactctttttctcgcctctaaaattttgcactttctcaccaacttaagtattttgatttgtaggttctaaatacacaacaaattcagtaggacaaacacaaaaatctaggt

SEQ ID NO: 54177 - DNA, 697 bp, Bovine  19866881320973
  misc_feature (1)..(1): n is a, c, g, or t
ngacacctgaaaaatgatgcttacgttatagatttctcttttacgagcatcatctcctcatcacgttctgtcaattttacctccaggttgacgcttattttgtctcctcttctactttttcatcattgctgccataattggcatcttcactgctttcctcctaaactttacaataagccaactacttccagttttgtaccattctattctctatactattagcaaaattcaccttaaagatacttatatctggtaaaatgccagtcctgcaagcatccttcccagattgaagttattctttgaatctcaaatattttcaaagatattatttctccagtaacattttcaggattcattgtgctcaggatttaatttacttcaccagctcttctattactactcagcaatattggctacttatacttctctaaataaatcttattatttcatgtttctgtgctttcttatatatggttcatactgcctgaaacaacaggaaacattatccctatggtcttgcttagttttggttagcatgaattcattcgaaatgagtttagtaacttttgtcctgaaaggcaagataaaggaggaccagacattatcctcatgtaaatcatggtttattcagaatgatagggtaaaaaacttggataattaatttagctctgatatagtgattggaatattagttttt

SEQ ID NO: 54178 - DNA, 696 bp, Bovine  19866881329166
  misc_feature (1)..(1): n is a, c, g, or t
naatccttcttggtagaatcctcttggctgagtgatgtacgtgccaccagaaagaccccgagtcagaatgattggccagctatagcctggaaactaacccccatcatcataaaacccaagactgcagtccacatggcagaatagttctcctggattcccttacctgttgctcttcacctgggtgccccttccccataaagtttcttgctttgtcagcacatgtgtctccttggaaaatttatttctgagtgtgatagaagagcccacacttgcagtatatatacttaaacaatggaacttgggactaggcttttattttctgtattttcaattcttacctaacacttgccaccagataggctaataattatgttttttaatgttttaattattactcaaaagtaataaataataaataaaagttacaaataaatgccacctaaataaatcactcaactatgtaactgttctattggttagcagcttcatttaaagaaaggaattaagtctcctttaggatataacctcagaccattacttcttagttgttcaaatcttttctgtttggttctgtgatactgtgattactcagaatggctaaataatcttggaaattactgaacctgatgataactttaatttcaagactttgaagtactctccttgatgcctcgctacttttatggtgtcttcaaa

SEQ ID NO: 54179 - DNA, 1070 bp, Bovine  19866881463588
  misc_feature (1)..(1): n is a, c, g, or t
ntaatttttttacttttttttttcttttttaactttacaatattgtattggttttgccatatatcaacatgaatccgccacaggtatacacgtgttccccaccctgaaccctccaccctcctccttcccagtaccatccctctgggtcgtcccagtgcaccagccccaagcatccagtatcataagtgcattgaacctggactggcgactcgtttcatatatgatattgtaagctcatgtacagcaacaaagactgagtacaatcaagaataaaaataaaataaaaataaataaatacagaaagaaaaccaccaataccatatttatttatttttatttttgattgtactcagtctttgttgcacgcatgaactttctctagttttgcaagtggggatgggtctctagttgtggtgtgtgggcttctcattgtgatggctccttttgtcgcagagcacaggctctagtgtgcacaggcttcagaagttgctgcacacagactcagtaattgctgctcccaggctctagagcacaggctcagaagttttgaagcatgggtttgggtactccatagcatatggaatcttcgcagaacagggattgaacccgtgtcccttgcattaacaggtggattcttatccattagccaccagggaagtcccaacacttgagatacatttaaagtgaatttattaaaaacacgttgaaaaattccaaacatcattactccctttgaaccatcccattaagatgaaaaatattttgtataagattttaattgtgaaagggtttctttttagaggtttatctcttacttcccctctctatgcaattaaaacttcaaatactgcatttataatatacactgcctagaacttaccagtattaaaaataactaaaaaaaccttttttttaaggaacagtgttttctattagcacatttaactctaattttcatgatattgtaattatgttggcaagttgtttggattgatggatttcagctcaattaaaccatcctgttatgaagcagagagttgaaccaaatgactaaagacttccaactctaa

SEQ ID NO: 54180 - DNA, 857 bp, Bovine  19866881523635
  misc_feature (1)..(1): n is a, c, g, or t
ntcatgcaaagagttgactcattgcaaaagactctgatgcttggagggattggggtcaggaggagaaggggacgacagaggaggagatggctggatggcatcactgtctcgatggacatgagtctgagtgaactccgggagttggtgatgaacagggaggcctgatatggtgcgattcatggggttgcaaagagtcggacacgactgagtcactgaactcaactgaactgagcatgttctttagtgttaaggatagtttttactcagtaaggcatattgatctcaagttatacattcgtttagccctggatacgatatcagtcaggacccttcagtactccctgggcatgagacatttggctttttatcctgttgaccactttcttaaattgtcttactgtcatgataatggtgatttaataatacttaccaagtactactggtctagagaggactgactggagaaattggtcttaataaaacgctatagatcagatactctgctctcatgctgttgagaaattactcaaacaagattattatgtatgattaccaaagacccaggcagctaaaatgttgtttctgagaacacagacactgaatgtgtagtcatgggcagagtcatcaataaattgtactctcttcagaagccaagaaagctgaggaaactatctaaggaactggctttaagtatgctttttgaagctaacaggaaatagtgttcagtgtttgccaaggttaaaatgctcttactcaaggctaaattggatgtggtcacagttagtaaagtatttactatcatttatgaacatttcagatcttttcaatgacacatgagtaactactgttttgagaga

SEQ ID NO: 54181 - DNA, 799 bp, Bovine  19866881860430
  misc_feature (1)..(1): n is a, c, g, or t
ntggagggtgctgaatgaatgttttttgaataaatttatgaatggatatcagcagcactgctctcctcactcaaaacaacatgaaaagctaaattgctttaaatgaatgcctttgaaatatgcttacatgatatgtgtattattgtattatgtttactgcctaaccatggaatatcgtattgttgtactttgagatacaaagatatttcagattcagatcagagaatacttgaaagattttaaaatcataatcccttattgccttgatattgaaattgtgcattcttatttagataaaaaaccacaaaatttaattctaaatgtttttcgttttgaaatcaatgacaagtgtacttaaccagtgaaatgctaactgctatggagagtaaggctcactgaagtggtatggatttaggaaagagtgcccaagagagtggtcaggtgaaaatgagcattcagaagtcaatgagcaggtttaatgcttttatcccctcttctgatttaacttactagatcctaaatttgaagatattctcttttttaacatttttattagcattatcatgaccttttcataactgtgtattcacaaaaatcaaagaggtgttttaaggagacagataaatgtatagctataggtgaagttgtagagagattattttaagagtgtatatatatatatatatatatatacatacatatattcatatgctatgatttggaatattgtttaacattaacttgtggtaattatttcccttaacagtctggtatatagtttatatatcctgtgtttcag

SEQ ID NO: 54182 - DNA, 1216 bp, Bovine  19866880109674
  misc_feature (1)..(1): n is a, c, g, or t
ntgtatagaacagtcttatggactctgtgggagagggagagggcgggaagatttgggagaatggcaatgaaacatgtaaaatatcatgtaggaaacgagttgccagtccaggttcgatgcacgatgctggatgcttggggctggtgcactgggacggcccagagggatggtatggagagggaggaggccgcagggttcgggatggggaacacatgtatacctgtggcggattcattttgatatttggcaaaactaatacacttatgtaaagtttaaaaataaaaaaaataaagtcccatgttcaaatggtgaagcatttgtttgtgacagacaccatatgccctgaatccttgtacctgtcgaagagaagccttgcagaacctaacatgtggcatgtctgcacatggattgttctggcatgatcatttataatgactttcaaagggagtatgagtaatttacatatcaaaggtcctatgtcaggaatgtctatgaaggaaggagctcactattattaaaatttgaatcaggaaacttcttgagggaccagatcgcaattttcatggcatttctagtaaagacaacttaagtaagtgctttggttgacagtgtcaccttttgtatttgaagatattgctgactcagattcatttctcattccatcctcattataaccctgagtcaagtattaggacccgcatatgtttgtgacttatgtactgtctacaatgccagtgtcccattatcccaccttgcctcaaatgagactaaatacaactaaaaccaagcaagagagagatgttctgaaatgggggaagtgtttgccagccctgtgatgtcacagtgcaccataactatttgggcgaggtggcttcatagaccacctttatttaatggtctagctcattgttttctaacttgtatattggagaaaaaaactagttgtgttgttgttgtagttcttggttttttaaaaatatctaagttttcatgcagtttgatttttttttaattatttattcttggcttcactgggactttgctgttgggcgcagactttctctggttgcattgactgggggctcatctttgttgtggtgtatgggcttctcattgtgggggcttctcattgcagtggcttctcttgttgcgtagcacaagctctagggtgtgcaggcttcagtagtgtgtctagggctctagaatgggggcttgg

SEQ ID NO: 54183 - DNA, 1555 bp, Bovine  19866880196667
  misc_feature (1)..(1): n is a, c, g, or t
ntacttttgcctagaaaatcccatgggcggaggagcctggtaggctgcagtccatggggtcgctgagggttggacacgactgagcgacttccctttcacttttcactttcatgcattggagaaggaaatggcaacccactccagtgttcttacctggagaatcccagggacgggggagcctggtgggctgccatctatggggtcgcacagagtcggacacgactgaagcgacttagcagcagcagcagcagcagcagaataagaagaaagtaggagagagaaggtgaatacaaaatttcattgtcatcagtaaataagttgatgtgtttatttgcatgttttactataatcttataaaactggggcttagtatcaggaaattctataacagatcaaatatataattgtattttaatagtataaattgttttctcatgaaacttgatgcttataatagaataataaagtcttttaataagcactagaaaaatcctaaatgtaaaaccaagtaatgaaaaactataggtttgaaataaaacatttggcaataatgtaatttgtttggcatcttaattaagttatctgaacttagtcttataagttcagtttgcaattagataatctctcttccttggaaaaaaagataattcttaaaaagttatttctcatgtaagttattatgaataagaaaatattaatgtactttatatgcacttttccaagtagtgcataggcaaggacagagagaaaattagaaaactttttaaaaaatgcatgctaaatagtgacacaaaagttgttttctattgaattcctaccaaaaaaaaaaaaaacctgaaagataatagaactaagaaagataaaagaactaactaatagaagtaactatatccagtttttaaatattgcattaggaatagcttcatttgaaggaaactagtgaaaagataagaagcaacatatttcttagtaaactgagagagtatatttgactgcaaacttttagtatttgcaagtgcagcttaagaatgatattatttcttaatgtaacccaatcaaacaagtcaatgggaaaaatattaaagctaagaacatttggtaaagggactattttcaaaataaatattacaaatcaatagctttatcagtaagaaatattaaacagaccaaaaattacactgaagttgtaaaatatgaaatttctgggaataatctcaaaatttgtcatacaagcaaatttaagacatattgaagaagtaaataaaagactgtttttctcctcttttgttatctctaatgctttgaatattgctagacttagccatgagttatttgttgaatagctaatgactcagccttgtggaatatgtagaaaatagtttgggaaatgctttggggatgtaaaaatattgcaatgttgatactctgtatatatacatatgtgatgaatatatatgtacacatgtttgtgtagctgttttctattaaatgaatattactttaaaatttacatccagctctttatataacagagacataatagaggcttgtgatt

SEQ ID NO: 54184 - DNA, 1766 bp, Bovine  19866880384477
  misc_feature (1)..(1): n is a, c, g, or t
naatgagggagctaaatcaactgcttaaaacaatcatcctcaagtcaagtaaatattttgaagttctcatctacttctttgcttttctgcatgccaaggacagtgtggccccctgcataagagtgcctcatcagcctgtggataaatcattctgaaaccaaaacaactttagaaaagttgtgaaatccatgtggcaaaagcaggaccgaaagcactctacctactttatggctcagaaaggtttagtcaaggctgctgctgttgttgctaagtcgtttcagtagtgtccgattctgtgcaaccccataaacagcaggccaccaggctcctctgtccctgggattctgcaggcaagaataccggagtgggttgccatttccttctccaacgcatgcatgcatgctaagtcgcttcagtcatgtccgactctgtacgacatgttaggaattagagataatttggaggacagtgttttatactttggagctgatgaaatttcaaggaattgtctcaggttttaatatgatttttattgcctgcagtttcttcttaggtaaatattcatattgcatattattaattttacttattggaaagctcattactggtaaaaaaaataaactataaatttaagccacatctttctttatttcagaatcttaattataagccaaaaataatatatctttatgaataagaccagatgtctattttctatagtctataaagaggcattaactagactttgaagacctaatttctatttagtggtgaacagagtaggcttttgtttatttgaaaacttttttttagtaagttgcacaacgtacttcagttgcaaaaagaaaaatatggtatccttcgttattttggctacctattaagttcctgtatttgaagacgtccatgctacaaacattgcacagaaaatacctgtaacaatattttacacatacatgcacatcagactcaacttcaatgcagatagatatgaatcacattactcaaaacaaaatgataaaattagagattcaattcaaccataagtactcaaacccactattagtttataaaattaaaatcattcttcaaaacttaatattaaaaaaaaaagtataccataggggtcaaaaaataaagtatctatggttaaaacgagaccgtgaggattaccagactatagtgaacaagccacaacacaactgaagtactgaagaaatggttgtacacagttggttaccttaagagagtgtaccacgggttcaggctgctgagaaggtgtggtatgtccactgaagctagctggagagttgggtgaactgttactcccatcagccccagatgacaacctaaaagaacccttagtagaaaatcaacaactttgttattaaaacaaaagtcgtttataactgaagagatgtcattcaatattcaatttcactgccaaatgagaattagcctttttttccctagcctgtcataagatgctatcaacctgttaattggaatacacttgctgcttgaccagcaaaaaaaaagctaaccaagagccatctctatgcatttccagatgtcagctctgatttactgaagagagcaatgccccctaaggaatgcccattaagaacattttaagaatgatttttgaaacttaaagatactcaagagtagggaatttgtgagttactccacatttgagttaaaatgctcactcagcatgacaaatgccatattccatatgtctcagaaaatgcagatacatcaca

SEQ ID NO: 54185 - DNA, 1466 bp, Bovine  19866880404215
  misc_feature (1)..(1): n is a, c, g, or t
naatcccagagaaggcaatggcaccccactccagtactcttgcctggaaaatcccatggacggaggagcctggaaggctgcagtccatggggttgctgagggtcggacacgactgagccacttcactttcaattttcactttcacgcattggagaaggaaatggcaacccactccagtgttcttgcctggagaatcccagggacgggggagcctggtgggctgccgtctatggggttgcacagagtcggacacaactgcagcgacttaacagcagctgcagcagtctaaaattcagtctagtagtataacaacttcggtgacctccctctactggtcattatgaacccgcacattggaaggaaccatcttgtcccttgcacttgctacacataacatcttaattttagttgtctgtgtattaagtgagttagtggactgaattcatggagttcaagtcaaaacctctgcactatacatttcagtatattttattttatcaatcatgcagtgcattctacattttttgccttcagaaaaatgatatttaaaaacagtttagttaagccaaataacctgattacttctaaaacaaaagtaacaatttagtaaatacaataaagtaacaacttagtaaatacattaaaaaaattattcaaatattttgttgtaactttagaatagctttttgactgttttacaattttatttatttttacaatattttatctatattaaactagctctacgatatgcaacatcttattctaaaattattttaagaccaccagagaaaactagacacacatgaactctttttactgggtaactggctacaattgaaaacagtgtagtgtcttgattatataagaggcctggggatagtttacctagcttgaatcctgggtctactgtacagtagctgtacatcttgggcaagttacctaacttgtctccactctagttttcccatctataacatggagataataatggtccagatgtcataggactgttgtgaagattaaaatagttcatgtatattaagtgattacagtgcctggtacataaccagcactcaaaaatcgtcggcaatcattaacagtggacaaaaagaaaattattttgagccacttacatgacatttattaagcatccaactatgtgtcaggaacccatgctagattaaagactagcagacaaggactaagacaagattcctgctcctaagaaactaatagtcttgtgttctaaaatctttaaatgattgcctccattaaatatttcatttcggagaatatccatcaacctagcttattgaagagatgaattttgaaaagaaaaaaaaagtatctcttcaatacatgaagaatcttaaaaatgtatctgcaaaaaattttctttttttgttgttcaaaatatttcaatttcagacaaatatagctatttagatgaatagctttaatgg

SEQ ID NO: 54186 - DNA, 690 bp, Bovine  19866880505208
  misc_feature (1)..(1): n is a, c, g, or t
nacacacacacacacacacacacacacacacagaggaagaatttgcaatagcaagttttctaaagtaaatgctccaagaaaagaaaagtcaggggcctacagtcagaaagaaacttatttaaagtttagtcaagctgagtggaatgttaaggctgccttagtcagaagttgtagagaagagggtaagacacatggaaatgatgttcggataagcagattataggtctctatttggccaaataattttagatgttggcatactggtataagttagtagaaaacaccagtctcaataatgacattctttcctattctgtgaaatgcaaataacattttgcatgttaagaccgtgtgatatttgttctccgtgttcccttggtcctttttatacttgaatgaatcctttgaagcaagaaaactgactttgtaaattgtgccttaaaaagtaaatctcaagggaaaaaggaagaaaataagcatttagtgtacatataccatgtgtcaatagattatagatatttcctcatggatcatcacatttaatcttcacaactcttagaattaagtaagaattagttcatttttatgggtgaaaaaagtacatctaatgaactttttaaaaagttatttaatgttttgatttagctttagtgttctttgggtattaatgaagacctcttcattgtcatt

SEQ ID NO: 54187 - DNA, 1103 bp, Bovine  19866880536467
  misc_feature (1)..(1): n is a, c, g, or t
ntgtggttaaaatgaagactcctgcatttaggagactccaggatctgaaattccatgatgtttcctatctatgcaggcatctgactggaacttcacacaccggaaccctcacttccgtaattacctctgtatagaacacagagcattggatattacttcagtcttgcatattctctctcctgctgccatttctcaaccaggactattaagtcaacttccaattatccccaaacagcacaggttgccatttagcaaatgcatccacaaacaaggaatcatcatgtttcaacataacatcaaccccaggaaggttccatcgctgtgcaagacgactccagagtttggagcatgaccttgtaaatttctgtggccctctatggaatggcacaacctgggaatcatagctaaccctttcccagagtgactacgtagctgatagcagatcacagagatttaaacttggaacaggttgaaaggtaccaccatttcacagacttctttttttttaaataaacaaccctaaatactgccaatggttggtgccaagctctgtctgccaagtgccacccaatttggccaaacggctaaggaagaatgcagctctggacccagttcaatgtactgacacccaaggccccaaaagcatttcaggaggcaagctctgacacgcacctgaatttagtgagaaaacatttcctaccatctacactattggaattgactgagaatggggcatacccttggtccttggggacctcagtgtaacacagaaaagctaccaatgaggaaccactttccttggccctgcactgtgattccatttgaaatgtatcagcatttagttgattaactctcccttattatgtagctacctcacaaatgccataagtcttggccctaaaacttgaacaaccacacacacatgctttagaaacagaaaaatgtacatatgtcacataaaggtcacataatggaaaacacagacaagtacaaagactggggtccaaaaaagctagaagaagggcattgcctctctgttgtcctgaatatgtttcccgaactcatccatattccacttgacatactgataagaattcagttca

SEQ ID NO: 54188 - DNA, 980 bp, Bovine  19866880759394
  misc_feature (1)..(1): n is a, c, g, or t
ncagagtgttattagctataaaccgcccatggttatatattagattcctattgtcaagagtttagtatgtctttcttcccttgagatttccctaattctgaactgttcaatagacctttctgccatgatgcttctcacatgtgattattgaacacttgaaatgtagcttgtgcaaatgaagacctgaacttttcattccatttaatgtggaagtgagtgaatgaaagtcactcagatgtgtctgactctttgtaaccccatgtactgtagcctgccaggctcctctgtccatagagttttccaggtcagaatactggagcgggtagctgttcccttctccaggggatcttcccaacctagggattgaacccaagtatcctgcaatgcaggcagattctttacagtctgagccaccagagagccattctacaagtgaactcagtgttccttcatggtaaaagcatttggcttggtttagactggatcattttagaaagttcattgatagcaacatttcctctcactatatctggaggcctgaagtagatggattttttttttttttgacttttcatttaatcgcaaacttaatttggtctatatgtaaagatttacagtttctccagatatgaggattatcaataatagaggagatactgggcagtgtgctgcttctcatcaaatattcagtgtgtgatataaagatttatcttgtaaatatcactgagtataaccttgtaaattcagagatacatcatctacagttcagctttgaatatagagcaaatgaaggaagaaatggattttttaaatgaaaagatcaaaaaggataattaatatttcataatcttaattaacttttccattgcacattggtttttaatgttatttggggtgtaaggtgtgattattgctttcatagccaaatcagataatctggtcacaaacttgaatgtcaaaaggtaatgtgaacatcttgt

SEQ ID NO: 54189 - DNA, 884 bp, Bovine  19866880810329
  misc_feature (1)..(1): n is a, c, g, or t
nctatgaggtcacacagagtcgaacatgactgaagcgacttagcagcagcagcagcaagatttgtcaaacttttaagtggttttgattagagaaagtgccatccggtctttaagatttcagggcaaaagataaaatttggtaatggtccattctaaaacacattacagcatttggaaggatgtgcaggaggaaagccatcttgaagacttttgccactgtgggtttacaagcattagcttttctgaggccaagttagtctccctcagccagagaaagtccaacagccagatgatttcaaatctgtaggcaatctctttaataaaccccaaactctaaagacactccttgaattagttccaaattaatcccaccatccacaggcttttacatattcctgagggaaagtcctcagaactatatattttaaaaattattatggttctaaaagtgttactctttcttcctcaggcaagcaaagttcagcctcctacttaagaattaatattagctccagaagtataagtgattatcatttctcactataatttgatgcttttcttattaaaaaaaatcttgttggcatcagcattttaggatttgcctggatatttaactcagactgctttattggcagagacagaattttttatttttaatgggatctttaattgtcctcagtaggttaaaaaaatgatgtcaggtctttgctctgattcatcatctatgaagctaattctactcttgtcagacccttctctaggtggcaatctgaaagaaatagagatggttattttctattccaatcctcccatgtggaaacctgttcactgtttttcactggccccaacttctcttagctctgggtctctgcccacaccttccg

SEQ ID NO: 54190 - DNA, 1411 bp, Bovine  19866880822819
  misc_feature (1)..(1): n is a, c, g, or t
ntaaatcctgatagttagatttttgacaattacatttattttaagtgtaattctgggtgaagttcaaaatagtcctgaattacagtgaatcccagtccccagtgtttctagttgaaatatgagtctattggttgtcttctgaggttaaccatttaaaacacccagatttatgctccatgagggttgtgagcactcaataaacctaccccaatagaccctcccatccccccgccccgggttccctctggatgccagcacacccagccatgctggcatgccacatccttcccatctggtcccagtcagagtgaatacaagggtctgtgcactctgatgaacacaccaattacctttttgagaaagaataaaaagctaggtggatcaaaacatcattcaaatgatttaggtgtgcaccatatgtaaaaaggccatgagcacttgaaacactatcatttccaacaggtttaatcaatctttttacaagtctgcatctttttgtttagggaaaaaagatcagaaatagcagtactggttgttacagagatctgctcagggagctggcttgactcctgttctgtagccttcactagggatggtgcaaactggcaggaaaatgggtctggggggtggaggaggaggagttcatctctatttttagggtcagcaaaaactgttcaacttcagaacagcttctacttctcagctggaaatatcacaaaccaagccaataaacatagttcattgtccataattacatattacactatctctgcattgtatatatattttttaaaaaagctaaggccgtcttcatgtgtgcaagcacaaggagattcacaaatagaaaaatctttaaagaccttgttctcaaatagtcactttttatttaaagcaaaccatattccacccatttaatgtcaaaggtcttttatcccatcttcatataacaatagggaagtcttaattaactgctaacatatcttaagcatcctcatttggacaacttactaagggtcgggttataagtaggtgataacagcagcgacagtgaagtaacgggacaaagaaaactgaacaacaataggaatcaggaggcggctgaagccaagcaagaccctccgtgaaaacacaaagtcacgaaccctaaactatacacttcaaggctttcttcaactcatcttgtatacattaaggttaacctttggtagctgtgttaatagaactgtcctcacagaagggatcaatccagaaagttgatttaactataggcaactttgactggtatcaaaaggacagctgttctttctatagcttgccctttccttctgatgcctcttcttttctcctcttcccttttcctacccctcaagtaagacttaggagtgccagcagtatccatgagcaatgcttg

SEQ ID NO: 54191 - DNA, 1515 bp, Bovine  19866880852092
  misc_feature (1)..(1): n is a, c, g, or t
nttaagcatctgaaggtgggttctctgggagggatcaaatataagtgaggttataagattggggactttgctatggaattagtgctcttataacaagagacaccggagagcttgctctctcttctctgtgaggatatggagaaaaggaggcttatgcaagtcaggacaagagtccttaccagaatctgaccatattacagcctgatctagacttcaaaactgtgagaaaataaggttattttgcttaagccactcagtctatagcattttattatggtagcccaagtagatgaagataattatctaaaatttttagcaccgaatttggaaggaaataataattatgctataaactgctgaccatcaatctttaagcttatgtttctgaattgggaagtaatttgaaaagaatataggtatgtatccaacccattcaggtactttctgagtattcaggtactttctgaatacttcctgatatcaacaagaataatattttctatatgtgtaataaaaaaaaatggacatatctttacccataccaaggaaaatagagaagtgaatctgagactatatcacaacttataaatattattgagaatttcagttacagggatgtaattatgattacttcagggaaaataattttcccatactcctgaatatctacagaagaactaaatttcctatagaaatcctatggactcttacacttccttctactgatgatactggaaattatccaatggatgtgctgacatccatttgtctaattccttaagaccattctgagattaaaccaacagacagtaaagcacatttaccacattatcacagcctttcaaagaagtgctttcactaaggcccagcttaatgtaatggtcttttcctctattgaaggttgatatagggaccattagtttaggcaatgtttctttgctgctgctgctgtttagttgctaagtcatatgcaactctttgcaaccccatggactgtagcccaccaggctcctctgtccatgaattctccaggcaagaatactggagtgggttgccattcccttctccaggggatcttcctgacccagggattaaaactgcccccttctgcttggcaggttaattttttttttccttttttttttttttaccattgagccacttttaagtttgaagattttatttctagacattctctgcataaggacacaaggagaaaatttccactttttgtcaggaaaaaaaaattgtcctcaatcttctttttgtcaaaaaataagttgttaaactcactactattttattttccttaacatctgaaaatttaaaaccaaacctcatttgtgctcaggatgtgtaatctacttaattagagtgcaaaaaaaaaaaaaaagtctactcttaatatacataagtcaacatacctcttaacggtatgagcaagcatttctttaagacacatggtacagtaacgaaagagagtaatttgctttacccagggattcaatcttccag

SEQ ID NO: 54192 - DNA, 1631 bp, Bovine  19866880985741
  misc_feature (1)..(1): n is a, c, g, or t
ncttttacatataccgtcttatagaaaagcccacgggaggcctacaaaactaaggatctgaagaaggaaaaaactaaaaaatatcactccccatactttcatctatttataattgaatgtgtgcctaatttcaaaccagggccaagatgaactcccaagactttgtgcacccttccataatgattcaagtatgttagtgctgcaatacatttaactctttggcacatgaagactgtaaacaactcaatggtgtgaataacttagccattgtccttccttaagaaggacaaaccagcattgcctttataaggacaatgaaacaagctgctattcttctgctcttttctcctctctaaacacctcttctgccactctgctgctcaaggatctccactctctgaaagagcagccactctttctattggaaactctcaaatggcactctaaaagagaaggcaatttatgtcaggagcagcagtaacttgaacctcactctcttgcagattagagacatagaaattagagctgagatttcacacatctgatttctcaagtgtcccatggtctactctcttgatgttgaatcacaaatttcctagaactcttgaagaatcagcccatttcataaaatgaaacttttaatatttcccaggatcgagttcaaaataagtgtttttcttcaaatgttcacaaagcttgtcataaacactatgcattaaagtagtattaagagcaacctggttgttctgtagtacccaaggagcaaaaattgctgagttgctaacaggttctcctgctatcagaaaaaaaatgagcgatcctatgaaactgtttgtaagctgaaatggcgaaaagtgaagcagcaattacctcagacacatcttgctaacagatgcacaaagcaaattgaggtaaagcacggatgctcacaggcacaatgcaaagctacggaggcctgacgctgagtgtgcttcctggggaaggagcttgggggtgccgccctcaccgctggggtgtccactgggtctccagaggctcactgccaaaccaaccctgaaagccatttttgcttttcacttttccataaaattgaatatcctctttagatttctttaggttagcgaaaacaggtactaaagtaggtcttcaatagagcaaatttttgaagggtagaggcacccctgtattacagaaacactattatctgaaacacagtcaagacccagaaaacaagcaaaaacttactttttcagcccaaataactgataaatgcatgacacatggatcatgcactaaagcccatgcactttactcacagaaggatacttcaaggtcacttactcttgttttcaacacagttctttctaatcagtgtggttatccattttcccaaggtatgaaaaccattagagcagagcagaatttagaaacagcaaggacatgagttaaaatcaggccaggtaagggcaacaaggaatactgctgacaccatgctggtactagagtgactgaaaatctattaaaagtagatattggaaaacaaataaagatgagccatctaacatagggactcaacagctctatctagcttcagagtttctaaatatcagaagggctaaaacgagtaattt

SEQ ID NO: 54193 - DNA, 1194 bp, Bovine  19866881063536
  misc_feature (1)..(1): n is a, c, g, or t
ncagatttctctggtcacacactgagaaaacccccataattacaggatatttatgacagcagcactgccatttcagggaattgcattatagttcacactaaaaataaaagggcaacacgttttacatactggtagctggtttcccttgatagatgcgcttattttttctatagacttaaatttatccttcaccatctgctcttcaagtattccagaaaatacaatattgcatctgaattcccctgaaagtaagttattcttcctccctacagatttcctttttgggttcatagtcttactggtatacaaaatgcccaatatttgagaagctctagtaattttgtacttcagactagataaaatttgggagagcatccagtcaattactcctgtaatgtttgggtttgattgatgagaaaatagaggaattttttttttaattttaatgttttcttttttaaacgttattgctgaagaagctgtgagggttttgtttgtttttctttgttcatttatgcattccttcaacaaaatttattaaataacttttcttaaaataattttgaaaagaattgtactaatcctatttatacagaataagccagagttgtgtgttgccatcatttgtgggagcctgaaaggacacttacaccctctctacctagtatagttttctagtacagctggtacaaactaaaacttccgtcctttggtatcttctggaagtatcctgtaagaaaaacccaaatctgcaaatagccatgttaattatttctatgtgattaatttcttaaacaatagggccttagggaaatcatcaggtacttgtctttgaaaagaaggagaaaggcagaagaattaggttctgaatactgggaggacttggctttctacgtaatttgtagtcaataggatatttgttgaatgaatatgagcgagtgcatagaaaactctaagtaaatcttccctattgtaagatattgccccgagccagtctattatcttgatactaacagcttcccagaggtctcaaagcattatcatatcaatcttgatgtgaaaaccaaggaattccttgagtacaattaattagtcctaaaacactctcacattaaaaaacttaaccagaggtgactgaaaagtttgtagccacttagaaatggtgtaattgatgggtcacaagttggtgaatgg

SEQ ID NO: 54194 - DNA, 846 bp, Bovine  19866881083513
  misc_feature (1)..(1): n is a, c, g, or t
ncaggcaagaatactggaatgggtcgccatttccttctccagaggatcttcccgacccaggaatcaaacataattctcttacactgcaggcagattctttactcacagagctgcaagattctttcctaatcattgtttagacaaagcttgccctattttctctttgtatctgtacatgagcactgaaggatatagaatgcagtaaaaagtggcacatcttatcaattttgtcattgccttcttgtattagctcctgagccaacttattgatcctgagtaacaaaacagatgagtttgcttttgaatcttaagagccttctctggcagtctttaatatttcacagagaacatcacaagctgtgatggacctccaaagcactattccaattcactttctcatttctgttgccctcttccactttttccacatctactgctaagtctcatttccccagtctattgccatagattgtttgtctgtattaaaaaaaaaaaaaaaaaaacttgccttagaaatgtcaaacataatgaaaaaatggggaaaaacatggccaacttggcattgaaattcctgggagtctcacattcataaagcacaccagttttgcaaattcatcaactaaactttgaagtgaaggaaatacagtctgttcgctcttgtctctgggcaattctatctcttatttttctgctcatttaccacactgagatatttcactgcaaaatacaatagtgaacatttagagagtttcatatatttctataagacaatccaaatcgacttttaacctttaaaattttagttggaaaataggaaacgaattagtaacttgagagaatatttta

SEQ ID NO: 54195 - DNA, 1235 bp, Bovine  19866881094003
  misc_feature (1)..(1): n is a, c, g, or t
nattcaacgaagctcattttataattttattatgggaattcagatatgctacaggctaaatgatatcctttcaaaacatgattatgccatggtacaggttctgcctaggaaccatgactgactagggtgtgtgactctgactgtctaatgtgggggaatttgaaggtgaccagaaggggagcctggtgggctgccatctctggggtcgtacagagttagacatgactgaagtgacttagcagcagtagcagcagcagaacacagtaaattctagaacttttcctattttatcatgatctcttgtttggattggcgttgagactgtgacactgggttgcagtgaaaatacgttacttggagactaacagtaacctactgatatctagtggcattgagtgctgagaagtttaaactttaatatttatctgggaactatagacttggaatgtgacaggtaacattgttttttgttcctgggaggaagaagaaagaaacttgaagatacatttttcttctgcagttctgccttgcatggatcacacacctggtgtgtccctctacaatcttaaagcagttggagtgttgtcctggtttttctcattgaaagtattttggcttttaatgcagtaggaggccacagaaagaattaataggatccttgaagccaccttgcttatatccttgaagtgttttgtttggatatttccagactgtcttgttttgatggggactgataagtgtcttcttttctactttgataaaaatgttaaatggaaaagactagaccgtttaaaatacaaacaaagtaaagacatcatagaggatgtgaaagacacaaagagagattttttttttcccttcttatatagttctgtggaatgtggccctgtttaatcctctccaagaaaggacagaatgcactgatggaacaaacaagtggggagtctgaggatattgaaattgggacccatgtttggctggtatctgaagctgcttagagagggagaggagagtgcttcagaaatatcctgcgcgcttcccggggaacagggagacatgccaggtatactaatgctttacctgctcaggggaaaattacagcaacttgatctttctctctcctggattgtttgagagagtgacaggggatataagtgatattactcagatggctgtttctagatgtctccatttctggaagtcagaatatatcactggataaatgctctttctgt

SEQ ID NO: 54196 - DNA, 794 bp, Bovine  19866881096671
  misc_feature (1)..(1): n is a, c, g, or t
nactgaactgaactgaactgaagatatttttaaagttcaaatgcttatctgggaatatttgagactctaaagatttaaatccaatacaatattccccaaaactatgaaagtagaaaagatggaaatagaattgaaatagtagaaaaataaagatttttttaggtaattgctgagcttatgaagataaatatacttctctgtaattacaacaggcatgtctaaacatcatgggattagagttagaataacctgaagatcatttattttaattcctggcatcacaaatgatgaaggtaagactcaaaaaaggtgaaggtatcactagttattaggcaaatgagtcataaccaatctcttgctgtttcttttccattttatgatgcataatgcacaactctctttgaaaataggccttttttgcccagaaggatttccttagaaatctaattatgtgaggattacagagctgagagatagtgatacctcaatgtcaactcactgatctggtgcagattcacaatgaatgtaattgatacacaattacagaattatcacataccaatattaggtcctttcatcttaattacttgtagaaaagatattttattttcctttttatatacagagatgagccaacaggtctcatttcttacacctctttttaaaattccagacagaaattcagtttcctcactggcatcattctatggagagctcatttgaaaaatggctttactctgctcttcctgatgccccctgccttgttattggttgttcagtcacttaactctttt

SEQ ID NO: 54197 - DNA, 1209 bp, Bovine  19866881130643
  misc_feature (1)..(1): n is a, c, g, or t
naaatgcatgtgcataggagacagcacacatgtggagcacatcctgtctgccatcgagatctggaaggaggagggccaagcaagcagcctgccccactgcagagagccagtggtgctggtggtggcctcagaacccacactgagcactagaagggaggcaagtgtgaagagtagctggggcttaccctgtgccaggcgctgtccgaggtgcttctccctagtaactcactcagtacctacgtcatgagtggatgattgttactgatgcactttgcaaatgaggaaactgagtttaataactcacacaaggctgcagaggaggtggctgagtgaggatgcaaactcaggcagtctggctccatgctcttcaccactagtctataccagatcccagatgaatgtctttgggggctgcactgagagcaataggaaaataaatttcaagtgagttgttatttagactaagacaatttatctctttataaatcagttcattaaaatggatattatggaaagatatatacctttgtaaatttaagaggcattcctcattttccatggatttgaatttacatgggccatggacctactgttttattctatcttaatgttcctgagtacttcgtatggacagacagcaaattaaaaatactttatcttgtcccattcctgggtcaaatgtgatgatttaagaagccttttctcaataaatctgctaagccaatagccataaacaggagccccggttagtttgttggtgctaatggcagaaagctgagctctgcatagaggggagagggatatatttataaacagttccattagtggatcctgccccccttcttgcattgttgtaaattcttgcatagctttattctcaaggagaaatattagactcataatactcttttcacaatgatgatacccacccccagagcagtgtactcccagaggagtaggaatagaataatgtttaaaataataattattaattgaaggaatacacaggcaaggggtacctctttgaccagtctcctacctacgccctaagatatctctttagaatgcaattttcccaagggtataaaaacatcatttaattattgttttaattagaatccttcactcaacccatctgagaccaggtagaccttttttcttaatgtgttttaaaggggaagtgtttttattgggatctgatttgcacat

SEQ ID NO: 54198 - DNA, 1104 bp, Bovine  19866881152399
  misc_feature (1)..(1): n is a, c, g, or t
ncttgaagatcatatcaggtgggtatctgtgtcagggctcagaacaaacaggtggaactccttgacaaaggttaaggcaggggtaacctttggtgaagtgtcagatgtcagcccacagtgccatgggagggagttgttgggagaatgaaaaccaggacctcgctctctgcctctgttcagtgtcctccaatgcttgctcagtgacaccccaggcggaagccagaggctgggagaagccacttctgtaatccatatggatcaggcccacagggacaagggtgcaaggggaagacgtggctgtcaacatgagagaggggcccccagatatgagtgctgcctgaagtaggagcatgtacccactgccaaaccacagcctggctgggagagaaccccagcttttctcttttttgactcccatttcttgccaaggcttatcatctgagcccaatgctaaaaggcagggaagctggggtgaggcagctttctggggcacagagcaggatggagaaggggagagtgaatccggatgaggacacaggaaatgtctttgctcatagcccatctgtgagcccatccctgaaaccaacctcagaagacacactgtggcagcttggaggtcactgggtcgttggtcagcagctgtatttaagtcagttacctttgtacatatggcatctttcactcgaccttgttacatgttggttttctctgagatcttaggaagaagcttgcatcaatttgctttgccttcttagtaaaaaacccagcatatttgcagagggctagtctcccctctttcatgcattggagaaggaaacggcaacccactccagtgttcttgcctggagaatcccagggacgggggagcctggtgggctgccgtctatggggttgcacagagtcggacatgactgaaacgacttagcagcagcagtctcccctctctggatgtctgtgttgtttgcaaattcttgaccttgagtggcggtggcatttgttatccctctgtctatgcctgggccctggggcatttgtgtccttcagatgccccttcctctgataaactttccgaaggttcagcattttccgtgtctcattaaaatt

SEQ ID NO: 54199 - DNA, 757 bp, Bovine  19866881169161
  misc_feature (1)..(1): n is a, c, g, or t
ncttatgtattgatagccttggttattttctgaagatgtcttattatataataatgaactcatattgatgataatccaacaacaaatttttatcaatacccagaactatacttgatgcttgaaggaaaaatggatgttttatagtttataaaactgagacagagataaaattgacttaccccaaatcccataatcagtgagaaacagaaagagaattaaaatgcatgcctcttgagtctcagggcctaacagtggtagacatccatagagatttcttaagcataaaaaaattgatgatatctgccagcaattattctgttgaagaagtatgttataaatttctatctgcacctcaaggttttctctgctagaatggctctaaaaattgtatgagctgtatcataaagtgtttgaaatatcacaaaaaaattgatgtttgaaaaaaatagatgtatatgaaaatataaagatcttttaaataatataatgtatactgggtttattttttgattaatgcatctgtgaaaatagtgaactttaactgtcttaatctttttaagttttctctcaaatgctgcacctattacactatcttattatccaggttattaaccagcacttgctgactaatccaaagaaactcagtttatcttacatgtctcaatattccaagctataaaaatatagggttaaactatataatctctgaaagcctcttctgcttcatgtaaatacaaacataaatgatcatgcttaa

SEQ ID NO: 54200 - DNA, 1867 bp, Bovine  19866881222134
  misc_feature (1)..(1): n is a, c, g, or t
naaagctgagtgctgaagaattgatgcttttgaactgtggtgtggggaagactcttggactgcaaggagataaaccagtccatcctaaaggaaatcagtcctgaatattcattggatggactgatgctgaagctgaagctctaatactttggttaccagatgcaaagaactgacccccttaaaaaagacccagatgctggcaaaaattgaaggcaggagaaggggacaacagagaatgagatggttgaatagcatcatcgacttgatggacttgaatttgaacaatttcttagagttctcctgtgggagaacatctgcaatatgattattattttccagttttggggttgcccacccagcaggtgtgtgatttgattttatcatgattgtgttctttatatcatctcattgtggcttatactttgtctttggatgcaaaatatcatttttggtaggttccagtcttctcttcttgatggttgttcagcattcagttgtgatattgtttgttgttgttgttttgagagggcatgagtcaatgtctttctactctgccattttgtcctgtttcctccctgttcctttataaatgaatgttctctacaaacatttcaatatatatatatagaagaacaaaaaaaagcctcttaacagttatgaaataaactagattaattttaaaactgagacattcaatttcaaggcattttattaagtcttgtgtaatttttatgtgatgagtggtgttttcaggtattactattgagttttggttgttctttggtggctaacatctctgctgttactgaacatgtttaattaaatgtgtgatctatactttcacacactagttaattaaatccatgtctgtagacataaggtgaattttccttttattttctctaaaactttgcagtccaaagtttttttatgccataatttttggggatacgtaattaattttgtactgttttaaaatatcctcatcaccaacagcatcttacaccctactgcaagacatgcagacagaaaataaaattataagttgaaatgtggccaatatacattaaaagttaagttctatagaagttacctcacttggaaaagtctaatgtcagaatatataccttaatatttcatatcttctataaaatattaaaaaatcacagttctctcctcttagggagaagaaaaagtttcaacaaaccaacatctataaaatatagtgatatatgaggggtacatatctcttagtaagtattaaaggaaaatatcaagaagtaatatatttattaccagactggaagtgctagttactgtttttatcagctatttctgaaaatttttcatagctttaaatgtttgctctggtgacactcaggtaattctttgttgtttcttccagtccaattcattttcactctttcttaccctaccagaacccttgtcttttcattctactattcttgtgattatgtttagaactaattgcatcagatagaaaataattttgaatcaatgaaatatgcctcaaactaaaataataataataataataaaagtagatgagagtctatttagcagcattccttgctaaaaagaaattcttagtgaaaactctaatttcaaaacttaatctataaagaaatagtaaattggacaataagtcatatttaactgagaatataaatggataattaagctaatgtgggaattctctattggtccagtgataaagtcagcattttgactgttgtgggcccagatttgatctcacaagctgcttggcccagcaaaaaaaaaaaaaaacctttgggtctgtaaccacaatccacaattaaaggaaagcaaatacaaattacaaatt

SEQ ID NO: 54201 - DNA, 1338 bp, Bovine  19866881260369
  misc_feature (1)..(1): n is a, c, g, or t
ntgggttggggtatgcaaggctgcttgatgctctgccagaaattctggcaggtagggcagaaacacaaagagccctggaaccatttgcctggtctctttatgtctgaactgtgctttcctttaagccctgtctggtgataaaaggaattaaatgttcttatcaagtttgggaaggctggcactgctggcttcaaagggtcacttttgattatgcagcagccttcagcttcaacaaggaaggggaagggaaaaagaggattttgtcagtacacagcattacaatactcattttcacaacacaaactgccttagttaaatatctctagcttgatttatgacgacagatcatagctcacagttccttgtggtctcacagtagcgtgcatgcaagaaaacacatccaaaacctaaattggttgcggcatgagtttcacagtcaacctgccaagaactcagcacttcactctttaccaaagtttgaacgagaaaaagcaggcatccaagacatgaaaaataagagtttgaaatggagattgggctggtaattaagagccctggactttggttgcagctcggagcctcagattaccctagtgtaaaagaaaagaattggattatgtgatcttcagggtctttttggctcctaaaattctttttctgactgtgctgttacataaccacactgtctgtcctctcaccccactaagtcattctcccccagcatctcctgattgttggactcaggactggatcattttagcatgacccttttgggtgcattaatttgccttctgtttatttttcctccctctctccaacaaagtagccaggcccttgtagtttcttgcctttggtatttccttttttccagggttaacatcagaagaagtttgaagtcaagagatattcttttatttctatagacataaactcactgagaggattactctgaaaatctccaaagagaggggatcaaagaaaataagttttagaaagatgcaggagagaggaaagaatgtttttcctagactgggaaagtgagacagaaatggtatttgacagcatgtttcctacatatgctttcctacaccttgaagacaagggtgtgacttgccacagcatatcttaggggcctggacagtcggaagcagtgttcccagacttggaatcacaccaccaggtatgccacttataccagcagaggttggctgtgactgaagtgaagactgaatgatgacaggggaaagagacaatgagtatcagttataatttcaagaaaagctgcagcagcagagtctgcagtgatcttactaaccttcctattataagttttcacag

SEQ ID NO: 54202 - DNA, 1612 bp, Bovine  19866881264862
  misc_feature (1)..(1): n is a, c, g, or t
nattgggtcacaaattccttaaaatatgattagtccaagattcagcatcacttcttctgttacccagatatttatattttggtcgtctatgtgcattctttactggcttccatgtgctttgcaagtagctactgtgctaacaggagtagatgagtttagagagagcaaaaaatatctctgattcctcatcaatttcaaagcaagaggttcattttttccctaactttgtgttttattaaccttttgtgggatgtgtgaaagagtagttaataaatgcttgaatatataatttcttctactgagagcttacttaacttcttcaaggaaaaaaacatcaggacatggtcctcatctttaaagctacactattttgcattttctctttttatctaatcccacctgactctcctataattaaattatagaacatgtgccattttatgtcatttattattctagactcagggaatatagtggtgaataagacaaaaatgccccctgatcttgtggaattttcatttctagtgacaagacctattaatagttaaatcaactgaatgaaaaaagaaagattttagacaacagtgaagtctgtgaatgaaataaaacaatgcaatattaaagagaacagctgagtccaacacagcataagtcaggacctgttgctaaagaattgtatttatttgggagctggaagaaaagaagtttctaactgcctacgggtggggagaaaaaaggtaaaggaagagatatatgcaaatatcttaatgcaaattttatggcagaaaaagcatgacacattaaggaatgcaaaatgtcaatatagctgtatcataaaggagcaagagagagttaagagttatgaaagatgaatttggacaactgaatcagaacttgcagtgttctgtagccaagctgactttgttttgtcctaagagcaagcacatcattgtaacaacgaaaacacaaatgttacatgctctgatttgcaattttaaatacaaaataggactaaataagcagaccatgtttttatcaagcttttattctatgtaattgctacatttcaaaacattaattagccattgtctttaaagtaagataatgagcattttataatgggttttggttatattattttcactaacacatataaaatacttttacacataagtatttttaaatacttggcttattttattttaaaccaagtatttaactttaaatacttggtttatttttttctgatttacagaacagtgtgcttaaattagaagattatgacaacaatgaaaatttaattgttgcttgtaaactgcttaaatattaaagatgtattgatttcttgtcctggaagtctcagtagagattcagactgatacaaatgctgtgtgaataatctctgtaagaagaaaattaaaaagtgtaagaggtagagaaaggggaaagtattacagcaatgaaaggaagggagtaagcattttgtgaagaaatccatcagataacattacagaattcagcaccggatattacttgctttagcctgctggagcattcctataagaaaaagaaatgcaagctttatttttagcctcacaattctaatgaaagg

SEQ ID NO: 54203 - DNA, 1485 bp, Bovine  19866881272146
  misc_feature (1)..(1): n is a, c, g, or t
ngaaaccctttaaggattgagtacaaatcgtcatctacaaacttgaccgggagtttggacctcatattctcttgtgcagtaaatccttgctaaataatcttctgtaaaaatgtcttacctttaagtgggataaagagagagtgtggtatagggagattaggaagaatcatgatttctttttaggagcttcctactctggttctctgcagcccagtagatgtgtgtcttattttccttgacttttgatttttgtccttaagttatcctcagcagtggactatttgtttccttacataagaaaggtttcctctggctatggtgtcccctgaaagcagacatctccatcaattctactaagtctgggagtgatttataatggtaaattttaaccctgtcccctggagctgaaagtttatagagccaaatatagagtaggcattatttccactctgtaacatccacgaagagcacatcataatagctgcaaaatgatgaggaaatgtgaacctctcctcaacagaaaagcctccaaagctagcatagaagtcacaaactaagagatttagctcctgtaacctacagataattgcccattcatttattgtctcatttattccctcattcatcagacaattactaaggcctcttatatgtccttttgtgtaatgtacagaggagttggttacaaaaaaaaaaaaaacacatattgcaaatcaaggcacttctggagctcaaacctgacttttttttttttttgtcctggcaagttacataaactagttcatgctttagtttctccatgtataaaaggaagaagtgaatgttatagcatacttttcttagtcggttaagtggtatcacacaacactagttaattcccttagctttttgacttatctttccttatgattctggaactgatgcagatatgaagatgtggtttctgtccccaaggaactgactgaaactgatgctcctcaaaactatggaaagcctttcaaatgagttaaatcagacatatttagcatagggacacaaaaattgttagcatacatatgagggaagtaaacatatctgtcttttgtctagttttggatttaaaggcttatcacaatttctgtcactttccagtgaagcacaattcctgtgcttttcagtaaatactgaatggataagagagcctcaaagaagaagaaatcaaggactaagtgatttcgaatgagggagaaatgatttcttacatataaggtattgaggtcaggcacttgagacacagattgtaaggttgggatttgtgtgcagaaatattattagagatggtttcaggattaacatgtacagtattcaaggaaacgaagcaggattgggcagagaggggaattgggctgtgtgatatattcaaaagactcataaatccactgggatctcagagactggagcaggtttttggagttttcctgagcaccctcactttgagcggatatg

SEQ ID NO: 54204 - DNA, 763 bp, Bovine  19866881337878
  misc_feature (1)..(1): n is a, c, g, or t
ntgagagaaagcttcatcaggaagagtgaactcatttcccaggagttgacattgatgcagagatgaaggatgagagctgttgtccagatgaaagtggatggggaagatggttccactcaaggggaatggtaggtgcaaaggccctggagcaggaagaacttgatactggaagacaataagaacagccagtggagctggagtatggagtggggaggcaagttggagaggtaagccacacacactcgagtagaacatagcattgggaattgttctaagggcaatgcgaagctttttttttttttaataagttttaaacagagtgtgtgtgtgagagagagataaaatccattagtaattgactacagggtattggttaggggacacttgaaaaagcagaaagaacaagaaagaaattagaatggggcagacctgttgcaataatatatatagaggagcaagcagttggcaaatatttcctgttaagggcctcatagtaaatatttcaggctttgagaggcaacagtctctgtctcaatccttcagctttgctattatagtgtgaaagcagccagataatatggaaatataagaaagactgagttccagtaaagttttatttccccaaaacaggtggtgggccagatttggctctcagcccaaatggtactagagctgtgccagggggcaggaacacaaaggatgggctaggaaaaaccgtggatgaaaaactgctaggctttgtgactacatgcagggactgaga

SEQ ID NO: 54205 - DNA, 842 bp, Bovine  19866881381442
  misc_feature (1)..(1): n is a, c, g, or t
ncagtgctcaagagccctaggtatgaaatttgggatgatgtgaatttcaagtgattatacatttagtcttttaaaaagcccactttagacaaatgggtaacatttagtggcctgttgcaatgttaaaaaaaatactgttttgaaaaagacaacccaagtcttaaagagacagatttgaaaaaactagctcacaaggttattatcaagctggttgcttagctattcattagaaggcaaaggaaatagctaaaaattggagaggacataatatttgcaagaacccaggtggcgctagtggtaaagaacccacctgctaatgcaggagacataagagatgcaggtttgatccctgggttgggcagaccccctggaggagggtatgggcaacccactgcagtattcttgcctggaaaataccatggacagaggagcccggtgggctacagtccatggggttgcaaagagtcagacatgactgaagcgagttagcacgcatgcagtgaaaaaaaggaatagtaaataaatgaaataaaaaaaaggggatactgataaaactgaatgaggcaatacctatcccttcaacctcaactagaattctgacacttgagcaacacaggtttgaattgctcaggtccacttttatagggatattttcacgagtaaatactgcagggctatgatctgccattggttgaatccgtgattgcagatctggtgtgtatagggccaactataagtttcatggcttttcaacttggccagatgtcagcacccatagcccccagcttgttcaggggtcacatgtatatatttcactccatttgggaagcaacccatggtgg

SEQ ID NO: 54206 - DNA, 1005 bp, Bovine  19866881401157
  misc_feature (1)..(1): n is a, c, g, or t
ntaaaattacccaatttatcttttctttctgagctaatataatttagtatcctgaataaaagctggcttttcaataaatagatcttctggtcagaactcagaaatgagtcaatgaggccattaaatgacccctaaaactcaaaaattgaccttttcaaatggcaacctactgatgtacaataaagatcacatttatctaattaagctaagaaaacataaaatttgcccaagtagttccacaaaacagagaggaaaagggaaggctccaacagaaaaaagttatttgttggtagattcaaggataaacattaaggtacatttctctagaaaagtttgtcactactatgaatatcactcaaaatgaccagccacacacctcagcagctccctgcagaggttaacaaaagcttggtttccttcaaagaatgtacattttgtttcttctccagccccagagggcatcacaaaataaagaacagatggtggagactaaaggaggagaccctgaaggtgaaggtttttgaagatgcactaatttaaacacctacctctgaaaaagacagtccccaggcctataaattaacctgaatgtgtgttttcataacatgcctatcatcacagctgagaccaagttcacaccctcagcgacaagaagaatcaagaaatggtgtcatctgggaccatctattctctggtccagaaacccagctcatgcatccaaatgttgcttctgttggcctctctgggttagatcatgggtgttcaaactttgtaaaaagtcacctttgttccacagaagcttaagcagaagtgtgaacaagccagttaaatgcagggctgccccagatgaagagcacatgtggtcatctgcagcgggtggcagagtctggctcctcccacctctgccagggctcagtggaacactttaaaaaccatctgagactgaatatacagcaacaagggctaaactgaggtcaaaacagtacatttggcccgtatatgaga

SEQ ID NO: 54207 - DNA, 1006 bp, Bovine  19866881439813
  misc_feature (1)..(1): n is a, c, g, or t
ntaaaatgggaggtttctgattgcctgctctggagaactactccaaggtacattttggaaatgtgccttcattatggaaagtggcagctagccttgctgatgaaaattctttagctttcactgtctttggcatatgctggtgcctgaaatcatgacttcttaatactccactagttcaatgcactctgcttctaatgttccctataagaagttagcaaatctaaagtgtgtaatagtatattctatcactgttttgctggtcatctttaagaaacacatagagaggatactttagttaggaaaaaaagaaaaatggtaaattatttccattctttaattttcctaatatgaaagtggaaaaaaaaaaaggaagattagacaggaaaatcaaaactgactgcctactgggttaggtattgtacttactgtttctctcatcctcatggcaactattaactccattttacaaataagatttatgagattccaaaagttctgaggatcaaatgagactatccaaggatgtgcattgtaggctacaaagcacatcacatatgaaaagtcctattcttttattttaggtatgattaaaaatctattaacagcaattaatggtgtatttatagttttctgatttctatcaattctaataccagtagccagaggacatgacttacactcttatttatttaacccatattcaatttgtcttacagcttagtaagaatcaatcatattatttagttaccttcaactatagcaaatataaaatacttatttaaccttgcctagttactcatcttcaaattataaaggcatgaaatgatcataaaaataactcatatattccaaagtattaatataggtctatctttattctaggcaatgccaaaaatgctcaaactactgcacaattgcactcatctcacacactagtaaagtaatgctcaaaattctccaagccaggcttcagcaatatgtgaactgtgaacttcctgatgttcaa

SEQ ID NO: 54208 - DNA, 1342 bp, Bovine  19866881465789
  misc_feature (1)..(1): n is a, c, g, or t
nccgcaaatagttactttacatctgtgatgcgtcaggcacagtgttgtgtgcactggccctgcagccacaaacaaaatacaggacagtctctgcctcgagggagttgaggtcttaacatgcctgagaacatcttagagggatattatcaatcagtcgttaataaatgaactgcagcattgtgagaacaaataaaataaacatgtatcaaaactaaaggtgaacataagtgtttaaagatctcttatccacaacagtctatatttcaccaatcatgaaaataaatggaaaattgtggaaacccgaaatttcgtgtggaggagggaggttagaggttactgtggaaacaatagaatcaaagtaaggttttgtgtttcatggttcttgaaccccacaactccaaaatcaaggctgtcattcaaaactgggtacatggattaggcttcaagcttaagccaatcactgcctcctcccaacccaaatttacactgtgggaaccctattctcaaggacagaaaaggcctgatagaaaaggtatctatcaagtatcccaaaggcaaaaggagctagatatgaaaactcagaaccaatggaatgtgtagtggtgactcctttttgtgtgtgtgtgtgcgctattgggaatttgggacatatagaaaatggtagagatagagatcagaaagtagactttgtccaaattagcttctcaattaagctgaaaagaaataagaaagtgcaaaacaagaaaatattaatttcctttatggttgtttttagctgtatagaagttttaaaatacagacagtaaaaatgtcatgctttgttttggatttcctcctctgcttttcatcttaaaaatgccttttgtcaacttgagaaaaaatatatatcacttatattttatttgtcattttattagatacattttcccacattatgtagcttaaatccataaagttattttatgacagtggattgctttttatttgtatataagtagattgcatttgagtctgttccatctttagtatctttttttcatgtctgtgtcatgtctgtgctatagggatatgctggcactgcactattttccattttactgaattgtcatgatttttccttatttatcaacttgagtagctcctttaaattcctctaaagtagcagtcttgaaaatgtaatcccacttcctttgtcctgcatttttctcagcttagcagaatgtcttgtgaagtggttttattgatgcctctagatctgtcctgcagagtgatggagttgatgggggttccagtcctcttcggcatctgcttcctggagcagctttatccatcacctgacagg

SEQ ID NO: 54209 - DNA, 1233 bp, Bovine  19866881672270
  misc_feature (1)..(1): n is a, c, g, or t
naacccattcctcattgcttttcttcttgatttaactgcttcatgcacacttaaggagctaccttaatctaatcaatcagtactctaaatcttgatgtaaaatagtgacagttaattcttaccaaaatggtcagtttccgctaacttggttctcagaggtattctgtaaacaagtatttaagtttaaaagtttataataccttgtagcaaggtataaaaccttttgacaactaaccctatcattgtttgtctataatgttaacatgtcacccagctcttacttttggagtttcatgttatattctacccagggattgtatggaatggattttggtggttttcttttctaaaccagtcttcagaaagagaaagttactgaattttcaaaataaagatcagtgtcacctgccctgataacctttggcaatcctgtccccacccctgggtggcagaaatcggcattccctgtttccagcaggtatcaaaaacaatagcaatttccttaagcacatcaatttctccttgcggatgggcagcctgtcgctataatcagatctgtcagctctttgcaaaagaattggaaagtggccttacttgtgtggaaatctaatagcgacctgtcactccctcttggcagcactgcccaggctgtcagtgtgatgtcctgtgtcctgcagttgcagagggctgggtccctccctgaagaaaagctgttgatttgagccactttgctcactcttgcagaatttatgatctgcccggtgtcttccctctcatgcttgacttttagaaaatgaatttgccaagtcctgggtgttttagtctgtcagtaactagtacagattctggcatcataattcactctataaaaactcattaatgaaaacaatccagttgttggtacactgtgattttcttgtacaatgaaaactggggtaccctgttgcagtgagttgttatcccatatctctctctacactctacttagaaattgtatcaaatgacagaagcaagattctttttaaaaaaattcaaagtatatcccagtcagtcactcttttaaacactagatgcccccaaaatcaaaaatttaattgatttttaagtttttactttttagctccattacacgttacacctcagtatattttggtaccctctcgcattttgtagaggtaagatatctgatttctagcttttaaaagaactgttcagtaagtaaatcaatccctg

SEQ ID NO: 54210 - DNA, 1129 bp, Bovine  19866880256832
  misc_feature (1)..(1): n is a, c, g, or t
ngaaatggcaacccactccagtgttcttgcctggagaatcccagggacaggggagcctggtgggctgccatctatggggtcgcacagagtcggacacgacggaagcgacttagcagcagcagcaccagtattactgttcagggagacatggctttgggaaagaacccgggtgttctccttacttgctgcaagtagtaataaatccttccttctggtcttcagcatggttgttttggctcaatacccatcaagaggtgaactctgaaaaaaaaaaaaaagaggtgaaccctgttctcaggtaacactaggggtgtacaacaagaacttgatgaatccctgctctgaacttctggccctgatagagctgactacttgatatttatcttccaaacccaaatcaggttatagcatgtaaccatattctcttggtggaggcactcatctgagcctcttttgattttgattttatatgtgtatgcacacacatacacaactatgctggctaatcttttcttcttttcccgaatccagtctggcttctcattcaattcagctgatgggagactctggtagaacagagggcaggaacaaagtgaggtcaggatatgtaagttctccctgagctcacctgctggatggtagggttacatttctccacggaaggccacggttccatctggctgccctcacagacggcttctagtctcccttgttttcttcaccttgaaatacctccctgaaaattccatacattaatttctttttgtttgagcataccatcactttcctgccttgttataccaggctttacttacaacattcgattacaaaaatattatatggggattactacggtatacgtattaccaacattaatattattttactatagaagatcaagggtacaatgtaatcaatctaagatatttcattggaatttattataaaagaatagctttatgtgattcttgaaacaatgggtaaaaatttgccttagtatgcatcagccaataaattaagtttaaacttttaaagtaaacagaagagagctaacatttattttaagtcctctgtgtactggagaatttatatatttttcattccagctgtatttttcactgtttgactc

SEQ ID NO: 54211 - DNA, 2935 bp, Bovine  19866880411498
  misc_feature (1)..(1): n is a, c, g, or t
ntttatttggtgctactagttagaaaaactgaagttgatatgtctgtcaaagctcaaaactattttcggtgcatttcacatcagaggcaggtggaaacacccactctctggaggaactgactcagaaaactggtgacagatgggatatgggtcaggaaaggagaagtgagtaagcaaaaggtgatctaaaatcttgagcctctagctgtgtattcactcaactatgcttacagagcccttttcttttctaccgactacaaaacagtaggaaagaaaacagctgaagtcagcctgctttcctacaacaatcagtcactgagcaatacaaggaggaaccatttaaggggatgcaatttcattctgcaaagtgttgggaggttccccttagtctataaactgtgtttaagggaattatctaaaagtaaattaaaagaacctgatcaaaatcttcaaagcacttttggagcttacgtagaaatgaagtgcaggtctggtaaccaagattcagtcacagatgagtcagatccagaaccattttagacaaatatctgtgtatcgtatctgctcaatcaggactctccccattttccaaacaaatcactgtgtagtatcatttaagatccacaattcagtttcatctcagtctacatatgaactttgacatgttaccactgtgttggaaagaggatgcaaacaagtagatttatcagaggttgagaaggaaaataagagctactgttgtggaaggaaaactattgccttgcctaactgctgacgtaatgtctaacgtgttaaggcaaagttaaggaacggatcagatctcaacattcaatctctgagcctcatggtttgagctttatattctgaacatagacttccacaatattatagttcaccatcatcatttcaggaaagaatacggggaaaaagagttgttgggagagttaattttcatcacaatctggttaatatttggtttctggcaaatcacataatgtatctaagatacatatgtcaagtaagtaccaatataatacactaaaatatttgcatgcataggcgcacacataagacttctaatattatcataaagcatgttgaacatgcaaagaaaaaataaacagccctatccctaaaatgttgtgtaatctaaagatacaattatactgtacctaggagaaagacagacactcagaaaatgggtattcaacaaatactataaaacaatagaaaaaaatccaatgaatacaactaattttctgggactgctgctgctggtccagcctttaggactcatccagtccaacatttcgcatgacatgctctgcatacaagttaaatcagctgctaagtcacttcagtcgtgtccaactctgtgcgaccccatagacagcagcccaccaggcttcccatccctgggattctccaggcaaaaacactggagtgggttgccatttccttctccaatgcatgaaagtgaaaagtgaaagtgaagtcgctcagtcgtgtctgactctagtgaccccatggactgcagcctaccaggctcctccgtccatgggattttccaggcaaaagtactggagtgaagtgccattgccttctctgtttctgagactaaaggtatctaaagggcaaatccacattatctctgtttctcattttatattcttctctaaaatgctattccttaaataaagtgtaaaaaatttgcattccaaaagtgtgaggtggataaaagtttgtcaccttaatctaagtgtacaagattatcacaggtacagacaattaataagcagattgccctacacccagagtccttggggacccgaaactagcagtaaagggatagttgagatttcaggtcagttacaaatagaattaggcagagaaaacttatacaccctgttctcattttctccatttttttttttgaaattgagaacatacttgagtcactttgaagtgatattattgacttgcataacattttttgtttttgctctgcaatgtgaatgtgcatttttcaaatattaagactttgatctgagttgctccaccagagcactctagaggctgaaaaccatttctatataagggtttgctatgcttagaggaagactactctagcttggaagaggttggaaatatcccatcagaaagctcttttcagtcctcctcagcctaaacactttactgagaagggtcaaagtcaccaactgctataacaaaacccaaattacccaatgcttccacaaggaagctaagctaagtggaaactcagaggtcaccagctggactccttaatgcagcaagggtcaaacagtaaaaatgcccttgaaaagcaacaggtacattctcctaaattctactgatttttacaagttgtccaataagtttaaaagactagcttcttaggtatcagtgtagaaattaaattcaactattcaaaaaggaggagggagtggtgacagtagtggtgtggtcagcccaaactttgaactctcaaagcaatcagtctgcaaactatgaagcgccagatggttttataaacctgaaggtccataaatctttccttacagtttctaattttttttaaagggtagttttctttgtggggttggggaaaatttttgccattgggtacctgaaccccaaaaccctaatagctttttaagttttcttgctctgtctgtaggagacaagtaggatagatgccaagagaacaagctcagagcacagtgtcatctggcagctttctggtggggagagaagactgagcttccatttctcaaccttgactgtctcactgtagtcatcacaacttaatgaagttctaagattttaaacattcatggactgagttcacagattcctccttcaattggaaacttagtataaatttctattttcaattacaactccaaatctccag

SEQ ID NO: 54212 - DNA, 728 bp, Bovine  19866880456118
  misc_feature (1)..(1): n is a, c, g, or t
natatactttgaaaatttccctaagaatactatagtatgcaccatttctcaaatgtatttgcccccagaatcctatttaaaggaaacctaccttgggactcaagtcctgtgaaacactctgagagtttatgacatctggtcctatgttgctacagtggaaataatgaaaatggctttatttttggcaactggaatgccctctcaggtgacactgctatccccaaatgagcaaatacttcttcccaataactatcacacacacaaacagttcttatatccctgatagttggctatctcaacacatggtttgaacttgaaggccatttgaatgaagagtctattagaatatgtataatcacatttgctaaacaaaataatacaccgtttaacaggctccttaaacctatactggattaacatatctaactaaaaattattgccttataatacctttgattaatagtataagatatgtttttaatcataacagatatgtttttaatcaaaattcagcatcaaaagtgacaagcacagaggatttttcgggtggcaaaatgaatctgtatgatactccaatggtagatacgtgtcattatacatttgtccaaacccactgaatgtacaatactaagagtgaaccctaatggactttgagcgataatgatatattaatgcgggtttatcagttataacaaatgtatacctcaggggtgggatgttgagagtgg

SEQ ID NO: 54213 - DNA, 1727 bp, Bovine  19866880457677
  misc_feature (1)..(1): n is a, c, g, or t
ntttggtgggggggtgaggggagggaataaggcctgccaagaaaaattagtggtggaacttgttcccctttcctttttccatggaatatttcaacactcaaacacaaatacagctcaatctttcctttaggttaactctgggactgcaaggaaggctctggctgcactgataccttagaaaaactgaaatacttcacgctgcaaaatcagtccctctgagttccttccctggaaccataaaaagaatcacagatgtgagaggggttattatttatatgctataggaaaaccctcctccagcacacatacaaatgagtcgacaaagttcagtcaaatcccctcacctagaacaaactggccaaaaatgtgcaaaagtgcagcatcagctgaaaataaaaaagttagactggcagaaaaacacttaaccaaaccaggccactaacagcttaagactcagtttgaaaaccatttactcttttgaagggtaagaccccttggaagtatacttgcaggatctcttaccttctttctcatctgaatcccaaaccaaacctaggggttcttaatcaggactgcaattagcatcacctggaaagccttcaaaccaacatggcgctgggaacctccccgttcgcgtccctccgctccctactcccagctcagttgaaaacggaaactcttgagttcagggcagggtgacccggtgtttcttaaaagcctgctaggtgagtccgctacacaagcagaagatgaaaaccacagctttagaaaagcatgtgttttgttttgtttttcaaaagaagctggtttctctaccaaatccactcaaagacattagagctctaatttcctctaatttcacccaggctgtcctgttgcaaaaagctctagtcattacttccaccgcctgctaccatgcacgcttcctaatgtggaagcaggctaaatctgaagctctccacagctagaggcgggagcacgcttggaaccgggcctaggaggccatgaaaccccagacgccatcttggtgattgaaaaggagatacaaactgttgggtgtaaaacactcaaggatgtatacacagggcagtgtcaatatgttgtaataactaaatggaaagttaacttttaaagagtgtattaatatttaataaaatgaaaacgaaaagcaaaacccctatttctctttacctgcataccacttctgacgccaaatatgcaggctttcccacaccaagcaattttccaattctcgacaggcacggagtggatgtcttgtactttaattcaattctgaccctaactgccccaaattaacacaagcctcacaggtttaggcctccggcctacaagactgctcgctccccattgcagacaccaatttcaagtccaggttgcagccagagcttctgatccaccaatgtaagtcggtgggggcggcgggagggaaggtgtcccacgaccccctccttcaggcttcacaatttactagaacggctcacacaactcaagaaaacagtttactcaccggactggtggtttatcatcaaggacacagcccaggtacaggcagccaaatggaacagagagaggtacagggcagagtgtgtgaagcttccacctgtgtccaggacgccaacctccctccaccacatactcaagggagccgctcaccaaacaccacccataggcttcttcaagggcgggtcttcttacgtaagcccgta

SEQ ID NO: 54214 - DNA, 2033 bp, Bovine  19866880467180
  misc_feature (1)..(1): n is a, c, g, or t
ntctcagtcacctatacttaacatctccagggttgtgtttctttccttttctttctctttcctgtctctctcgactcacactcaaccagttggtatgttgcaattcttccctctctaacatcccatagcattttcttttctcctctctctaggtcatcttgacctgaatatttataatagcttctcttccatcttctcctgattatgtccatttcaatttcaatctgtttattcatcaggaagactaatcatcctgaaggacaacttcccaaaacaatctgtaatttgtctaaatcatcgtatttgacccatagagttcatctaatcaaatatctcattttgcaggtgaagaaaatgtattgaccatatgtagttattaacagaactggcacaggaaccctatttttttgtcataccattaatattttttccttctataatcatacctgtacccactgaaattcttatgcagctgatggtgagtcttgctgaggagatatgaggagatatgacattgaaggcaaattaagaacacattacttcaagggaaaatgccaaggtaactgggttcccaaagagagaggagagagaaatagcatgttgtaaaccctttggagtcactaaggaaatgttactactgccaaggagaatttgagaatgattctaaattatattataaaacaatccatttgtttgaatatgtcttaatgagttatgtagataagggatgaaaagctagtgattttatttcttcttcaaattggtctttggtttatctgccattttggtctcttattcttttattaatgcaagtcttgcatatgtcacaaaaccttcatttaactttttcatttgacaactctacatcattagtacagtgaaagtcagagaattcttgtagattaaaaaaaaatagaaggttatctgtcagccacttgacagaagcaatattattattaccattataggtgatgtggcatttgaatgtcctctttttcactggccattttgtactcatatcttataaattaacttagtagaagaaaaataggatatttcttccagaaaggagtttcacttcatagagaaagacagaaaatgagtataagctataagtttcttttagtaactgcagaataacagctcgactttactttcaggagtacctgacaaaagggatcatgttcatttggataaatagaaaatcatggatgcagatgtgggcaacagctatgaaattgtgaaaatgttttcaagttcggtgtatatgaagtgttctcattctaggtcccattaagcgtatagaaacatgtattttatcatttaagaacattttttgaagataattctatgaaataactacatcttcccaacacttgtgtgcataagtgaagtttaaaaaattaaataaggttcatatgggtccatctaaagagaactttaatctcagatatccagacattttgctcttgttattttttttcaaggcatctcaagaagtacagtcctttgtcatggagggggcactggtttggggacctcagtggatacaagatccacaggtggtcacatccctgtgtaaaatgtcatcgaaatagaattggccctgcaaatctgcagagtctgcatccccagctatggagggccgattgaatttgttgcatgtgcttgtccagacctgtatcttatttttgtgcagaaactttaaaatttttgtttactttacacatgagcaagttaaatagttaaaacagccaatcaaattgcttggtgggctttgtagcttctaagcaactggttagtgaaatcattaataattttgacttttcaaataccttgattacccaaactatgatgattaaaagagtgaaaccacctttttttcttccaaggaacaagagtcttttaatttcatggctgccgtcaccatctgcagtgattttagagccccccaaaataaagtctgtcactgttttcatttttccctatctatttgccatgaagtgatgggaccagatgccagatcttagttt

SEQ ID NO: 54215 - DNA, 2274 bp, Bovine  19866880522051
  misc_feature (1)..(1): n is a, c, g, or t
naaatctctaaaaggcaagtggaactttagcagcccatgaaagatgaatttttgtcaccttggccctagagtggcttgaggtcagagaattaaagctatcataagttaataacagtttgtgtaaccttacccttaaggaaagtgaacatgactgtttagaattttgttttactgcatttaccagagtttgtgtgtgtgtgtatgtgtgtgtgtgcccttgaaaaccactgtcacttccccagtatgaactccctaaagttaggggtgagttttgtgttcattgtagaagagagggcaacgtatgttggaggattcattttccagccctcttcacatccctcctgatttctcttgaagtgataaacctttcggtatctaacttgactaattctatatccttgacatttaaactccccatcccactgtttctcaatctggggacgaaagatataactttacatacatgttaaaatcaaaagacttatgtgaaaatgcacattttaccacagagatatatccttttagaaaggacaaaacagaatgtgtaaaaatcaagaaaaaaaaaaatgaggaaaatgtattgagagtataacaggaactgaaaatcttacttactcatccttattctatatttcttagtatttagtgtgtaaattttgaaatcttgacttcagccagcaattttgaatgagaataaaatactctttgataatacatgagacacctaagtgaaagataatgctatattcaagaaactgcagagaaataaaggcaaatgttacaagaaatgactgctataattttatagttcctctaactcaaactagtctccagatctcaccatcattatctctctcatttcctttcagtctaattaatcaaaatccttcctagatgttcatttctggtcagtatgtcttcctgaatatgaataagaaatagaataccattcaatgtttgaaattatgggggtaatctcaatgacggaaatagatgactggcaaaagggaagggaatgcctgattaaatatattcatgaagatgtcaaagccttataaagccaacatctggggaagagaaagccataggacgagagcttcctggtgaagtgtgtttcttgaaatcatcaccaccatggacagcaaaggttcgtcgcagaaaggtatgtacagcagcttgtggagttgttgggttttatccatgttccaatgggggcattaatttgaaatttgaggaaatattctcttaggtttcaggattacagagtttagaagaactagctaatcctgctctagaaatcaattgtataggggcacaataggacagtggttcttgaatggaggactgtcttccagagacatttggttaatgtctggagatggttttggttgtcttaatatggggcaggggtgcaactggtgcccagggggtagagaacagagatattgctaagcatactacaatgcacaagttagcccccagaacaagtacttatccagctcagggtgccaatcatgtcaaagttgagaaaacttagactggaataagaccaaaaatgtctctgagtccaattcatcacaactccagaaggtagaaacaaacattttctagttaccaagattcttatgtggtgtggctaagatgagtcagtctgatgaaacttttaactctgaagctataatacagacagtgacagcagagtagtctcctacaatactttgttgactgggtttaatccaaatgatatcttagaagaaaacacaggctagtaacaataattgcctttacttgcttggttgacattcgctagaaaaagaaattgcagataactaatgagaacttactgtatagcaaggacaaatctactcagtgctctctggtgacctaactgggaaggaaatccaaaaaagagggtatatatgtatacatacagctaattcactttgctatacagcagaaactagcataatattctaaagcaagtatattccgataaaaattaatttaacaaaagaaattataaggcaaagacaattacaaaatttatcttatgaaacaacaaaaacatttcttttttatctcatcttaggctgtggaaaaaagtccttcagatgataaaggttcagataaatgtagtcagagttaaagaatatctatccagttatgaatttcctagaaccaatattccaatttctctatctgtaaagtactttatatttatacttgtagataaaacagttaatcagctgtgttacatgactggaaagtacctaa

SEQ ID NO: 54216 - DNA, 1115 bp, Bovine  19866880547024
  misc_feature (1)..(1): n is a, c, g, or t
nccctgtcctaactccccagaggacacctgctgaacattaaaccaagattgagtttcaaaaccaaaaaagttacaaaataagaagtcagatttttcaaagcacttgccaacaagcttctcagtgttctttcaaggttttcgtgaatggtgtcaagttttcccaaagatattcctatctgcttttgcctcccaagacatccgaggttgccaaccatccacatggtaggaaaaatctaactatgtgagacagtgtagagcggataaaacatatgtcaaaacatgaagcaaaaggtcactcttttagtcttaatatttacatgtatatatcagaattttcacattggtattattaactctgttagtaaagccacacaaaccagtgtatcagaagtgattaagccattcaccatatgagaagtacagagcaagacaatagagccttgtatggtacctggcacacacatatcactgaattaatcaatcagaagcctttgatatctgctaaacagtcatctcggagaaggcaatggcaccccactccagtactcttgcctggaaaatcccatggatggaggagcctggtaggctgcagtccatggggtcacgaagagtcggacacgaatgagcgacttcactttcacttttcacttttatgcactggagaaggaaatggcaacccactccagtgttcttgcctggagaatcccagggacggggagcctggtgggttgccatctacggaatcacacagagttggacatgactgaagtgacttagcagcagcagcagcaaacagtcgtctggggggatacgcacttttcctccttggcttctataagaatttgtagatagcttttatgcttaaagtactatttccataattgccctttgctaaagcaaactaaagatatctaattattctcaaatcacctagagataccaacttttaactttatgtataacctcccagagtatgacaacgcctagccacattcatggatacatataaacaaggtattttttttttaagtgagatcgcagaaaaatctacagcattctttgaatgcctcatttagtattttactgggatatgtctactataatgtatctgacca

SEQ ID NO: 54217 - DNA, 909 bp, Bovine  19866880566859
  misc_feature (1)..(1): n is a, c, g, or t
nacgagaaagtacacagactgactgaagagccacttctattgactcgctaagtggctgaaaagcaatcatggccacatgccctgcattttggttgacagggcgacataaacccaactaacaccagactgtgtgacctcaaacctgggatgggagccagaggtttcacctgagacccaagttatcagatgtgggagctgtctcatttgctttctcttttagcagaacaaaagggagcaaggaccgaaggaggcaagaagatagaacctgaagttgtccagactccattaccctaaattacctgatgatgaataaatattccttgttccatggtttcaatggaaggtgaactactactaaaaatatccgatgttcatcatgctttcaatctctttcttttctatcagaaagaattattcatgatttctgaccaaagggtatccctttagtataacctcagacaaaccctgtatccttctgctatctttataccctctttcactcccatcagtccttgtcaatccattaaccacgacagagcccagcaccctattataaacttccctcccagcatgcctcagtggaaaagccgaaattgcactgctttaaagcatcatcctgactcctgacggctgaacgatctgggggaaatgtcttcatccctctgggcctcattttctacacccataaaatgaagctgatcttctgcacccccgttaccacctaaaattctcacagtctttagcccacagttttcaagtcttcagcccatagttttcaagtgagcccagacacagaatcacaggaggctagacgtcacttttaccatgtgggtgaaaagagctctgtgaaaacatgttcttacgggcaggaaccacctggagaaaatattaaagacaactgaatactgt

SEQ ID NO: 54218 - DNA, 1543 bp, Bovine  19866880574356
  misc_feature (1)..(1): n is a, c, g, or t
naccagctggctaccacaggcttcagatgctaagcgtacaatggagatgaatgcaatcttatatttacgtgtttctgaattcccggatcagcctataattaaaaaaagaaatccttttgtaggaaagaggtggtcctaccagctctcaatgtagctggttagattcaggtgcggatgttgttcatgagatttgggatcacgatgtcgcatttcgagggcgtgtgccatgtggcagagcagagtcatgctccacatagagaaagcctgcatctaccttgccatctggagacgcgggtgccctcgaaacagcctctggtgaggttgggggaggcacctgaagcttgttttagattccgatgtgtgggctctggtgctccaagcccagctcaaaactgggggtgaggtgctttcccagttgtcatggggagctcttctgggacgcctgtctggcccttccactgtttgttactatttctacaaaggcggctctgtgtgttggattatgtttggccagctgttggcgcattcctgcgggtggggctgggtggagacctgattactgtacttggaaactgtagatctctgtgcggtggagagcagggagggaatgcaaagaaagcaggttggagaagctgatctctcttagagatttgctccaggtagttctacagcacgtgcagaaaggcttccagtgtagagaaggaaagaggggatgatgcggggcggggagcagtgagggaaggagaatgcaactgagcaagcccatcagagagaaaaacagactttagaacttcaaagctgcatagacaagcagaatgtcagcagcttgtaattagtggttcatggttgcgtcagcgcctgcacctctccaagaataactgtgtgatgtgtgccacagagtgaagaagacagtcataactaagttatcaaacctagttcaaaccagggcaaatggagtcaggaatttttctgtgtttgtaaatcaaatcctgatggattacacgtctaagacttgctgggttctgcataattgaaggctggattatccatttatgggggagggtggagggatattgtatgttcattaaacgaaactatgaacccttaaaaatgcagatgaatcgtgcatgtaaatatcagcgcgctctgcgtcaatacacggtatttcctccaatagccccaagcagctgttgccaatctccccgaatctctgcatccacacagagtttttatttgctcggtttttgtgcattcacgtggagaggagttaaaagttacagttcagatgaaatagggtcaattaaatgcgaaaaatcgcatcttggaattgggcaactgcagcggggttctgatttttgttgctgcccccgtgtaaagcttgccggagccttggcggtctcgcagccaaacagccgtctgttagtaagcccgtgggaagtcggggcaccgcagtggtggggaggcgaaggccacgttcacttccctcccttgtctctggcgcttagagattgccgtgtgtggactccagccccacaaagagccg

SEQ ID NO: 54219 - DNA, 1685 bp, Bovine  19866880594078
  misc_feature (1)..(1): n is a, c, g, or t
nacggaggaccctggtgggctgcagtccatggggtcgctagagctggacacgactgagcgacttcacttccacttttcactttcatgcattggagaaggaaatggcaacccactccagtgttcttgcctggagaatcccagggacgggggagcctggtgggctgccatctatggggtcgcacagattcggacacgactgaagtgacttagcagcagcggcatccaatattaattagggcttcacaggtaactcagtggtaaagaatccacctcccaatggccaatgcaggagatgcagtttctgtccctggtttgggaagatcccctggagtaggaaatggcaacctgctccagtattcttgcctggaaaattccacggacaggatcctgccaggctacagtccatgggactgcaaggagtccgacatgactgactcaacatttacaagcatccaatattgcgtgaaaagcgaaagtaacttcatcagtttgggggtttatgttttcctacttgtatgccccaaggggctcatttccagggagtgaggtgaggacagatgggaccattccacctacccagggccttgctgactcatcttgctgcggtcagagagttatagcaactaaatctttcctacgttaagtgagtcactgcttggccattcagtcctggtcagtttgagggtcctgcctgacctaaaggtctgttctctatgtgttaggaaaaaggcagggtcagctaagtagacactccaggtcatgctgacctgtgatcctaagatttgaacattggactttcaaaaaaaataatgatttcctgtctgatcttttcctagtatatattttcctccattcaaatttgccccagttcctttctgaaaacaactgctttcctgaacctcatgttggggtaagcctctttcacaagccatattcctctgtttggggcattgcacagcactctttgaaaatgctttccagtagtttgagagagtttaattagttggccagtacgattacagcccctcagtagattttgtgttgccttatgaaaatgtagtttcactatactgttgcaaggttgtgagtttatcacagtcccaaatgtttagatagaccctgaaaatatagtcagttaagccaagtgtgatgtatcttaatgacaacattgattcaatcattcagcttccatttcctttctctaggatgtgagtagatttttaaaaatttaacttggctgatttctggtcctctgaagacggtgtctgtgattaaacttcatcctccctttcccacatccaagtgtctacctcaaatttgttcctggtgagttacagcaagttcacagtctcagttagatttttccttcttgcatttctcaaaactgctttctcttctttctgcatatcttagggttttgtttgggcatgtatttaagagttttttagggttttgtcttaagctccttggattggaatctttaagttcaaatatcacccagaagctagcagccctgcctttccatgctggtctgtcagcagcatcacttaatgtagaggccagtctcatcttttccccagaaggatcactgaaatagcttgtaccagtgtgcatgctgagagaagcaccctgctggactttacctcctgagtgaattttcaggcttagaaaagccctccaaacat

SEQ ID NO: 54220 - DNA, 997 bp, Bovine  19866880613923
  misc_feature (1)..(1): n is a, c, g, or t
ntgtctcacactaaatatccgagctatctattctgttcctcagttacacgagcaatacccatctcctattttagaaaaaagtaaactattgtttaaagacagtaaacacggtctatgacctaagtgttttttgattatttcaaaaatctcccagagtacaaacaaaccaaaagaaaatagcaaggcacatacccacacattctgagaatactttaatttaaaaaaaaaagaaattccacttggacgcagagaaacttttgaccatttagggtcgcagtgaagcagacgagctcacctaaaagatgagctggaagcatccactcctggaaaaagccactccccctcaagactcacacctttctactttgcaaagtagaatttggactaaatgcagttatttctttaagatgacatcaagatttattttgcactttaattttcctctcatttcccctgattgcagtctaaatctgagtttaaaagaattatacaagcatctggcacatgatcgctggtaagcatgacagctttcattaaaaactgatgtttcaacctgtatttctaaagaatagattttaattgaaggcctttacaactaacaatcaagctaattgtattttgattctccttacatttctctggatcaaatactcacttggatatttttcactaagacatggatttgctaccttattttgaaacttggaggagaaaatggtgctaatgaaactcagaagaaagcaaccagggatgtcttgatgaaatgccatgtcctgtgtgattctatctcaaactcaggtaaagaaggaagcaatttttggattcaacctttcgtgagcctgtgataatccagagttgacaacacagaacacaagtatggacaggcggcttggtggtaaagaacccacctgtcaatgcaggagaaggaagggacctgggttcaatccctgggtcgggaagacacccggagaaggaaacagcaaggcaacccactcca

SEQ ID NO: 54221 - DNA, 796 bp, Bovine  19866880627859
  misc_feature (1)..(1): n is a, c, g, or t
ngcctgacctacttagagttattctctctggctggcagctgcacggagcatccagtcttctgataggctgaggctgttgctaggggggaattagcctgaatttttccacacacagactcagtgactgaatgataaaagctgactggaattaaagagatttggtttagtattatacagatggatcggccccgtttttctttctcaagtgcaaaggaagagtgcaaaatacagatttttgtgtccatcttgttccttgaccctctggttctcccccaccacagaaccgccagagcaaggcagttatgaaatttcggttaatctctttaaagtcgggggtcatggaaatgatgttgcaaatggcaagatatttaagcttaaagaccgctgagaatgactaacagaaggttagattatttttcctcttctgtgcactaaactgttttgaagttgggcatgcatctttcatgcactgtatatttaaactctctcccccttttgggcttgaacaaaacatttatataaattctcttctatccaaacagatagaagcttgcagtctctggcttgtttaaaataagatggtaaggattccagatttggatgggggagaaaaatatatataacatttttttttttttaattacaaagtatttttttctgggatattttgggtttggcttattttttaaaagccagcctggtgtttgttcttgtggataaaacttaactgctcccaccctaccctacttggcttcacaatgtacagaaagatacaggttttttttctccagaagat

SEQ ID NO: 54222 - DNA, 1241 bp, Bovine  19866880644090
  misc_feature (1)..(1): n is a, c, g, or t
ntataagtagtatttatatcattaataagacagtacagtactcaaggcaagtagaatatgtatgttgttcctgtttattttaactgaaaattgacttcgaaactgtgcgccatagtgtatttttgaccacttactacatgctgagtcttacttaaaattaatttatcactataattctcagttaaattgcattagttacattgcatatgtatttttttcattttcagaataacgagacaggaagatgtatgtgtacaattcctcttagggagaacactgcctttgggaaaattatttaatccatgctttgtgcagcctgggagttcttgtcttttccctccctggagcctaggagctgtctcacactaagatgtcagaacatgtgctaaactcttctgcataatcagaggagaaaagtgggcagttcttgagggaaatccagagtagaaaagtagggaatcagggtgttgggtgtgacatattatgaaaaaatgtatttgttttagtactgagtgaaaagacacagtggcctagaaagccactgaaaaatattttaaaacttagcaccagttgagtagaagaaaatagtttacatctgttgacagtggttattttaaatggtgggattagatgactattctttttataatttttgtgcatttgtatgttttcataataggcttatattatttttaaatctttcactgtaaaatgctgttaccaagctgcataaaatgtatgtgtgtgtggtgtctatgtaagtgtgttagtatgtatatgtgggtctgggagtttccatgtgtgtgtgtgtgtgtgtgtgactttcttatatttaccaaatacaagttatgtgacactgaaaaaagttatttaacttttctgtatctcagttttctctttcttaaaatggggataatactatttgtttacaatactacaataatactacttctttttaatatctttcacagaaatacatgaagactaaattagttaatgtttgaaaagacagaagatgctcaataaatattagctttcattattgccattattcttgttattgtatgggcagtttatagataggtatgtgtacacagacagacagactccaaataaattgaataaaacattaacatctgttaacactcactgatgggattatacgacattattttcctacttaatataacttttttatttccagaataaacatctattatttccacagttagaaaaaaata

SEQ ID NO: 54223 - DNA, 1473 bp, Bovine  19866880657482
  misc_feature (1)..(1): n is a, c, g, or t
nccctacctttgcttgcacaccccatggaccactggccagtaagtccaggcctcaggatgctcaccagctcttgcaccctgtgtcaaggctaattccattaccgagattagctgcatgtgaataacttatctgtgacaattaaaaaagccacagttggctttttttttctgttgccagcctgccactgtctgcagtcgttagttggcctgtgctgcgggaatataaaatttaaaatcattctaaactaaacttaattagggagagaagtttgttgccaacttgccaccctcatataatacaactaaaaccaaatggaaatgatttttggatgatccaaattagtttcctcttctgccaaataccacggagccccaagattagagagtaacacaaggcctcctaataggtaggttttggaaaggattctctccatcttaggaaagggcattgggaagaatgcccttttaggagcacttaaatatttatttttggatttttgataccagcatattggcttcttatttgttccttcattgttgagtgctcagattttcctctcttgcttttgatttttatcttggcaaatttttataactttgaaaataacagcacccattgcttagcatatgggacaggactcttgtttccctcttgtgtgtggtttcttttgttttgtttttaagaaagcaagtaaaactttttttttcttttctccctgttcttctaggcctcagtgacctaaggattagggggtcttaggtcagattcttttcttctttgcttcacacacaattgtctttcccttatattgggatccttgtgacttgaatggggattctgcgaggagcagcatgtatatgggttgtgtataaactacataagttttaagatgtggcaggaagaatctctatgctttggcctaggtgggggcatgtaagaaataagatgactttgcttacatagcccctaaataatgaggaccgcaattcctcttttccctttgaatctaattggtttcctttggaccggatttagtgatgaaaagggtcaggctacagtcactgtctttgcatgtttttggcatgtagaaaaggaggcttgtcagagccaaaccaaaagaagcttgtagacactgaatttgccctgagcagattattaatttctttttctccttgtacattattaaatctgttggaaagagacatcagctcaagagctgtcactctggctccaggccagcatgccaaattctgtcatcttctgcggcatggccaagcatctttattacatgttacaattctgggattgggctggatccagcagtcctgatacagcatcagatggttaggggtgtggaaaaggaaaagggttatattcatctcctggcgaggttttgcgagaagtgtcagagcagtatgcgtgttgcacttgtttagggcacagatttctttttttttttttttttccttcat

SEQ ID NO: 54224 - DNA, 750 bp, Bovine  19866880658532
  misc_feature (1)..(1): n is a, c, g, or t
ngtgttgctactgaagcaatctgaaaaatacagaaatgtgaaccatgataaagaaattggtaccagaaacaaggtgatgacttaacaatatgaggcactggccttggaaccaggtggtaggtggtgaggaaaatattatttgaagctgagaaaaataatgagccgtgttatacagtgatgtgacattgttttaaaatgtcctctgtgacagcatggaagtcagctaatatacttattgaacttgtggctttaggcaaagaggtcaagaagcaaaggttttgctagggagcatgggttgttattatcagccatctttgacaaggttttatgagaagaaagtggcttagtagaattgattgaaagcagataaaatccaggaatgaggatatataaagagaatccagaaacttcagttctagcgggctagaaagatggagctatttttttcaactacaaccagtgaaagaaaatactgaagtatctgagcaaaaaactgtgactagatctcaaggtgaagacccaatcttgagtattgttgtcaccttgggagttaaacactattggcagtttaagattgtccacagaaaaccttttaatttggaaaataaactgctcagattaccgagaatgcgtgtgtgtggctcacccatgaagccagtaaactcaaaatagatctacaaagacgggtatctcaaaaagaactgtgggtacaggtgtatgcacagggagctgtttagaaggtaataaaag

SEQ ID NO: 54225 - DNA, 2050 bp, Bovine  19866880715661
  misc_feature (1)..(1): n is a, c, g, or t
nttttcagacctctgtggatcccatctatttctttttcaccatgctgatctggtgggggcggctctttgagacctaatttgcttaagtagccacacaatacaggtatttctttcctggggtcttaccaccttcccaggacaataggctataagtcatctttcctcttacatcttccaagaactcatatctaggcagcgatttctctgaagttcacagagtttaaacatccttgctactgcccctctttctctgtggagaaacatgtctggtttgaaagtaaaatagcctgtttttccctattgactatagtctcaagactattgcttatttcttgagatatttcatttttccctgaggactagccttttcaaaacaagagttgactccctttattttttttcatcttctgctgggttattctttctcaaaagcaacaaattaaaaaatgctttaacttaataaatggggcaaagatcaaggacgacaagctaatatttcaaatactgtccaactataagtaaaagtatggtttaagttacagtggtcgggttacaggtacatgaaacaccacttcactcattacttccaatgctcttgattttcggaatagtagacagggagtcttcctgggcgtgttactattgcttcctgggctatttatctgatatcagacttactgtgttagtttattaccagctgactattgggccccagcggaatgacagtcatggatattaactagcaagcagaagtctcatgtttccaagttctgattctgtcactaattaatctgaaatgctgcatttagtagttgccttctttatgtctcatttaaaagtatgtaatgaagaatgggttgatttctaagagttatgtttcagttttattaatttttggctgcacttggtcttcagtgctgcatgtgggctttgtctagttgcagtgagtgggggctgccatctaatgtgtgggcttctcattgtgggggtttctcttgtggaggatggtcttcattgcttcatggcaagtggaatcttcctgggccagggatcgaacccatgtgttgtgcgttattggcagatgaattctttaccagtggaccacgaaggaagccctcagttttattctgattcaaatatataccaccttgggggagtctgggatacaaggaaagatgaagggaagacctggagcctgaacatatagggaatgcaggttactggaggatgtcccaggagtttgaatcccaatgcgcggaagagttaggagtttaaatgggatgctgcctggtaaataaacattccctactgagtatttttcttaaagctgtaacaggtccacatggttaactgccactcagttgaaatgtttgactcagtttacatttctgatttaaaagcctgtgctgtagcaactgtccttttgctattgtcagtccatattataaagcgcccacataggttattgaaaaatccatacaaaatctctggtcccagagatttgtgtttataattagatggccctttttattttcacagatcggtttaatagaaattacttaaacattttaaaatgacggccttaaaatgtgggagtgggaaggacgaggacacttgacctccctccgtaaaactgaattgctctttgtgtttgcagttttgacagagggagagagaacatccttatttggtcatggtacccattaagagagcagcatagttattacatttcagcttcctccttcacattcctgccttagggatttgcgaacagagtgctgggagacttctagagttaagaggctgagacaggtagtttggagcaccttttaaggggctctccataatgtgtataggctgagtggtgaagcttaattaacttcaattaaatgcaaaacataccgaacagctcctgtgtgtctggcactgtgctgtgcgctgaagtggcataaaggcaaaataagagtcattgactcctagagatgggaaaaaaatcttagagcagttcttgcccaacacgagtgccttcttttaatttgatcattgtcgg

SEQ ID NO: 54226 - DNA, 789 bp, Bovine  19866880750943
  misc_feature (1)..(1): n is a, c, g, or t
nctccttttaagaatactaaaaagcagttttgtgatatagtaaatgtttaaaaccaaggaaagcctttaaaatgtgagcatttatttttttcattgaaatctaaaataccaaatagatgcaaacacatacacacttaacccaatttcccccccaaggaaaacactaagaaaaatatgtgtagttttacataaaaatgtttgctacaagggaaatctttaagctaaaaaaaaaaggcaagataaaagcaatttattattatgctgcccaacattactatacgagattactacagtgatgaaagatgttgtcataatacatgcagccaagtaagctgaattcaagtattgttgggagttttccatcccttcttctaatgcacagtcctgtcagtctgaagcctcaggggatgtacagaatgtaattaccaaggttcatgataaggaatgaaccaagccaataggcagagaccaattctaaaatgccagccagtcttcaatgtctttcctgaaatgtgtcttctgcacaccactcttcattttacaatgaagaaaacactgctatgtctgtgttctaccttctggtggaattttctatcaggtttaatgttgacatggaaactaatttattgcagggagttgacaggtgtaacgattccagtccagtgaagatcttacacaggtgcctcgaatatgagttttgctgaatacatctcaggcctgcgctggacagtcccaaacctgaattcagcctgggacaggtatggcatgtaagagtagggctcagtgctt

SEQ ID NO: 54227 - DNA, 962 bp, Bovine  19866880849803
  misc_feature (1)..(1): n is a, c, g, or t
ntcgaaatctaatacttcagtgattctttatttttccttcttagagaaaccctctgctcttgcttctgatcctttctttggctgaacttctgctgtatcacccgcctattttttaattcaacctatattctatcagacggtattcccagcttccttttatcaccatggtgacaccatacgcttatgcctttattaaaaatttatcttaaatagatcttctaggaactagtcttttaggcagtgacagtttttcagtttcaaatccaccataatgtccagatactgggaatttgtgtgcaaatattattccactattactataaagggaaataaagcaaaatgtttaaaattagatagctactattcctgctggatgcttatgcatggaaaaagacattttatatgcattccattcttactttccaagtgcacttggcacacagtctttttaaagaagaactttatgtaaccttgaattagcttatatgatcatctacatttggtcaatttttaacttttaaacttaatgtcaactttccagaaatatgtcctatgagaaaaatcagaaatgctgatgaagattaacaagcatataaacagcttaaaattacttctatatccagtaatgagagaagaaataataatataataatttatactttgatatagtatgaactggtatggtacagtatcatattattgctatactacaaattgctcaactgtagtaatgactgaataataagcatttcctaagaaagatattgcaaataatttttagtaatgaagaaaggattataatgcagtaattgagaatatactaaatttatttgtgacactgcttttgtctttatagctatgtctatacctctttagttaattaaacatctttagttatatgtctatttataaaattgaaaaaatggcaaatactaataatggctatacctagttgatgagtt

SEQ ID NO: 54228 - DNA, 1462 bp, Bovine  19866880872615
  misc_feature (1)..(1): n is a, c, g, or t
ncttttcatgtgcttatttgtctgcatgtcttccttggtgaaatagcttttaagatctttggcccgttttttcttcgtgttgttttcttactgttgagttttaagtgttgtctgtgtatattttaaatactagacctttatcagataaatattttcccccagtctgtgccttgtcctcatgcttgtgacattttcttcgatagaacagaggtttttaactttaatgacatccagcttatcaattggcaccccactccagtactcttgcctggattatcccatggacagaggagcctggtggactgcagtccatggggtcgtgaagagttggacacgactgagcgacttcactttcacttttcactttcaggcattggagaaggaaatggcaacccactccagtgttcttgcctggagaatcccagggatgggggagcctggtgggctgccgtctatggggtcgcacagagtcggacatgactgaagtgacttggcagcagcagcaggttatcagttctttctttcatggattgtgccttttgtgttatatctaaaaagtcattttcatacccaaggtcatctacgttttctcctgtggttaacttctgtggtgagttatatggttttgtgcttgacatttaggtcttccatgatccattttgagttaatttttgtgatgagtgtaaggtctgtgtctgggttaattttttttttttttccatgtggatgccagttccagcaccatttgttgaaaatacagtccttgttgcattgtgtcccttttgttcctttgcaaagaccagcatttgtaggtatttatgtgggtctgtgtctagactccgttccattcatgtgttttctgttctttcactggtatccccctgtcttgattactgcagctctatggtaagtctggacatcatgtagcaatgatctgcttttaataatctgtttatttggattaaaacatttctaactggattatctccataaaaggtagccagatcttgttgccagaagaagttctggtgtgaatagtgtgctttgcagacatggggagataggtctcgttgcgtttaagcagctgtggactatgtcctttgctgtagtctgtataaatagcattggctgccgtactttaaccttgtgccaggacatatattctaaagagctctaattgtattaattccattgtgccacagatttcaaccgattctatctttggtgagtggacttggtcagaagcagccaccgactcaaactaatttagtataaaatcctaacacagagagtcttatgttacagaaccacttgcttcagttcattttgtagtctcgagattgtcctacagaaattcaccctcgaggtccgcagagagttcagcagactgtctggtggctgtctgtccaagttccttgaggcaaagaaaggagacaacggatcctgttcttcgacagcttta

SEQ ID NO: 54229 - DNA, 1647 bp, Bovine  19866880938365
  misc_feature (1)..(1): n is a, c, g, or t
naactaaaacgggtttcctcgaagatgggaagagggtatacaaatagacatatgaatctgccatttcacattccagttgatcctttagtgtccttgacaaatggggcttgttctaatgcatttatacaatacttaccatggaaatataaataaagaatgcagttctagcttactcagagtatatgcgatttaaaaacagttttaatttttaacactgatgtgttgttgtgttgttcagttggtaagtcatgtctcactgtttgtgaccccctgatcggcagcacagctggcttccctgtccttcactatctcccacactgttttaagaattaccacaccgtgacaaagagaaataaggtgagcaaatgctgctggaaagatggttccaatagacttgcttggagaggtctgccacaaaccttcaatttgtaaaaaatgaaatatctgcaaagtacaaaatgaagcacaataaaatgagatatgcttgcatcttccatattgaactggattaaactttttcaaatggtaagaatgtttagagatttgttaaaaatctcttaaacatagcatcaagggttgagatcaggaaatatggcggaatgaggtggataagacagcagtgagatgtgttccatgcatgtcggtgtcaggtggtcaatttgttgtcaccaaactcctcctaaatcttaaatttgtgttacctgtcatcatttatttgagtggtctggaaagaaggagaagtaatatagtattaagtgtcttaatcatactgggtaatgttaatcacatttcatgtattttattctaatacatataattctaatagtcttatgggggtagaaatgtggagacatggagaaagaagatacttggtcttctttgtgtataaaagtaaaatactcttttttgcaaagctcatttgtggcactagagaggtcgtttcctacctgtaggtttgtgatggattgaaggcagaattctaataactttttcagcacgtgttgacacctgtagtcttttctttcccaaggtgtgtggggggtgggctctagttttgtgcagaattgctatgaagatgccctctgtcataataggtgccagatgcacagctagtgctcagtaactaatggataatgatagggtatattcacaccttggaaatgaggtggtgaattttttgaattttctgatagagttcagcacaatgagaatccccacggaggtacatggggtgagaatctgtcccagggatagcaggtgatgacaggggactctgtttcaatatgttttggacggaaaatcacagctttggtctgccgaagctggtgagttgtcatcacttaaacaccagtggtgttacagacttgtgggatatgtcattctaaaaggatttagaaagccagagagtgactcttatcccacatgacactggcatcccctggcattgaaaattaaatgtatgaagtgagaacttctccaaaaacagtaacacaaacgtaactatgagggcagtaagaaagtggtgctgttttccaagttgaggctagaaagaaagaggtttgatctcatttatagaaattcaaattactatacaaagtatagacagaccatgtttgggatgaacttaatcctatttaaatttttaaa

SEQ ID NO: 54230 - DNA, 1842 bp, Bovine  19866880959322
  misc_feature (1)..(1): n is a, c, g, or t
ngctgctccctccactgagtgacttgagagagccgaacagctttcccgttttgactctgcatctcaatctgagacatctgtcatcactaaaaggacttttccctcttctgccaaaagagaagagaggaaaatggagatggcacattagcttttaaatgcttcagctcagaggtgacactcatatttccactcatcatgtcatcagataaaaccagtcatatgccccactgcctgtaccaagtgtaaggtaacacatggaatatttagtgagcacttctggctgccacaaggtaaatattttatttctcatgattgtcaaggagacaacacttgagagagatgatgatgaaccatgtgctgacctcgtcaaaaaatgaaagaactgactcataaggcagtcaatgactgaaggtcatttagaggtcagtgactgaaaccagagaatgggcagtagagatggctggcgtgaaaggccaaggatctgagggctcctatgctagaaatgaccttccctctatactacactctgcctgaaatttgtgtacatgatgtcaaatacctggataaggaattaaatattcaatcacctagatctttcctaaggttgtaaatttcaagctattcaggaatggactgttgatggatctgattaatacagagctaaccatatttcctatgtgaattctcaggttttaaagaatgaaaatgtgggaacgataaaattctactgaacataatttatcctttccttgatgatttagaaggcacctttagctcctgtagtaacttagggacatgcctgtgaacatcaattataattgaactgcggatgtgcgaggctataactcacgtgagctctctgcatgctgggagcacaagcagggcagcaggaagactgatgacagcaggggatggaagggcctagagctggggaaactaaccaggaggcatgacttgcccccaggggtaaaaccagcagttgaaataataaagttcaaggagatgaaggactctgagtttcaatcaaggctgatacatacatccaggatgtactgcccagatgctgggaacataagaccacaaagtctctgtacgagcaaagcaggcagatcgtatgtctccaatctagtaggttaattgggtagaagcagatgtggagtctccaactctcgggatttccaagacatggtccatcaagctgaggctttcaaagataagccactaatcactgtaaggtccagagcagagctctggttccagcaggaaattgaaaggcaaaccaggaaaccagaaagtgaggcagaggctgaagaagtggggaggagggcctcaacttagtgagcatcacagatatgaggcttaagtgagcatgttgattttagaacacagtcgcctggggataagaggaggctcctattcggctatattctttaaaaggtcacatgaagacataaagggaatttaaatgcatattactaagtggaagaaatcaatctgaaatggctaaatactatacgattccaactcagtgagattctggaaaaggcagaactatggagacagtacgaagattagtaattgcttgggtttgagagggtggaaagcgatttacagaccagtgaaaataccctacatgataccataataaggtatatgttccataatacactggtccaaacctataaaatgcacactatcaagagtgaaccctaatgtaaactgtgaactttgagtgataatgatgtacaggttcaccaagtgtgggggacgttaataacagaggacgctgggcatatgtgggggcagggggtatatggagaatctctgtgtcttccaagtttt

SEQ ID NO: 54231 - DNA, 1601 bp, Bovine  19866880989661
  misc_feature (1)..(1): n is a, c, g, or t
ncctgagcttcccatagtccaatcttaggaagcagctttgttcatgttataagttttgaccactttccttttatgtcttttgagttgtatgccacacatagaaatgttttcccttttccaggattcgatttttagaaataatgcaggttttcttctagtacttttatggtttactttttttaatgtcagtacttggcacctgtgctccaattgagctgtggagaaatcctatcacagctagctaatttgctgaaaatagcttgaagacttttaccatatattaaatctggaaacaagaatttgcagactacagagataataattaggttttagagcaagaataggctgtgaagatcatctagtcagatgttctcattttcaaggtggggaaagggaaatgaatgtaaagaattccagcatagtaaaatattttacctagggtcctgcagggtcaggtgccaacaggaagatctctttccatgctcatgaggttgcttcttactgcattcattcctccactttgccagcatttaatgagcaaatcatgatctgggcatcacatgattttagttggccacatttattgatcatcttgttcaatttaagaggataaaatgtactccaggtttttaaagctttttggaggggaggcttgggaacctagtacatctcaagtgtcaaactgcacatatttcacttcttgctcagattcagaatattgttaccggttattatgaagtctaggtttagttataaaaatacctgttaatgtgaaacaaatctgattttatttagcacttgtaagaaggtcgagaagaggagaggaaagagttgctgctgctgctgctaagtcacttcagtcgtgtccgactctatgcgaccccatagatggcagcccaccaggctcccctctccctgggattctgcaggcaagaacactggagtgggttgccattgccttctccaatgcatgaaagtgaaaagtgaaagtgaagtcactcagtcgtgtccaaaacttaggaaccccatggactgcagcctaccaggctctgcctccatgggattttccaggcaagagtactggggttgtttgccattgccttctccgagtaaagagtcgagaatccattaactgccttcagcaatataacagtatcctaaataagcagaatgttgctcccctgtgtcattctgtagtcttactggaccaccaagtcagccaaaggatgctttcagaggggactgagatttagtgagatggaaattgcagaactcagttttctattacacagacattctctagtctcatcaattaatatggtgcattttcaagaaacccatgaaaagactagatctgtttctttgggggaatacacttgctttgtagagactgaggattcatggagccatttctctgaaatattgtccttgggacccagtatttaaactcacaaacctgcatgcagataattcttaataatggttattgttttaaagaaaccatattgaccaccagacaccacagtgctccttcccctcccccacaaataaatacctttacctttctcactccctagtagcatctcaggctgtttaaaaaa

SEQ ID NO: 54232 - DNA, 2089 bp, Bovine  19866880992123
  misc_feature (1)..(1): n is a, c, g, or t
ntacgtttctttagacataacgctattgcacacttaacaaactagagtatagtaaacataactttatatacaccaggaaaccaaaaaactcgtgtgactggctttctggcaatactcactttatggcagtggtcaggacccaaaactgcagcatctccaagagctgcctatagataaacaagatttactttcatgtagatgctctgagaaaaacacaaatggagattagagataaaggctgactgagatgaggaatcagtttcaaaagtcttcagggatggcccttctacagaggtcacgtttgcacatgcaactgaaagatcaaacagaaggagtcaaatgaagatctgagagaggagccatccagacagagggactgtgaggaggccagaacaaggctgacacagtcaaggacccacaagggcctggtatggttagagtacagagtgaggaacagtaggaaacggcacagaaaaggcagatgggaatcagatcatgtcaggcttttaaaaccatgatgagtggcttgggtttttttttttaattaattaatttattctaattggagaatgattacttcacaacattgtgatggtttttgccatacatcaacatgaattagccacatgtacacatgtgtttttgttttaactgaagtgaaaacacatttgtagggctttaagcaagacaaacgcaatgcgtacactttgagaagatcactctggtgtgcaatatagaagcctgcttccatactgagaaaatttggaaatgaaatacctttgaatcatcaacagactgactttccaatgaacaaaacattctctaaaatgctttataacagcacccagctcagtgctctctcctctacatttttcaggctgtttatttctaggaattttatgattgatagcattaccttcacattcatagaaatctaaggaagatcagaaataaaggacagtcttatcccaaggttgtctaaagagaaactgagttataaagaaatagcatataggacgtccctgctggtccagtggttgagaccccatgcttccactacaggggacacaggtttgatccctgtttggggaactaagataccaaaggctgcgcaggccagccaaaagtttttcaaaaaaagaaatagtatatgactcaacatcatcactacacaatatgaaaaatccctcaggttgccagaatttgtaaccacgtttatggcttgccttcctcacagttctgcatatctctaactaagtgagtgaaaagacgttttaggtatgatttctaggttttgtgaagattatcatccctaaactcagagatcgtttcctctgttaactctgatccctaaaaataaggttgtcaaaaaaaaaaaaaaaaataaggttgtcagctcactaattacagctcactaatctttgttctcaattcatctgaaaataggaaatgtttcttatcatctttgtgagacatgaagtcacaaatatcttagtttcccctataaaacaaatgttcgaagcatgttagaacatcatctcccagttggctatcacttgaggtcactctcaggtgaaataccagtgactagaaatgggtcaaggataagtccaatttcattcacatctgaaagctttcatctgatagaacagccagtgctcctctcattgccaaacagatccctccaaagaaagttattagtcaaaagggcaaactagaatcccagtggtgatacttcttgtgccatgagtactagattaagtgaggtaaataatagatggtctgttcactggggagttgattccagcccttctcaagatgcagatggaaattttaacccactcacatccgatctcagtctggagccatctttcttttcctccaaagaatagagactgaatttcaggctagttaaatcatttcccagctatcctgttgtaacctgataaggtaggggttcccagaagaaagagacccaggaatggctttcttgagagaggagaaaccgtttttggcctaagtcattttgtgatctaaacctggccacaatgcttgcccttaaacaggtctcagtaattaatgatctaag

SEQ ID NO: 54233 - DNA, 697 bp, Bovine  19866880992366
  misc_feature (1)..(1): n is a, c, g, or t
ngttttgtttccctccagctgctgcttttcttccctcacattctgggactagccctagtctgaggctgagctggatctgggctaaacataatggagaaccggtggaaataaaagtcctttcatgggggcacagccctgtttttcagatggtgtgaagcagatctgtagtttattattaataatagcacatgcgtgacaccacatcttcaaaggacggctcgaacattaattcttttgtgatgtgaaaagagcagcagtagcgtctctttcaaatgaatctcctactcttctggagaggggcgagaaaacctagtttcggctagagatgaatggatcgccaccctggaggtctgggatctgggtccaattgaggagcactttgaaaaaaaatcaggagttttatctgaactatatagcatgttccaaattctacaccctttcaaactcacatggaagtctttcgaagagaagctggggtatcttttgttccaggaataaaacaaactgaataaaagagagaagaataaacgtgtgttttctacacggatgaaatttgatctgaggtccccaggaagaaagagagaattattctcaccactttagcaaagcacacccttcagtttctattaataaatgatttttttttttttttggtcaaagtcaccatcttcttttaaaaagtgacagtattccattt

SEQ ID NO: 54234 - DNA, 1959 bp, Bovine  19866881035551
  misc_feature (1)..(1): n is a, c, g, or t
ngtcagagtgggggctggcgtgaaaccacagatgaacttgagaacaaaaatttaacttagccttgagtctgaataaccaaaaggttaccccagatggtgagatctgcctgagacactattaaaaatgggaaagaggtttaaataataaccattggtggctcttatgtgagcaaagccatttcctgttaattgcccagtgagatggtaacactcaataaatccagttttgtaaactttccctctctatgttgttatgatatcaaatactcactggaatatccaaatccatcctaggagtgttggtgtgaagtgattagcttccaggagtttcattgttaagcttgtagccctgcttcatactctgtatggtgtgcagtatatatgatgactcttggtcaagatgtttacttaagtgaattatttgtgatcattcagtggtctctttgtgattagaaatgtcttcatttcaagaatttggggttctgttgtcaatagcatgtaggggcagacccttgagacatacggcggatagatactagacaaaatcacagagaaatatacagaattattgcattggaggcgcctctgtgctccttatttgcttaagaagactgtaagcattatatgatagcatgtcaacatagctcataaaggaagaagtggatacaacaagcccttcttaatgttccccagaaagtcagtgagtgaactgagaagtggatccaggatttcatgtatcagcaccataggtcttatcatttatataatcctttttttccccccgttactgtcaagattttagagagggattatgggttgagttagagagcaggcaattgaggcatactacacaaagttgttaaatctcagaggcttgagatttcttggctccttttaagttttggaagcacagcactcctagagaatctattaggaactggcttcatggagaaaatgtagctcttggacagttcgcttttgaagctgagggagaggataataggttgctgaacgtgaagaggggatttgcttctggtttaggaaacagagggtgcgaaggggtgatggtcctgggcggactcaggctgtaatagtgcttcaggagggccgagtgctgctccacatcaacttcaattttccattgaggtcattttctgagttgcgacaaagcctggggaccctcttatggggtgtctatctctttgtgccctgattgctagggctgccaactgcccatttccttcgagtctgaagggaattaattccaatcagattgtgcagatttaaggcttgggaagaaggaaaaaaaataatctgcaggtcttgtgtctagggtagaggttcctaacctccaggatctaatacctgatgaggtgaagtgcagctgatgtaataataatagaaataaagtgcacagtaagagtgatgtgcttgaatcatccctgaaccaccgcccctgccgccccacgcaccagtccatggaaaaattgttttccacccaagtggtccttggtgctgtaaaggttggagactgctgatctggtggatacgtgggaatgagttacacaaagatgcgaacgactcaggtgtgaggggagagaggaaagaaagagccccccacctgtgctctcctgagtgggaagtttcctctaggctttggcagaatgagacatgtgcgagagtggagggaagaccggggcattctcctggggagggcgttcccgaactgtcttcacccagcagatgaaaggattccatggaagagttccccctcagtggccccaccccaggctctgtgctgactgctttttactgcttcacaggcattgagtcaccttgttaagtgtcatccctagtgtggagatggagttattccttgcccccaagctactgggaacctattcaggaaagacacaggtccctgcaccacaaacgcagaggcttgctgtcgctcaattt

SEQ ID NO: 54235 - DNA, 1451 bp, Bovine  19866881041039
  misc_feature (1)..(1): n is a, c, g, or t
nggaaaggctacccactccagtgttctggcctggagaattccaaaggggccacaaagagtcggacacgactgagcgactttcacttttcagcagggaagcccagtccatactaatttcataccctgacacccattctagggaagagatgttctatttcctaacttttcaaagggccaactgagtttgctttcctgcttgtttttctaagtgggcctgatttcttctcaaagcccttttcaccagaacaacccacccagtgtggctgcccagaggcatgttagcttcaggtgtcggtgccgcggcttttcctgttcagcctctggggctgctcgtttcctcccctgcaccctgggtcccaggtagtgcgcgctcatttagctttactgcctgttagaggcaggggcaggtgggaattaccacacgtttttttgcctctggttctttcttctactggagagcaggtattaaagaggagggggggcaagcagagagccgtgccgacaggagggagggagtggaggccaagcagggttgtgggggtctggcgggtggttggttgcctgttaatgtagcccggatgttaagaaacaactaggagaaggtaaataaaagcagacttcctctgggtccctacaaaacccctttcctgcttaccgctgccttaggccgtaggtctgctttcctgcctgggttctataaattactagcagttatcacctcaggtatagatggaatgaaaaacaagtttctgtagtaggtctgtctggaaacctaatgactgtttgatgttgtttctatgagaaagctatattctgagttcccaataaattaccaacattccttaggaatatgaaccacgtgcacgttagtaaacgtatcttttgtttctgagtctcttcaagtttgtacttcattttagaatcgagagttgtgatggatctgaaggtaacaggagggccgagagcatattcttccccagcattaaatctcttttgctacttcctcgtactgcttaggtctcccatgttttcctttcggtgactatctttcagaggatcatgttttggtcttgggataattctgctttcagcatacaacatatagctggggacttgcgtgaaactacccagagctgtctcatttagaatattttttccccttggctgacttcactaaattttgttaatgcaaggggagctagcttcatggctgcagatctggtatcgattatcattaattcttccctttatgactttgccacttaaatacacatttagaaacaaaccaaataaacataaaatagcataactaaaattttgacttgggtggtccagttagtttcaacatgtgcttagctttgaaaggtggttataaaaacactagagtttaaccaaaccattaaatgatggcaataggtttttttttctttttaagtttattttacaaggta

SEQ ID NO: 54236 - DNA, 1066 bp, Bovine  19866881115408
  misc_feature (1)..(1): n is a, c, g, or t
ntgtaccttcttagtttgttttgaggcatttttttccccaacattggttaaatagctatcattttaacatttgcattcctcccacctccccccacccaagggaggatagtactattgtaattatactacattcttctgaggttctataatgagctattattttgctaatggaatattcaagtagtctgtagtaatttatcaaatagtcccaagtcccattttctcagtgtgaatctttttgttcacaggtaaattgatgtgtggggggttatcaaggcttttttgtaattcaaattatccattccacctctcttcacacacacacacacagacacacaatatatacaatcttagaagagtttttagaaatgtttagaattaaaattgtacagactttttgcaagtagaaatttctgcattttaattttcttttttatttttgcattttgatccctaattttgaaaatgcacctaaaataaaggaggaagggaaaatgtaattcagtttttttcatgctacaggctgttcttttgtcagcttgaaccactagcaggagagcactgttctaaattagacactaagaaacaggaaaccatctcagcccaagctcttctattttcctccacttttaaaagacatgaatttaaactggtgtggttcttattgaaatggacacccccttttggcacagaaatgttaaaggtatattattatatctttaattaaaagtgttgcgcatatattaatgaagagctcctgagcagaaaactatgcaaaaaaaaaaaaaaaaaaaaacacattgggagacttgtttaaaactatttaaacaaacaacaaacaaatgcaaattacctatacaattaactaagccactaactgtaaggttccaattcctgtcatgatggtaaaatgcttgttctgctggctgtttcctcaaatcaaccttaaagtttattttgtaatattgtcctgacaggaaaacatctttgagaagctaactaacagaaggccctgaggatgaaggatgtctagaatcgctgctgtgtgataggacagggagttgca

SEQ ID NO: 54237 - DNA, 1765 bp, Bovine  19866881148278
  misc_feature (1)..(1): n is a, c, g, or t
ngcaaggatgctggagtgggcagccattcccttctccaggagaccatcccgacccagggatcgaacccaggtctcccgcgttacagacagattccatactatttaagccaccagggaaaccggacataagtaataggcagtatcaaatcagaggactttttggatggcaaagggtcttgaaaccaggccccataggaatagctgaagggcagcagcaaaacgagctgggagctgagattaaggacaaacgtaatagcggttttcaaatatcagaaaagttttgttacagaagagttgatttgttatagatcaactgggggtgcagaattgggcaaggtggatggaggaaccagtgaacagagaagaaatcagctcaaagaggagttttctcacaattaaaaggtctgacagggcactgtttcagagcagtgactccctcagcccttaaagtgtgaaggaaaagttagatgtctgtatggccagctgtgtggaaggagagggtggcagggtcagactaaatgggctccaaggtgcttctccattctgatagcttgatcactggggggtatatttcggaaacccaggtaagtttcaagtatgggtgcagagaactgtaggggtgaacaaacacgtcaggggaagcagggggagacctggaaagttctctctcgtgtgtggtgaggagtggcaaaagcatcagattgaaggttgagaactttacacattctaataggcaatagggaatgtcttacttcctgttctggggcaggatatgataaaaccagtgtttgaaagctttgctctaatctgtgttcaaaggatatagaggagagacagagagagaccaagagagagagaccgagagagagagattcagagagagagattcattccaggcaggggtactacttaggaacttcctggttatcagaaaagttcatcttacctttattatggtgggtggcaatggaaacaaagaaaagggggccaaaatcagaatttaatggaagggctaacatgggtctccttgaaaatggcttggaaattggattcttcaaattatgacttgaaagatatatgactgattttttaggtcagccaaccacaattgggtatttatatttcatctaccattcccactgaccagtgacttgaggcaactcataaaaattcctgttattcttattccttggtagtatcaccccaataagaaagagtgtttatagagtagtccgagtcctagatgtaaggtgtcatgttctattcatatcgtgccatactaattcttattattggggttactgttctcagttatgacaatgatataattttatatttcttatcttagggatatttttgtcttccggcagtattctgaaagtgagccttcctgtaggatgttctttgaaagactggcaaatctttcatatttgtttgaatgttggtccatcaggagaaagtgaaacatatgtaatattcaagatgatcacacatattccctcctttatttaatatctctaatatctaattggaaatcctctggtctcatctatttacatgaagctataatgattcagatgggtgctttcctggggtactgattttttttttttcctgtgggattctctgaacagggctttcctgaaaagaatacattaagactgtcagaatgattcttttcagcaggctaagctttgcagatgtcctttgttgagggaaaaacgcattattctgaaagtccttctgatcttcaggaaaactgaaa

SEQ ID NO: 54238 - DNA, 1686 bp, Bovine  19866881159381
  misc_feature (1)..(1): n is a, c, g, or t
nacaaacctgggccccctgcattgggaacgcggaatattagccgctggaccaccagggaagtccccatgctgtattattttcttctctcattatttatttagttggctttgcatttgctggtaagtttagccctcatcgatagggctggagagagatcccttgatccagagcacaggcaggaactctgataacagtacttcctgccctagaagaggaaccactgcgaccccgttgcagccaggctcacagttggcctcctaaccggctgccagtagcctccacggagcagaccctcgtcttgaaggaagtgagctggagccatcatcctacttaaactagggcagagagcccaccatttgtcttccctttcagagccagcaatttttccctgtaataaatgacttcattttgccgctggagttacagaggttaaatttacagctaagtgcaatcctttactcgttacagcgccttccagagaatttgctcatttattagcaaaaataccacttggagtcagcaataaaggtgcggatgtgctcatagaaaattactaagagtccgatgtggaaaaagtataaattatgacaccaaaagtacttccacttttttcctcctaaatttaaaataaagtcctaagacatttaaggggttttggtgtctccaggcccagtttcttcccaagaattaatgcttgattttctaatcttcttgtaggagacctgcctatccacactaaccttatcctctgtggctttgagcttcacgaatcccatccctgtacccccagcctaggttgttcttccttgaccaaacatgtgtaagtccagctgctcactggaggttttcaccctcaagtcccacatatgcctctcatttgacatagcttaagctaattttaccaattatttctcaaaaatcagaaactcttccccacaatccttcttactagcattactattgtttaactaatcataatggataattagatgtcaacatagctaaacgttgcccagataactggcaaaccataccaaagtatgtctgttagggtgtttctggaggagatgggcatttgaatggatacatcagtaaaaacataaagatcaccttcacccatgggggtgggcatcatcccatcccctgagggcctgagtggaacgagggggcgcaggaagggtgaatttgctctctctaaagcagagacttcatattctcttgcccccagccatcagcactactggttctcagaactttggatttagactgaattacatggtgggctttctcggttctttagcttggagtctgcagatggcaggacttctcagttgactcacaagactatactctgtaaatactcagggctctccagagaaacagccaataggatatacacatatacacacgtaaagagaacaaaaacacgggggttcctctgtgctttacccctctcccctcagtcctcaattaaatgcctaaatgcccaaaaacaatggttgattttgtttccttgtcatctccaacatccttcccctcctgcctcatagtgaaaagtgaaagtgttagtcactcagttgggtccgactctttgcgaccccatggcctgtagcctaccaggctcctctgtctatggaattctccaggcaagaatactggagtgggtgccattctcttttccaggg

SEQ ID NO: 54239 - DNA, 1367 bp, Bovine  19866881193977
  misc_feature (1)..(1): n is a, c, g, or t
nagggggcaaaaatagtaactttccgagctgccatttgcacccttaaatccagttaattatctccatgtattttgcatctcaaattagagtaagaataccacacaagggtgatccatcacaaataaagaactccaaacccagcagaacctggggtctatttgattgttgctgctcagtcgctcagttgtgtctgactctttgggaccccatgggctgcaggatgccaggcttccctgtccttctgttatctcccagagtttgctcaaactcatgtccattgagtcaatgaagccatctaaccatctcatcctctgtcaccagtttctcagccttcaacggagttcctggagaattccatggccagaggacactggtgggctacagtccatggcgtcccaaagactcggacacgactcagcacgcacaagccttatcaataaaatccactgcacaaaagctgccaacaaggtaagcgataccatgaagttagcaaggcaaagccatactcctagagaagttctaaccggggaaatccacaagggaatcctcatcaccagtgggcaatcctcctcacccacggtctcagaagatatcaaacaagtatttttaaaatggaactaagtccagctgaaaactatggcctagattttcaaaactatatggagtcagaattaccaccactccaagggttccaatccggttccgcttagggctgcgcgcctttgcacgtgcgccgctggctccacccccgcagtccccgcctccgagaggaaatggctccagacaagcagggtcatgaggagagcatcccgaggctgcagcagcaagaaccaccctggggtggtgatgccgtcgtccctcgaggcgcccagttctcagaccacaggagttgccatttacgacgtgtggcagaaacaggctgggagggccagaggaacgtgatgagttaattcagcggcggcagtaaaattcgcatcggcacccgcatgatgtagtcctgtgactccggcaaatctcgagataatgagggaagcagtgtggcgtgcaggaaaggcagtgggctgaatccgaagacctagatttttgtgccgactctgccggctgatctcaagggaaggggcaaatcgcgccctctctgggactcaatttcctcatctgtaaaataaagagcagatgtgctcttctaactcagaattctaacccacaaggaaactgatttggaaacacacgtcctcccgtgtctggcgtcctcctgcgtctagcgcaaggagcctccgggacattttggccagcacattcacgggcttgggataagactgaagacagtggtatgagaaaggcacctgctgaagcactcttatgaccc

SEQ ID NO: 54240 - DNA, 1303 bp, Bovine  19866881195397
  misc_feature (1)..(1): n is a, c, g, or t
ntctgtatatttccatttggcctataaaactcgattgactggtttccaactatgtgactttgagtaagtcacttaactgcttgagctttagtctcatttgtgacaggaaatatgtgctagttggttcccaggcgctctcacttctgaaatgttaggactctgcaattctgtgaatttaaaagttgacattaaaaagaatcatatgaagcagaaggtatactattgactccactgtagaagggaagagatggcaagttgtggactaatcaataaaggtctaaaaatagcatataatcctgagccttctttaaaaagtcagtcttatttattgccctgtttattgaactatgcatatggttgagaaaatagatgggacatctggaaaaagtattaaaacatatttgtaggcaaggactatgcctcagcaccttaaatatgttgtgttacaacagtgtatgctgatgttgtcattaaatgcaatgctagccacgtgagtcagccccatttagaatcattttggatttggccaaatggtattttggtggtttctggattgtgggttagaaatcagaactcctggagtgagtctcttgtttctacacacatataacaccccaggacagagagaagtccttttccttttaattttccacatctttttgtggttgtctttgctttccctcctgtgatccatttctggcatgacagtaagagtttctttggggtaattagtagtcctaagttatttccattaaggattcttggggattagatgtaaaagcattgtagaaagactggttatatagagaagaaacatagcaactttttttttttttttttaaaggtattctcaagatcagacatgggttgttgttgcaatctggttccagcaagcacagcaagcctggggcaagccattttgatatgtcacggaggcagcctttgggcaaacgctgatgacacatgaaggaaggctgttcacagtgtttcatttaggttcctttgatcactcttaactggtttttaatattacaccaacatcatatcagaaaccaaagcatttcttagtcctctcactctggaaatcgtttcccccacttttctgaacctagaatgaaagatggatgtttggttggtatctcgtgtatgccactctttcttaaacactacagtggtaaagacttacaagtgttccttttcatttgttttgaagtgatgagagagggcagagatggtatcttgttagtgtcccagggccccagtcaaggcttggagtagagtggggacttcctgtaattggctt

SEQ ID NO: 54241 - DNA, 1038 bp, Bovine  19866881272151
  misc_feature (1)..(1): n is a, c, g, or t
nggaacagaagtgagtgcattggttcctaaagtcttagaaatacagcagggttcaggtcagttgctcagttgtgtctgactctctgcaacgccatgcactacagcagaccaggcttccctgtgtttcctcaaaacataaagactgtaagtatatattttctgcacagcatcacatcagtacttccttccaaggatttcatagttatctattcttcccatgatctcccaaaagaaaaccaaagctcccctacttttaatttccaacaattaccaacacagagaatcgggagatagcaggatgcaactgttcatactccatttgctggcccgtatctgaatgggctttaagtgattaacatttcgctaaaagggtctttctatgtgtatgttttgcctaaaataaaccttggggcttccttaattgtttaattatgagtttctttaggttctagtaaaaattagtgattgctcagtatcactccaactactactgtgtttctgctgaaaaaaatgtgaaaagcaaaatttcacaggatattttcacaataaggaaatgtaaagagattcccttagtaaaaacacaaaaacaagttttattctgccttgcattctgaaaatacagtatgttaaatggaccagtgatcactcttgcaaaacaattttggcattcctcatttttcacaactagaaacctaaaccaaagagcctctgtggcacgaactttgattgttatggtcctggaaaagaaaaacagatgaagaaaaggcatctctgtaacagaacaagggaaaaacacataaacccataatagctgaagaaggaaaaatacagcaaacccaggagcatccagcccatatctacagaccatcttttgttaagactgctgtctacctctgctaacgagaggggtagacagagtctaatgtcagagactcaaacacatttgaaaagaaaacgggggcagaaaagatcacttctataaggcaccagccaaatgccgatttttatgtagggtttctttcaaaatactcaatcaca

SEQ ID NO: 54242 - DNA, 1465 bp, Bovine  19866881274862
  misc_feature (1)..(1): n is a, c, g, or t
natgatttttagtgatgaatcctataacaagctccttgagttttacagctttttaatgcatgcttgagtgtaaagggtcttgtcttaaaaaataaaaagaccatgtaaaatatcatgtaggaaacgagttgccagtccaggtttgatgcacgatgctggatgcttggggctggtgcactgggacggcccagagggatggtatggggagggaggagggaggagggtttgggatggggaacaccatgtatacctgtggcggattcattttgatatttggcaaaactaatacaattatgtaaagtttaaaaataaaataaaattagaaaaaaaagaccatatctaagaaggcaatttgttaaagtttcttgttttcatttattagaaaagcaaaagaaaatccatccctacatttgagagaatgaagttccgattaaaatttgtcaaaaatagcagaagctatcattacacagaagaccattaaaagcttactttagaattatagcaaattattctgggtcaagttattagaatcaatgaattagataattattcattgagctggttatgctaacaaaaagaatgaattctcattctttatgaaagccagccatgtactgtcagccaactttcatggtgttattataccagacaatataagtgctgtgcaccttcctacccaaatagcatgaggtttactgaaatatctagagatcattatacttctgtcttagtcctgctggggtgctaaaataaaatatcacagacttattaacaatggaaatggatttccacaacagcatcaggcagggcccccttgcagtcacacacttcttactgtagcctcacgtcgggatacggctacagagctctttgtgtctcttacatttgtaagtaggattgatttcctttaggatggacttgttggatctccttgcagtccaaggggctctcaagagtcttctccaacaccacagttcaaagcatcagttcttcagtgctaagccttctttatggtccaactctcacatccatatatgactactggaaaaaccatagctttgactagatagaactttgttggcaaagtactgtctctgctttatagtatactgtctaggttgatcatagtatttcttccaaggagcaagtgtttttaaattcatggtggtgtggcggattcatttttatatttggcaaaactaatacaattatgtaaagtttaaaaataaaataaaattaaaaaaataaaaataaaaaataaattcatggtggcagtcaccatctgcagtgattttggagcccagaaaaatagtctctcattgtttttccattgtgtccccatctatttgccatgaagtgatgggaccagatgccatgatcttagttttctgaatggttgagttttaatctagttttttcactctcctctttcactttcatcaagaggctctttagttgctctttg

SEQ ID NO: 54243 - DNA, 573 bp, Bovine  19866881303634
  misc_feature (1)..(1): n is a, c, g, or t
ntcacatgttccgtgcctgcaaatgaacatgaaaataccatcccagccacgaagcagacaagtccaaacacagtgacagcagcccctgggttcaaatagatctgcgctgcaccccatctacaaaccggcaaaatttccagaaaggtagatcacaaaagcaaaaagtacctgcaggaaccactcatcccctaacctttcttgtccctctttccccttcaactttgatgatttggcagttctggaacccttccgagagaagtcaagactcactctgccagccccagctgttcaaagctcagctcaatctgttccatacagttggctgtattatcacaataatgtggctacagttcaccttcatttgctgcaaagatcattaactatccctcagagagatccagtattcaagacagagcgtgcccgaggcataataaacggaggtctctgggtaacacagttcaaaagaaggtaagacgatgccagccaggccacctgacagttcctgcagtcagagaaaagggaagaaaacaagggcaggaaggatgaagagaaaaaggaaatgcaagaacgtgc

SEQ ID NO: 54244 - DNA, 1456 bp, Bovine  19866881317520
  misc_feature (1)..(1): n is a, c, g, or t
ntattaaaagttcactgataagggttcagattcctatgggaagtaccaattgttgagttttggtgtagtataagggaaagaataatccaagattattagaaaaggctattgttatttctccacattcctgctatatttacatattctaaccagaaggtcagtctcaacagattgaatgcagcacataggagacttcagctctcttctgttaatgcagggatgaaaaatttcacaacactgtaaaacaatggcactacattttgaagggaaaatctaattattgcttttaaaagtctctcacgtatgtaaatatgtttttaggttatttttaatgaattaataaatattaaagacttgttctaatttgcaacatggtaagtgtttttctctgtaatttttaataaaagagtctggatattaactgacttaagaactggtctaaaggaatgtataagtaaattcacctccaggaagttcaagtgtggggttacattccttgagatccaagatctgttcctacttctcagtttgaagtggtttcaggaagtttaggtagtctccttcacagttaggggccccccatcctgggtggagtgacaaaggatgaagacaaatagcctgaatggtaatttagtcaatagagtccatctttaatctccaggctcctgtgtccaaagtcatgaaatcctccaggaccatggaagagtttcaaactattgctgcggaagacgaagcgttgtacaagggctgcatgacatgtattcttggagatacagcttgcaactccgcatgcgtaaaagggaatcacagctgcttatctgaaacgtcttcatcatccatttggaaatgaaggattccgcctgctctacttccatcaccacaggaagccacacccagctgacttctcagtccagacttgttctcaaggtcacctatgtaattttttttttccccctgaagcctcagtgttcttcgtcttctcggagataatagccctaagcccttcagtcatcatttccttgtcctcaattttcttcctggcttcctgcaattttaatcccaagcccctgcaattccttgccttggaggtttaagtggccccatttacaaccgattttcagctaatatttgatgcattcttttcaaataaaccaaactgtcctcctctgcaggcttggtgcttttgcacctaataaaatcagagggttgatagtgggcttttaaactgatgtggtttctcttctgtgacttttacagaaaaatagatctttcaaagtaggaaatagacctgttcctgatgggttaatttcagaatctcgtgctgtcattaatcaagggaaagaaatcgctctttcatctgccctttgctccagttcttacaaaggagagggaatgagagtggggtagatgagtaaagaaatcatagactctttttctgggggctctttccttctaa

SEQ ID NO: 54245 - DNA, 794 bp, Bovine  19866881318577
  misc_feature (1)..(1): n is a, c, g, or t
nctgcatggttttgtgagctaaatttttaggaatgaggggggaaacacacaaaataattcgacatgctccacaatattccaaataagaactaaagtgaaaaatttctgaccaactctagcaattaaagaatatttaatccactataattttcaataggatctaggggaaaaagtcactggtatatgatttcattatcatcacaaatcaaagaacatagtaccatggtttgaaatagcagggtttttttttttcaaatagaaagttataatagctactgaataaataatcagtatttggaaaaatattttaactaatcttttcccctcctttctcaaaagctaaattgtttgctatttctgagactaataccattgtacttgttggataatttacagtaaacacacatcctcttaatcacatcacagaaacttaaatagatttgtaaaaccattaaaaaatcaatacttagcttttaggtgatgaattaattaatggagtgtgaatgcttgaagtctgcattacccagcatgcactatggcctttcataatatcactgtcaatgggaacagtatgcaaagtaatataatgtaactagtggggaagtgctgataaaaatatatcaatctctgctacccaatgagaatattccagtaaaaacttccttttggtaagaaatgcaattcaatatttttctgttatgtataatgatggaagaaagaagcattgttgacaaatgaaatccagagaaaaaatagtcagaaatgtcccaactctttttattatcaggcaatag

SEQ ID NO: 54246 - DNA, 984 bp, Bovine  19866881321182
  misc_feature (1)..(1): n is a, c, g, or t
naatatattacatgaaaaatgtattttaattcctcaccagtgttttaaagtttttagaaaaatgtgtctttaaaagtacatgtagcattttcatcatatggaagcatttctagcaacacaacctcaaaaccataaacatggtgcttttggagctttcagtgactctgcagaaaaatcaaagatatgaaaagagaaataaggtagcttttgatggatttaaaattttatataacatgtacgcaaaataaaagatgaaaacttagatctagataacatctaaacaccccaggcccatatccagtgataaccactgcttcctttaaaggttaattaaattataaacgcatacctgcagaatatttgtgtgtttaaaaaattcattaaaagtggaatataccttcctatttggccaattcctttatgaatatatttgcatttaataatagcagcccacctttagagcttttttgctcattttctctgcctttatcctaagcagccagatttctaaggttaagaccaaaggctttgtgaaaatgtcacgtttgtcctcatcaaaaaaaacccaaaaaaacaaactgcaaagtcttttcttgaagtttacatcactgtcattccaagcataggaaatttcatcatcccaaatataaatcaaaaatatttttataatgttatgaaagaatttatatatattcttcattttggctgacacattttagcacaggtcacaaaaaatgacaatcaaactgttttactttcattacaaacacaaattacaagtgtacatcttaagccttattttttagaaatggttatgtcagaccaaactccaacattcaggatgaaaaaatatgcttattctttggaccacgttgtttgtgattcttaagaaatagacttatgaataaatcattgaacacaaaagaggaattttgaattatactgtcgatccatttctggcttactgagtctgtagcctcactg

SEQ ID NO: 54247 - DNA, 1309 bp, Bovine  19866881327413
  misc_feature (1)..(1): n is a, c, g, or t
ntcagtgaagctggcaaacattcattctctttgaaaagtcttctcccaggcaaggaacctttaagctgagtccaaaaggatacatgagattcaaccaagcaaaactgtggggaaagaggaaaggcaatccccaggcagagggcctggcagtgcaaaggtcctgtggtagaaaagatgaccaagaaatcatgaataagatgggaagaacttgatgaaataaagcacacaagtgagcagagggcagtgcataacgcatggcagaactggtcacgggttccctgcatatcagaaaaaatttccctattaggccaaaataaaagcaggcataagcaacaaacgttcaaagttttaccctgagaattttcagaataaggctaattactaccccacctacagaatgggctctgaaacatgtaaagatagtgatcatctttttcacatatcttttattttccacactgaaaccatcccagcttctttaactaagtaatatcccagccatgacaatctagaggtgaaagcaatggatctgaactgaggaaacaggtttgggccttgatgctagacttactacatgcatgatcttaagaaatcactgacattatctggaaagttgcccacatttataaaatgtaaaagaatctactgcccttcagatctcatagaattattctgaggattagatgaaccaagaaatgcgggagctccgtacaacactaggtatcgatgcgtgtgtgctaagtcacttcagtcatgtttgactctttgcaccactgtggactttagcccaccaggctcctccgaccaggagattccccaggaaagaatactggagtgggtttaggtatcgttagaagagagtaactgtaatgaccataccagtgttcattctttctatagcatggtcggctaaagcagcagtcctcgaccgtttggcaccagacactggtttcgtggaaaacaatttttccatggacaaggggcaaggggtggggggtggtctctggatgattcatgtgcattacatttattgtgcactttatttctattattattacatcagctccacctcagattatcaagcattcgatcctggaggttgcggaccactgtcctaaaggataaagaggaatgccaatatgttgaactaatcaacactcttaatatgtccagagctgtatagactgtaatgtttcaaaagcaatttgtcacaagaccaaaaaaaaaaaaacaaaaaattaacaatataaggtgatagatgttaacttattgtaggatcattttgtaacatgttatatgtcaatatcaa

SEQ ID NO: 54248 - DNA, 1447 bp, Bovine  19866881685249
  misc_feature (1)..(1): n is a, c, g, or t
naaacatacacgcatagcatctcacatatcactttactctagcacttgtaatattaggctgtaattgccaatatttttcagcctcccacaaagaaccgtcaaacccaatgatggcttccgttatggatttttgtcctccttatacttgaggcccccccaggtgctatcaactaacaagattgtttttcttccagattaaaaaaaaaaaaaagccagtcaagccctttgttcgtttactcatttacttcttttagtggcactgggtcttcctggctacccctgggtcctctctagttgaggtgcataggcttctcgttgcagcggcttctctcgttgcagaccacagactctagggcacgcaggcttcagtagccgtggcacaggggcttagttgtcttgtggcacgtggaatcttgccaggcaagggactgaacccgtgtcccctgcactggcaggcagattcttaacccctggaccaaccagggaagtgccagtccttttgttctttaagtgcccatggactggcacttttaaaaaggcagggttgttgtgacaatgtgacagaaatcccaaggaggggcagggaagaaacaatcctgagttctttggaagatttctcttacagatgcatttttggcaacttcacagatgagttagttatatgtaagggccagtttgatggtccacagaggctctcctccagctgggaccctagttggtgaagaaaggtcatctatttgctgctcttcactcctgaactcagaaggaaaaacataacttacatatgtcctgacagtgttgaccagtgtcataggtgggagaaggggtacagggatggaattgttgcttcttatctaaattaagtaatttagggtaaaacagagtgaaaagggagcaaaccagcctaaagggtcatagggtacaaactggttgcttggcaatgtctccatttactttaattaaggtttttagatatcatgagtttgattacttaaagaagtaagcatttgggaaatttagagattatcaaattctctcatcatccctgttagtgacccagagcagaaagtgatagaattaaataatttcataaatgtgtcttcacagctgcttagctcaaaagaatgttcaaatgaggatgcaaatgaggaagattaaaaagtgacaacgccttttgatcagagaagctagcagcttaaaaacctgagccagatgacaagtgttaaatgaaagttatacaaatatctgccggaaacgggcaaaggatgaagaagccatgctgtggaaagtgggacgtaagactcggtggataagcctccatggaagtctctagcacatacacatctgctaaacttctggcctgcgagagtcaggaaaacaatcaaagaaggagaaagagaaaataactgagtaggcagactgccagtaggcagaaaaaataaaaggt

SEQ ID NO: 54249 - DNA, 790 bp, Bovine  19866881847788
  misc_feature (1)..(1): n is a, c, g, or t
nacctggaaaataaaaaaatatgtaaaagggacaacacacactcttaacatcctaaaagaaactgcttaaatagtgggagcaagttgtatgaacagtggaggtactgtgtgatccaccaaactcagatggaaaatagaaattcctcagcaaggaggagaaacccactttggtatgtacacaaattgcattatccgtcaacctggctggctagcaaatacattagcaatgaaaaatatcattgaagaaaaccctatagatctatttctatgaccaatagcccaacaaattcacctagattgaatattgagaacaaaaagcttacactgaaaggggacatatcgtacacaaaaataaacaggagaaactgccagtgtcaaccgacaccctctctcccaatcctaaacgtacccatcgatctaagatctgggttataggtatgcaacatgtacacacgatcactctcctgaaaagtatctgctgaagcacaggcagcgtttcagggctctaggtcaagatcaagaatataagccataaatccactaatgctaaagatgaatgaatagccagagatgagatggtctctattactgtgtattgaagctcatcagaggtttgccatcgtcttacaaaatatccttgctctctatcctttatattctgtctctttctgtctactacgtggctaaatccactatacatcaagtaagagtaggtcatttctaactcaataataacataaaccttttggaactcagtcactctagacgctgacatgacattcaatactga

SEQ ID NO: 54250 - DNA, 646 bp, Bovine  19866880493352
  misc_feature (1)..(1): n is a, c, g, or t
ncttctaggtttgagacaggtaaccgcgtgacaacaactgagaaactgaggccagttatgctatgtttgaccagttacatgtcctgtaacctacatttctgtgatttcgtaacttccatcacatttcaggcccacgtgtagttaagggattgcgtgtttggacatccagacagacacccttcccactaatcttgctttgagcctggagacactccagaacagaaagcaacatggtacatgggcagccagcgccctccaactctgaagcaactgctgtagtcatggggcagcagtgtgggtaagaggacacaaccagtaaggagagggagagaggcctgcatggtcaggaaagagcctacctgagcggaggccaaacgctggaagtgccaaaggagaatctcagaaggctctggaagtaacagcagagaaataaacattcagggaaggtagagcaggaatcctctttagtcaggttcctccccttccaccagcaagaaatggtttcccacgggatggaaggcctcaacccaaagcagatatacaggagaacaagatgaggaaatggtctgcagtgagaataatgcagctccagattatccggaccagacaacacattttcagcactcactcatgaggtcattaaatg

SEQ ID NO: 54251 - DNA, 1666 bp, Bovine  19866880536148
  misc_feature (1)..(1): n is a, c, g, or t
naattccagaaaaacatctatctctgtttactgactatggtaaagcctttgactgtgtggatcataacaaactgtggaggcatgggaataccagaacatcttacctgtctcctgagaaatctgtatgcgggtcaagaagcaacagttagaaccctgtatggaacaactgactggttcaggactgagaaaggaatacaagactctttactgtcaccctgtttatttaacttaaaacgctgagcacatcaggtaacattcccaaggacacacagcgagtgtactgcaggattagaaatcaagtcccggaagctggctcaagatctggaggctcgaaccatgcagtgggagctgctgtgagccctctcagactcacagaatcgacagttgccctctgcatggccccccttgagaagcatggcatttgggttcatagcaatgtataaaacacaatgaaaacaatgcaacccagtcctgacagttacgggaagctttcttataccctagcgcttgcaggttctcctggcctccctgtgagaaggggagcaggtatgccctccctggtttcacaggaagcccagggccataccacaagccaggcacgtttgaccctagagccctcaacactgagtcctggaccactgcacacacgatccctctttgcttttctaatatgcatttttcctgattaccaaagtaatatatgctcaatgtaaaatgtgaaaatagaagaaaaaatagaaaagagactaaaaatctctccctaatcctaccctgccccctctaaagtaacccttgggaacatgctggtatatcttttcttttccatgcccagagcccccatctgcctcactgatctttcctgggtgtgagattcacctgctggcttcctggctggaagagagtggccttgcccagtccccatggagtagggggccccttgcagccacctgatagacatgccatctcctgctccctgggatccgtgaggcccacccactccccacgctccctgggaccccacattactcaatgtttcctggctcttatcaggaaacagggatgtttgtgacattgatgaaatcacaacaacaacccctccacccaaagtttccttcaattaataaaaactaggtaattttagaacccggctcttcaaggagctgctgcggaagattttcacatctttcttgaatcatttttgctccccactcctttttttttttgcttctcttgttgcctgaactttcaccacttcagctcctggttttcatttcaccattatcctggggtaaaaatgaaacactcaccccactgccactacccccagggagagtggtatactcagcatggtgcagcatggaggaacagactacaggctggttcacttcatggctgagcatccatgagcgaattacttaacctctctgagccttagttttctcaactcagaaatgcttccctggtggtgtttctataatattagttaataattaaataagtgcctagcacatgactattggtttcccctccaggccctaaaatgacacttggctcaagttgggatggataaaaggatatcctggggctgtttgggacagatggagggttaagatcttgtcagggtttggggataaaaagagaaggatgtgggcttttaagaagaaag

SEQ ID NO: 54252 - DNA, 950 bp, Bovine  19866880563834
  misc_feature (1)..(1): n is a, c, g, or t
natacatcacattgcagggcggcccctctgagggtcgagtctcactgcagacctgttgtggaaccaccttcaggttagagagcttgagaaacagctgggacagacccggagccggtccgaagaaacagccagtgagctgtctgtctatcctgactcaaggaagctgtcagcccaggagaaaaatctgctgcgcatccgcaacctggagagggaaaaacaggaaggatgggaggtaagtgtgcccggcaggaggtcaggggcatgtggggccgggagaccacagccacgtctgtgaagactcagaggctctgaggtttggggtcacctctgtgcatgctcctcatgccctgctggtccaccctgagcagcctgactggttcctcaccccgagcccatttcatgaatatcaaggtggccccattatggctgttatggagatgctgggcctgaaactagctcttgatggggtgagacacttcagtttgaacattaggcttagtgttgtccaccgaagcatggcttttctcttttcaccacccaggcagggattgagggtcctcagaagacacactgggacttcccaggtggctcagtggtaaagaacccacccgccaatgcaggagatgcaagagatgtgggttccctgggtcaggaagatcctctgaaggaggagatgacaacccactctagcattcttgcctggagaatctcatggacagaggagcccagtgggctacagtccatggggtcccaacccctctctgctctggcctcatcagtgagtggcagtgaaggctcagctgtgaccaagggtcccactcagccctgcagcctgtgactgccccctctgattacagaaacttgcggcggagcgggatgccctccagagagagctcgaagagcgaaaaagaagtttgagggcatgaggtcccggaacaaggtgctgtcga

SEQ ID NO: 54253 - DNA, 1434 bp, Bovine  19866880583235
  misc_feature (1)..(1): n is a, c, g, or t
nttatttccattttacaaatgatgaactgaggctcagggagggagagtaacaatcgcaaagacacacagcaagtataccacaggattaggaatcaagtctcagcagtccgcttgagatcgagagccttgtcggggagctctcagctcggcctctccccgaggtcactcatgcccattacatcttcctggaccgtgagcccgctactctcagaatagcttgacggcagggcctgttgccttctgagcacagtggccaggaaagccttgaggtactggcggaagcggtggctggagaaggcgtagaggacgggggtgaagcagcagtgcaggaaggcgatgctctccgtcacctgcagcgcatagtccaggtgctggctgaccctgcagtccccaaagacttgcaggtccagcagcgagtgcaggaacaaggtgagattgtacgggaaccacagcacaaagaaggccaccaccagagctacggccatcctcagggcccgcctctggcccgggggcctcagactcaccagcacagagccaatgcgggagtagaagaagatcatggcaaggagggggaggagaaaccccaggaggttctgctggaagcggaggaagagcttccagatggtcccatgtcccccaaaatctgcatagcactcccacacgcccggggagttctcatgcgtcctcacaaagaccatgtcaggaatggagacagccagggccatagcccacacactggctgcaagcaacaggctcttggctcgggtcctcagtcggtggtagggccgagcgcagacaatctccaggtacttgtccaggctcatgcagctgatgaagaagatgccactgtagaagttcacggtatagagggtgctcaccaccttgcataagacgctcccgaagacccaatgccatgccacagagatgccccagaagggcagtgtcaccacaaacaggaggttggagatggccaggttcagcagataggtctcggtcatccgtcttcgaggcacgaaccggagcaagaccgctaggaggaggaggtttccaaccaggcccagcacaaagatcaggctgtagaagacaggtagaaagactctgccaaatgacagcacctcgtccttcctgcacagcatgaagatcatgtcctccaggtagtactcatagtcatagaaggagctgctgttctcagaactggccaccttggtggtgggcggcagaggggaggcggtggtggccatggtgggaggacgcacccagtcctggagctctgcgggccagagagcagtgtgagccacaggagatggatccaggccttcccgccctctctccaaacccactggagccccttttctgggctggccaatagactctccacatttaccccagtacctgtgggctagcgactaggagtacaagtgcgggcagcccaag

SEQ ID NO: 54254 - DNA, 2814 bp, Bovine  19866880631576
  misc_feature (1)..(1): n is a, c, g, or t
naagaattctttcttgttcttccttttccccccattgtttccccatctttaccgaggtataactgacaaaaccacaacaactgtttttatatttaaattattgaccatgacgatttgatacatgcatagcctgtgacatgttcaccatagttgttagttaacacatccattccttcacacagaccttttcctgtgtgtagtaagaacgcttaagatctactgtttttgcaaatttcaagtaaacgataccatattactaagtacagtcaccatgctgtacattagatcctcagaacttattttacagctgaaagtcttttttttttttttttaagattctacatacaagtgatactacacaggatttgtctttctctgtctggactatctcacttagcttaatgtcctccaggtttatccatgtttgttgcaaatggcaggatttccttctttctttagtggctgaataatattgcgtcgtatgcacgtgtgcgttttctggatccattcacccactgagagagagatacgtatgttatttccacgtcttggcgattgtgaataatgctgcagtgaacacggcggtgctggtgtctcttccagacatgatttcttttccttcagatatatcctcagtaggcctcctccaattctggagatctcccctatttggggctccaggggcctcctctctgtggaagatgcttttgtgccctatgttatgttcccctggacccctggctgacgccagctgccctcacagtggacagtccccctgcacattgccagcttcccacctcaagccccagaatcattccctgctttcttgcccactatcagggaggcacagaagaaattaacacctttagggacaaccctcaaccaacaggagacaaaagtcagggggtagggcttccctggtggctcagtgataaagaatccacctgccactgcaggagactggttcagtccctggtccaggaacatcccacatgccgtggagcagctaagcccacgtaccacagctattaagcctgggctctagagccagggaaccccaattactgaagcccgtgcaccctagagcctgtgctcctcaacgagagaagccaccacgacaagaagcccacgcaccgcagctagagaaagcccgtgcagcaacaaagagccagcacggccaaagataaatagagtttttaatgctataaaaaaaagtcagtggataaacgcccagcctccatcctccagagggacaattgtgagtggcattctgtacgttgccacaggatatgccccgagggactgagcctctattctataaaacagatggtccttgtctccctccaagatgcctttctttagcggatgatccttttgaagtgagagtctaaactgttgtccttatttattatatatgttttaatatggcttttattactacttaacacacgtatgtgtgacacacttcccaggtggcccagtggtaaagaatccacctgccaatgcaggagctgcaggagaggtgggttagatccctgggttgggaagattccctggaggaggaaatggcaacccaactccagtattctggcctggaaatttccatggacagcagagcctgggggtcgcaaaagatttggacacgactgaagcgactgaacacacacatgtaatacatgcatagagaagcactgtgaaaaactcaaataatgcagctggtcctccataaccatgggctccccagattcaaccaactgcaggtaccattactgacgttaacttttcagttgaatatgagttattctctcctctaatccttaaaacaacatagggaaatgggaatgactcagttcctattttacgaaggagaaaactggaaagtccagagtgctcacttgcccagaatcacaggccggccagaacaacagcatttttaattaaaagtaggggtggccatggacaaagaagtctgtttgggtttctttttctcccttctgaaaagaaaaaaataggttttcaagttggattcatagcctagattctcaaagttctggatgccactagggaaacgtcttttaaaaatgtttcaagaagacaggctgttttgatccttctctcggcctcacttggccttggacaacctggggaaagctggcaattgtgcagttgtgcagagagaaaggttcaaaatgaccgtgagcagatgtccctgaagggccacccaagtaaagctttggggaaaaaaaaatacctgctttgatcgaactgtaaaaacatcctctgaggagaaatattcagctgaatgagagcacatcagagaaaggagtaaagggaatgatgcctcatgtcctagaaagttagctgctggatcctaaccgcccccactgctgcaagcgtgccagtggaacctgcccccccaccatctaatacatgatgggagacgcgctcacgacgctggcggcaggagggaaagaagatggttctacagttgctctgcgtctcctccctgctcagatcccacctcccaccctttcaccaagactcccccttgattcctcagagaagatgccctcttccccagcagccccacccactcacagctgcagaggaagaggggtggagaaagaggggagccagaaaagctttggggaagacacacgcgagttctagatcagcttgtggcccttctgggctgtgttacaatgggtaagatacacaaccgctctgccctatttcctctgttataaaatgggggagaatgagataatccctccttacaaagattgacgtgaggaaaataaatgagtcaaaata

SEQ ID NO: 54255 - DNA, 1127 bp, Bovine  19866880656908
  misc_feature (1)..(1): n is a, c, g, or t
nctgcagactgaacgaaggagtgtgcttcccttctgctatcctgctgcctggaatgtggataaaagtgctggcactgtggccaccatcttgggtcatgaggatgaaggccacaactggggaggaagagggtaagctggcaggagcctggacccttggccaggtgaggttgagggtgatggggagccacagacaggttttacaaggagcagggagacaatcagatctgtacttcagagaggaaaggtttgtgcagcatgggctggggagccagatggaagcagggagccgaagcagggccaggtaggagatggtgcagcccaagggaacacaggtggagagaagaggaagtggctgaggcttctctgggtaatgggtggacttgcccaacttgggagccagcaggctgagccagtgccccgctcacctgcacactgagctgcccaatctccagctccagctgccgcaccttggcctcccgctcagccaccatggcccgcagttgggccaccaggctgctgcttcgctgagcctcgctgttgagctgctggtctaggcggtgctgggacactcgcgtcttctcctcttgcagactcaggctgcccagaatctcctggagctgtttcagctggtcctgtggggccgggtgggagggtgggcgaggggagccacgactctcgatagagaagaacaagagaagaccagcaacccaccccttccctgctcctcgggaacctaacagtgggatgctagtgttcccttgagaaggaagaatactttgcctgccctcagcgggtattcaaccaggttttcctgtcctcagctcccttctccttgagatcagggttaagaaggacatccaaagggcttccgggagccccatccaaggagattttacgatcagataagtctggtttgaattcagttgtgtggccttggatgacttacctagctgtgaaattggattatgtgttcctaagggttatcttcggagaaggcaatggcaccccactccagtactcttgcctagaaaatcccatggatggaggagcttggtaagctgcagtccatggggtcgctaagagttggacacgactgagctacttcactttcacttttcactttcatg

SEQ ID NO: 54256 - DNA, 1068 bp, Bovine  19866880899538
  misc_feature (1)..(1): n is a, c, g, or t
naaccccaaggaggggctgctgtgcgcctccagccggccgctgctgccacgtcatctgagctcggcgtgcctcctgctcagagcggccaagaccggctcactccactggtccccctttcggttttactctcttaaagccgcagttatttattactttctcgttgttcgcctgacgacgtgacaaatgcatggtctttgtgcatgctgctagacactacttttcttttccagctgaaaagtctcgtgtcatttttacatttataattttaatgtggatgatcaggattaaattaaaatgtatatttggaacctaatatccatggagcacttagaaatttgatgttctgcacttaacttagagaaaatgcttttccttgtgaaaaatctaaattcccgccccgaccttcagtgacatgggaactccgtgctctgaggcatactctggtgtctgagacagaaccaaagcaataaccttgtgatgccgataggcctggagcctgcaggcgtggggtgcccagcctccagggcctgtgcagagcagagtgcagcaagcgtctgcaccgacaaccgtaaaaccatgatttcagcataacccacacctgtttgtcttaagctatagtgtgaaaacagtttgggctcttaaaatttaactgaaaaagatgttcttgttttgtactaggtgagaaagtacatagattcataaggcagcttcctccgcagtggtcagtcgcaagcagacagtctcattttgtaatgtggtaacgtgaactgaagatgtctcaccttgacttctagagtgtgtgtctgtctaacagaacaaaaggatgcttggtgtaaattcccttgaagagggcgtaccccaggcttcctggacaaccatgtaggtagaagaaacgctagggcctaaataacgtggaagcaaaggtgttggcaaagtcaaaaccccattaaaaaaaaaaattttggcatttgatttttaggactttgataattaggttgtctgttggtaacttccattcttttatgtcctttagctcaactacctatgggaattggctgattaaaaag

SEQ ID NO: 54257 - DNA, 882 bp, Bovine  19866880903514
  misc_feature (1)..(1): n is a, c, g, or t
ncgtaaaattgcatccggggcttcccgccctttcttctgaataatgaagatgcacttcccaacccagcgccccaccccattttttcttaccgagaagatccaagcctgccagcatgatcgcccgctgaggctgggggcttggtcaggccagggtcctcagggagcttggtggaggcccggctgacctcgggcccactggagccctcgtctactcctttattccgaagatactgcagggaacagacgtgggttccatcatcagggccttggctcagaggcctggagaaggcaggagggggccttggcttgatttcggggctttcaggggatatgaaagaggcttcttttcaggagtgcaaagcgaggcctgttgggtgaaggcactgcttgcatgataataacagctcataatgcctctcttcagaaagggagcttcacagccagaggagggtgaccaggccaggaagctgttccacattcaggtcccaaggggaggtgagggggcaggtccacctctccgggcagccccacccacacggggatgaacaccaggtgtgacttcaggcctttttcaactagagatgtgaagaccttccaaacacctgaagccaagagcaagggttggcagcctggccaggaggctgggcttctcaggcccctaccttcccccatccctccctctttcagatggctggtggggccagtggaaggaggaacgtttgaggacccccaacgggaggtctggccaccatcaacagtgggacagttggtgtgagccccgaacaacctggcacgtcccctaagcccggccaccccgaggaaacttgccatgtgtgcccttttgtctggggtagtgctcggtccccaactgctcggtgtgac

SEQ ID NO: 54258 - DNA, 852 bp, Bovine  19866880984316
  misc_feature (1)..(1): n is a, c, g, or t
ntctctggcaaaggaaaccactatcctgtctgtattgagatacggatctggtttagatgtcagctacaccataagccctcaattcattaagtcatcaaggcaaacagatggtgcctcgcaatcagtgttatggcaaaatgattcggagagtggagattagtcaataaaaacctacttgcagtgccactgagtgtggcagtgcgttccggaagaggcacctcattctcagagaattatcagacttgtaaaattagccctaagtcgccgttgggagagacagagtcggggaaagcagagagccaatgggtacccaaggcagctggggagaggagaggagggttctgaaagggagactgtctatggggtggtgatcaagagaagaaggagccacaggagcccaaagcccctgcccagctaccacagtccagtagcagaaatgcagccagagttactgaactctcgtactcacctctgcagagaaacagtcttgagtcattcaaccaacattttccatgggcaggataccaccaagtgctgtggtggaaacataatggaggttctgctgccagggtgcttgcaaaccaacgttcatgcacaaccacaggactctccatcataccaagtaccaggagccagctggggagcccaggtagaaaatcacatttatcctttctagtggaaagaagctgtttacctgtggtaaacaggtaaacagcttttcgcttccagtgctcaattctttgtgtaatctagtcaaattacctgtataaatacagataataaaaattagtcaaccttttcacttacatagtttatatgagactataaattttctaatttttaaaatcaata

SEQ ID NO: 54259 - DNA, 1523 bp, Bovine  19866881251622
  misc_feature (1)..(1): n is a, c, g, or t
nctcttttggggcattacttcactgaaaaactggctcaacatataatcatccttttattcaacagacattctatggcacttgaagaaattgggtcctaagaagtgctagatttggggcagatattagagacacaaaggtgagcatatccaggacatagtaggatatgtgaacaggcctaatcaagggaagtgtgggctatcttgtatcagcatctatcctgcaaaggtgcaacaaggtgggagaagtgggaagaaaagggccagggaagaattctacagcgtcagtgtctctgggagagctgggcccctctcctctcctactgagcacggcggaggaccacagagtcgcggagccctccaccatcctagagaagctggaatggcaggagtgcgccggcctccacctctcgcgtgaagcaatctggccaacacagaacgtggagagctgcatgtgggggttggcgggggctttgaggcctgcgtctttccaggtccgctcccgggccgatggctgggtatgtcagccccgaagcggttctggagccttcctcccagacacctggccgcccccggtctgacccagccagcagccggtggccctgggaagtggggcccgtttcagcccagcgctcaacctgctgccaggacagcccacgttgtcaaaggtgagccgatgccaggaagctggctataggcccagatgagaggcggaaagcaggcagtgcagtgacggggaaattgggatacagtcctgagtggagggacccgaggaacaggcaggggcagagtggatccggcatcccccaggcttgtggcggcaggggaagcagatgcacaggcctgagccagtgctggggtagaggtgtccacagaccgctgtgtgtggcgatgaacggccagaacttccacgactggttttacagagctggttttgtttgaggtgggtcttgagatgaacgggcttccctggtggctcagatggtaaagaatctgcctgcagtgtaggatacctgagtttgatccctgggttgggaagataccctggagtagagaatggctgcccgcccactccagtattcttgcctggaaaatccccatggactgaggagcctgatgggctacagtccatagggtcacaaagagtcggacacggctaagccactaacactttgacttaacacctttagatgaacacaagggaggatctggatcttcaggcagggctggggcccgggggctgcaggtctaagggcacagagctggacaagggaaaaggagccagactggagacaaactaacatatgaggagcacattcttgacataggcatggtttcgtcccagtgtgaatcctctgatgtacaatgcaaagtgatctaaaactgaaattcttcccacattccttacatccatagaccttctgtccattatgaactctctgatgttgatcaaagtcttccttttgatcaaaacacttgccacattcttcatgtacatagaacgcctcttcactgaggctttcctg

SEQ ID NO: 54260 - DNA, 997 bp, Bovine  19866881272634
  misc_feature (1)..(1): n is a, c, g, or t
ntggttggggttcctgtagcataagaattagaaacaaatatcaccattacgcattctctactgttcaagaaggtgagaagtctgacggttatagggtttctctccagcacggcacctctgatacataatcaaaacagaattctaagtgaaggctttcccacagttgttacatgtctagggcctttccccagtatggattctctgataacaagtgagatgtgcctcgcaaataaagctttcctcacagtcaatacattcatgaggcttctctccagtgtggacccaggggtgccgagcgagacccaagttccacatgaagcctttcttaaagcccttacattcataaagtttctccctagtgtgaatgtgattggtagttgtaaccaggactgtgcttcttcacacccagggggaggaacagggcaggccttccttaggctctaaccatggtgagtcacagtccacgtgttgctctactcaccatctgaagtcttacgccggctctaaattggtcccatagccagggagaagctgtgcactgactgacttggcctggattgctggtctctgaacactctctcatgtagtgacttagatgggagaacttacttggcttatctcagtgggggcctatgctagtagctggagttgggattactcccacccaaagggcctggctactccctagtcggggagggggaggagaatggatgtagggagggaaccacagtgtcctctagattctctcaggatctcaggacctactctcgctaccactccagggaatttcccatctctgctttagacagaaagctaacagcgagggttattccttgaataaaacctgaactccctgacctgcagcagcccttcctggagctcatgttcctactcaatttcccttggaaattgtagaattggtctacagttctccaggcttggatgggagttacaaagaaacagagcttaactaactcgaagaatttattagagggac

SEQ ID NO: 54261 - DNA, 694 bp, Bovine  19866881325296
  misc_feature (1)..(1): n is a, c, g, or t
naattcagtgggttttaatatattcacaaaggtgtataaccatcacctttaattccagatcaattccatttttatcatgcccaatgtgggtgatacccattaactatcattccctattgccctttgtcttgccacctcccacctcgtccccttaccagcccaaggcaagcaatagctcagagaccacaaggattccagatcccagctacatgaaagagcaaattagccagaagtggtcataggtcttttaaaactgttggtgaactccccttaagcaacaacttacctaatttcacaagcaatcacaatctgcacaggacacaatacttagccatctcgcagcttgcaatttccctctaatcagccatactatactaggcaacagaccaaggttataagctcattttatctagttattttaatactcatcattctcagaaaaccgttctgactctcataaaacaaaacagcaggaggactttgatggctagcacttgtctgctgattcatgagtaaaactcaaaactcaatttgagtcagacagataatttttcttttctggtttttcctgacacagggcaggcacgtccctgtccctaaacaaaagcatcagcatagggagagtaatgagggccaccaatttgggtgaagtgtctatttgcataatccatttttctctcagaattataaaata

SEQ ID NO: 54262 - DNA, 1211 bp, Bovine  19866881486701
  misc_feature (1)..(1): n is a, c, g, or t
nccgaaaagtagacttctaccaaggcaggcaagaagatccgccactataccatgccgtggggctcgggtgtctccatctgccctgggaggttcttggccctcaacgagatgaagctctttatcctgctcatggtcatgaactttgacctggagttggtggaccctgccacacctgtgccacccgtggacccccagcgctggggctttggcaccacacagcccagccacgaggtgcgattccgctaccgcctgcggcctgcggagtgagctctgtccaagaggccgaagtctggctgggggtgctcccctgggtctctgcctcctctcgcccacccctctaaagccccagaccacccctttcctcttcctgcttgtcctccctgctctttggcatccttctgatcacctcacaggctgatacttctctcttgaaaacaccatctttcacagcagatgctgcataactcgcctctcataggaagtccaaggaaggggaaataactgtgggcaactcagtttgggggataatatatgccatgataaatctcatgcagtacagacaccggttacagtgagtcatatagcatcttgcaaacattggtctccaccctcccactctgctttgcttgttttcctcaacactcaccctgtgggattcagggcctagaacagtgtcatccgatagccatatgaggcaagccacatgtgtaatttttcatctcctagctgacatatttttaaaagtaaaaagaaactggtgaaattcatttttctactgtattttacttgtcctgatgtatctaaaatattagcatttcaacaaggagtcatacaaaagtattaattaaatatttttacatttctttttccctccaagatctggtctgtactttttaacccttcacactgagtgctcaatagctgtgtggcttctgtaatggacagagcagctctagaaaagggtggcctttcatggaagagatatgcaaggtccctcctccctgccctcctctcccctctgcacccccaccttggggtgatttcaacccttcacttggtttccacaaccattgctaagctcagagctctctcctacctccagacccccaatctccccacagcgatctcccagcacctctgattcagttcagcccacacagaactcagcatctgtgcccccccacacacacctctgccctaaccacgcccat

SEQ ID NO: 54263 - DNA, 1373 bp, Bovine  19866880385781
  misc_feature (1)..(1): n is a, c, g, or t
ncggcctcatcatgttgttccgttttcttcatcccctggacttctttgtcagcttgtatgtaaaccagatgcctccttgaaatgggataagggctccaaaaagacagaggttttgttcccattgttaactgctgtattctaaacatctgacacagtgattgtatctcaggtaacatcagattaattaatgaataaataagaagtgaaaatgaaataagctttgtgattggagaatcaattgagtgaccgtgatgttaaagaaagcccttctaactctctgtggatgaggacacaatgcctagttgtactggttcagcattctaaaaggctgtgcataagcatggggtcattttagattcgagctgactagtgcttgaagattagaagttacagcttcagtttttgtaggcagcagaagcactcacatttgaaatgatgtctcagcaaaagatttgactcttttccgtgtcccatggactgaagtattattgtccttcagctgtattttccttttcttttttaaagatacattacttgcttctttctttctaaaacgaggcaacggatgttatctgcccaagtccccttttctctagatttttactttttgagacatcactgtggacagattattcttgctcttagcaaacattcttcctgggatgtattaatgtatttatctctgtcagaaagcagagacctaataaccaattccccaaacctcttgcaatatagcatctaatttcctctcccttgaattgtcagccacatgcctgtacgttcattccccagtagtactcccttctccactcaaatgtcagatcgaatccattggaaaagattgttttcaagatttattgctctttttgcctcgttctctgtcttctttctgatggcatcgtgctgagagggccagctttgcatgcactgcttcagtaactgaaataggcaacagataaccgcagggccatcctgatagtctttcttggagcatcagtgtctgatgatccttggagagagtcatcagtctcaaagggcaaagggagtcagatgagcacactgcagagatgactcaatagaaagagaaatcattatacaaatccgcaaattcacgatgcatgtcaactctgataatgatgatatttattactttttaaattctttatcatttataaatgcaatcccactcattcataaaaggatgcatatttactcaagaacatagtacaactaagcccccatgctttcccagcatagaagatctacagtgatttctctcctgtcttcctgatggggggaccatccaaaagttgttatttttttatgtaccttttgattcttataacagccataagcaactattcaatttccac

SEQ ID NO: 54264 - DNA, 1333 bp, Bovine  19866880413248
  misc_feature (1)..(1): n is a, c, g, or t
nttagaagaatggaaggtcttattcattatgatcccacaacttagccaaataattgacatatagctgtaaatagtgaatcaataaacacaaaagtttttgtgagtgaattgaatgagagtatgtgagtgaatgaataaacattttacacttgctgcacacagcttttttgtgagcattctcatacactttctagcatttagtgtcttaaatataataggtacagaaatgtatggctgtgctttattgggggggagacttgttgttttcctacaaaagattcactgtctctatagtcatgtggccaagtctgactgcaaacaagaatgccgtgctcatcaagagaggacagcgggtcttaatgtagagacagtcactgcctgcgtaagaactgagcccttaatttactctgacaactacttttaagtagccaaagtgaattggaaaccttcccttgagacattcattggaaaacacagtttggattagtccaataaccgaatgtcaaccacctcctacaacaaagcagtgagacatgcttccctctctacagatcaagtaacccagaagcgtgcagcctgggtaaccgctaataagggttctcagagaatggaggccagtagaagaattgtttttccccatagtaaaagtccaaacaccttaccttagcacccactgccctaaataagtcagtcctgacctccccaggcattgaagacactcagtgaaatcccacaagcatttctaaaaaagcgaaggggacaggacattcccagttgaaggaacagttaatttttttgtaatttctattctttttttaaattttatttattcatttattgatctgtttttggctgcttcgagcctctgtttctgcaggcgggttttctttattttcagtgagagccgggactcctcttcggctctggtggccggcttctcactgcagtggcttcgctcgtcgtggagcacaggctctagaacactcaggctgcagcagttggggagctcaggcttagctgccccttggcatgtgcagcctcctggaccagggagcagacctatgcccctgcactggcaggcgggttcttcactactggaccaccagggaacaatttaaataaatgcaaggaagtcagttaaacttagcaacccagtgactccatatgacacatacgtggaggaattaataataaaatagggaaacgaaggtcttatactgagatgtcttggtataaatgtcgctcggtcttctggtgtgaactcgctgttgttgttcagttgctcaatcgtgcctgattctttgcgaccccatgtactgcagccaagaatatt

SEQ ID NO: 54265 - DNA, 1134 bp, Bovine  19866880499150
  misc_feature (1)..(1): n is a, c, g, or t
nccccaggggttaagaactgcaaaaagtgggagacaatgtatctttctgtactttctatatgggtggtgtgctttgtttaacgatgtttaatgctcactcacatgcttcctccaaattgtggatacagagaagtgtgccttgataaaaagcccaccgcctataatagagccaaagcccgatgttaggcctcccacatttttcttcagaatataaatacacatgcaatccttctctgaatgaataataagacatgttctttctgagttaaacttttttaagagaattttagttttctcatagtgatatggttgttttaaaatttgtggaggctttgctataatcaggagagagaagacacacagactcaggagtgactgtccgggaggaaggcatttttacacttacagattcctggcaacaggaggcacgacgcacgtgtcccagtcagtcaggaggcaaagaagaggctggtgactgtgggcaagagccttcgtgtggtctccacgatgaagaatgctcaggccgggctgagcaggtggggctgccgagtctgaatgggatccacgggctttggagcctcagaactctcctgagtcatctgacgcctggccctggtgtgtgaggggtgacctctgagcgcccagaaaaggacttccttgtccttgaccccacagtaagtttaccaggcgcagcgcaggatgtaaatctgacgacccacggccactgacaaacattaacttggggcctagttcactagttacttcacatttcaaaaaaaaacatctcatctcttcttggcttgatgaacagaaccggtttgaataaacttgtgcattgtgcctgttttagctttcattgacgataaactcttcagtgaggtataattaatgcatctcttttcttccttctcccaaatataagacatatactttcctcaatatcttgtgtaacatctacatttcctttttaatatctatatatttgcaagatgcaattcatcatacatttctaattaacatctaatttgggatgaatttcctctttcttcctttgggcttttctaatgagacaataagttacatttgcaaagggcccatattaaccatacttgcttaatagtaacaccttgtggg

SEQ ID NO: 54266 - DNA, 3371 bp, Bovine  19866880546752
  misc_feature (1)..(1): n is a, c, g, or t
ntgaatgggctgttatctgtaagtctggtcttaaataaggggcttttagtatctaattttatattattagaagaaagcttgaaaatttttctacagcagtaattgcataaatatatattttatctggcattaaaaagacattattgatgcagaactctctattaaggagaatggactacttttagatgagaagaagttcaaaggtaccatcacattcatcatctaaatgtaattagttatataatgtaatagaatctgaattatattaatgtagtaagactgaaaaacacaagtctgaaaaaaatagctatgggaaattttggttgatgcaatctgagttacatatatattaaactccagaagttgagaaaggcccaaagagtagagcgaaacccagtggtatttcttcaacaagcaataagggctcacttgctatgttctgggtaatatgctaggcacagataataaaacacagacatggtctttattctgaatttacaaactagtactggagatgtgcagcgataagattataccacatatatgttgtcaaagcaggggacttggctatggaaactccccatttcattaagaaattactactagaatgagtaaactgaagttgttgttttctctatttgcatcattcctctcataattgaaatccctgtgatgcaaagagtagcaatttccaataatgaccctgtgctcactctggattgctcggacaacctcattctctcagccagggcactgtgctcaggcggtttcccttagcatggtgtttcctcctcgctgcataaaatcctattggtctcaagacttccagatactgggcatcagcatccgcaggcaattcctgtagctagattgtgggggggtgtgccttcactgataaaggtgccgtcatatctgcttgtaaggagtgccgctgcgttataggaagttgggagtcactactccttaaagaaagaaaactcatacagaatgttcagcagatcaacccagcccaagcacactttgcagataaaacgggaccattagacgtgtcttctcccactcaccctgacccttgtcatagatgtatccccaacaattcttttccgtaacttgctgagtggaagttgcatttgaatgtgaattcagtgctatattctatttatataaaacccaagaggtcaagaatggtgtcgtaaatttcataggtataaaaaaagttattcatttaattcattcatttgcatgaattaattgcaaaaaatcaaaatgagtgagtgatcaaataaatgctatcaaataaatacttgccttcctataagatgggcttccctggtagctcagctggtaaagaatccacctgcaatgcaggagaccccagtttgattcctgggttgggaagatcccatggagaagagaatggctactcaggccagtattctggcctggagaattccatggactgtatggaatgtagtccatggggtccccaagagttggacacgatggagtgattttcactttcactttcctataagacaggcggagggacagacagagatattgtatcctactccgaagccagattttggactgaagaaattagagacaagaagaagactacatatgtggagtctgaaatgaggaagaaagaagggcagtgggagacaatgtgggttataaaatgagccccaagtgaattttcaagtactcccaacaaaactttgaaaaatggagaatcaaattcctcaagaatcagatgggaccacagataaaggtatccttttcaaccagggaactctggaaaattgattcttgattttgaaagtaaagcaatttttatttgattcaaaggtatcttcagagggcaagagaagtttaacgtgtatatagtgtatctgaagacttgtctagggtccaagaaactcccctttgggtaccataaactggtttattatccattatctataacacaaaaataatgaaagcggtacaattctctgttcagaaagcccacaggaattccagaatttgacagccgtgatatatctcagttagtttttcctgtgtaaaaccatcacaaatcatagagcagacagtgtgttggttaaagagactacacattgagatgatgaagttattcatttatcttcattgaaaggactcagactgcactatggctgataacataaatctcatcctatacgagatcctctcccctaataacttctcttagcagtttgattaaaattgcttttgttttcctgtacataacagtgatccaagtttcctgactagtcactgaaacttgcaacccaatttgtggtgctaaaatctggtgaatgattagagtttaataaaatgaagagtttaaaaatggccttgtaaaagggatttggtgattaaaatatgtaagcataaaaaatttaagtccacttgtaattcaccttcctggttctgatacttcattcaagtgacatatcatttctttagaaactatttctacatgcacagatactctgatggatttgataacttaatgttagttagcagaaaaaaagtcaaacaaatggtgaagagagagaacagaaatgtgcacagtaagatcaaaaacatgatcacagtttttaaaaatgtaattatggtaaaaaccatcaaaatattgaaaatataactataatataaatatttttgagtatagatacaggaagagatgatgaaaaaaagtgaatttagaaaaagaatgtgggaaggaaggaagggaaatggagcgaagatgagtagaagaaagaaaaaaagaaagagaagaaaataaattagctccctaacattatgtatttaattcattctttaatttccagggtctttcgtgtacattagaccagatacagctccagaaaattagaaactgaaaataaagttttctccctctacacactcagattaaaaggtgcatcagagacagggtaactgcaattatcatttcccttcaaaaatgagaacaggggcacagcagaccagtcagcagaaagttcaaaatccacaccggcaaatgatggaaagctctctgtttcaggggtggaaagttatgtgaccgggccttaattacacatcctatgtgctttctggtatgttcctcaagatctaggactccaccttctggaaaatctttccttatttcttgtcttccacattcacttttcaaggagacactggaaatatgctaactgagcaaactatagcttttgcttagttttgttctgttagaacaccccttttctgggtactaatttgatatcaatgagctatttgctatgtaacaaaacacactgaattaaaatctctttatcatttcccttgagcctataggctgg

SEQ ID NO: 54267 - DNA, 1361 bp, Bovine  19866880864051
  misc_feature (1)..(1): n is a, c, g, or t
ncagcctgccaggctccccaggcagacccctcccagcacccgaaacttttcctcttgctcctctcccacctcaatggttccctctcattccacagcagagcttcagggaaaagccaagcctaggaaatcagaatctttctcctggcattatgctctttgcagccaagtgactcatgcacagaaggaacaaggttcaagttcacgaatcagcaggctttccattcacttctgtgttaatggttccctccttgtccaaaagcaaggctggagctaatggatgtaccgctcccatttccttctagcttcttttctaactgtgagaaaagggagggaattggaactttgtgaacttgtaggaaagtattgtggccaggctctaggcataacagcttgtgtatatcatataatttgtccctccagggaagaaaaattatcttatattcaaaaaagatgaaattcagactcagaggaatttagcaacttgttaaggatcacagagattgtaagaaactgagtcaagatttaaaaccaagtcctctaggcaccagggcttccctggtggctcagttggtaaagaatctacctgcaatgcaggagacccctgttcaattcctgggttgggaagataggctacccattacagtattcatgggcttctctggtggctcagatggtaaagaatctgcctgcaaagcaggagacctgggttcggtccctgggttgggaagatcccgtggaggagggcatgccatcccatccattattcttgcctggagaattccatggacagaggagcctggcgggctacagtccttggggtcacaaagagtcaaacatgactgagtgactaagaacacacacacacacactctcagcgccaaagccggtttgtggatgaagactctgcacggtgaagccttttcctgggtaaccgcttcttctaagacacactgtgttttccttgccctcccttctggcctcaccaggaatacttgggttcattaggatgctggatctttatctcaggtgactcgttaggcatttgagtgctgtgcatttgtcagcagtccaggttaactcgctctttctagtaaaaccctttctagcaaaattcattccgcttgaaaaaattcaataaatactgagagatgggggagcaagattagaagattgaaaaggaaactagataactaaggaagaagagtcccaataagcccatatttctctctgatcggagagtatgtgaaagggctggattggcaggagtgaaaaagaaaatctccttttttattaagctcacctgtgtagtattatctcttcagaggtgtttatgaaaacattcacacagtaaacttgcctcc

SEQ ID NO: 54268 - DNA, 1033 bp, Bovine  19866880888931
  misc_feature (1)..(1): n is a, c, g, or t
ntggaagtgagaaatagatttaagggaatagatctgatagacagagtgcctgatgaactatggacggcaggttcgtgacattatacgggagacagggatcaaggcccatcccccatggcaaagaactgcaaaacagcaaaatggctgtctgaggaggccttacaaatagctgtgaaaagaagagaagccaaaagcaaaggagaaaaggaaagatatacgcatctgaatgcagagttcaaaagaatagcaaggagagataagaaaaccttcctcagcaaccaatgcaaagaaatagaggaaaacaacagaatgggaaagactagagatctctgcaagaaattagagataccatttcaggttacctttgtttaacttgactctctgatacgtgctggcaaaagctctctggctaatgtagctgaataacagaagaatgtatctttgaaagttgaaatagagccttctgacaacaccattaatccacaaatgatctgtaatatcttggacaaagcagtcaaatatagtgagatttgacttctgtatgtacaaaatgatcccctatatctcactgagttatttaaaaatggtgactctacattttattaaatttctattacttgtgtttataccttaaatactttacagaactgtaattttttaacggtgtgagtttattcaacttttgatctctataatgcctactatctagcagacagtgtatgtagaatgaatcaaatcactgaaaatcaacctacgttagatttttaggaattttttcataggctctcttatttggtgagatggcaactgcctgaattaagccattttaccattttcccttttgtttcctgagtctttcatggccagacactaaaagtgatagctgtcctccactgcagcacaaaacatccctgcaacagctatttattatttggtcaaaatctattgtcagtgcagaaaacatcacataattctcaacatccctcccattcaaaattttaattcattcaattaattataaaaaagaattact

SEQ ID NO: 54269 - DNA, 737 bp, Bovine  19866880898051
  misc_feature (1)..(1): n is a, c, g, or t
nttttaaatatgagttaataaaatcactaggtcatcttgggaattatatcattttaaaaacagcattaaacttgtcatcttcaagcttttccccaagctcagctaacttcgtcagaagtctaaagtgttgtatgaattactagtaaattagccaaaaacaatctgtagcacacaaggagaatatactacaacttctcctgtgatctctggctgcaactacacttgccaaagaaaataaataatgaggaaattgtatggctgtaacaaaagcatgatgcaaatcccttcatagattaatcgacaggacagtgatccctagattacagaataaacttactctccttattctgccactcataaaaataatttttcctctttgcatctgaatctctcttccccaggggtagttataagttaggttagttcctagtattttccttatttaaaaattgtaagagtatatatttgtttctatgtttctatgtatatatgttatatatttgtttctatttgtttcagagtcagtgttctgacactgctatgtgccagtcaaagagctttaactagcagcttctgtagctttatgatgaacattttacctagatttgcttgataaatgcccaaaaccacattattaagtgtgacggacctagattgagaaccacttagctaaataatctgcaaagacatacatgacttggttattatcgctgtaaaacagggataagcatatgtca

SEQ ID NO: 54270 - DNA, 1148 bp, Bovine  19866880917184
  misc_feature (1)..(1): n is a, c, g, or t
ngacgctgttttacagttagacggcggagatctagaaagagtattgtaatgaaacttacttaagatcaactaactctttcacccattctcaatccatccacaggattacagaaaacatgatccgacatgtgtgtgggaggggagaatttatataataattctttgttttcacttttatgggtataacttcattccagttgatgttcctcaaaattcaacccatgggtccttttatctgacaatgtgcactaaaagaaagacaataatcattacagtaatactaatccaaaaccttatcatcattattataaaagtaaggtgggtattaatatttattgttaaataacttgttacttttattactatcattttgtaaagcagtgctatttttctacccactttggattcactaatgtctagaacaaaaactggggaaaatagatgttaaaaatatttgtttacattcaactatagttatttttctcttaagatagttactgaaataagctgtggtggcaaatgccaggttttaacttcttttcagtcatgcgtctttaaaactccctttttattctgacagggagtgatggccacttctttctcacagtctcatttatactaaaaatgtattagaaaattaatttcgtaaaagagaaaatgattaagctccaataaatgtccagcacacctgggaaaatgtgaattattgaagatggagtctgcattgaatcttgaaaacctggaacaaactgcttattactgtggcctgtttcactgaattgctgtgattaaaagggagactggcttaatgtgaaggtttttccattaagaaaaaaatctctccctcgctcacatgcatgcacacacaccacacattcactgagacacacatgaggtcttgcctgaagcacaaaattattgctttcctttattgtgttggaattgcagtggtgcaaaaataagtctgtgccataaattgtgtgtcctgttaatttgggcagtgttctttcaccaaactggggctcttagacctagtagagcacactgaatatttaaattatatgtccaacttaaaaaagttgaagggagaggtatttagaacaacttgagaggaccacctaaaacaccaactaaacaagaaggtaaca

SEQ ID NO: 54271 - DNA, 1321 bp, Bovine  19866881255356
  misc_feature (1)..(1): n is a, c, g, or t
nctggatattgagaaaatctggaggtgttagactagtctcaccttcaagaggccctccacctaaagagcgagaccatcatataaaaataaatgctgacgccatttggtcaggcatttgttgatggtcagggcctttcaagatgatattccagtcaggagtaaagccctgcagaggagatgaacctgatccttaagccccttccaattcaatatcctctaacttcccttccagtcacctagttcactccctctgcctactttaggaaaattcacagcttaataatgcatgagggaacattaccttaaggtataattatgcttttccccaaatgacctatgcaattacaccagagtggtgaacagtgactgcagacaggagttggaacaagtgcccaggaatataatgttacaaaatgacccctgtttcaattttccttcttataactacataaaaattacatttgcttctatcacagagatgtgcagtaaaacatgaaaaagacccattagattatcaactctcatctcctcctaggaagttgttgttttttttttttttaactgtgatagtctttcgagggacttgaggctgttaaattattccaagataatagggataatgagggaggaaagacctcccagcacagtgtttatacttcgtaaatctgcacattggtacctggcggcaggtaaaccttcatggccagatcatgagtggatagagctcaaagaaaggtgggaagttgagccaggagatccaaggcgaggctgggattataaaattagagctagcattagagtcagaataaatagtcacagctggataaaagagaagggctagttagtggtcatgtgggcagttccagacctgggaaccagagatttgagacagcatgtttcatataaacactgatattaatatgacattaatgtagattattacacatatataaatattttatgaaacttccatcacactatgaagtattctgattctgttgaatattaaatccattccttaaccagaatcactaaaaacaccccgaaatgattacctaaacgccctaatcattcttttaaaacttattttactgaaatatagctcatttacaatactatattagctttaggtgtacaatacagtgcttcaataatttttatagattagactccattttaatttagtattaaatattggctgtatttcctgtgctgtaaaatatatccttgtgacttacacattttatattaatacctctcaatcctcttcccctaattacccccatccttgacaactcttgatatcatcaggctttttagg

SEQ ID NO: 54272 - DNA, 1021 bp, Bovine  19866881265456
  misc_feature (1)..(1): n is a, c, g, or t
naaaaattgctagtattaactatgactttgggaaagacacctaaatgattacagcctaagttactccctttagaaagcaggggattattgtatttattagaattaacactatgatagaaaaaggatgaaagatactgagcatagtgagtaatgcttttaaaaagctagttccctgtctttttttgcaaagagcactgtggggtccgagttttggagagaagggcaaagggaaacaaatagatgttctgctctgaatctgtgcacagactgaaaaatcaaagtaagacacacgcatgtgaccgcgtgagtgtgtgccggtgaagtcacaggtgctgcaaagaggtggcaaaaaggaccacaggagtttgtaagaaggaaggaatcagaagttaaaagcagaaatataatttggttctgagttattaaagttcaaattctgagagccctcctaaggtctgcctcattcagggcagttgtctctgcatttccggtctgctgaacccgtgatacacactgagcacagctgagaggcgccctgctcactgttcccacctttcccccagccagattcgctttttctcacactgggattgtccaaagtttcttccttgtttgtctgcctaaaactcaagcttgactccttccatccactctgcatatatggctagagatctgatgtgacacccttgcctaataataataatggcaattaagaaggacctgggagggaaaagatggaacagagaatttttttaaaagtctgtaaataagcccttgcacaagtatgatggtacactcaattgaattaggaatcacagtgagttatatgacctggttgcagtaattgcattaagcaaccgtattatttcaataataaaataaacccattgaaacagagtattttctaaggtaattatttaactaattcaaaagtggcaggaggattagatgttccaatctttgcattttattatctcctcactgtattcagcctgaaaaatagtctttggcaattgaactt

SEQ ID NO: 54273 - DNA, 1200 bp, Bovine  19866881272790
  misc_feature (1)..(1): n is a, c, g, or t
ntttcagcttcagcatcattccttccaaagaaatcccagggctgatctccttcagaatggactggttggatctccttgcaatccaagtgactctcaagagtcttatccaacaccacagttcaaaagcatctattctttggctctcagccttcttcacagtccaactctcacatccatacaatgccactggctttagggatggattaatccatgagttcaaagagtggaattcagagattgtatcttcattattaggcaagctctttccaaattgatggcagatgaagccacagaggctctgggaataaaattcttcttacaataaaaattcagaggagcagaaaaagagtggtttgttttcatagtgccatcaaaatttccagagtgtctttctaaggtctgtggccaggaaaaaaaaaatcattttcttactgatttcgattatgtgtccaccctgagcatgaggttgaggagtcaatcaattagttgaaagtcttgttgttggaggggaagagttggtgcaatacccctaaggaaaaaaaatctgagattattataagcccctggttttaaaaacaaagaaacaaagaaaaagcaacaaccaaagcagtaagaacataacaagaaggtacctcacagatgttaaaaaaatgttagcctgaaagtaacacgaggccatttacatcaactctctgctgatgagcagagacgtaaatgggcttgttcaaactctcagctctggtcagtggctgaatatagaccacagtttatgtcttcagagtcatttaattacaccttgccatttccctaggcatcattatcattatttgtttaagtgatagatatcataggatatctgaaacttaaggaaatctcatgtttagcaagaagatcctggttttgcttccttaatatacttctgtgcttgcacacaccaattgtccaagctgaaaagagaacaaaattgtacaatttcccttcaagtttggccatttcacatttttatcataaaatagcctcatttctgtcactgctggggactgaatccagattaagtatatgcatgtgactttagtcactgaaatctcaaaagaaaatgttctactcacctttgagaaattcttccagtaaggagcaattatatttcttatttgtttgatttcatttcagagaaaagtgatggctcttatagactgttag

SEQ ID NO: 54274 - DNA, 1908 bp, Bovine  19866881375991
  misc_feature (1)..(1): n is a, c, g, or t
natactgtgaacaaataagtgattccatccaattatggtcacaagcaggtggaaggcaaacaactaagaaactgaagtaaacacgtccttcctcagaaccatcctttagattgaacagatgctgggtctggaatagaaatgtctttctgaccaagccctgctgggaataaactcggtctagaattaacctaatactgtctcagccttaatcacattgtcttcttttgatgtcattctctggttcttttagggaagcttagctgtactcaggcacatgtaattcctccttaactctttttatcttcagactttcatatctcaaattttgttaattgacagcagaattttttttaataaaatgaggggaaagatgtttttcccttatttccttcattaatgtttctggtaagcaccttaaaaacaagataacattctgtccaccgcttacctccccttcccttccctcttgctaagctgccaagttcttttccccttctgtatacttggcttcagacatagagattaacttctgggcttattttgggggggttgatatctcttaattattttctttgattcatatcttaaatgctgatgtcacaagaatatatgattttaaactaaaaactttggattcaaagtcaagcttaatttttatgattagtttacttgctaatctctgaatacctcttcatctggaaaaaagattctacaacaatacttaaattatataatgacgtcatttctgcccttcatactgaacatgaacgaggccagaagcccagtcttctttgtgtatctgctgttcagctgtgcttgctcagtcgtgactagtaatgcacatagctgttactgccattttgcaaatacaggtgttgccatgaatgtcatgaggacagaaattcatcaaacagggtttatgtcatttcacttgttctttaatagcactgagaatagttcacacataaaatctacataatcccttttatttgctttattgaaaaggctgtgttttttttttttttcaaactgcctcagttcactcatacacacatttacacatacatacaccttgcctgtaagtatcttataattatagattacaggctaattagggtgttatttatgcctgaagattatatactaattatatgttattatgggaaacctggcaaaagcaatgtgagcaatggctgtaaaattataagtggatgctgtttcattttatgattatttgtatcatatgaaataacaagtagccacatatcaaaccagaagggtgttgtgaatctgttacccatgtccttttaatattgccgagccctagtagtgccagaagcacagcttgctttggtttcaatgacagtggccttggaggcagagcagagtttagaattcatgcctatgataaagcaagtgcaagctgccttgtgatacgtcaggagatgccagatttggagtttggggataaatggtgaggaaggaactaagggtaatcatgagttactgggtaaaactgttagttttctaaccatggtcaacatcatcatcatactaacaaatactttcagaataaataataaaatagtagcagcagtttgtgcttcttctgtgccaagcactgttatgacactttcacatattacctcttcacacactcccatcagtcctgtaagtgtcattctatgaattataatctttttgttttagagatgagggaccaagagacagagagactttgaaccctagtcccacaaagcgtaggacaaagacaaggatgccagttgctcattctccctgggtttcttcccccttggcttgaagtatgtgacaacaaagcacatctctatttccttgcctccaacgtctagaaggggaaacacgtaacctgttcgcatccggaacttc

SEQ ID NO: 54275 - DNA, 1279 bp, Bovine  19866881540227
  misc_feature (1)..(1): n is a, c, g, or t
nttaatgaagtgaaagaaaaaacagtaaaacagagaagaaacaatcagagaggggaaatttttcaggaaggtggcaccaaattgcatctcctttcaatgatctgtaaatagtatctttgttgtcactaagttcttccaaataattctgatataaagcaaagtctgagaggtcctgaccaatccagatactctctgcaagtgtttacaaggtgatgacttaattacccgaaaggttgccttgcttgtctatgttattttattttatttttgtgtagacctgctctggactccagatttctaaaacgagcaccttggaggagttccatggcaatctccctggagacagagttgggattattaatatacttttggaaataacagctcttagacactgtaactcacattaatgtgcaatatccagaccgctcactctgcggatgggaatgcaatgtactcattctggtttattataaaagcattaaaatgtgctctgtgggttaatcatgatgacacttgcatctgttttggaggttttgagttgttttttgtgggatttaatcatactcttcttgaactttaccttctagaaataaatccaagactttgggggctggatccaagcaatccatgtcttcagcatatgctttttttggcatattagagcctgaatcaaaactcctttcagaagcatgaaactttatttaatcactgtgtacctattttttactagataccagggagatatgtgtagaccttgacagtgtaatctctcatgtaaacctcaaaaacaatagtgtgaggggaaggaaaattgtaattcaacaatttaaaacctgagaattttcagttcatcaatttaaaagataggaaaactgagccccaggtaggtttataaatcagttcaagtcattgaacagatttccatcatctttctactttactctcttgactcttaagacagttcatgagatgactggagtccacggttcttgaaaacttgggcttttcctctctatttctgtttattgatgcttatgtaatattgggttggtccaaaagttcattctgttctttgtgtgtttttttttttatagaaaacccaaacaaaccttttggccaacccaataattattaaatgaataattattttaaagtaaaaggccagagaaaagttcagttgtgaaacttaattctttggacattttcattgaactatgaagatatttgagaacatgtagcctgtcatatgtccctaatatcttcccaccactcccagtta

SEQ ID NO: 54276 - DNA, 2141 bp, Bovine  19866881573483
  misc_feature (1)..(1): n is a, c, g, or t
ngtgttgtgtgcggtttatccattatggtacaagagatgcaggtgtcaaaggcccctacatccatcatgggtctcttttattttatttccaggtagataatgagcatcccatttatgctaggcacttctgttgatgacatactagttgccataaaatctggaaagtaagatcaattttatgagcaattaaatgggatctatcccagaggtaattaattttatgatggaggttgaacaaggtgagaggagagcctgttttagatgcattgatgatagggaggaataatggctcatcagctatgaaacagttccaaattacctggctttcgggtcattatttatatcagtattttaagtctgctgccctccctgtttgcatcaggaacagaaagagtattgttatccacagccttttagggagtgatccaaacttgctctcaggagcgtaatggaaaccggacagttacgaaactaactttgctttcctgtaagacagatgttctctgatccacagttgaagaaacaatgaggccatttatcagtgaaaggagctgcttctatctgaactcaggaaattgatagcaaatggctgagaaacaggttgttggcagttatgcccgagtagaattaattaatctatacattcactagacaaatatttattgataatattctgtctgtcagacaccatgctaagtactggggctataaaataaaattaatgcaatcattgggaagcttgtgagtctctgttaactgtgtttctccttgggatgattcaatttaaaaaaaaatggctcttgaataggtttgaacatctcaaaatccaagagtttcaaaacacatgagtaacgtggcttgcctcccatgttattgataatgcttgcctttgtcctcagaacggtgttcctgtcacagaaagagacaaatttaattgtgatcaccagggacagtgtagcattataaaaaatgccagaggacattctactcaccatagtttatcaaagctttactagtcctgcatgtcttctttatgaagctttctgtgttttcagagcatccaccccattctctgtgtcaccagggacatcagagccaaactaatctgaccctagttgccctaatgtgtgtgtgcttggtcgtgtctgactgtgtgaccccatgggccaggctcttctatccatggaattttccaggcaagaatactggagtgggtcgccatttcatcctccagagttgtcctaatacgagctttgatttaggcaagaaattgcaccttgatgaccctccccaccacaccctataacaagtctataattacaggtttttagtgagaagatacccaacccaatgtgctgcagggaagacaaagaaaggcttcactagactgcaggactgagacgtctggtggacaatggcaataagcacagctgtcttcatagtcacctatatgcagctgattccacgtcacccgttctccatcacctctttgctttcctttttctccagagggtttctcagatggtgacctctgatgtctccacatgtgcattatccttattgactctaattcctcaaggaaaaaaagtcctcactgtctgacttgctcaaaaagacatttataagattcactttgcctacaaagggccatctagtaaaatatatggtttttccagtagatgtgagagttggaccataaagaaagctgagcgctgaaaaattgatgccttttcattgtggtgttggagaagactcttgagagttcattggacggcaaggagatccaaccagtcagtcctaaaggaaatcagccctgaatattcatgggaaggactgatgctgaaactgaagctccaatactttggcccccctgatgtgaagaactgattcattggaaaagaccctgatgccaggaaagattgaaggcaagaggagaaggggacaacagaggatgggatggttggatggcatcaccaacttgatggacatgagtttgagcaaacttcaggagatggtaatggacagggaagcctggcatgctgcagtccacggggtcgcaaagagttgaacgcgactgactgaaatgaagattcactcttattagactaaattgggtctcatgtgtcacatcaaaccaacag

SEQ ID NO: 54277 - DNA, 773 bp, Bovine  19866882198225
  misc_feature (1)..(1): n is a, c, g, or t
ntttagaagagataagtcctcatgtaatcgatcaggcatatgtatacaaagttcacattttaaaatcatatttggttctttaaaagtcaaagtgaaaagacaaattaatcggcttatgttctctgagctgtcaaaaagctttcagtatcattatcttcctgaataacagatctgtgctggagaactgacttcattgcagtcctaacactcatcatgcactccacttgatactaatttgaagtgtcatcaaatatttaaaatatatggatttttactctaattttaaaaacgagagagctgggatggcttcctaggtggcactagtagtaaagaacctgcctgccaatgcaggagacataagagacccaggttcgatccctgggtctggaagatcccctggagaaagaaatgacaacccagaggagactggtaggctacaggccacagggtcagacatgactgaattgattcagcatgcacgtagcatgcgtgagctgaaatacatcaaaaaacggcatcatttcccaagtttacatgactaggatgtacagatccatctgacctcaagatttttttttatttgatgtatgattgatttacaataatattgtgttaatttccagtgtacagctatatgattgagttaatcatgtacatatttttaagtctcttttccactgtaggttatacattgaatatagttccctgtgctgcacagtaaatccttcttgctctctattttatgggttttatctggtaatcctatactcata

SEQ ID NO: 54278 - DNA, 1171 bp, Bovine  19866880395976
  misc_feature (1)..(1): n is a, c, g, or t
natcgaacccaggtctcttcacctcctgcagtggcagtcaggttctttaccactagtgccacctgggaaacccataacgagtccaggtgtcccaaggaatgaacggctatgtaaactgccccagggtttccaaggcgactggggatggctgaagaagagaaaaagggaagtgagtgtacctgagatggagtcatggagccaaatggagtcaattcagcctcagctgagtaaaaggacatttggtcacgtcaggagaagagaaggaaattcacatctgttatcctcctgcagtgtgtcaggccgaacactcaatatccacagtcctgttgaatccttaggaaagcctggtgagggaaggagtattttcctcattttacagatagaaaactgaggtccagtgcagtaaactggcttgcccagggtcatcccaccagtagaagacagggctgctggacttaacatctgggttccttccatgatccccacttataaacgactgtaaaaacaaagggataagcagagttctaagacaagctaactaaagcaattccaaaaataactattacagaccaagcaagaagtttcgtttagttctccaagttctcaaattgaatttcagcaaggcttcccttattggacctgagttgtaagatcagtacattttctagagtgacatcttggagaaggggatgggaaagaacgcttgggacaattaataagaagaccctccccccaccatgccttgcccccattaccagcttacctttatcagaagatgagaattaaaagtgatgacacaccagaaagcttacaggatgggaaacctaactcaaagcatcagtttcgattctatgtgaaccatcggctctctctctttactctttccatctggctttctggtctttcatgattgggtctttcctgaaggaaataactcccaaaaggaagtagaaggctcacatcaagggaagatacaggactgaatgaaagctgcaggggaagaagatgagccctaaactgttggtgccaactgcttttctctcacgtcatcttgatgaagtagattgggttaaactactgttgagtcttgttgggggtatgtggtcatgggcaggagataagagaggagttaggggttaggagagaagagctccctcaagacaataggcag

SEQ ID NO: 54279 - DNA, 1082 bp, Bovine  19866880401139
  misc_feature (1)..(1): n is a, c, g, or t
nggagggtggtgatggtgtttataaaaattcccttgagtatatgaatatagaactagaatccatcaagtcatcagtaacacccattggctagctaaagaaaaaaatcatgggacttctctggtgatccagtgactgagactcccagctcccagggcaagggtcccaggtttgatccttggtcagggaactagatcgcaaacgccgtaactaaagattctgcaggctacagctaagacctagcacatcaaaaaaaaaaaaaaaaaatcatgtcagaaggggaaacagtctatttttattgggaatatgtttgctttacaatgctgtgttagtttctaatgtacagcaaagtgaatcagctatatatacacatggatcccctcttttttggatttccttccaatttaggtcaccacagagtactgacagagttccctgtgctgtacagtagctgctcattagttatcaataaaaggggaaacactctttacaggaaaaacgatgaggatctacaaaaatcagttcgtgctttaagagcgagcatcatacaggaacgtgcgggccacatccccaggtggaaggtattgctcctgtttatggaagctatacatccaaacttgaatgtcaacagactaggtgaatcaattagtggctgaatgaagcaattgaaatgcatccaacttcctacttggaaaaggcaataatgtttcataataatgaatgttaataacctgtgatggtatgtgatactggccagtgtcaaagagaagtgttttgtgtgtttttttttttttttaataaacacatagccacacatactgtctcacacacacccataagggtttgtgcaattcaattactttaacaggaagtccctccatggaaaaagtaacaggaccaaagacccatctgtgtccaaggcaaatcaatggtgatctcaatgggacctttggagagaaatgaaccatatcatggagttaattggctaaagccagttacagagaaacgctagtctaacttctctggggaaggaaatgttaccctgcccgagttttcattatacgtttatgaacacactaagaaa

SEQ ID NO: 54280 - DNA, 909 bp, Bovine  19866880455661
  misc_feature (1)..(1): n is a, c, g, or t
nggaagcccctgagcacatactaggaccctgctttaggcacagctgacaaaatagccttccaggagttcagcctcaagttccccagagaattgaatttatcagtaaccgtcacataaaatgtttgctcactctttcagcgcctggtgcttccgagcgccttgtctgttctgtctgatgggtacagtgcgccacaagactgttctacaaatgacatttggcctgaagttccaactggcggttagatagtaaaatataaacgagaaagagggttttccactgatcagttcaatttcagtggttttaattttcccgtcggaacagattaatagtagaatgaatgaacaaattgatcagagttttgtttctgggatattaaagtctcctttctttgattcccaagcaaattcttttagagagtgactcacttaaaatgactaatatttcaaaagctttctttaaaagaaattcttgcctctagttttataccagatttcagcaccagaaagaagatactaagtttgaaaaatctttcctaaagggaagttgatgggagttccctggtggcctaatggctaggattccaggctttcactgccatgacctgggttctatccgtgggatgaaatagatttctcacaaaccgcaccccatcaaaaacgtgaggttgtttaatatctcaagtatatatacagatagaatatatgccctttgttttagaggaagtttagggattttgctgcattaaataagttgtggatttaccttaggaaacagctaaattagatttttgcctcctgctttaaatagcaaggcttttttggtgaaaggacaggaactattaggttttacaaactcagatcaacgtgttcaggaataaagtgtaagagtttgcagggaagcaagaatag

SEQ ID NO: 54281 - DNA, 1442 bp, Bovine  19866880522905
  misc_feature (1)..(1): n is a, c, g, or t
nataaataaatattaaaaaataacaatcagtttcatcagattgcaataaaaatacattaaatgatttttttaaaagatttgtaaatgagaaataagaaagacttagctcatttatatgttgaatatttagaagctttcttggggggaaagcaactggttgaattgaagtgatctgagttttcaagcacagatttagatgcctcagtccatttaagctgctataacagaatcagttcagttcggttcagtcgctccgtcatgtccaactcgtccatgtgaccccatggactgcaacatgccaggcttccctgtctatcaccaactcccagagcttgctcaaactcatgtccatcaagtcagtgatgccatccagccatctcatcctctgtcatccccttctcctcctgccttcaatcattcccagcatcagggtctttgccaatgagtcagttctttgcatcaggtgaccaaagtataacagaataacatagcttaaaaatagcaaaaatgtattcctcccggactagtgcctaggaaatctaagatcagggtgctggcatcagggtgtctagtgcaggtcaacttcctggctcacagacggctgccttcttggattgtcacatggcagaagggaggaggagctcttcagaacttctctcagtagagccctaatcctattcttgagggctctgccctcataaccttttcacttccccaaatctccgcctcctaacattatgcatcaggggttagaaattcaacatatgagtttcagggggacatcagtgtacgatagtggataaatcacttcgtatgtgtgtgtgcgcatgttcgtgtacttgcacatgtgttattcacttcctctacaaaactctccttggaaatttcacttgcagctttgcttactatgaattttctatacacttgaggattaaaatgtccctgtttggttttgcttccctgttgctttcccaagtacctgggtgtttgccacttctgctatgaaagcattagaaagctggtgctaatgcagataattcaaatactggctgcatattttcaagtgtattgttttggagaagtttgaaggtcaagggtcagtatacgctaacatttgtgaccctgtggaccgtagccctccaggcccctctgtccatgggattctctaggcgagaatactggagtggattgccatgacctcctccaggagatcttccccacacaggaatcgaacccatgtcttagatgtttatatgttgctatttataatagagaagatcaagaagcaagcaaactgtagcaatcagagaattaatattaaatatactatggcacatcatttcattagaatttatatagcaactgaaaaggataaatatggaggctttgaaggctttaaaaagtattcatcagcccacaattaataaaaacagggaaaatgt

SEQ ID NO: 54282 - DNA, 918 bp, Bovine  19866880527165
  misc_feature (1)..(1): n is a, c, g, or t
nttctagaaaaactaaccgagagactttgtgacatcagatacatagggaggcagagtagggtgaaagtctgtactctaagtgagtccctctccctgccccctccccaacctagcctcagaataacagaccaggagatggaaagattcttttctgcagaaactgacacacaccaggaaaaagacctacacgtattgacatttggaggctcctggtgaaaaagcccattgtcgacccagtcttcctagaataaatcccattcatgtatactggacttctagtcagctttttagggtctcatccttgagtggcagtcaaggatcccaggtgaggaaagcatctgacatgacagagagtaaaataatcaaacaggaaaacaaaaggatctatgaagaaagcagaaacaaaagaatgagtagagacagtgaaagtaaattatatttggtatctttagagccataagagaagacatcataactgcaggatgtgaagaaaaagaaacaagcaaagtaaaaaagaattcttggaaataaaaaaactaacaagaaatttcaaaaattctgtagcagtgttggaagatatagttaaggaaatttccctgacagcaaagagagagaaagacaaaaggagaataaaagataagaaaattagaggtgtaattcaggagattcatcatccaataagtagttttagagaaaacagaggaaaataatgctaaggaaagtatcaaagaaataatatgaagatacccttgaaccaaaggataaaattcttgatgaaaatatccagcacaatagttgaaaatggacccagaccaagatacattactgagacattatagaactctaagagtaaaaaggagccctttagagttttcaaagagaaaactataaagtttacatacaaaggatcaagaatca

SEQ ID NO: 54283 - DNA, 626 bp, Bovine  19866880528365
  misc_feature (1)..(1): n is a, c, g, or t
ngagagaggtagaaaaggtaatttatttaaggattaaaagaaaagtaagtggttgatactgggttattatgaaaaagaggatgtttgggggagtatattcttggtcatagaggctgattttaaggaaatcctttctttcccaatacaagtctgggggtttgggtcagactcaaaactgtttcagtctgatgtagtacttggaatcacagcattgcacaattcctgtacacacttttcccacaaaatgcagcatggatccttgaagctgtgtgacgtgctgatttatggatatgtctctatctgtatttttgagaagtctttagccattgttggggggggggggtcataaattcacataatcactgaagcaaagcagaagccatgatcttaaatactatttgttcattttatcacgtataaaatggggatactatttttggctcacagcgttaatgtcaagattaagtaaaagagttaatataaagatttctacactgctaggcaaatagtcactcagtcgtctctgactcttgctaccgcattactgtagtccacccagctcctctgtccacagaattctccagacaagaatactgggagtgggtagccattctcttctccagggg

SEQ ID NO: 54284 - DNA, 773 bp, Bovine  19866880651368
  misc_feature (1)..(1): n is a, c, g, or t
ncatttaatccctatactgtatcgggttgggttttttttttttcctttgccattacatgaggcttacaggatcttagttccttggtcagggattgaacccgggccctcagcagtgaaagggtgaatcctaaccaccggactgccagggaattccttatcaggttaaattttaacaggtgaagaggtctccagcagggaccattagatcaccctgaatgaaatctcagtgaatatataagtcttggtttgttccaaaatgcctttgggtaagactttcaattctgtcgatcttagctgaacctcttatgagttcaaaagaagcaaacactaaatctggctcaagaaaccaggctgtatgcgttaagcctaacctctgttgacaaaaccaggcagaatcagatgtcctggtttggtaaagaatgaaattttgctggaactctgctttttataatcagcattgtaagctgaatggaatgtttagagacaacttcaatatttaactggcaaatatcctgagtggtagcagaacacggaaaaccctttgtacaatagctatgttgtgtgatgcactgatatccatgagacttccaagctaaatttcgtgttttaaagcagttgttactttagcggaaatcttgaggttaaacctaacacttgtgatagttttcctgcttgaccagaagcctccttatttattgagcatttgctgtccagctagtagagagcagtgcttcatattgcaggctcctactagttctgtcacttcaggcggg

SEQ ID NO: 54285 - DNA, 1417 bp, Bovine  19866880651948
  misc_feature (1)..(1): n is a, c, g, or t
nagcccaaagcccataatacacatagtgttttcatcatcatcaaggtcaggttggtttctgcctcccagctggggtggtcacagggcagcgagctgcatcagttgcctggtcggtcagaacaaatggacgggtccctctatccctctctccctcctgctcttccttcctccctccttccctccctctcttccttccttcctgttgagttggggaagggatggtttaccatctgccaaacattgggccaggtgtttgggaatcctgtgggaacagaggtcctgtaggcttctgagtcccattgtggggagaatgacatgacaaccagacacaacagctgtgaggaatgctgcaaaaaaaaggttcatgggggtgtcagggtgaagtgattgatctgggaggccgagatgagcattctggaggaagtgatgcttgagctggtattttggaggggtaaaaggtgaggaggtgggtgggggcagcctaggtggagagcagggattatgcaagggcccgatgggaaaacagcagagcatggaaaggtgagtgaggggacccagaaaggaggtggggctggaggggaaaggcagggcagagcacagacactttcagagccttgatgctcagagcccagggaagtcttcaaagggatggggctgggagtgacatttggggaacactggatgcatttgcgggcacccgcatgggcccagagcctctccaccctccccgtcaagcagcatcgatgcatagggacgtccccagacacagctgtcaagcaggaaaagtgaaccaggaaatggtggagctgggggcagggcagggcacagatggtcggagagtagcgttctcagcaccaccttctcaacctagtccgcgtgaagctcaggccccccaggtctgccttctctggattctgcacacacacccccccaacccccggagtcagctgaacatcttagcaggaggcttccgtggccgcctctgccctggttacacggcaggtgctgtgagtcacccacctgcgtggagagtcaggggaagaggtgagaacgtgagtgctgggaaggctggaaaagcaggtgggcgcttggcagaggcccagcttctcggagctggggctgcgggggtggggagcagcccctcccccgtggccctccccgcagaagcctctgcggagaaaccttgggtcccatcccccgcaggatgcctctccccggcttccctctcccctcgcccccaccctccttctccctgggctggctgtcagcagactgccaccatcaccatggctacgcctgctccagctcgcagctccagaatcagcaggagtcagggcagggggagggcggctgggctcattagtcgtcttattgaaccgaattcttctaaacctgtcttgtggctgacactgcacat

SEQ ID NO: 54286 - DNA, 931 bp, Bovine  19866880667150
  misc_feature (1)..(1): n is a, c, g, or t
nttttagaaggggattgcttctagaacagttctctaaataagtaattatcaaaggggcaccatcctcatccaaaccatgtggtctgagattggaaggggacccaaggaaagtcagggagttgctgcctaaggaaggggtactgggtgctcaaccggcagaaacaaaggatgtgtgagcattggctcatcagtctagatctccctttagagacaaaaaggaagggtatgtgggcccagaggagccgacaactccaatgtagaggtccttcatagctcttgcacctaggaagaaattttaaaagctgaaatatcgctggcagttactattaaaggatttacttgttaagttgctaaggaagttacagaaacagatggaccatactacttaggagatgaaatctcaagagttcctgggggttatggggccccatttccatccctccctcactccatctggactttgatgtgggctgtggcaaaaataccaccactcgccagcagaactgcagagtttaaaacacgataacttcacattgctgcactgatgacatatctcagctaccgtcttagatgtcagctctgtctgagactcttgccttttatccttttatggtgccgggcaagtagacacttgctaaatgaatagaagaaaacatgaacttgtaaacaagcaatggacatctattatgcatctgtatacaccaaactcagggctggttagtttcacgtgtaatttaatttaatctgcataatattcctgaactgattatcagagtggtatcttcaaggaatttaggctctagtttagaatataaatcataatggaaaaaagttacatgtaaaaataatagatagtggtattggtataaagataggtatatagatcaatggaacagactagagagttcagaaattgtcctacacatatacg

SEQ ID NO: 54287 - DNA, 976 bp, Bovine  19866880688438
  misc_feature (1)..(1): n is a, c, g, or t
nataaaagagaagttgcatataggttctgattaatttatcatgagtgtcaagtcttggctttcagggtgagagtaggggaggaatgacataggtgatgaaagtccacagatagcacgaacacccaaatttaaccagcaatttcaaatcctcctccactaaaatatttttttcatttttcattagaggtagcaaggctcagcccaccttttatggctggatctaacaatatgtgaactcatcagaaggcagtcaagtgggtgcaagaggaacagtgagaattgggcattgttggcctttctgaaattgcaagttgaccactcttcttcactctgttggtttcatttagaagcagcaccagattgaactgcaaggagatcaaaccagtccatcctaaaggaaatcaaccctgaatattcattggaaggactgatgctgaagctgaagctccaatactttggctacctgatgcatagagccgattcattggaaaagaccctggtgctggaaaagatagaaggcaggagaagaaggggacgacagaggatgagatggttggatggcatcaccaactgaatagatatgaatctgagcaagctctgggagattgtgaaggacagggaaagtctggcctgctacagtccatagggttacaaagagtcaaaaacgatggagtgactgaaccacagccacatcagcaatgttggtttaaactgggggctgtcaagcagaacttttagaaagacccactccctctttgttcatcactaaaaagcagctcacagatagaggaccctctgtgtaaaatgtgcttgcagtgactgcaggcaggatgatgtgacagagcagaagctgagctcccagagcagaacctccaggctaaactctaccagtttgagcttctgatatactcagactcaacccaacctgtaaccgtcaccatgcagactgccttaggcccagcccttcccaaaagcc

SEQ ID NO: 54288 - DNA, 1111 bp, Bovine  19866880709031
  misc_feature (1)..(1): n is a, c, g, or t
nccctgtttttagtgatgggaagagtgagacctggagaatttaagcaaacagcacaataattaaaatccagacagagtaaaactcctaaagacaccttcctattactcagtgttgcacttctcatgactctgttttaccacacgtgaaaaattaagtcatggaacacccacattggaacatctttcccttcctgtggcttgagttttgttctgagttttgtgtgtttctgaaacatttctgttggatgtgtgttttttaatattgtaagcccgcgcaaatccttgatggaaacaggcacaccataaagcacaattaaataaaaaggcagcagaacacacacagcgatcatggaaatgactccgatctccgtctggggtgggggctgtgggtgttgtctttgtggctggcagacagaaggttgtctgaacttggttatgagagccagcagagtgagcttgaagagaaagataaacatacaacaaccgttcaaagcttcaggtgttatgattgctatttgggaaagactctacatgatacccgctggtgcgtaggaatttcactcccagggataagtggctcagggaactctgggactctgctccttcagattttcccgtaatgagaattcagaacaattgtgtgctcgctcatcaggagcgggcgtgcctcagagttgaaacccagggcagctaaagctgctttatctctaaacaccttcaggtgggctcttcatacaagcaacctctctctctcactttttctctctctctctctcacacaaagtctcagacatctgacacacaacctacattctcacgtgcccccagacacatacacccttgaacacattctggctgatgacacgcttgctgcctatgtgcaaaaacacacaccagctcacgtaacactcacacatccacacattcacacgcactcatactttccctctctgtctctctctctcacacacacacactcagtctctctctcacctgcacgacatgcttctggcagagcacccgcagctgtactaacctgccccgcctttgttcccaggcctggcctcagcagcattttcccaggcccaggcttcctttaactgctgcttcc

SEQ ID NO: 54289 - DNA, 1978 bp, Bovine  19866880935848
  misc_feature (1)..(1): n is a, c, g, or t
natggacaaaagggcattccaggtgaacacagactgcaggagcaaaggcatattgaaaaaaaaaaaaatccaggcttttctctcttccattgcaccaacccttaacaaacatttttccagcgatcaaaccgctggagcctgtgcttgtaatcctctactgtgacatctctgtgaggcacggctctcctgcctccctcccttcatctcttcctatcctgcctcttcctgcctcgtgttctcacgctgtctctccagtgtcttttcaaccttctaaaatgaattccttgacaaacgcttgctttcagcccggaagaggcgttcctgcagggatctttaataacagcaaacacccggagactctcacaccttttttaacagaccttgttttgttgttcttttccctccttggataccagaagcttaagaagaaattaactcaagaaaaaaagaaaagaaattacctcatcacccacacaggcagatcttgactgtaaaagcagtctttctgacagacacttctggcgcccggtctccctgattaagggcagttttacacaccagcaccctgacgggggaggcgaggggaaaggcttggagggtgggttccagggagaatttttccatcttcagaaggattattaaacttggaacttatgtttctccatgttaatcattgagattgaaggcaagaattctgtttctgatgagaatgtgtgcatgtgtgggtgctaagtcacttcagtcacgtccgactctttgagaccccatggactgcagcccaccaggctcctccgtccatggggattctccaggcacgaatactggagtgggttccgtgccctcctccaggggatcttcccgacccagggaccgaacctgtggttcttatgactccagaatggcaggcgggttctttactactggcgccacctgggaagcccctgatgagaatggtggccaggcaaagggaagtcatttcaagctccaggaagaaagcctgccttgtgcctgcccgtgtggcgtcaggcccactgatctgggcggacaacgccaagctttcccgaatgtccccaaagggcacactcaggtagcagggatgttcaaaacgtgtctgttaagcaaatccactgaccttctgtgaagactctgctgtttcacgctgcgcagtgtgacttggagagactcctgggtctccagttagaaaactgcccagttttcagttatctgtctttttgtcttgtcctttacttttgattcttacctttagatttgagtgaggactcctatgctttttgggttgaatcatgccacgtcctggaagaccactggccctgatcatctccacaaagtctgtctctgctctggagaactgacactgtccctttcataatatcttcagctcagtctagacagttctcaaataatcaaatgctggagagaaggcagagctcagggtgaagtagggagtcagcctaacgatttctttgttggaatgatcccttgggagtcgatgggagtggaaatccaatttagggaccacagtccttccttggtgtctattcaattccattagaaattatcacagcaaaatcatggcatctcagcattaagaggatctggaggtgttatcttagccaagctcagcatcgcacaggaatcctccagaagcatcccagctggctactatcgctcaaataatcagacatgttctctgatggggtgaaattaattagagaagtcttccgcagactaggtgaaaactaaaaatctgcttatgttgtagcttatatgcatggatactaatgcctgacatacatatccataacatttgtgtggactgaccaactgactaattaaatgaattataaaatggagtaaattggcaaggaggcagaaaggggaaggaaggaaagtaattgcagtgatgagaggcagtgggaaagggtgggggaaacctttttctttaaggatttttttc

SEQ ID NO: 54290 - DNA, 1242 bp, Bovine  19866880955955
  misc_feature (1)..(1): n is a, c, g, or t
nttaaaaaagttacatgactttaagagtttagctgcatttcaatcccagaacaaaaccacttttattttcctgcacataaccatgaaaggatttgagggtactgctggggaaggatctgtttatggattttcgatctgaagttgaaattagatgtggttcttattgaactatcaagacatgattgcaaggcacgtaactggtgagtggcttatatgaactgggtagaaatgaaggtgtggtcacaaaccgcacgtatgtctcgcacagaactaagctctcgtaaccactgcttgaactacaatagaaaatttaaggagacggaatggattacggtaagggctggcaaacgccttccataaagggccagacagtaaatattttaggcttcgtgggctatacagtctctgtcacaattactcagctctgctgtagcagcaagggagcagccgtgggtgatatgtaaatagatgtggccgtgctccaataaaattttattgataaaaacaggcagcgggccagatctgtctcacaggcttaagtctgctgacctctggattgtagcctattaaactgaggtaaatatggatgcagtccttagatatcacgatgtctaaatacataggaatagatttgcttctccctggggaaacagacaaatgcaaaaccgtattaatatctatgttctcaaccatttctatctatttacttagccgaaagtgttaagacaattaggaaaatgaaagttctaccttgatcaattaaggaattaacctttttttttttttttccaaatctttcttcttttatcacacgactaacaaatgtgtactgagggttaaacaataaaactatagacaagttcacacaagaatataacaagagcttttaacattctcagcactatcttccaaactttgtttttacaaacatgagaccaaaatgtgtacagctttattttatattttctaactcaacagattgagcttttgttaaatgaaaaagcaacgtacgcagccataaaaaaggggtcatttgtcgtggtgtggatgaacctagagtctgtcatacaaaacgaaggaagtcagaaagagaaaggaaatatcgtatattaatgcatgcatgtggaatctagaaagatggtactgatgggacctatttgcagaggaagaatagagacagacgtgggagaatggtgtggacacagtgggggacagggagggagggccgagtcgagagagccg

SEQ ID NO: 54291 - DNA, 1158 bp, Bovine  19866880956796
  misc_feature (1)..(1): n is a, c, g, or t
naatgcacataaagcacaataaagtgaagtgcaataaaatggagtgtgccactgcagggttaggacctcagcctgtgaatttaggtggggggcacagttcagcccataacaccattccctcctcattccggcaggagacagaagtgtattctagacaaactgaaccaggaagactgcagacttgggtgtactgagggaatcatcaggactgaggcaccggacctataacagggagagtttgtgaaggccatatgctaatcagtgagataccatctcctggtttcctccacccagcccagtgagccaggaaccaagcttatcccaccagcagccacgcctcccctcaaagcaggagatcagaagatctttctttggattaattgtaaggtcttagagaaaagatctgcagatactgatgtgggtgtttcccaatcaggaagaaagagagagtggggggagaaagaagaaagagaagaaagaaaaaggagggcgaaaggaaggaaggaagaaatgaaagaaagcaaggaagaaagaaaaaagagggctattctctaatacatctcctttcaacaaagtccatcagtcaacaagtcctaccttcatacagagagtttctaaggagctctttctgccacactcttgaatatagataagaggttaggggtcagacatttgagaaaagcctccaaaatgaagacttgaccaacatgtaactaaaagagtgattttaagaaaaacagatggtacaaagatggaataaagattatataattaaaatatgagaaaacattgcctccatgaaataagaacagctactatttatttttaaaaaatttttaatggaatgcttcatgaatttgcttgtcatccttgcacacttaccatgctcatcttctctatattgttccaattttagtatatgtgctgccgaagtgagcaccagcatactatttaaaagcaatgaaacaaccatcagggagtcaaaaagggctcatagacattaaaatatcaatatgaaagcctaaaaagaggctaaaaagaaagcataaaaagagccttccacggtatatttgaagttagaatctaggaaatctcccatacagtagaaaaaaaacaacaaaatagagagtaaaagagaaaaaaaattaacaattgtaa

SEQ ID NO: 54292 - DNA, 951 bp, Bovine  19866880975425
  misc_feature (1)..(1): n is a, c, g, or t
ncacctgtactattaagtcttccctgggtcctctctacatgcttccttgtggttctgtgggcaaaagccaaaatgaggacaggaataggagacagatagatgggagctgtacccagttactgcccccaggtcctctgctccccgggccttgacaacccaatgtgatgtgtgaacgtgccccaccgaggatgctggacagtgatgactcaaatgtacccagaaacaggaggcttgccagacatggtcagctggttcaccaagttcacaggtggctgggatcgcctgccgccaccgtggaagccacagacaggagaataaagtcaaagtccctcctgcttggagatgagtgttgccttgaagcttgttatataagtgagctggatttccagcctaagggaaagacatgcacgagaacccgcctcacagtgggtggggattgctgtggtcatcctggttgctgacagaccccttggtaaaagcaggcctgtttctaaatctactcccaccttaccaactgtcctagccctctctgagctcagggccttagctggcactgcaatctctggtttacacaagaagaaactgaagctgaggccttttccaaggtattcttccctgccttcacttccggcaattattataaagtacactcattatctttacaatggtttggagattaaagcttaatttggtctgatatttcttcagctttgccttaatagcatttgtagctataccagccccactaggctgtgaagccaacagattccttaaatcaccagaggctggagtttgcatcctcatcttggttcctattggtctggccagaggcacttttcatgagaacattttaatgggtggtcagggttttctgcagggacagctatctctgtaacaggaaaaatgagattctcttaagagaaaagctggcctgcaggaaaaatgatcagg

SEQ ID NO: 54293 - DNA, 1364 bp, Bovine  19866881102130
  misc_feature (1)..(1): n is a, c, g, or t
nttccttcagttcggttagtcctcagtcgtgtccgactctttgcgaccccatgaatcgcaacatgccaggcctccctgtccatcaccaactcccggagttcactcagactcacgtccatcgagtcagtgatgctatccagccatctcatcctctgtcgtccccttctcctcctgcccccaatccctcccagcatcagagtcttttccaatgagtcaactcttcgcatgaggtggccaaagtactggagtttccgttttagcatcattccttccaaagaaatcccagggctgatctccttcagaatggactagctgaatctccttgcagtccaagggaccctcagttccttaggtgtcaataaaagtgcttcacaatcatgatttagaaactgcaccaataaggtcttcccacatttacactaaaggatctgcttatatttgtattaagtatcatgaattgtatggagccttcacttcaccggaacaaaatgaaaccccaggtgacttataatgaagcttttccatcatcctcagactcttgaagcctgctggaaactggtgcagcacagaactgaagttacagatctctgctgcttctgtgatttcctggcagaacttccttgctctaatgtctctgactccagtcaccatctgaaagtcctccccagaggtctgagggcctcacctcctatgtctggtgctgctgctactgctaagtcgcttcagtcatgtccaactctgtgcgaccccatagacggcggcccaccaggctcctccgtccatgggattttccaggcaagagtactggagtggggtgccattgccttcggtacttaattaaaaactactcgttgtcagaagcaagtaggctctcaattcctgcttagttaacgtgagcctttcagttttgagatgtgttattctacccacatagcaggtgttccttaaatattttgtcaacggggagaaagaatgaatgaaacattcaaggagagatggggtttgccttttatgagattagagtgaaggagcgcatttgctggaaactgtccccagtgagtgaagggatctgcttttggttgcaggccactcattctttccatttcagccatcatgcattgtgtacaccatccatctctcatcttgggagataattcattccaggatttagaatgtcactgaagacatctcagcagggaccttttatttgtccacaacaaggatcatctgggggatgtgctgttccccatggcagagacccagactcaaagggcaatctatcacataccagcttctcagcatcaaaaggagtgaagcaagtcagaaagggatttgggtttgttgttaagagtgaaactgggcag

SEQ ID NO: 54294 - DNA, 1710 bp, Bovine  19866881103498
  misc_feature (1)..(1): n is a, c, g, or t
nccctccggcctctcccggcagagagaggtgtgttcgctctcccgcccttttcagtgctctttctgcggccggggccgagctgaactacctccaggcttcacgtactggaggtgcacgctttacagagagaagcccatctctgaaagcacagcatgcattagcatcctctccttcagagagagctatttttgtctttcgtcttccgaaactgttccaaagttggggatgcaagtatcaggaggagaagcaaaacgagccagcgtctcccgctcagaagagagggaatcactgtcgtttcctcaacaacataacaacaactgcagcagcagtaatggagaacaaactgagttgcagccgagctgcccttgggcacaggacaaccagcctgcccagatctctttctgtgggatttctttccgtacacttcacaggaatgaggttcgttgccatagttactagcaaatcacatggtatagcctcgctccctagaagtgccggagaacagcaggctcagactgtgatgggggggagaagatgccttcctccccagcatggttgcttttcctgagcaaacctgcgcagcggtttccccgttctgacctgcccacttaggggtcagggccagctgttctttggggcgccaattcaccgttttcctaatgagatcagcagcgcaagtttcctcatgcacttttccttctggtttcaggaacccctctccccctctccagtccctcccttttctagacacacacacacatacacacacacacacacacacacacacacacatgggtgatgtactgaattgctgagttgattgcggggtggagcgtgcagcctacaccacttgaataagctcttttaaaatccgaggatggcatgagtaagggaattttgaagctgtgatacaatcagtacactgatgcctcaagggggtggagggagggagtatggactcgcccagatcctaaagagacccggcagggtcgcctttcccaggcctagcctcgatggggatttgtgaccctcaagcctcagagttacggaattgggttcactctgaccaagtctggtggggtgggggtggggcgtggccccacaattgtcgccttccagggaagagaaagccgtgccctcagagaaagctctaaaaccacaaagctctttacctctgcgcttccccctccccccttccttccctacagaaccaggccagttagctcaagttccgtgtgcaggagcaggctagaagggcacgtctttttccctgacaattacagattgcctacttctttgtgttcagattgtatctgatcttgtcaattccatcagattttctggtctgctttccccattgcaaaagcaaactctggatgatagaaacacacacagaagagtcagcaggtagcaaaagcaggaccgagaagggactctgcccgagttaggcaaggtggtgcagaaggcttgctcagggcccctgcctcaaagagctcagtgtattcagggagaggaggcaaaggtccctctcaaaggtccctaaccccatgggcaccatgagactagggccagggccaaggggaccagagggttctaaaatgaaggggggcagggatgcaccctagaggtatgtgaaactctattcggtggggtacaagaaatattagaacgtccatttattttatctcttctgtgctatatgtattttg

SEQ ID NO: 54295 - DNA, 2892 bp, Bovine  19866881272825
  misc_feature (1)..(1): n is a, c, g, or t
natgtgtgtcttactgaacacatgcacacagagtgaatgtatgggtttgtgtgctgctcccaacttcctttactggcagccagatcaagtgacacctgagcttggccctctgatgagaaagcttaaggaagctgttcaaggacagcgctggagagggaggaggtcagctctgtgccaagaggactttgatgggagggagctgagcaaacccacgggggccaccacccacctgtcttcctggaccactcccatgagtgctgcccctccctggggtcgtgtggggtttccttctcttctagtccaagggaggtgaagagggaagtggtcaggcagagagagggagcagccttggagtcaaacagactggggctgaaattcctgctctgcctccagaccctaagagctgtgggtgagctccttaatggattcatccttggcttccccatctgatagaggaatgtgctatgatacctagcacagaagcttatggggaatatcaaaaggatcaatgcatcttgaaaaaaaaaaaaaaaacctatatatagcactctgcacaaagtatatgctcaatagatgatattattgttccactgaaagagtaggatcaccatttctttcttccaggttgccactttgggtcagattcacagctctcagagtggagacaaggcactactggaggtttgtagaagctctttggttcaacttgattagatattagggtacttcggaagccgttagcaagaggccccagggttgggaagagttaatgtaccagaacaatggcaactgttgtcaccgggaaatcagctctttggtttccaaaaggaaagcagaaaagtccctcttacccaacaaacccaactcaacactgaaaattctgactgcagtcaaatatgcctcttttaaaatgaaacactacacctgcaagcatgaactgattgcctggcttttcaagggccagaaagtgaaataaagaaacgaactctcaatagggagccccccgcccccccttccccgttactgaggagaactgagtcagaacaatgactgagcggctgggaggccacctgccttggaggcgggaattgagtcaacacaggccctaagcaaacagtcgggctttagtgttctaaatcagtttgaacagtggttaaagcctgtgggccgaggagccctgaaaccctgcacacatcctctattaagtccgagccaatctccccgggccgacgctgtgtttactcagcgtctttcattgcaaaatggccgcccctttagcggggtggggcgggggactgagcaaagctgaggagaggggcggtgccctgagtccgccgggcgctggctgccctgcctgctgagaaagcgtggactgcaggtccctcacagagaaggcttggggttctataaccccaataaagtggagacctgaggtgaagagaacgcaatgcaaagacaaaaggcataaaacacaccctgtcagcgagaggccttgtaaatagctttcaagattctcttccaaggtggggaaaggacttgagagaaagagagcgtgtgctcaggttcctggtcgctttggaaagcaggtctcacccttggccagcaatgcctctccgtctgccacttccgcaccaagaggtcttgagagtttgggcagatgagaactaaagaactttgggaatgtgtcctaaggtctcacacgtgaaaaaggacacgatgtcgtgtccatgcgtgaaccatatttatggcattcccaagaggtagctttgtcatcgagaaaagctggaaatattttcttcagggtgagggggcggggaagggtggatctcataaaccctagtcgcacaacatttcatgttttgcagcaggaaggaagtgaggaggagacaacaggccaccagaggaggcagagagcccatgcaggcgcaaggtgcttttccacacagacaggcttggtcttcagtgcatacctgtgtctcctggcgacctgactcccaccctgactcacacacagtgaggagggctttctggggctgagatataagtggacaatgagaagtaagagggtattaacacccacgcccaaacttccccaggcctggcctcctctaaaccttccggtgttgcaaaatatcttcttcctcccttcttccatcaaaatcccatttcttcagtacagtggttctcagctagaagggattttgcacccaaaggacatttgtcagtatctggagatgtttgtagtgattctaaccagggactggagtgctaccagcacagcatcccctgtaagtagaggtcagagatgttgctaaacacccgacaaggcacaggacagctccccgcatcaaagaattatccagcccaaaatgtcaccaggactgaaactgaaaaccttgctggcatgtactcacatcagagctgtaggactgaaaagcatctatttgaactgattcacaatgtggtttgaatggctgataatctacgtataaccttccagggtcagttggtttttaaaagaggttttcactttttggcaagcattcatatggtttaaatacaaatgcaaaaggaagagaagacttttgagaagctacggggagcaatgttttatacatatgtgttggggaggccctcctggctattccttcattcttatcatgaaggcatctacctacttgttccaggggtagaaagaccagtcttgtgcactcatcctggcaagagctgaaataagggccacgtcacaaaaatacaaagacaagtgttaacaattccactcaggtacctagagtagtcaaattcgtacatatcgaaagtagagcggtggttgccagggactgaggggaggggcagataaggagttatgtttaatgtgtatagaatttcagt

SEQ ID NO: 54296 - DNA, 1319 bp, Bovine  19866881273021
  misc_feature (1)..(1): n is a, c, g, or t
ntcaggtctccttctttcccaactgggctataagggaagcccaatagaactgcttagtctggagaaacctgaactgattgcaaggagcagagttgcgaagatttctggggagattggtggccatcttcacatcttcacagatcttgagggttttgacagaacacttgtgaaattgcctcttaattagcatgtaccaatggggggggggggcgctgttgagtggcaagggcgtgggctgtggcaaggccatggccaaatgattggggcaaatcctctctgtaaagccctgtagcaggagcaaaggctctgcactcacacaggcctgggttctaagctcagctgttgggcgagttgctgagcctctctgtgccttggctccctcagatccaaaatgaagaagctaggctggaagactcaagaggtacagtctagatagaaaacttcttggtactaaaaatgtggcgtatgtgcatacaataaacaaatggaaactttaaggttatcttatttggattttgctcctgaacctgtactaatattggtgatgagaacagccagcctgcttctgttgcactccacgatgccatgtaatgatcggaaagagctgacatgttcacaaaagcacttttctctgtgggtaggagtggaaaatagtcccatttagctgatatcactaatttttaaagaaaaccatatgagctaaagagaactgaagatgaatgtgggagctatgagtcaaccagtgaatttcaaccacattaattttacattataaatgacacagttttaaattttcttagattttataaaacgtgatttttcttttaaaaagctcatcaagatacatgtcaatacatgttaaaaaaaaattactgaacatttactcccatcctaacacatcttcaaaacaatgactatgctcttagctatttttaatacaaaatccattttctagcagccttaaaaactgaaagcaatacgttttgtgaaaactgtcttttaataaaaaatagtctttgttatccttgtgtggtttttctccttttcaaattgtttcgtaagagataatgttgcttaaaaacatccagcatttccattagacaggatatattcaaaaagcttctagataagccacgtttatacatagttcctttaatcttagatatctaatttttaaatagcagaaataagaggttgctttcctttttgcagtagaatcaaagtggcattacaaattttcaggtagagaactacaatataaggcctagagattatgtaagaaacatccgtgcttccattctcacctcaaagcaaaacaa

SEQ ID NO: 54297 - DNA, 1852 bp, Bovine  19866881305979
  misc_feature (1)..(1): n is a, c, g, or t
ntcacttgtcctgctgaacaaatgtagttcctttgctttctggattaggaaatgtccgcaggtgtcacgtcccgaagccagagctcccagagcatcttctgtttccatccctcagggatacaggcaaaaaggtctgtgccacctagagctcctccatttcacaccagccagcttgccacagcctttttggaagacgagaagaccatagcgccgggtccctgacacagcagaactcctgagctgcctgaggcccagggcagtgtctgggcgccgccttcggtcgctagtgagccatctgcttgagcctagatttgtttcaacacatccaaacacaccctacaggcccagcgggaagggtggagaagcctgtactgtacatgacacaccagggaagctctggttaccaggagcacaaacaatgcctcattcaggggctcaggtgagtgtcagggtaacttgtcactccacaggcatgcacctcacccttccctccctcttctgcttctcctcccaacctcatcttccaagtccctggggcggtttgaacacttggtgtccagaaacccaatcaagaataatgtgctgacagcatgacagtcaccttgtcatttgacccttcacttcctgaaatcccatccagctgtgtctaaacatcctacagtttccatcactgccctactttttcagagctccttatccctgcagacgatgtggctctttttgggtcaagcgtgactataaggctggtatgagtggatcaccctggctgttctggaagattcctttcaagttccccggaggagtctgtcccagcctactgcgtgtggctctgtgcatttattgggatgcaggaggttactacctacagaagttattccttaaataaagaacagttatttaagtgtaaggctatttctgtgtagtgtagtcatagaattttaaattttgagagctggaagagaacctaagaatcacagcttcatctttagggtgaaggaaacaataccagagaggttaagtaatttggccaaagtcattcatctcacagacatagatactacaaccttgtggagactattatcaagacttgacacctaagtcaatgaactgaggttgactttaaatggaattgggaactcactatggagttcgtgtgtgtgtgtgcatgctaagtcacttcagtcatgtctgactctttgtaatcccataagctgtattttgccaggttcctctatctacgggattctccaggcaagaatactggaatgggttgcctttcccttctccaggggatcttcccaacccagggatagaacccatgtttcttatgtctcctgcatgggcaggtgggttctttaccagtagcaccatctgggaagccctaactatggagtctctggggttgcaaagagttgaaaatgacttggtgacttagcaacaacaacctcacttagaagaaggggtatggatttcaaattattttaaataatttccccccattccccccaatatcagatactctaaattctatcttctattaatcatgatgataatgtgtcctctctcttactataaaatgttttgcttcctccccccacaccccttaaattgcacctactggatttatgtaatttgggattcacttgtttgaccgaatctgctcacaggggaagatctaagtgaaagtgtctgctgctgaaagggcaaggaaagctggcctggagccatcgttctgtctccagggctctggatggtgccgtttgtcaaaagatgctgagactcttgggaaagatgatctccaaggttgaattgcggtcaaggtttgctcttccctttcttcctgaaaacgtgc

SEQ ID NO: 54298 - DNA, 779 bp, Bovine  19866881317687
  misc_feature (1)..(1): n is a, c, g, or t
ncccagtaacaacttgctaggtataaaattttaataagcatcatcgattaggaaacactctgtctcatcctcctttaatggagtctggagcaagcctatctgatgaagtagacatcactttcctagctcagggctgagtgagacagcccaagggctctggtagagaagagttgtggaaatcacaaaaatgcatactttgggaagtcctctcttttctagaatccccagtggccatgtgcttcattgccctcaagtccagctcatcctataaggaaagaagagctgggaaaagaggtttggaaattaggacaaacttgccaagtagaactaatcaatgataagatgcaaagaaagtcagggaggaggaagtagcaatgcacttagggagatgtgcctggtggacaagatccaggaacaattcccactcatcatgtaaaagccttcagtaagcccctagtgcagaaagtactgcttggagagcttgtctaggataaacgagagacaggaccagaggacttagagcaggggtactgagggaacatcttccagcccagtgcatttcaaacaagtccccaggcattacctctgacattttctggaaggggacatgggggtacctaaggatgagtcttgtcttttcactgcagtcaaaacacttgaaccacgagggttctgcctctcaaaaccaggcctggaaaccactaagggcatctcactctttcctgttatgtacagaataatggaagcccagagaggctgtgtgattgctcaaggtcaca

SEQ ID NO: 54299 - DNA, 1509 bp, Bovine  19866881386678
  misc_feature (1)..(1): n is a, c, g, or t
nttttgtttttttttttttggtttgtttggtgattttgggtaccttctcctctcgtaaatgacaatgaattaacatatatttagtttagcaagacagcttggaacttagaagtggaagtcatttgggattcttatttctacagatataattagtttcatgggctcatttaaaagtatatccacatatttaaggaaatcatatggttgactttgtatcttttggtctgtgatatatctgtattttatatcattgttcatcagtgtgagctcatcttttagtatttctctcagtaccatcactgatccagtcagaggcacttaattaggccagaaacacatatttgctcttttacaaaagcaccaaattctatgtttaaggatatgccatttcaaaaatggccttgtattcaatgtaagaaaaaaatcttttttggtattcccactcacctcacaaaatagtacatttgctggtaaattggttaatccaattgtgtgttagtcatggtaaagatgaggtagcatttttttttttttttttactctgtgctgttttcacttcccacttattttctaaaaagtaggcctattttgaaacaagataaaccctacaactgagcttatctaaagcaagaaaagcaaatttacagaaattaaggcaacacacctctggtaggattcccagaactggacactgtggagcaggaggggctgaatggaaaataagctgtgtggttctccctgccctgcagagcgtggtgatggtggtcttcagtgaggacaaaaaccgggatgagcagctgaaatactggaagtactggcactctcggcagcacactgcaaagcagagggtccttgacattggtaagttgaccttgacccttgacattcttgcatggtctttggtaaacctcccaatgttgccttgatagaaagaagagcccagaaatcacagctgagacctacatcactcctgttttgtgcctggcactagtttggaacgtttccaatatttcagtacatttagtacaaattggactgagaagtcaagattgggctaagcttagagcaaaacactttgtgtcccatagaagtcaactgtgtctcatataataatagatttagatttaccatggccaggccagtttctgaaacatatttccatgccctcttgtgtttgagcctaataactggcaggcaggccagaggaactcttattccttcctgtaacacaagtaacgtgggctcatttggatctaaggtactcgtgaaggtcacgggactagatagagcattctagttctctaattttctatcttgtgttccttctatccaaacacacgtctagtgcaaagagtactaggtgatcagactaatgcagagtttgagagagcgttcttggcagtagagaaggaataatctgcccagtgcatttccgggagtctgtatattcctaaacatcatgcttgttcttcagagattcggagcccccgggtgggactcaagagtcca

SEQ ID NO: 54300 - DNA, 1642 bp, Bovine  19866881523017
  misc_feature (1)..(1): n is a, c, g, or t
ntaggttatttgaatcaaaatttatacgtgagattggcctgttttctcttttatgctcgacttgtcaagttttggaattgagggtatgccagtctcacaaaatgttttggggaagctttccacatttttctggggtcagaaatactttgcatctaaaaattagacaggaataacccataaaaccaactgggggtctggaacctttgggcaggtgtgggagatacatatatatacacacatatgctgctaagtcacttcagtcatgtctgactctatgcgaccccatagatggcagcccaccaggctccctcatccctgggattctccaggcaagaacactggagtggagtgccatttccttctccagtgcatgaaagtgaaaagtgaaagtgaagtcgctcagtcatatccgactcttagcaaccccatggactgcagcccaccaggctcctccgttcatgggattttccaggcaagagtactggagtggggtgccatcaccttctccaacacacatatatgtaattacatatatatagctgtatactgggaacccagattaaaacttgatgaagtattttaatatttgcattaacacttggtattattttcagtttggatctgtatgtatttaaacctgtttcaatattttagttgttctttaatcactgccctatgacctaagtacacttagggaatcagtgacttttaccataaagggccagacagtaaaaattttagactttgcagggcatatggtctctgttcgaactacccaactctgctgctgtagcgagatagcagccactgacaatgtgtcagtgaatgagcatgactgttttggaacactgtttattggaacacagtcatgttccaataaaactttatttacaaaaataggtgaatcagagttttcagaacccttcctttatccatacgatctgtgacatcgttgtctttgttgtttagtcgctcagtcacattcaactctttgcgacaacatggactatagcctgccaggctcctctgtccatggggattctctaggcaagaatactggagtgggtagccattcccttctccggggatcttccgacccagggatcaacccaggtttcctgcactgcagtcagattcttcaacagctgagccaccagggacccatttcatcaagtccagacctcaaaatgtaacttaaacttgctgaaaacacaaaaaccagtggttcaatacaaaatatgattatgtcttaggaatgtgctcagtcctattacaatgtaatattttaatcaactgttggctgttttgagagtttaggattcaggaatcttttgaccaagaaaagggcctttgcatgtggcaatgcaagttatttttgttttttttagtttctttctactctgtagacctattaagccttctttttggccatattgccctgtcagtgaccaccagttgaacaagaatggtgattgtggactttcttgtctcattcctattttaggtggaaaagtttccacatcactttcatctataagtatgccttttagatgtttctagtttttagttcagtttagtcactcagttgtgtccaactctttgccaccctatgaatcacagcacgccaggcctccctgtccat

SEQ ID NO: 54301 - DNA, 1178 bp, Bovine  19866881587901
  misc_feature (1)..(1): n is a, c, g, or t
ntttgatatgaagtgagagggagaaaaaaataagtatttattgtttattcttttttttttttttactgagcccctccgagtgtggatgaactttttattttttatttatttatttttttaatcctaataaaaacccttggtctccaaaccacaagcaagacactcctgctttagttcagcaagcttcagcttatgaagctccactgtctcagtcgccatcttgttacccctccactccgccaggcccccacccggatgaactttttaaacacttaaatcaaaaaattctgtgtgctccccaaacttgtctcttagatgaaacaaataaacttttatatatttgaaagtatataaacaagtgtaaatattgggagtaaacattttttaaaagtattaagcaaatttctttgggagggaaagacttgattcaattctttgctggcagtgttctttgtgaattttgtccatgatctctatatctagactcaaatgctgcttgttggaaatggtttctctttcaaattagtgttactgttattgcatgctttactatttacttttctgcaatcagaaatcagtgattgatccaataattctctgtgacaattaaaaaaaaaaaaaaacgtttgaaacatgctgtcttcagtcccagtgtgtagtggcacaaagaagaaaatgtgatcaaatttatggaaataatctctgatttatccacctataaatgcagtggtagctcaggagaagcacaactgttgatgtgtcttggaatcaaagttccctaaatgaatacagaggaagagttctagctgaagtgtagttgaagctgcagtcagctcttcaacacgaaggccatcctagtaaaaatttctcagttttcattgcctcagtctaaaaattggtcttttctgtaatggatgaaagcaaagtaactgaaaagaatctgttccagttttcaaatatcttgaaaatatattgaagtgaagccactttcccttaaataggggacagtttgctggtcgtttgctctaggaagatgagagttatgccctttctctccttagtctcagcacctcatctgttgccatgtatcagaaaggcagggcatcctaaatggaggtacttctgatggagggaacttgaggagggactggcttgcaaatgagatccgcgtggataca

SEQ ID NO: 54302 - DNA, 1132 bp, Bovine  19866881997706
  misc_feature (1)..(1): n is a, c, g, or t
ntttgatataaagcacacacatgtaaattgatcagttgtaatgtaaatctcagttactctggatagagcctgcaggttcacctatcagaggttcttagaacaggacacagtcaaaatgaaatagggaatgctgacacttcccaagtaatctgaatgcaaaatcttacttgatttattggatattcaagaacaatataggagatattaatattattgtttagagtgacttatataagaattgcctcatttcccatgtcactcttaatttgcggaagatactgcctaattttcctccccaactaactaggtgcctttgcagttagctggctgctgtcatgtattattgcgtttccagccgtgtgtttagtcccagccatcctttctgttacatcagcaccatcaccctagcctaagaaaatcggagctatgacattatgtacaagctggtgtttaaactcaatccaaatccctaacatgtgaaatggatgcttagcaatgtttcttcatgtattctcaggggaattaaaaaaagaggattttcttaaacattccttattctttggactaggaaagaacacctgctttgggggctttgagtctctgtggcaatttgataaagaaacttggaaaaaagtcgaaaatctctgactccaggctgtactgtttgcttctttcatggctggtgtttgaaatttcaagtttagaaaggaatgtgccattatttttcatgaaatcaacccttattttaatggtgccctgtgttggaaacccaaccagaaatagcattccaaaatatagtattttttattgtttccagaagtgatgccatgaaagttaatgctcattaacacattgatataaaaattatatgataaatatttaaattcactggagccacatgctttaaacccaaagcagtctgtgcttattatttttgtagtgaggtttagggatttgggggacatatttttataaatccctttaattagagacatagcatccctttaaaatttagtgggcactaatagaaaacatagtatacttacattaaagttcaatatttaattttcaagaaaagaaggctgtagtctgcaagatatcccagctgctgcctgtcctaatgggagaattg

SEQ ID NO: 54303 - DNA, 938 bp, Bovine  19866880915743
  misc_feature (1)..(1): n is a, c, g, or t
ncttatttatttgttgacttgcatcccagctctttcccgattttcctggaactgttcatcttaagtttctacaggcgtgatgggtactccaggctgtatgcttcagctgcctttgtcaaaataggcatttccattgtagtaggaaaatatattaaaagatcatacatgttggacagtttttgacacagtaataatttttttcaaaggtaactttacagcgttcctgttcagagaaaggagatttattccatttatgtctaaataacatcatctgagcccttgagtatatagggtatatcagttaggatgctcttggctataattcacagaatatctgactgcattgacttagactgtgtgggttgatgattttctcacataacaagtccagaggtgagtgatttttagtattttttagtgttttttattgttgttcggtggccaagttgtgtctgactgtttttcgtgtctggtctgttttaggcattcagtaatgtcatctaggacccggtttccttcggtctggacgctctgtcgtcccccgtaagtcaggctaaaggacaagggttcaaaggccagagtgggaagtcacatcaaggagggactcacaggcgtgccttttcctctctgcacagagggaagtctcttgggaaagccccctttcatcacgtcccgtacgttttgttgaccacactggatcatcgtctattgcttgctgaagacaagggcaggtattctcacctctggttctgaccctggcgctggggggcgcctgctctggctcctggcggcccgtctctcactgatggcgcgtcctcctccgcctggtgctttgcgcagtgagacccgggctgcggtccgccgtccagaggaaagaagggcattctttggagctactctgtttacgaaaagcaagagcatccacacaagactcatat

SEQ ID NO: 54304 - DNA, 1545 bp, Bovine  19866881203214
  misc_feature (1)..(1): n is a, c, g, or t
nttttttttttttagccagagtcagcatttgttgcttagaactaaaatacccttgactaacactcaagaacctatgatacaaaattgaatttgctttggtgatgacctttcttcattgtttagatccaacagacatacttaaaccaacataagttgccttatttaaattagttcttttactccacaaaccctgtttttctggtctctgtgttagggaggtcaatttaacaggaagcctattccagtgactagcttggaactgtttgggaagccaactctgttctctccagccctcaatgttcactctcactattagtctcttttatcactacagcgtggcaccctgacactttaagaagggatcattaagctgtagttatatatcatttggcaagaaagagtgaaaatcactctatggaattcatcagtactgaaaatgacttggggcataatcagcaatgtgaaaagcaaactgcaggtagtttaattttaaaatccctgttatctgctgcagaaagagacatggtagcagcagaaagtgataagcagttggtatatgagtcgtggtgagacaccattcaaattctagaaaataattctaaattaaaatgccacccattgtggctccccattattaacggggatcagttaatttaggcagaactaccaacctggctggagtgagggcacagctttaattaaaaacgcttcaatgtggctgaaaattcacttgcatagtcaagctgaataaatgattggaaattaaaaaaagctgatgggtcagtttctctttatctctgctctttgttgggatgaagatatttatgaacgttctctgtatccctaacactgtgcccgccattggtagggtttttcctgtggttgtgtatggatgtgagagttggactgtgaagaaggctgagcactgaagattaattgatgcttttgaactgtggtgttggagaagactcttgagagtcccttggactgcaaggaggtccaaccagtccattctgaagatcaaccctgggtgttcataggaaggacatgctaaagctgaaactccaatactttggccacctcctgtgaagagttgactcattggaaaaaaccctgatgctgggagggattgggggcaggaggagaaggggacgacagaggatgagatggctggatggcatcactgactcaatggacgtgagtctgagtgaattccgggagttggtgatggacagggaggcctggtgtgctgcgattcatggggtcgcagagtcggacacgactgagcgactgaactgaactgaactgacagatcactgtgatttattctttgtgaaatcatcataatgaaccatcttatcaatgaaatcccatgtgggcctgatcacttaataggcttgtgccaaagtactgattctgaatgtcagctcacaaggcagcagcttgaaaagtgcaagggtcatataaaggagaattctggactaattttaggaaaagtgccaaaggggcaaggatttcctggaaatttctctagggatgaaatca

SEQ ID NO: 54305 - DNA, 1005 bp, Bovine  19866881525230
  misc_feature (1)..(1): n is a, c, g, or t
ntaggaaagagcaaggcaagaaggtggaaaatccccaagcatgaaatgtttcttcttttttaattggaaacagaaaaggtttttctctgttccaaaaaacttacttaaaatgtacttttggaacctaatccatttataaactgggggcttcctgaatagattagaagaacaaattacactaaggcttcacagatgcactgcaagagagatttctgcttgagaatgaaaacaggaacagttattttcagttcctaattagcaatcagaaatgagctaggacattttaatcccataaaaagttatcattactaagcatcatttatagactggggcttcctcgatgtctcaggagtaaagaatccacctgcaatgcaggagatgcaggtttgattcctgtgttgggaagatcctctagaggatgaagtggcaaccactccagtattcttgcccaaagaattccacggacggaggaggctggtgggctacagtccaaagggtgacaaagagtcagagatgactgagcatgtacccaaagactgtttaactacaaatatcttgtttaattgactcacagtcacagcagatattgactttttattaatctacaaaattttaaaggcccttctaatgttaaaagtaacaaaaacataaatagaataagaaatgtcttcagttcagttcagtcgctcagtcgtgtccgaatctttgcgatcccacggaccgcagcatgccaggcctccctgtctatcaccaactcccggagcttgctcaagctaatgtccattggagtcagtgatgccatcctatcatctcatcctctgttgtccccttcttctcctgcttcaatcttttcagcataagggtcttttccaatgagtcagctctttgcatcaggtggccaaaatattggagtttcagcttcagcatcagtccatccaattaggactgatctcctttaggatggactggttggatttccttgcagtccaagggactctcaagact

SEQ ID NO: 54306 - DNA, 731 bp, Bovine  19866880739527
  misc_feature (1)..(1): n is a, c, g, or t
ncactgccaacaataacaacaaaggccaattgcacttgctatccttgacgaggcagtaaaaaatatgattttattcaatcttagccattgcatacacaacttcttaatattctacatgatgaaatgacaagtacaactaaaacatttcagctgcagatcgacttacaagggtggtcacaagaaaaaccacctttgtttgagttgcaagctgagctagccagttttttaagtttttgtttttgtttttttttcccatagaacgccgcttttatttgaaagaatgactgacagacaaactaggattatcagactcgggtatctgacagatattttctaatgtctatcaagggagcctgttacttcaaggaaaacaatggaaagtgcttgttgccaatgataaagttcatgctttccagcacgaattctgaagttttggaaagcgcgtatctgccagtgataagagcttgacagcttcctggtacttatagacttttctgacgatattggtggaattattaaagaattatgttttatgaatatattgtataataaaatgtgttagcatttggaagatctgcatgaccaagtgaaccaatatttttcaaatgaccaatgcaagatgttacaaagtcatgttgtgggtgaaatctattcacagttcaagataaccaatgcgttttaatgtaacaaagtaagaatgtcttttgctatcacccaaatggatctgtaga

SEQ ID NO: 54307 - DNA, 1338 bp, Bovine  19866880953444
  misc_feature (1)..(1): n is a, c, g, or t
ncccctctccccgtgttgtcccaaagctccctggaacgcgtgtcagcccaggaccccagtctccacccgttcctccccatccttggtttccctctgcttctctagctgtctgtctccatcgtgtcccctgctctcaccttgaagcccgtgggacaccagtccacaaactggatagtcctcttggtcttgatggcggcaatggcgacgttcacgtccttgggcaccacgtccccccggtagagcatgcagcaggccatgtacttgccgtggcgagggtcgcacttcaccatctggctgttgggctcaaagcaggagctggtgatctcggccacggacagctgctcgtggtaggccttctcggctgagatgatgggcgcgtaggtgaccagtgggaagtggatgcggggatagggcaccaggttggtctggaactcggtcaggtccacgttgagggcgccgtcaaagcgcagggaggccgtgatggaggacacgatctggctgatgagccggttgaggttggtgtacgtgggccgctcgatgtccaggttgcgccggcagatgtcgtagatggcttcgttgtccaccatgaaggcgcagtccgagtgctccagggtcgtgtgcgtggtcaggatggagttgtaaggctccaccacggccgtggaagacctggggggccgggtagatggcaaactccagcttggacttcttgccgtagtccagggaaagccgctccatgagcagagacgtgaagcccgagccggtgccgcccccgaagctgtggaagatgaggaagccctgcaggcccgagcaggcatctgtctgggagaggaggacacggacaaagctctgaggacacccttgcgtgggcaccggcagacggccttcgctgtccgcctgctccatcccacaacattttcaagtgggtgaaatcaaaccgtccttgcggaagtcagaaaacacacaggagctgcagcactcttgggaggaacggctgaaatacggggcagcaaacacgctctcgcctccaggtccacgaagcttccagcccagtggcctgtttgcaccaggaatgaggctccgaaaccatggtggttaaggactttgccccgtgtggaccccagctccttgcccctttccctgaccctgtcctttgattctgtggaaactgcaggcttatacagcccagcccaaccatgcaaggtggctcagggtaccaatttcagagggataaatgggtcagagaccctgagatttaacatcacctttgccatttcccagctgtaaatactcgagcaagttactaaccctccagactcacgtttcttcttaaagtgcgga

SEQ ID NO: 54308 - DNA, 1763 bp, Bovine  19866880996315
  misc_feature (1)..(1): n is a, c, g, or t
nggggatgtgatcctgtctatacatccaggcctgctgccctgtaccctccccactacatgaccagggtgccccagcttgagttatccgctgaccaccgcgtttcggtcctctgttcccaggtgggcatcaactaccagccccccacggtggtccccggaggagacctggccaaggtgcagcgggccgtgtgcatgctgagcaacaccacggccatcgccgaggcctgggcccgcctggaccacaagttcgacctcatgtacgccaagcgcgccttcgtgcactggtacgtcggcgaggggatggaagaaggcgagttttccgaggcccgggaggacctggctgccctggagaaggattatgaggaagtggggactgattcatttgaagaagagaatgaaggggaggaattttaaatacagatgttcctcctgcctgtgtctctttattcctgctacccctccaagcacgttaacccagcctggatcctgacaccagggcccgtgggtgacgagcccacacagacgctgagctctgccagaccctcatgaggggatggcggctttgtgtccccagaggagaccagagtcactgtctctgggtcagggtgggaggccgaggcaggatttaagattctagatgctgctggccccaccgcagacacagcctcctggctgggatgcaggcagttgagacctgggctttgggagggctctggaaaaagagtggctctgtggtcagggcttgaggagaagcaggagtgcttttctgcccctgtaacacacagaacagcagcggggtcaccgcaggcagttcggtgctatgactgaactgtgcagtttgggtggggagtcagaaatgacctcgtggagacacaggtgcagcccgtagccacactgaggttctggggtcagaggacaccggtaggatgtatgaaaagcaggagagaggccagggcacccagaggatcgaggggaggatgtgacgccaggtcaggggccatttgggccactcctagagaggaggtgaggaggtcagtttcctctaactgagcagcatttggaaggctttatgcagaatgtctcctgtgcacacatcccttatctctcacccccagcagtctcaagggctcctcctcttgttttatgcatgaagacactgaggtgcagagagtgtatgtgctggaagtgggacagcggagccggaggcgcgaccactgtcttctctgggtgctccaccccgtctccacccttgggattcgtgtcctgttccaatagccgcctcatgagatgaagggtggggagaagcaaagtccacttattacaaaagagaggacaagttaatgcatctttccctaaagttggcagctccagtaggattggggggaaaatcataagccgccctgattaaactcgtgatgagacccccagggtcgggcccacagcaggtcctgatgcatgaaacgtacagctcagtgactgcgcacttttcttgcttgtctctattctgtatcccttggaagccccaagaaaaatagaatgaaatgtcccaaggaaaggaagatcaggctccccactcatcgaggactgtttcagagagaccaccgtggcggtgctcctctgtgacggaggccgtgggctgaggaggccaggtctgcttgcgtccagacccccttgcctgaggtcatcccgcgtcagttcctggggggctgcagagacccaggtcaggagcaatggcccatctcaggaaggggcgttttctactg

SEQ ID NO: 54309 - DNA, 2134 bp, Bovine  19866880151772
  misc_feature (1)..(1): n is a, c, g, or t
ncccataccatccctctgggtcatcccagtgcaccagccccaagcgtcctgtatcctgcatcgaacctggactggtgatttgtttcttatatgatattatacatgtttcaatgccattctcccaaatcatccccccctccctgtccccacagagtccaaaagactattctatacatctgtgtctcttttgctgtctcgcatacagggttatcgttaccatctttctaaattccatatatatgcgttagtatactgtactggtgtttttctttctggcttacttcactctgtataattggctcaagtttcatccacctcattagaactgattcatgttgatgtatggcaaaaccaatacaatactgtaaagtaattagcctctaattaaaataaataaatttaaataaaaaaatatgaaatggaatcaagcctaatgctttattgctgctttacactctggttattcccagatggctccctaacttcattagctccctcccttttggctcctgagttggcaaaatacgccgtgagccacactttgcctcagttgtttagaggatcacttccagaagttgccagggcagctggctttcagaaggtgtcaaaggttcccatccagtggattttgcctctgtgtctgggcccttggagtgagctctttggctgtttctttagcttttgtccctggatgctgtctctcagaactcctcttagaagccacagggccagttccacttcatcttcaagccccctacaggagacaattcaagctggattcagcatcttgggctcccctgtatccaggaggagagttgggacatttggctacaacccttttaggatagttgtgaatgccaaatggacaccagcccctttctgtagattgataagattaaaaataaaaaattttctatttgcaaaagccgtaaatgcacacacacacacacacacacacacaccccctataaacacagaaatgtatgaagtttaaaactaaaggcccttgtatcaacctcttagtaatatttctttattatatactattccagatttatttcagtgcatatctaaagtattgtacttaaaaaaaaaaaagagagagagaatggaatgcctacctattcttcagaaattcgcatgttttctttgacagtgtatcttggatgtgaagtcattcagtcgtgtccgactctttgtaaccccatggactgtagcccaccaggctcctccctccatggaattctccaggcaagagtactggagtggattgccatttccttctccaggggatcttcctgacccagagatcaaacccaggtctcctgcattgcaggcagacgctttaccctctgagccaccaggggaatcccaagaggcttttccatttcccttttccatttcttcctttggtttcctatgaagccgttgcattttttccctccgtactcaccagccagattgtccactgtctcttccctgatttttgccaagtgactgttcaccagcaagtggtctggtgtcctttccaaatgagggtctgacacttgttttgctcccacttcccaaagctttaaatttcctttatcaagcaacttcttacgctgggaagaccacagtcggtctctactgcttcctcacagtctcagcttcttcaaattacttgatagtgcctttggttaatgacttgcacacttgctttgtttaaatattttatgctccagatttcatttattctttcaactgattcttatgatttttttctttatctttccttcatctgtttggagcttacctcttttttttttttttttttctgattacctcctttctttgataaaataaaaggacaaaataatatccaaccagtaatatccagcataatatctttagacttccttcatggaaatataggtagaagattctttaaattcagaagaactttatttttagcagattatgatgaaagaatacagtttgttatagttgtacaaaatatcaggatggaaactggcccaagaaaggttcgctctcaagcacagggataatccatgatttttattaattgtttccttttcacttttctttctggtctgcttttgcatttccttgcctccagcactaggtcattttc

SEQ ID NO: 54310 - DNA, 2939 bp, Bovine  19866880400341
  misc_feature (1)..(1): n is a, c, g, or t
ncccagttcaaaagcatcaattcttcggcgctcagctttcttcacagtccaactctcacatccatacatgaccacatagccttgactagacagacctttgttggcaaagtaatgtctctgcttttcaatatgctatctaggttggtcataactttccttccaaggagtaagcgtcttttcatttcatggctgcaatctccatctacagtgattttggagccgagaaaaataaagtctgacactgtttccccatctatttcccatgaagtgatgggaccagatgccatgattttaattttctgaatgttgagctttaagacaactttttcactctcctctttcactttctttcttttcttttttttttttagcacaggcccatgattctttatctcctgggtctgcgacccacatctaatctggtcgagtaaccgtaaacattgccaaaacgcccagagtacgcctagggaagccggcggtcactgagcaccagaggagccgggtagtgttgcctgcagggagttgtaggctgacggccacaggcgtttgcgcaacctccttgagaggactgtgggatgctgtgccatgtagattgagcctgcaacagctactgcaggaccgtggtcggaaaacacaaatctgaccttgctttcttgcttggaatcatttggcgaggatgagttctcatcactcaaaggataaattcatagtcctaaagtaacattgtgtctttttcatcatgatttagtacccgtggtagccttaacatttcctaattattcttcaagacgattctggatgcttcctccgagaaagggacttgctttggacttctcttttctgtgcttccacagcactatcttacaattctctaataccatatacaatcacggctaggtttcccgagcgcttacatggtcgttctagcctaaactatttaccctcaccagctcagtaattttcacacaacagtttgagacagttgctgtcagtcccattctgcagatgaggaaactctggcctagagacgttcgttcactactcagggacagtctcccactagactacgagttccaggctggcaccgaaagaccagatatttgcttttccgcgggccacgccctggggcagggtctggtgacgacactgcgtcccatggtgctttgcccgccagcgctgccattggcccggccagtcggctcccttcccaaagtgaggtgccctgtggttgcctggcccccggggcccggacggagaccaggtctgcgactagaaggctctggccagtgcggggaagacgctacggtcagtcacggttcctgggcgacagcgacctccgcaggcacgccagcacccgccaggtgaggagggcacccaggtccgcgtcagctgtcgagccgctccacgccccttggtgcccgagtccgcgacccggccctcccagggggatagtcatcgcgtcccagcagaacccatccgcgaagaagaaagaccaaaaggggaagaacatccaggtggtggtgagatgcaggtagggcgagcttgcagggttccgagccctgggctttgctgcagggctccttcctgtgctgtccgaggagagggattttgtctgcaattttctgaatgaaccagaccttcctgtttcatagtttcctgcgttctaaaattttcttcagaaatgtacactccatttttttcacgagttgcagcaagatcccgtttcagacactctatctcttatgtatattccttaatcagagctttcttggtgagtttctggttaattgagtatgagtttctggttaattgaggcttattgagtatgttctttgctctatgagagcaatgtactcagagtttccaatgtactcagagtttcctccagattgagagatgcaggagaaacttttgcaatgataaagatgttcttgtccgtcccccaagagagtcctggaggattctagtcaggttagattctcgataaggaacatgaggtgttctttctacaagagcagtaataacccttccccagagtcaacagggactgactgatatttccagcttcccgagctctcttgtcgactgctccagaacggccaatgtttttctcactgcctgcaagatcaaccaagttcaactttccaattttaacaagctcctctccatcaactgtggtttctttcttaggtattgtaacagagaaaactgagtgggatcgactagagcaggcgttcatcaaagttgctcggctgtctttttgctgcctccttctccaaaatttgatagacttcatccttgttgtgtactgtaatttcttctaaacctttgattatcactcccctcttgttatggggatcatcaaacatctgcagcctctcagaaacatcagaagacggattaaggagatcaaagagctcttcattatagatttccaatagcgacactttcactgaaaattcagtaccattatcagtaagtttctcaaagatgtgatgaggagtacgtggaattataccagccaaaggatcctcctcccaagtatactcttcattagggagctttcaccttccattgtaaaggttttgcctgtgccggtttggccatatgcaaaaatagtgcaattatagcccataataacttcatccagaactggacaaacaacacttctgtaaacgtcaatttgtttagtatttgctccaaaaatcatatcaaaagtgtgtgttttccttgagcttttgtccaccagtcctccagtgtcgaacactaacttctttccgaacactaacattctactaccgaaggggcattagctttccgctctgtcaaattaaatggtctgcatctcaccaccacctggacgctcctccccgcttcatccctacccccgcagatgaattcagctgagacgccatgaccgtcccccaagaaggccgggc

SEQ ID NO: 54311 - DNA, 1372 bp, Bovine  19866880444851
  misc_feature (1)..(1): n is a, c, g, or t
ntaagccaaattatcaaccccacttttcaggttcagaagtatccagaattgcagattttggaggccaccaggagtcttaacaatatagttctaaacttctttccttgcacactatttcccggaattactgcccctgctttgattaaatctgtgtgaaaatccaacttcccaatgaaaactaagctcacctgatagaagtggactgactgctctaccccgccctggtcatgtttcatgaagctgcctttacacactaccccacaagtgcacttacccctttgcttgtgcatagtgttagtactttatgttcttgttcaatgtttgttcagttgtctcagtatcctttatgtctgtccatgtcagcatcatcttagactgaaaactcccagggggcaggggccatgtctgtttaactcgttttgtacagtgcctaggatagaaccatgtacaggtaggtgcttaaaaaatgctctttaatgatgactggtagcactctcagggactccctaagctccagctatcttcagcacatggtacttggcagtacatcagggcactttggcctgttctacagggcattagaatgcaatggcacaggaggctagctgcagcagtctgtggcaagtatttgactctatccattgttaagaaacaacttaatatcacaaccaccaattcaactaagagttaaaatacgtgggaattttgatggaatagtaaagagctataactctttctctagtgttcatctgtttccaacactaacagaccagaggctaggtctaagagcctcagacaagcttatgtaagtttcatctttaattgctctgcttgtagggtgagctgttactatttttttaatgtaaaaacaaacatcctgcaaactcaggctgtaagttactttgcctaataataagaagttagtcattagattgtaaacagaagggttatgttttggacaattatttattgaaccaaactaataataattgaccccaaatccctcaaaataagcaacactgaataaaagattcagagtcaaaggagatgagtaccatgtctcagtgtgtgtgtgtgtataggtggtgtgtgaatatatatagtgtatgaccaagaaaagtaactaaagaccatcaaagtagttcaaagtacgtagtttgtgccaagggaaagcttcaatttttcctcattagaatagaatagcccatagaatatatgagggctataaagtcaactactaagtacttattaagcacctattgtacacatagaattttactatgcattaaaacgtaaacaaaatttaatacactagcctctgcctccaaggagctacaatctagttagggacaaacaataaatacacattaaa

SEQ ID NO: 54312 - DNA, 2955 bp, Bovine  19866880464339
  misc_feature (1)..(1): n is a, c, g, or t
ncaaagttctattgttgccaagaaaatggacatagaaagagacatttttatacttggtttaagcagtgctgcagtaaaccattataatatgggatttgagtctctcccagtgggctagaattgtctttacaatagccatatcatcatggctgaaatatgcatttgattgtaattttaatatcactcagcttttctgatgctagtatcaatgccttctgttaatgccttcagtttaaactatatgtttatagtggaaaaattaatgctgtcctatagcaaaaaaaagccacaaactaagctagactcagactattttaaggctataagtaatattaatatattaaatttaaaattttttatcatactaggaacactcatttctcttcttaacatttcttaaagacattaatttcactttctgcataaattcactctgtcaaggtcaagacccatctttaataaataagacccttttcaacaaaagataagcaatagattaaaataacatttacaaaattaacatgcaatgtcagtaactgtttgtacagtctattcgtttgggtgggtttttgttagtttttttttcttttttcttatttacagcaaagtccgggaaatagctacttccttcccctccccccaccacacacacaatagatcttcctttacatgcaatcacccaatctcaagtaacaaattcttagcagcagttacctttgagggtccagtgtttaaggatcgataaaattaaaaagtgtacagtatttattttcttctttcaggttgattatgtgaccgctctggcaaaagcactttgacaactgtaagaaaagagggcatgcgcacacagggaactgtgggggctgaagtccttcactaggtactctgcccgatttaagcacgctcagccacgaaaggaggaagcctttcaaataccgattccaagggaaagacgttgtgccggattacattttatcttcctaaccaatctaaatcacgagttgttacgagaaaaataaaccggtttgtcaactgatttaggaagccaggttaaaagagaaactggattacaggactcaaataaataaacccagaggagctaccttaaatggtattagaatggtaatgactgggtagccagcagaaggaacccagccacaccaaaagaggtggggtggggaagaataaagaagggaggaggtggactactaaggaaagataattaaaatctgaccatacttaaatacgtgtaatattataaaatgaaaagaatcttaatatgaaatatgatattaactcttgaaggtcaggttaaagataggtttcagtcataaattttggacattatctatccaccaagatttctatttgattttcaatgaaggtacaaatcacttatttcaagattctacttgatatgctctaaatcatacacctccttattttacttgtcaaaatgaaagtttactttgcattattcatacaatgatcaatcaaataaaattcagctctttaaaactaaaacagtgttttagttaaatattaaaaaaataatttgacatgtttattgtttcactgcataggacagtgacatctttattcaaggcagaaagtagctacagtttcttttaaaacttttttccccctgatgtacatttttcctatcttaacctcattaccccaaggctggaatctcacaacatcttaacatcaactggtattacctatagcttctgagagcaatacttcaactaccagtttgctcacataggcagaaggtattatctcttgtggggtttggttcaatgccattcatgcaaggggttcagaataaagtcacttcatgactgtgctgattgaactaagaattaaaaatgtcagacatcatttaaaactatcttaattctctatttcccctcttcaccaattagaactaaagtagtattatcagagactaccaatttgcagcagtcagtagtctttatttctacttatttccaagggaaaaaacaaaacaatttaagacaaaaaaaatcattttgaatcaatctactacaagctctttttaaaagaactaaataaatggtcctcttattcctactatgaacttactgtatattccccattttttttccttcctctatctttctaaagaaaatttttcctctgccaacgtgttatacttaacaatattcattcccgagtctaaggatgaactcagttaatcttactcctgaagacttcccctaatctaccaaacttctaacattttcaagtacttgaatatttaaaaaaacaaaagttcgctcataaaggtcatataaagacttgttttaagaaatagatttttaaagattatttaaaattaatatgccaaatttttattggtaaggtagaaaatcttattattcaggtgtacttgaaaatggtttaaattgggcatttagcaattcacttgaccccaagtacaggtctactaataatatacacagtgaaaaaaactaaactttggtctctgaccctttgataaatgacaaaactaaattaacactgcctatacttaacacgtatggatgtgagagttggactgtgaagaaagctgaacgccgaagaattgatgcctttgaactgtggtgttggagaagactcttgagagtctcttggactgcaaggagatccaaccagtccattctagacgagatcagccctgggtgttctttggaaggaatgatcctaaagttgaaactccagtactttggccacctcatgcgaagagttgactcattggaaaagactctgatgctgggagggattgggggcaggagaaggggacgacagaggatgagatggctggatggcatcactgactcgatggacgtgagtctgaataactccaggagttggtgaggacagggaggcatggcgtgctcgattcaggggtcgtaaagagtcgga

SEQ ID NO: 54313 - DNA, 1066 bp, Bovine  19866880537118
  misc_feature (1)..(1): n is a, c, g, or t
ntacagaatataacacagaaggtgttgataaatattgcttattgtttcatgaacttttatatataagatatatatacacagacattgggtactaactaaaaagatattttttagtggtgggggcatgtcacagtcaaaacaaaattgagtctagatcccaagagtagttttttttggccatgccttgagtcacgtgggattatttccccaccagggattgaatcccctgcattggaagtgtggagtcttaaccactggaccaccagggaattccctaaagagtatttttttaaaaaaatactagttccctaatggacaaatgttgcttcccaaagaggattcagaggttgactatatctaaaaaaccatgtattatatccccattttggagattaacagtgtgcattagtaagttgtttaagaagtcttgtatttaaacagttgccaaatttatttgacttcagaacttttttttcccacctgtaatgccttttaacattctgtgaaactagtttttggagaaacacactttggaaaaccttgatctggttttgttgtcacgagggaaagttttatctatttagtctgaaagttcttatacatagggactgaggatcgattccctgtgctgtcattgggataagagggtggcaggtaccatattgtgggtttcgaggaaggtgaaggtcagaataaggaagtgcttttctctagaatcatgctgagagaaattgcctgtttcctaagtggagttcttttctgagaaaggagctatgagagtgaccaggaccctgattgctgaaattttttcttcttatttttacagatgtgggatctaggaaaaggcctgacgatttcccagctacaccagtctggagtggctgtcctggttcttacttttgttgtcctctgtagggctggcagccatgtgaaagcccgaagttcccagtgtcatcatcctacaaattatcacattgacctgtcttcctggttggtactcttgtctttggccagggcaaagttattctgatttgtttagacccttctttgcttgcagatccccttg

SEQ ID NO: 54314 - DNA, 3176 bp, Bovine  19866880611952
  misc_feature (1)..(1): n is a, c, g, or t
naaaatacattcattgtccggctgactttttctctttaagattcttgactcctctgcacgtggcttctgagaaagctcataacgatgttgttgaagtagtggtgaaacatgaagcaaaggtatacttcatttttggtaatttttggtaatccagtgagttgtttctgattttgtagataaaatgcctgatttcctaaactatttattctctcctaagtattagtttttccctcaaaatagttctgcagatacttttttcagtatctttttgctagaaaagctgtggatttactcaaagaaacattcctgtatatccttccttcacccttcctgttaaccacacctcactggtcaaattattctttttctaacagtacactctaaagagtatccctagccagacatatttattctggaattctcttccggtgtcttctgttccttgcttacatgataattcctattatttaccccagccacagtgtctcttaccctctgttatttctgccagagaacatggaacagaaggaaataagttacttaaataagttgactaaaaagatagctcttcagattgtgaagctgctgttccatagttggcacttggacaaaaagcgtttttttttaaaatgaatcacaaaagtcattcactccagagcattcaggagagaaatgttttgtttataagagttatactttttttaggagaatatggtttttctgtttgtagaaacagtatacttaagtttaaagtcaagctgatgtcactgtgttgggcaccgtaagcttagataatatatatcagctgtaccgccaaaaaagtcaagtagacttaaagaagataaagcattgtattcatggaatagttaggttttcatcaaggctaaaagtcatcatttcttacccaggaacttaaaaaaaaattctcaataaacaatacacatagcatcccagattggaagagataacagtcatttaattcaacggttttcacagttttcttagccacagatccttgtcttcttcaaacaaaatcttggtagaaatacattatataatagacgagctggctcttctctaagtgaacttggcagaacgattttctaagctgtcctttcttggatttccactcaaggaaccacttcaaattctgcagttttttttaatgttgcttctcagtgtcctaataatttctctcttatttgggggaattcttgataatgtataatttcaatctttcctattgtaaagtattaaaaaaataaagtttatttctgcttgactgcttggcatatctcattttgtctgtctgttctataactttttgttgatcgcttcttttcttacatgtggtgtgttacttgaagactatctggatgcatattgaatttgagttgtataactcagtgaaacaatcttggctagggtgaccaaccatcctaatccccaaactgagggatttctgggaacacaggactttaagtgctaaaaccagaaatatcccagccaaactaagacaagttggtcccctaatattgacacagaatggcacccaaataaagttttcaagtggatatagttcacgggtttccagtgaatgtgagttcatgaataaatagattagttgctctgagcattttaagttgatttttctgattctgtaagcatggagactagctttttgtaggttactttttagaattattgagaaaatcttactatataatcctattcagatgttctccagttccatgaatgtgaattggataatgtcttaaaacacactagtggtcacataattactgaggaattttatttttcagttacgttttgaagaattattttccagggtggcaggggtgggagttggtgggttgggaatgagaataaaggggtcttaccgaagatttttttaattattactatgaaatttttcaaaaatacagccaaagttgatagagttttacagagtgtaactatatactcgccatatgaattctaccactagctgttcaccatactgtttccttacatatccagcaatttttccctcttatcagtatcttacattttttgacacacttcaaaagtaatttgcaagttactatacacacctccctaaattcttttagtaggcatcaactagaggtcagtatttgtttgtagtttttgtttggatgtggaatttacgtacaatgaaatacacagctcttaaatgtacatttactgaattttgcctaatgcaaagacctgtgtaaccaaaactcttgaagatagagaacataaccacatggcagagacagtatcccatccaaggcagtctccttgcctagaggcaacaaccattttgattttttctacagtagattgatttgccactttggaccttcatgtccatgagatcgtacagtattcattgactcttttgtgtcagactttttttcactcagggttaatgttttggcgattcagcagtaacaataattctttttattgctgagaatattccattgtgtgaatatactgtagtgtctttgtacagattgtattttaaatgataagatagaagattaagccaatagaaataagtattttaatgctgatttagtgtctgactttgttatctgttatcttggggttagtctctacatttctgcacctcaagtgatccttaaaaatacatgcattagaccttaggccgtgtctataaatgcgatgaatctatgagtgctttaatgctaaacacaactattattcaacaccttaaacttttaatccaaaattgggtctcctgatgtctgccttcatgaattggtgaatttgtactctaaatttgagagaaaatagtttatttgccactggataatagtcttcataagagaatacttgagcatttttaagttaataacaagtgttgaacctgaacccataattagagcattttaaattttataccactggctaatttccattttttctgattgttaaggttaatgctctggataatcttggtcagacttctttgcacagagctgcacattgtggtcatctgcaaacctgccgcttacttctgagctatggatgtgatcctaacattatatcccttcagggctttactgccttacagatgggaaatgaaaatgtgcagcaacttcttcaaggtattgaatacttcg

SEQ ID NO: 54315 - DNA, 2370 bp, Bovine  19866880684671
  misc_feature (1)..(1): n is a, c, g, or t
ntaagtttttaatggtccctaatttaaactctaaaattttgaaatgcatagtagctttagttaaggcctagtcttaactagtctgattggttacctgacgcacaattaaaggttaaggcatcaagtagcctctttttaggaggaaaaggaaagaaacaaatagattgattttctgtccctgagaagaaagccaggaatttcttgagcttttatgtatcagtgtttactccagttctctgtctgaagctgtatctaaaatttgtattgaactctcaaagaaacagtgaattgttatatatattattgtgttcttaaaagtgattttattgttgtatgtagggaaaagcctgtccttttctttctttttttgcataaaacaaaaggtatttgtcttttaaatttttaaaggcttcttttaagagtttttttttaaacatctgctttaagatctattcaagactgaaatgtattttgtttaaaggtataatctctgtgaaacttaggacagtaacttctaatcaggctacagttctctgaaagggtcagtaaaagcatcatctatgcaactgatgaatctcacaggattccttcacagttttcctgattctttgactaatagtttcaacagtttagcctatagaatcatattctatatttgttattttcattcgtgttctgtacatttctaaatcaagcatagccattttttcagaaagtgatagttatatatggaggaaaataggaggcaagccaacccccacctccaaggaaaaaagtatttctaaataacaggtaacttatatctaattggattaatttttcattttaggacttgaatgctgttgcttttaggtttaaagataaagagagaccacggggctatacctctaagattgcaggaatattacatgtaagtttattgttattttactctatactttggcacatagagtgtttcagtgatcctgtatatgttactttcagtactatacaaatcataaaaattgaagctacagtgtaaaactttagacattgtagcaactagtaaagtctgatgtgaagacatatttaaaatcttaattttcatcatcctgaaaatcatcatctgtaatattttcattacatagacatcatgcttactggctttaaatatttttcagttctactatgtgtcatgtgctacttatgtgaaagctataaatcacccacttttctctgtttccattgctgtcaccctaatatgagctaccttcatttcttacctggattaccatcacagactcttagctgaattcgtgtttgccatctccctagctttagtgttttttccctgcctcaatgatcttttgaaaacccaaatcagattatttcactcctctgtgtcaagactttcagtggtttcccgtcagagttgaaatagatctaaatttttacctgacccataatgacatctgactccagcctctctctgacagaattccatatcactccccctcccacctctctcattcccattccactccagctatcctggctctttgtctaatctttaagcgtttagttttttcttccctctcagggccctgtcatttgctttttttttctgcctggaacacttacagtctttgcatggctaggttcttctcgtttgggtctccactcagatgtctctgctttagagacaccttccctgacctctcaatcatgaccctgccccttttaaattttctttatagcatcttatcagtataatgacagtatttgtttgtttattgtccacctccctcccagttagaggacttccctggtagctcagacagtaaagcgtctgcctacaatgcaggaaacctgggttcaatccctgggttaggaagatctcctggaaaaggaaatggcaacccgctccagtattcttgcctggaaaatcccatagacagaggagcctggtaggctgcagtccatggggttgcaaagagtcggacaagactgagcgacatcactttcctcccagttagaacatgagctctttatagaacagggacgtcatctgtcttacctaccattgtacccacagcagcacctagaacagtgcctggcacggagtagggtgttcattacatacttgttgaatgaatgaatcagtctgtctcagtaagttccccttactaaaaagcttcttccacattatttttctttagtaactaaaaatataagccatttttcctccataacaactttgtaaatgcttgtctgatttcattcataagaagttaaagaaaaaattctattaaaatatatatactttatattaagaatcctatagatgccagcatttaatcaccaaatttcttttaatcgacactcaatttt

SEQ ID NO: 54316 - DNA, 1697 bp, Bovine  19866880942809
  misc_feature (1)..(1): n is a, c, g, or t
naatgggtgagaccatgcagatgcagaggatctacaaaatgggttcaccaggcttgtctacagtgctgggtggatgaaaaacaaagaggaaacagtacagccagagtggcatgtcctcagtgcaatgctgaatacttaatagtttttccaaagttgggtccagttgtttacatcttggatcttgcagatagactgatctcaaaagcctgtccatttgctgcagcaggaataatggttggctccatctattggacagctgtgacttacggacaggtgacagtgatgcaggttgtaggccataaagaaggtctggatgttatggagagagttgatcctttattccttttaattggacttcctactattccggtcatgctgatactaggcaagatgattcgctgggaggactatgtgcttagactctggcgcaaatactcaaataaaccacaaattttgaacagtatattcccagggattggttgtcctgttcctcgaattccagctgaggctaatcctttagcagatcatgtctctgccacccgaattttgtgtggagcccttgtttttcctactattgtgacaatagttggtaaactaatgttcagtagtgttaactctaatttacaaaggacaatcttgggtggaattgcttttgttgccattaaaggagcattcaaggtttacttcaaacagcagcaatatttacgtcaggcacatcacaaaatcctaaattacccagagcaagaagaagcataaaactgcgacttcttgttgttctgcagtcctcccattcttaggagtctgttgtgtcgttctgattccatcattgatgcacagtaatggagacttgtaataagctgctgctctcatatttttaagaaatataataaagcacttagggcaggggaaaccccctcggtaatcacggaacctaaggatgtgatttgttttccttgttttgtatgtacttctttcatggcggtcatctgaacccattatcttagcatggtgaacctgagttttgttcatattttcctcaagacagaaatgtaaagatcaaactgtgcaaatatttaaaaatacacatgctgttttattcaaatgcctcttttgtacatgttcatgttcagtgttttcttagaattagcaactcaatgaaggtactgtgaggatttttctcactggcataatttgattacaagctaagcagaagtatatgttaatatgaggaaatgtaaattagttataaataattaacaaaccaaaaatgtatgtaaacattcaaatgattatctgaacaaatgcaattttgttgtgtttttcttaacccatgtgatgtcctccaaaatgtgtagggtaaaaattcacagggcttccagatcactttttcactattaaattttatttatataatgttgacatctcatagttcatgatgtaatttttttaattaattttattttatttttaaaccttacataattgtattagttttgccaaataacaaaatgaatccaccacaggtatacatgtgttccccatcttgaaccctcctccctcctccctccccataccatccctctgggttgtcccagtgcactagccccaagcatccagcatcgtgcattgaacctggactggcatctcgtttcatacatgacatttcacatgtttcaatgccattctcccaaatcttc

SEQ ID NO: 54317 - DNA, 2491 bp, Bovine  19866881057276
  misc_feature (1)..(1): n is a, c, g, or t
ncttaaaaaaaaaaacaacactacttagaatccactcatggtgagcagaaatacaatgtactctttaaattttggaaaattccatctgaaattctagcaaacctggctttattcccactttagcatcaaagcatcacgtgttctgctccctctctgccacttcctctcagctgagctgctccccaaggagatcactcccaacagagaacgaaagggagggggaagaggagtctgcctggcaaaaagttcataccaaaacccttttacattgcccttctgattcaacaaatgcgctggcagccctcagttcaagtagaaatagaggcagagtcttcaaaaatattttcaaggcattactaacgaggacaaagtggaaggcagcataatcttaagctccaggtttcctggtgcgtcagctgtgtaacgtattagctataaatgacctcagagtttctcaagcagatcaatgttttgttttttttgtaaatatattaatttagttcttcaaacatccaaggttttattatgggatgcctcaatttatcagtgttttcaaaagtttgataaggaagagtgatggcaaacaatgatttctccctgtcagaagggaagcgacacttcaaatgtcttattcacctcttaaaaccgggaacagactctagtcacgaggtgagaaacatcaaacaatgaatggcatgaaaaattttaatttagataaaactgaacctatgttacattacagagctattgtcttaaaaaaaaaagccctctactctaaataaaactatgccctctactttccaaacgaagcaatattaaaaccttatttgtacatgtgcctaacgtcatctaaatctcacaaaaatactgaggtactcggagtatcataactgtcttcttgttggtttaactaaagagataacgtaggagattcatagacttgccaaccaggagccatccctattatatgactcctctaagatctaagtcctcagttttgttctctgaaaaaagggggatgatattacttcaaaatattcttaaagctgctgtattttctctcaccatagattagtgttcacgttctagaatgtaacattattctagtttttaaaattcagcctattctgagtcattcatgttgctgaatgaatcaataatttgttcctctttattgctaaataaaactctactgtgtgaatataccacaatttgtttatccattctccagttgagggacatatgcattatttttaattttggctattaagaataatcctactttaaacattcacatacatgcctttctgtggacatcagtcaattctaagatagaactgctgcattctatggtaggtgtgttatgtttaactttttaagaaactgccaaactgctgtctaaaatagctatcccattttacatgccaaatatcactgtatagcacctttgaaagtgccaaacatcatgaaagatacagcaactctaagccccaaggaaggtgcatgtttcggtcaagggacagaggcaggtagcatttcatgcagaaaaaaagattcacacaaaaagagatgtagtgcaccccaggacagccactctagcctgtgagtgacttgtaggtgtgctgccttaaattccattaggaaaacatctaagtacaaccaatgtaagatatgttctgggaagtctaacatgcaaagaaaaggaaatcctaaggggcagccataaagctgatgcaagcaatcacaacagcagttcaccagagcattacctacaaggcggctatgctaaactttaaaagatttatatacagccactctagtgatcaagatctccattttacaggtgaagaaaccagaggccagaaggtaagaagctatgtggccccaaagtcacatagcttatagaaggtgggaccagatctgtctgattctagacaatgtttttcttgactatgctaatttattgttccatctccatgtttcacaaccctcctaccctgcttggaaggtacctccttgaagctaagtgatactgtcccttaagccatactatagagaaggaaggggcaatgcattccagtattcttgcctggagaatgccatggacagaggagcctggcaggctacagtccattgggtctcaagagtcaaacatgactgactgactaaaccaccaccaagccatactatttcccgtttctaatgtactcatctggcatctttctggtatttcactgtttttccaagctggttctctacctgaaagaagaggagctgaccagtcaaaaggaacaaagtggatatacttggcagtgatctgcagtgattttcctagagtaaatcacagcacctggcattctggttttgaaccttaatttgaacataactttgattcatttgactgatgatgaaggcaccaatatccttttctgaggatcatcataacacaggaaaaagcatcaaggcaggtatcaatcccctataaatccat

SEQ ID NO: 54318 - DNA, 1564 bp, Bovine  19866881076007
  misc_feature (1)..(1): n is a, c, g, or t
nacgcctgcctgaggaagatgggaaactgtacctgtgtgtgtcaagccccaccatcaaggataaaccagtaagtaacttgcagccagctgttgcttttccagagcatgtatgcaatcagaatagctggtcaccttccccttgtcatgagaatactgggagctaggatcctcttacccagggtgacctcgctatgctgtagtgctggactgctgctgacggggaactaataacaaatttctcagtttttggttttatacctttgagactacatgtaaacaaatgtgcccttgtctttcactttacagttcttttaagctaattcctattgagaaactctgaattgaggtaaataatgcccttagtggttttggcagctggtttctgtcattatttcagatcaagggcaggagtgatttatttattttttaaaaataaaagatcaaaatcttcgatgtttatgtgcctttgaatgcaaagctttgtgctgggtggtacccacagctggctaaatagagccttctgggccaggggcttacactctagagtggatagcttcaaacagagaaggggaggggaaagatggagaacatggacccaaagccgtaaataatgcacacttctacagaatttgtgattgagtctgtggtttctgagccaaagagtgtgagtgaataagtcactgggtgagaaaggaagactacttcctttctcctgacagaggggatatcagtggaaaagaggcaagactgttcagggcagaataaaaaacttgaataatacagcagaagtagactccaggaggtgaggagggatagggaggtctggcgtgctgcagtccactgggtcgcaaggagtcggtcacgacttggtgactaaacaacaatacagtgatccctgaggcggttgggagaggggtgagacttgtgtgtcaaggcctgatgctcggagtgggaaatagagtaaaaacagtagcgtggactaaggggcaaggcacacgtttaccacgggccctgcagcatcccctgtaaggcttaaccagaggtgtgggcttggttaacagcaaggtttactctcagaaacatgtaggggaaggagttgtggtcagatgtaaagctcccagtttgagtcttgattctagcatttaaatatctgcttgactgcataaagtcacctaatccttgctgtgacttggtttcctcactgataaaatgagaagaccaagagttcctctctgggatgttgagaggctcagataagaggaaaaagtatgtaaaagcctctgatgaggttgggtacttgcccaaacagtgctgctagtcctacatggtgctagaggactggggagagcgagatcagagcttatctactgacaacatcttttgaaaaaaacagtgactctagaacagggtttataattgtttgcagaagaatgatgccaggactggccatctgtaagtgggagaaggcagcatgtaaagccaaagagcgagttactaaggaaagggaaccctgggtcatgtcacaatgattgatgcagaagaggaggcaaggattttagcaagt

SEQ ID NO: 54319 - DNA, 1692 bp, Bovine  19866881132235
  misc_feature (1)..(1): n is a, c, g, or t
ntagccagtcatcacagactgggtaatggctcattttgaacttaagcttcttcctcagtcactacagcatggcagagaggaagagtcagaaactgctgttcaaaaaccattgaatgtggtaatcaggcaattactaaacactatttgcttagtcacatttactgctcatgaaatagttatcagatcataaagcatggccatctgtttataactttgatgaagtacttgatcagcatatctcagctctccatcatccaactgtatgtccttggataagttgctcacttctcagggtctcagtttcttcatctctgaagtgagatgtcagactggggcatctctacgcattgtacacatatgtataaatttgtgaattgaccttcagcgtgggtgttggtaaacaatattgaattgaatgctaaatagataatggcacaactaatggtttaaacaattgttttgcatggttattaaaacataggttgtatttctattgagtttcttatagatattagctagttgtaatttagtctgtacactgcattgtgaatttcattaactatgatctcaattagcattaaaatttacttagtcataaaatgggtcttttacaagtgttttgccctttaaagtctttgaatgtttataagggcctcccaagtacagatcactgtattaggattcccttgggtaagttgagtttcacattcttaaatgaattaattgcagtttggaactgccaaaagacaccaactaaactgaacaacttcatacagacaaacaaaacagtaagtttgtttaaaccctaaagaagtttttgaacatgtcgctctcttattgaaacttcctagggggatggtttgtgtatcagcagaggaatgaagtccacaataactgtggcattgagatatactaccaaaccgacatgcagagcacgtcagagaacatgtttctggagctcttctgtcagatcatctccgagccttgcttcaacaccctgcgcaccaaggagcaactgggtgagtgggcagcggggcgcggcagggcacctcactccttgaggagcactgtcgtcctcgagaacattcgccacatgtgcagccccctgtcatgatgcctgtggggactccacctctagaagataagccgttactatctcatggacagtagagcagttcttaaggagatgacgtgtgtttacatcacatacatgtctatatagaggtcattttgggtgggggaaaaggatgctaagggcaggctgttgagggtgacaaggtgggaagcaagccaccagagaagcttgctgctgctaagtcacttcagtcacgtccgactctgtgcgaccccgtagacggcagcccactaggctcccccgtccctgggattctccaggcaagaacactggagtgggttgccatttccttctccagtacatgaaagtgaaaagtgaaagtgaagttgctctgtcgtgcccaactcttagcgaccccatggacttcagcctaccaggctcctccgtccatgggattttccaggcaagagtactggagtggggtgccattgccttctccaccagagaagcttagattaaaaaaagattgttactttaagagactcaccgaaatcctttttcatggtgttcaaagcacattactggggctgctcttttgatcaaattttccaggatct

SEQ ID NO: 54320 - DNA, 1170 bp, Bovine  19866881175675
  misc_feature (1)..(1): n is a, c, g, or t
natattaggacctagtggaatgatggatacaaacacctactgtaaactgaagaacactaaacaaacattaggtcaagtaatacattcgggctgatacttgaaaatgcagtatgaataaactgcaccttccgtagcattattgggcacctgctgacctggggagttcatctttcagtgtcctatctttttgccttttcatactgttcacggggctctcgaggtaagaatactcaagtggtttgccattcccttctccagtggaccacattttgtcagagctctccaccatgacttgtccatcttgggtggccctacacagcatggctcgtagtttcattgagttagacaaggctgcgatccatgggatcaactcctagagttggtgatggagagggaagcctggtgtgctgcactccatggggtcgcaaagagtcagacatgactgagcaactgaactgaactgaactgcacctttctgtgtattcaggcttccagctgagcttggcaccagtattcttcaccacatgggggtttgagggatccagtaaacacaatactcaaagatgtgtcagaaagccctatcagtccagaggcaccaggcacaggcacatactgatgccttatttaatcaacttctttaaggaataacagatttctcataagttacttttccatgaagcagacatttttccttttcggtgctagacatcttgaattttgatattttttgccagaaatcttcctaaaatgtactgtctattctttcccctctcaagcaaagggtactaccaacgtcctttacagtacggtaaaaggtgtcttgcaggtaagacaatgcagtggacagtttttctgtcacctccttcaaaatgtgtctgcctgctaccactgttaataatgcctttcaaagaccctttataattttgcaacttcaaataatttttaaactggattaaaagctagataatcatattctctgagactagtacattaaataagactctgaataaagctgaaaagtaaaggatgtgacttttggaccacgataacctctcaaagggtaccagtcacatggtatctctgacaatatgtatcaacaaagagaagtagctgcatgaaggacattggtagttaggtggtccttaagttaaagaagagtaatattttcac

SEQ ID NO: 54321 - DNA, 1552 bp, Bovine  19866881183782
  misc_feature (1)..(1): n is a, c, g, or t
ntggaccctctaggaatccagtgaggcacagttcaggttgctttggtcctctcactgattctaatagtagctgatgttttttaaatggtctgtaagagccaagcacagttacaagcatttgatctgttcacatcattcaatcattggaacacacagtgctttcagaatatggagtagaaaatattgctgggcacgaaagagttttattgtggactgtttaaaaatctattcaaatgctattaataaaatggcattatttgctgcacctaatcatttcatggtaatggatgagagaatctctcctccactgtggtatgattttaattgtcaatttgtgatactactactcagaaaaaaattataataaagcatatcagcatgtcagtccttttagaaagcacattatcaaagaattactttgtacttctttttttcctacttttagttaccctagtggagcttagtttttaaaatcattcaaatgacttggccctagttgataaaatccttgtaggtaaataatcttcaccatttgaaaaatcaagtaagattaattactgaaatttattctgtggttatagcactgcttataaagacctagaacagtagctatcaaacattagcaagttcagaatcacctagagggcttattaaaacacaaactcctatgccacgcctcttgaattattgatttactaggtctggggctagggcagtagaacttgcatttctaccgagttcctaggggatgctgaagcttctgatcacagatctaaaaaccctagagcagtagttctcagctttggcagcacagtggaattacctgaggggctttaaaagctactaatgactgtgtcctaccctcaagagattctcacttgggggtctggtctgggcatgggatttttaaaagcttcccagctgattttgaagggctgccaaagtgaaggcctgaagtcctaaagggagacaaagactgtctgtttatgttttgttcttactgttttccctctaaacttagactcatgtaggtgtctaaagccagacctcctgggtatgacctcccacccgcttctattttagatcataggttggaatggctaggaggcttgtaatttcttgagagtctgtaaattgaacactgctatctttacttgtcatgtatcatctggaggctaaatagttctgactattaatagtaagcagtgttctagtacctcttctcagttgtctttgaagtacaatgcttgtatgtctggaagtaaatttattaattaagatttctgtatgctgaattatcatggattgattgtgactataatagaaaatctattagaaatgctaagaaaatttgcaaagagcatatttagaataaaaaatatagcctatcttctttgaagacagaatcatcaggccaccaaatctccttttcctctgtagaaagaaaagtagattagagagagaagcagtgaaataacaaaaaagttcgttggacctaaggaaggccaatcatatgccctggggaggagaaagtaatacaacctaaacttcg

SEQ ID NO: 54322 - DNA, 945 bp, Bovine  19866881274599
  misc_feature (1)..(1): n is a, c, g, or t
nggacactttagatggatctcctaccacttttggaaaaacaaattagaccacctgtcctaatgttatgcatcatacatcatcacagtggcagagagtcagcgttattaatattatgggaggtggtgtgtagaaaagtcatgcagtatgaaatccaattatctaaatttagagactagcattgccatttattagctgcctggccctgggagataacaattacaaatattcactgagcacatactatttgcctgtactttgtttacataatgactaacttcatacaatcctaagaggtatataacttcattacttccacttcacaggcaaagatactgaggctctggggaaattcaggtaactcaccctaggttacactgttgggaagtggaagaaccaggaataaaaccctagcaatatgactctaaaacacatgttcttaatttctcagtctttgattcctctagaataaaacagagataataacagctgcccaacctaactaatcagaattatattagcaagtacaagggcatttttaataaactgtaaagtaatagaggtcaatgtatgaaatccaaagctaacactgacaagcagatgggtttatctggaagatctacacacatacagatttccttgtctcctttccacttaatactgagagtcaaacaagttgtgttaagcccatgctgtttctaacaacaatgatcttgctatccagacatttcttaccttacctctttctatatcttgagttcctacttatggaagcagaaatcaatgttatatatccttaaactgctagagagtacagattttttaaattattattagtttcaacacctatagtttcagagaattttttcaccatctggggatgatgatgtttatactatctgatcacttatttacatggatgtgcttagtcactcagtcatgtctga

SEQ ID NO: 54323 - DNA, 1382 bp, Bovine  19866881501393
  misc_feature (1)..(1): n is a, c, g, or t
nccaaacatgccacctatgtaggcatgcctttcatcaaagcctttatggataattgcattcacaaaggagaccctacaaatacatataaataggtaacatttttaaatcacaagtaaaggaataaaagctaaagcgtcttagaagttaaattctttcttttttcttcaattgtttgattccacaaaaatcagaaggcactacagccaacccattcccatggtgccctgtgtgaaaacaagtcagcttagatatatgatggactaaaatcccactacataaggctccaagcagtgagaggaacagacatgagaagaagttcaattctgaattaacatacatgtatcaccaccatgataagcaaaaccgaaacacaactgtcagctggctcgctactttagaatagttattttagaagaattgctaatatgaatgaatgtttctaacagggtggtggttcggatgccaaagtgaggacacatacagattcaactaggaaaaacgtacagatcaccagaaagaaacatcaatgctagagttatcaaattcccggctccaaattcacaccaacccagaatcaagagtctcataattgacctcctatggccaggctgaacacaactaggtcatgcaatgacacccacattcgtgtacttttcctagataccctaagcggctaaagtgatcttttcaagttcatgcttttcttcatatttctctcctattcttccgcttctctgcctttatcacttgctagtaccagattccatatgcaaatgtggtgtgttccttcattccctacatattgacttctttctcctccttccttgcatgcatgccaaaaaggagctcagccaaagaccaggaggtactaagcatggagatcaggtcagggagggcagtgaggctggggcttgggaaaagccaatatgacacagctaactgattcatcaagattagtgtcccttttcataaagggacaagggaaatacactgaattctgctttacagaaatactaaagaacagaataactcacttgaattaacttggaaaaaccatttctattataaaatagaaaaagtcatacattacaacccttaagtcaatacataaataaatatcatgttctgtgccaagattttatcatgacaatttttagggtgttgaaatgagaagtaccatttagatattatatactaattcagtctgctatagccattcttccaggggattgtgatatttaaatactgtattttatagaactttaccaagtctctaaaaattttttgcaatcaaagccaattaaggaacagattggaactatcatgggtaatgtgcttaaagacttgataaacactacactaatatctatattcatctttt

SEQ ID NO: 54324 - DNA, 744 bp, Bovine  19866881733641
  misc_feature (1)..(1): n is a, c, g, or t
ngctttctgatattttcagaactttgaactgcacttttagctacaaattaaaagaaccacttagtctgacattcacaaaacaggaaagctattttatataaagacttgcagtgttttaaaagtctcaaagcagtcaaatgacctatcaataatccacattttataatgattataaatacttcttctatatctaccaagcactaaaaacacaaagaaaaacatataaaaatacacactgtaagaaaagtatgtaagaactaaccttgaccagaagttcagttacttcataatgaccataggaacaggcgttgtgcaggggtaccagatcactacaataagacaaggggaaaaccctgcgttattacagattccctatgctttagcttatgtacttaaatttaaatagcaaatgggttatgtcaccttctgggcttcccttgtggctcagctggtaaagaatctgcctgcaatgcaggagacctgggttcaatccctgggctgggaagattccctggagaagggaaaggccaccgacaccagaattctggcttacagaattccaaggactatatgtatagtccatggggtcgcaaagagtaggacatgaccgagggactttcactgacttctgtatcttttccaaactcagaactcaaacacttggtcttctttgaaactttttcttttaaagattctgtaaggtaaactgctatattccttaacgtaaacccaattccttcatga

SEQ ID NO: 54325 - DNA, 868 bp, Bovine  19866882067397
  misc_feature (1)..(1): n is a, c, g, or t
ncactcttgtgaaactacccattctcctttattattccagagtaattccagtttaacacaagtttcctattcatgtatagtaatatatacctgaattaggtggctatttctcaccactatctctacttcagttatagacagaaaagcacagaattgtccagataccaaagaatattagatggcacattctggggactatgtttacaagacagaaatcctacaagtaacacctaaaaacttcatgacagataactagaaagtcacatcaaagataggaacaaaactcaaattctttctttccaaaagcctaccatctgtaacacaaaaagcatttgccttgaaaaaagcaaatacaaatatacttcctttcatagcatcttaagagtaagtgattaaatatgctaggaagaacaacgatacatacccatggctaaggaaaatagcctatgatttaaaaattcctcctccccgaaaaaacccaagaaataaaaagtttgaggttacttggtgtaagagtttagctgaacattcatcattttatacttacatgctaacctttcttttaactgtggtgtgggagccaagtctatagcacttttattgtgacagttcagcagtgttggatctgcgccataactcaggagaagagaacacacttcaaccctgttcttggaagcagcctcatggagaggagtgaactgccacaagtccattgcatttacgcaggcaccatgctggtggtgggggcgggtaaagcatatatttagtgctcaacttttaagagaacttagaatattagtactggggtaatttacatcatgccagcttaaaagggttatgtccccaaagggttacttttcaaaccagt

SEQ ID NO: 54326 - DNA, 755 bp, Bovine  19866881131881
  misc_feature (1)..(1): n is a, c, g, or t
nacaacccctttgaggaggtgctggtaggtgcattcttctgggtgaagggcagcagtaggtatttagaagacagaaaaacgagatggcttcctgttgcccgcaggaagcctatggcatggaaattctctagtttctgtctttaaggccagccaacagtcaatgaattttttcattcaacttatttttatctgatgtattatattaaaatctgtatgttagaaatgaaaaattcttgcacaggacccaagcattgctttttctgcagatacctcattcactacttacatcctctaactgcagtcctcagttctcctgtggttattacatgagtgagtagatgtcctctcaccatcactttatccccacttttttcagatttttttcagtggtgtctgtgcttttcttgcttttctaaccttgcatttatttccctgcagatctcaccatctgctgcaatttgactactcaggttagtgaaaatttgcccatttaccagttttgtgccttaggcagtattcaccagcattctcctacttgagatgaataaggatctttacttctctggccacttgtgactcattaatggtgaagttccatatctttagaacagtttcatccaaaaaaagctagctggttttttgagtatttttttcttctgaattgtagtacactagtataggaaccggagaaggcaatggcaccccactccagtactcttgcctggaaaatcccatgggccgaggagcctggtagg

SEQ ID NO: 54327 - DNA, 779 bp, Bovine  19866880514128
  misc_feature (1)..(1): n is a, c, g, or t
ntggagttggctcatttcaagccctcaagagatgagaataaagtagcttgctgaaacattgattaacacaggagactctatctttttatcttcacaagcttattaattgcaagataaacttggagcagctctggacttcttggccacctgcattatttaggaagggaaatgaatgaatggttactttaacttttggtaaatgagagaaatgaagacacatttcctcttcaataataacgtaagaggaaaaaggagatggcaaacttccaactggtacagagaaagattaaaccctgtttcacttggaagaactacagattccagctgaactcagatattcattggtattaattcaaagccacatcttctttaaaacaccactgttttgatgatgtactcaggttctgttttctttgccttttcctcattaggaattggggtgaatattctgtttgcctttccagaactttttcccctccgcgccccccaccttattctccactcctggaggctgagtaggcatggattgcatcgacaagttccctttcctgagagtcctggttggatttggactgtgggatgcactcgatagacaggagcacagaagagagagtccaggcatggtttggcaggagctgtgtttctctctccaaggtcacatctcctgcccatcaccctcagtgacatctagaactcttgccagcctgtggtagctgctccttcccttgtcctcagaaactgaggaatggtaaggattcatctcgttgctgggccctggg

SEQ ID NO: 54328 - DNA, 1550 bp, Bovine  19866880533443
  misc_feature (1)..(1): n is a, c, g, or t
nggagaacttttgaatcaaagcaccaactcacatgggaaatatttaacttcataattaaacatattttctcctcttccattgattccctcagagtaaagaagagaggagagatttccctttcttttcagttaccagctgttacatctttatcatctctgatgaccagctccaattcgtttcacagccctgacctctatgtttagcaggggtccatccaggcattggttcctggacaattatctacaaataagatagctagatagatatcaacggagatatgagtacagctgtggcctgctaaaaatgtaagatcagaacgcagaccccttcctgtggggtaaccacagagctcctgtaacagccccctcccgggatcttagaaaggatccacgtctatttcagaatgcaagagtgggctgcatgcacagtatacccacatagctcctgcgatgggtgctgacagatggaacagatgataatgggcagagccgtagcccagccaggataagagaagagaaaggattacattccaagtaagcacttctaattatctgcttctttttaatatgggtaatgtatctgtcttctaaatattgaatataaagcataccgtatttccatctaggacttcaagatgctatccatcctgtgccaaaagacacccaccatctcaatttctactattattagagtattaatatcattagaatgtgcttggttctagaaagtttggttaaaacttatccattccaatcatttcttcttcaactcctgctccatggataaaacagaaatacaattttgattgtaaatcatacttgagtaaactacattttaaaaatagggaaaaagaaatggaacttggaaagaagctgttatttttccaggtgaatttcattattagcttgtacttcacagcattattcctaatgcaaagtagaatagtgggaaaaaatccaaaaacaatggattttttaaactttttattttatattggactatagacaattaacagtataataatttcagatgcacaacaaagcgactcagccatacaaatacatgtatcctttctcccccaaactcccctcccatccagcctgccacataccatttagcagagttccctgggctgtacagtaggtccttactggttatccattttaaatacagcagtgtgtacatgtcgatgccaaactccctaactatctcttcccccacccttctcccctggcaaccataagagaaaacaatgaattttaagcatagccctgtatgtaatattgaaaagcatttatttaacttctctgagatgcactttaagaaaaaaaccaaggaatggcattagttctcttacaaacttattttgaggattaaatacaatcatgattaatgttaaccttccaacagtaagacagttaacaagtattaagtatttgtcaaatgtaatatatttgtcaaatataagaatcgatcatcttattaccattataatgtttatcatctctacttctattaagagtgctttaggcaatggatgtggctcttt

SEQ ID NO: 54329 - DNA, 1884 bp, Bovine  19866880590166
  misc_feature (1)..(1): n is a, c, g, or t
ntttctggaatgagatgtgtctctcctaaagtaaggagcccaggctctttccccaaatcattaaggatcattgggaggctcgaatttttcccagtcagtttgaattttctatggaattttccaaggagatcgaacctggaatcctaaaagaaataaaccttgaatattcattggaaggaatactttggccacctgatgggaacagtcaactcactgaaaaaaaccctgatgctgggaaagattgaggacaggaggagaaggcggtgacagaggatgagatggttggatggcatcactgattcagtggacgtgtttgttaagtttgagcaaactctgggagatggtgaaggacagggcagcctggcaagctgcagtacatggagtcacaaagagtcggatacaacttagcgaatgaacaacaatggaattttcctcctctgctctgcagctttgcttctgtgagtattgaattctacccacttgaactcaactaaagaggtgattacagtgtctctttctcttcccttccagcaaaatgcgactaagagaaggcattgtgtagagagattttgctgaagttagggtgaaaatggagctgctttggggatgttgcaacgtaagagccaacaccacacaacttagcattggctccatcacttctagaggtcagtagatattcctgttgccaagaacgtctcccttgctgtattttgtctcaagcccaatcaccagagatggagcctgtttttcctcatcattttttgaacatatacacacagacacacacatacaaacacacacacacacacacttcagaaataaaaaaccataaggaaaaaaataataaagtaccactgttacctatcagagtagtacaaatgtggatttctgtcattctttgagcatctcagtgctttataattcttctgtaatgaatatttattgctttcattgcataaaaaagagaaaagggaagcattacttttagtgtaaaaagaagtcatgtaaaagagttcttgttccgaggcacgtgagctgggaagaatctttcttacctcgctattcatcgctgcctcttctgacctcaaagcatttcgtgtttcaatcttttttcttttaaggcttgaggagagtaatctagcagggggtctgataaaagaatttgaaaaacgagcttttctatgtgaagccttacatcctcctagaatgaatcgtgctcgttcggctagtaattgctccagactccaggaaagacaagactttcccgtccaggaagataaagggctgtgcgactgtagaacccaattcaattacccattagtgtttgtaactgctggttctttcctgcttcgcttcaacccactcctgggaggattcgagtcccctggaagcatgctcagtagcacacgactctgaggactcaaaagtttttggttttaagatctgatgcacaaatcgcacattttggccatccaatgtggattctgagtgaggccaaaagatttcctgggctggggcctgaagtttagaatggcctgaagcaggtaacacaggatccttggcgacagacagcctgagcctttcttagctatttcctctgaacagctatgtcctgtgagcatcctctgcttagtcctgtctctctttgcaaacctgctcttccccttcctgtttggagtttgtgtttggcctcttcacctctggatgagagaagtgacatttgcaaactagaaagatccccagagtggccgagaggctgagattgttcggccgtggctcaattatcgtacaactagtgggttccaaccactcagagactcaatgtccacatattaagataattttatggttattatgaagacagtacactgcattggttacaca

SEQ ID NO: 54330 - DNA, 747 bp, Bovine  19866880595960
  misc_feature (1)..(1): n is a, c, g, or t
nctcagaggacaccacagaggactcaggtgtgatgagctccccctcggacatcgtgtccctggattcccagcacgacagcatgaaatccaaagacaggtggagcacagaccaggaggactgcagcgaccaggacctggctgggacgccagagccgggccccccgaagagccccttgtgggagaggagcagctctgagaaccggcatctgaggtgaggcatgggccggctgggaaggggggtcccctccagcctccaaggatggaggcctttgtcccagtgagccagccagggctccatagtgaggagcctgactggggatgtgttgcacgtggttctgtcttcatgctgtgtctagctattcaggtatttataaataatgcatagtgtcagcttgttcacatttacctttcatacaaacagcaccataacctgtttccgcaatatcacgtgtttacgatttgtccctggtgacgtgtgtgttcatgagttcactccctcatccagttctttatgacacttgagccgttctggtttttcacccctggagtcaatgagcaagttgtatgtatatgtccatttatggatagagttttttagaagaggatgattaggccttcagagaaaattcagctttttggaatattggcaaattgctgtccgaaatgatgacctgctgaccacgccctccagctgtctgtagagccctgcccgtcaaccttcacaccagtatgcggacgagcgggcgt

SEQ ID NO: 54331 - DNA, 1451 bp, Bovine  19866880855979
  misc_feature (1)..(1): n is a, c, g, or t
ngctgggggagactgaggtctgaaggctgacagaagtcaggtgtacgcctggctctcccacccagtgtgcgcccccgggcggtggcccctcctcgctgccaggggccccgctctccacccagtccttcctcccactggctccccagggaggacaatcccatggaggtaaggatggcagccacaagagcagccactgaaagcttgggccctggcatgcggagcttcaaacccaccctcttcaggtatgaaacagccctggagctgtccaagcctcggttgtcatctttctgactcatctgtctaatcctccatttttgaatcccctacaaacttcatttgcatttggaagtaggtccaatgtcaagatgatcaaacgtattttgaggatgaaaaagaagtcttttttgaaaagagataaaatgaatcaggattattttgcctagagaaagttggtaagtaattcaacaattatcttctctacccagaagctggcagggagctagctgtcatttccaaggaagatagaaaaagatcaagtggttggatggtggaaaaggatgaacttcctaagctgagggctgcagagctcatgtgggacataggcatcagctgctccccgggtggaatgcacagaagcattatgctgttgggaaaatgcaaccctggagggtacctggtttataaatacgcatcctgtatagctcaggagcccctgaagtagggacacacacaggctcaatatatggacgatgccctctgtgtgtgtgtgtgtgtgttactgatgcttagtcactaagtcacacctgactctttgcaaccccatggactgcagcccaacaggctcctctggccatgggatttcccaggcaagaacactggagtgggttgccatctccttctccaggggatcttcctgacccagggatcaaacctgcgtctcctgcattggcaggtggattctttaccactgagccaccaggaaatcctgtacgtatgtgtaggtatatataaagaacttaggcctgtctggaagcagggatgctctacatggtgtttgttaaaattcaaaagaaatcccaggaaacaagaaaggatgatctcagacgaggtgtgacaggaagcagaaacaaaaccagccttcgattctggctgttgctagactcaaatcaagctggtcccctcctggggcctcagcctccccttctttaggactaatgtttggcccctgggttcacagactctaatgggtaagtccccgtccatctctggagcacagccccctgcccaccggcattcacagccggccgcagcgggctcaccaccacgacctatgtgaccgcatcatcgctgtgctacgctgacctggccactggcgagcattctgaggccggttccaactcgaggaacatttctctgctcccggctggctgcctcggcccataggatacagt

SEQ ID NO: 54332 - DNA, 1124 bp, Bovine  19866881277377
  misc_feature (1)..(1): n is a, c, g, or t
nagtgtgggggaggatgtagtctcctgggggctcaggatatggaaaggctgggtttgctgtgggatctgcctccagtcttagacttgacatccatctgggtggtttccttcaagcagccaaccccatgtgtggggacaggatgctgacttcagctgtgggtgccaagggctctctcactgttttggctcttttattctcatctcatcattaaattgagctcaagctctcttctttcaaacagcagtactcatctcgctccaggtgttgttccttggttcactgcttctagaggctttggatgagccatttaaagtcccagagacacagcatgcccatctgggtaatgggggcaaaggttccacgagcttcacacactgagacatgcgcatgcctgggagtttaaaacctctgctccatggtaccctggggaggtctaacctcccgtacagtgctagcgttagaagcaattgcccttacatcacagctctgccttctccttgatgatacaaagacgatatgtacagctctagtggtgagaaaaagatggaaattggaatgctttgtatgccagaggaggctgcagctatgagtttctaaaccagtttcttaagacggattgaaggaaatggatgtgaatcttacagctatatctcaacttaaattcagccatcaagggcctgatttctaaaagcttatttgcacttttccaacagaatactacttgcaaaggcagaggggtggagcgaatctatttcctatgaggtgaaacctcctattcggggttttaagtgggctcatgtattatcccaatggctgaccattctcctggagctgagggcacagtaagtccaataaaatcaccccagcagtttgatatatcatttcatccgtttctgacttggagaagtcataaactcatgtattcagagggacctgtgctaacaattctagcttggtcattcagagtatttacggcatcttatatcgtggcacctgcactggccatcccattgccagacatatttatccattgactttgttttgggcctcgcacatgccaaaaaaatatgagtcatcttggtggggggagaccacagtgtactctgcaaagagaccttttaca

SEQ ID NO: 54333 - DNA, 1150 bp, Bovine  19866881351903
  misc_feature (1)..(1): n is a, c, g, or t
ntgccccgcttttggcagagtttggtcactggcctcagcactggccctccttccttccttggtagcagggcctctggtgacataaccagtcaccctatggtgagccagcaaccctgtgagtattaaccacgtcttttttttttttttcttttcctgtattttgttgctttgacctctggggctttgcctaccctgaagggactggatcaaccactccagagcccaacctccagcacctgcttctggggctctcacactctgggtcaccacccccataacctggggaataggtgccagacaaggaaggacagtctctatggcttagaacctgcttaaatgatctgaattagacagtcatgccagctcaccctgccacgcctcattcttttctggagaaatcatagttgtccccagggttctcactccctcggtgttctgactgaccctcttgcttccccaggccccctcccccactctttgtggcatggcatgccccttcctctcggggactgtgagtaacagactaagtttccaatagatatcatttcatgattttctggcttcacccattctaaataattacaaaacccatattaagacaatgagtgtggcctgcagtgtatcagcaggaggctggactcaggcatctcagatttatagatgctcaaggatgcccttttctatcaactctcacccggtagaaccaggtatgcggcttccttgtcctgattactttccacttgacaatgatgtacaatctctgtgctaggcccttagtacaatccttaaatctatatttcttactgagccagattatttgtctttctgacaatattagaccctggaaatgtaattttttaaattaaagaactttataacgtgcttcctcagaagagctccatccagtccagatgaggacatttatctctagttctgtccccttggtgatattttaatactgcataattcacttaacaatgtgcctattaattatagcaaattcttacaatcatttgcttgtgctgctaaaaattggatagtttgagaaaagttttcctctgttaaaatccttgccagatttcagaaataatatgcttggcattattaccaaattaagttatttttcaaaagattttcacaatgaactaca

SEQ ID NO: 54334 - DNA, 724 bp, Bovine  19866881423042
  misc_feature (1)..(1): n is a, c, g, or t
nttcttgcctaggaaatcccatggacagagcagcctgatgggctacagtccatggggtcacaaagagtttggatacaactgagtacgcatgcatgcaatcttaggttagcactttctgctttacacccaagcttgagaattttccaaagcttgcagttagctgtaatggcatttgagctatgggattatataattcaggtggaggacaatggaagcattaaatttcctgacttgggctctgtggctatttatttggaagatgatttaattatgaatttgtatttggtatctgctaaaaatagattgtgcttttccacatttgcaaaaattctgcagtaataactttttagttcaaaaaaaggttcatttctttagttcaaaaaaaaagctccccccaaaatggttcacaggagtcttgagcctttgcaagagctgtttctctttctgactggaagacccaccctgtgctctgagcatcttcccatcctcgctctcccccctctcactggtgcttatgacacttgcaggctggagatgctctcacccctgttccttcccccttgggcgtttaggcagctagctgcccttctgaccctgtgtgaccatccccaccatacactgcaggctccctgagagcaggtcccctcgcctgccgcccagcgcaggctctgtgtcctggagcaggcatatggggtgggccctcaccgacacctgtccgtcaggt

SEQ ID NO: 54335 - DNA, 955 bp, Bovine  19866881774715
  misc_feature (1)..(1): n is a, c, g, or t
natctcctccaaagatgcacattcttggtcagagtcctgaatttcctcaatatgctcattcattcacacatttatgatgcacctactatgtgccagcaccattctctggagtctctccaggaagagagggtcagggaacgcagggcgcattttggcaacagacagaaacatctggcttgcttgcacttaacagacaatgtttgttgttggataaatagagataatgcaaacccaaatcttctggggagaaataacgtactgatggtaagttaataactgttgttggatcctgttgtgagattagagtttactgggagagtatttctagagaaaataggatgctgaaaaaatagagaaaagaaagatacataaacacaaatctgagactctgtttaaagggatggactacagtgaagatgcccaggaccaggtgcagtgacactaggcaagaagactggacttaaatcgacttcctccggttcaaactctggctgcagacagcagggccgtcccatcttgggggctggcaaattcctgtcccctgtgttttcctatagtaagcaagctgagattgttttctacagtttttaaatggttgagggaaaaaactcaaaataggaataatatttcattgcatgtgaaattacttgaaattaaaatttcagtgtccatttttgttgttgttcagtcattaagtcatgtctgactctgcaaccccatggactgcagcatgccaggcttccctgtctaccaacagctcctggagtttgcccaaacccatgttcactgagtcggttcactgatgccatctaaccatctcctcctctgtcgcccccttctccttttgcattcagtctttcccagcatccaggtcttttccaatgagttcttcatatcaggggccaaagtactggagcttcagtttcagcatcagtccttccaataatattcgggg

SEQ ID NO: 54336 - DNA, 673 bp, Bovine  19866881873875
  misc_feature (1)..(1): n is a, c, g, or t
ntaaattgcgattttgttcctggcagggggcacagtgggaatatctcagccgcgggtgcaacactgcaggcttgttcggtaggaagccctgcatcgggtggcatctttattaagtcacaggctggtcgggtcagaaacctgtgcgtgttctcacagttcagcttccccgccaagctcccatccagggaaattccagggacgggctcgccttgagcagctaggcctgcgccttgtaaagaggcaaagcaaggcctccaggtgagggcagcacagcttgggatgtgtgcagacattgccaggtgctttgggaacccgtaagtttttgcctctgatctgtttcccgtcatttgataagaatgttcaaactgcattgagttagtgcagcctattttttggaaggagagatcctttttctataaacattcagaatgcagtaactctttatctgatccttggagcaggagctgctctgctcagcttcatccaggagcctttgccgacagctaagcgatccacacccatgggctctttcttaacttactggaagttgggtaatagctgtgggactcggctctcaaatgttcctctttgaatatgaacttgatgtgtgctgagatagccacattcccatgctcacggcccacggggtgagtttgctgtgtgttatggatag

SEQ ID NO: 54337 - DNA, 1422 bp, Bovine  19866881893443
  misc_feature (1)..(1): n is a, c, g, or t
nctggaagtgatttgcaatcctcagttcgctgcattagaatgggggtgggaaagcatatttattcagcacatggcatgtgtcaaatttgttacatgctttaccaaccttatctaaaccatgtctcacagtaattctgcaactttggcactaaccaccattttacaaatgcaggggaaatgggattcagtgtgggtggggtcagaggactgataagcagccctttaaggacttgaaagtttctcttagtgtcaggttcattatattttaatccgttcctcttcctcttccaaactttactgtttgattgtcacagaactcaggtctccactccagagacttttcaaatgcaaatcccaagtctcggcatttccgcatcacgtacctgctcttgttaattcaataaatcaaatcaattcgccaaggaccatccaggaggatgaatcagaaagagatgaatcagaaatgcactctgcacttaagggaatttataaactattagagggagtaaaaccacatcataattaaaataaatacatcagtgcatccctatccaagacaaggagaagctgagatgttctctgtccaccaacgacagtgaagggtggagggaagataaccaggatctggagccaaggagagaggaagagagcaggggcccagacagacagacaggactgtgaggtgcacagactccctggggatctccttaaagactggctatgggcccgggggcctgcattctcataagcacagaggtgagcctccgccacattttaagcagcaagggtccagtgaggatcaacgtgtaaagtgcacagtggcatgggttgcctagaacaggaggagagtctaaaggtcagggagaaggactagcaaacgaaccaagacaagggcgaagcggggagggcaggatggtgccctgttcatggcgagtgaactgtcatgctacagattcactgctgttcctctctgcaggctgagaagtgggcaagtcagccaacttaaagcattgtaaggatggagtggacagtcactcaatgctctcagttaaagcaatcaaccaacgaaaactggagagggagccattcctggaaagacgattcaggcctcatcaggaaacccaaacgagcactacctgtcagtcaggtggtactacctgtcagtctgtctgccctgcagcctgtcggtcacctgtctccatggctgtcgccgtgcaggtttgttcatggtcctccacaggggtctttggacgcgtcactgcactgaggttgatgttatataatggctaatagaaatctgtctcgagtgaaatagtcaatacaaaagtgtgtgtaaacacaagtcgtttggagttttcagaatatagagcattacacggttactcacgggaagagaaaaatcaaccttccaccagcactcaa

SEQ ID NO: 54338 - DNA, 930 bp, Bovine  19866881920989
  misc_feature (1)..(1): n is a, c, g, or t
ntgtctcctgcacagataaagcccttttctgaggaaagaatttaacttaaagaaggtactttactgcattcaaataagccccttaaacattctgcactttaagcttttattctagattccattgtgaggtgataatgaggtgctgaaaactaattagctcatcagacagaactgtctggtctgccatctgctgagtctggagagtgatagtccctggtcaaactgagaaatgggactaaaaatatcacactctcctgttcttcaccctgttcttgcctttgtgcctgaggcagaagccattacgtgggatttcaggctgctcgcctggccatccaggctcagggtcacacactgatcatccacgcccacgtggattttcaaatccaagtggtgtccttgaggttctctggacttgggtcctcctccaatacacacaccctgttacactgtatacttgagaggagtgaatggtttgagactgcaagaaggttattctcattaaccaaattgccaggaccccaaagtatccatcagcagagtgtcccccacatagattttgcaatgaattcttggaccttttctgtaggcaacttctattatcatgggttcagatagcttgtgactctggaacaaggcaagttttctttgttcttttgttacttagagcttccctgggtggcaccagtggtaaagaacttgcctgccaatgcaggagacacaggttcgatttctgcgccaggaagatcacttggagtaggaaaaggcaacctactccagtattcttgcctggaaaatcgcatggacagaggagcattgtgggctacagtccatgggtccccagagaatcagtcaaagctgagtgactgaacacacacagcgtgaaggactaagacttgataagcaagttgcttccccagagttactaatgtt

SEQ ID NO: 54339 - DNA, 1651 bp, Bovine  19866880458349
  misc_feature (1)..(1): n is a, c, g, or t
ngaaaagagataaaggcataaatgaaataatactgacctgaatagataactcctgaagctgaatgatgggtacaacatggttcattaacctactctgtctactttgcatatgtttgaaattttccatattaaaaataaagaagatttggtagcactgtggctgtgggcttatttcttaacctactgatgtctcagtttcttatctatatgataaggaacaatagtacctacttctagagttgagatgagaatgattttttatatttagacatattacatctaaaatttatataaatatattaaaatcttatatgtaaatatattatatacatgaattctctaaggttatatataaatgtatattagctagataacacacacacaaagggcccagcacatagtaaccttcagtaagtatcagctctattagtatgaacacaaggtactaatatggtgtctcaatacaatgggcacccaaatcatggcagctgttgttaatataaatggcagagttaggtctagaacccaggccagatttttaatcaagtatttgacacatctccttgatagaccaggtcaatgacccactggcaactctaacatccccggtgtctcctgacaaataccagagaacctaatacaggatcaggagctgactaatgtttaacatgcttctctggaagcaggcagggccaccttgtttgccaaaaccaggtaatttatggtacatttcctaatatctgctgacagaacaaataagaaaggctctaggacatgatcaatgttcacaccagccttcaaagtgatttggtaaaaccatagaaaataacacccagctaaggtgcaccacacagggtaagagctgacaaagaaatggcaatttttccctgagcaaatatacaagtaacagatgagtgctgagagactagctctttaggtcttcacactctccttcctaccccctatattttaagagaagacaaactctttttcaacatacttcaagtatgactgtttgctggattaactgcttccttgaaacgataaaattatagacaaagagctcattctaatccttttatcaatttaagtacaaattggcttaggaatattattaccttttctacctcctctaggagactatgagagggtatcacccactccaaattatgggacatgtcctccccactccgatcaacagcaggaatatggatgccacttgatctatgagtagtcacacatctccatttctgctcaagtcgctcccattgcacacagtagcctctctccatctccagagcctaaatcacctgtgaccatactttctggaaacaaaggggaagaggagagaagtaccgcgtgagaaaaggtatctgggtgctgcttctgggtaatctgggagatctggtccaaacacagaaacattggtgtttcgtattataagcacaaccagaaggaatattagaacttaagatggtcctggataatacacggtcactttgtcctacaaggcccagtataaatgctcgcttctccaaaaatgttccctaggcaccacaaatgaagcaatccctccctcctctgaacttccctatcactttacccctttatgggactgctaagagttcatactgggggttcttacaactca

SEQ ID NO: 54340 - DNA, 2218 bp, Bovine  19866880472920
  misc_feature (1)..(1): n is a, c, g, or t
ntagtaacacaggagcagatggggagaagatgggtgggtttactagcaggcgctgactgaaacagttttagagacgaaactagggaagaaagctgaagagcagcagcctctgccctctgggccaaacctgcagagatgctgggggttcttggcaatggtttgaaagctcgtccacccaggcacagggctttacttctctgatgccaaaatcctctgcatgcctgcccctccttcctgtgttcttttaaaaaaagaaattaatggaatctgttcagaatacccctgaaatgaaattacatttttaactctaattaccctaattaaaacttgacagctgtaatcctggaatggcagatatgctaagtaccccatgcctgtgacaagcttacttacccagatggaatgttctgttctgggcttaggagaaaaattcttctgtgtatttgttttgtttttccctatcggccattagtctttgacctcacagcttcctcaagctaggatagtctgtcttgtgggctacaggacccctgaatttccacagcggtccgtttgctttcagaggtgttgctcctgatgattcttaccacatacctttgagttctcacttctgttgaggttggtctgcatgccctgagcctgtccctgggtgaaatcccctgcctgtgggggacctgcactttttagagggctgtctgctgatctagggctacatctgtgtctgggatcagttgatggctggtattaaggttacagtttgaggtcagggacaatgagctctgaaaataggattcctcttctcttcacatgtatcagcataggctagaagcaacttggtgaaatgcctggtcttgacccctgtcttgactagttacctggacagacaaggaacatattggggagggagggagacagtccttgaaacagcctgaaggctctgttgatgctgtgagtaatctcacagttctattaggaccaaatatccccatgttctgttactttcttgtagcctgaaagcctgtttagtcagtggacactgggtgttaagtactgcaaaggatacagagttgaataagacacactctgtgccccctgagaagcttagaattgtggggggagtaggggaggcagtagtggatgaaggacagccatataatgactagttacataagacagaacaaggtaaaatttcccacaggtgttagcatttgaacttgacccgaataggtaatactggcagaggaatggagaggggcattgcaggttttagggaatagtgtgatggaaggtgggaagttgttagatgacagtctgctgtgattggaatacagtgaacagggaagggtacgaaagaggatgagattacggtttaaactatcctgtaggtaaagggagtccgttggggctgtaggactgtaataggagtatgtgtggtggattgagagggtgattggagacagtagattagaacagatgtcaagtaaactatggcctatgggctgaatcagtctgttgcctctttccatgaagtaatactggaacacagccacactcatttgttcatctatgactgctttcatattaccttgtggcagagtcaaatactacagagactgctggccctatacagaaagtttgctgatctttgagttagaaagtaattatgaaagttccgtaagaggagataaatgtcaggagtaagcctgaaatgaattggaggtgtcaaatgagactgcagaagctgagacagtatgatttaacagagaacacctgccctacctacctctcacaactttgtaagagtcaaattttctgaaggtcacgatgtcacaaaggacacaggacatgagtaagtcctggtttgcccttattagctgtgaccttgggcaaatcacttaactttcccaaaagtttaggtgaatgtgttgaatgaaacaaaagaaccaatcaggtttttcctcatgacacagaactcttactctgctgcttatctatgcttcaccccctaggttatgtctgggaaagacagatatcctagaaaacttggaacatagtttatagtttgagttgtgaagctggggacaggtgggcggaaggtgtgggagaggggctcatgatagtttgagggcatactgtgcccttcgccttccctaactgctggcacttgttctggccagatatttctacccttcaacttccagagcatattaggtccctg

SEQ ID NO: 54341 - DNA, 4666 bp, Bovine  19866880540002
  misc_feature (1)..(1): n is a, c, g, or t
naatatcctgaagtctatttttaaaaattaaaatgtatttaaggacttccctggtaatccagtggttaagactccatgtttccactgcagaaggtgcaggttctgtgcctaatcaggaaactagggtcccatatgccacatggtgaagtcagaaaataaaaaaagttttcaattaaaatgtatcttaaatgatgcagcaatttatataaagtattatataaaacacaagcagactttgtaatttttttaaaagtataaaaaacaaaaacaaaataaagtcagggctacccttgaccgcccctcgtcccatcccagatagcttccgctactgctcctgatttggagttttccttgtttctacacaacacatgtatgtacacacaggaagtgcattgtgtcaaagggcctgttttgcttctagttttagaagaactatgctttaaaaaactttatgaactgacaattacagggacagagatcaaaattccaaaggttcaatagggaaaacagtgaaaagtgggtgtccctctcttctctgttcccaattgtctctttactccctaaaggcaaccagcaattctagcttcttgtaattccttccagagatagtctagcatttaaaactcaatgtgtaaatacatatatgtattttccaaataaagaaagactcttctgcaccttgtttttcttcattttatagtatatttttcaggctttttttttttatcagtatggaaaatagcctccttctttttcacacatacatggtatcccattatatttatgcacaatatttatccagtcccctatggaaagaaaagttgtttctaatattttattacaaacaatgctgcaattaaatattttatacattattttgcatatttatttgtaagatgaatgcctattagtggggattagtcagctgaggttattttaaaattttaaatagtattttaaaagttgatagaaactgccaaatagccttcaggacataccaatttatactgcttatgagtttgtttgttcctttgttagtatgtcatatgatatactctgtcctgcagactcacatttttcactcagtaatatgacactggagttctacttatgtcaatatgcatagatgttcctcattaaaaacaaagaccatcttacagtttcccactgctatggctgtggaaagttgatttagttgaacacatattgatggacatttggttgggtttcaattttttgcttccacgaacaatgctgcagtaactcctcttgtattaatatgaatagaatagattcagagaagtaaattgcaagattgatagttatacatacttaaaatttcagtagatgcttttaagttgctcttccaaaatgttgcggcagtttagacttcctctaacagtgcatgagaactttgtgtgtgctccctcagttgtgtccgactctttgtgaccccttggactgtagcccaccaggctcctctgaccgtggaattttccaagcaaaaatactggagtgggttgccatttcttactccaggggatcttcctgacccagggatcgaacccatgtctctggcatctcctgaactggtaggcagattgtttaccactgcgccacctgctcttgaacctgcccatgtactttctcctggaacaaagctcaaagtatgggttatcactgggatcatccagaccctgagccctattctgcagaatctgaatgggtaagccaagtgttgggaagaataaacacagaaaaggggcagagctgtcccccactagccagatagtcacccaggtaacacaactctctccaaaggaaagattactttggaagtgggagaaactgagctccccatcaataggggtgtttgaacggaagtttcaacaaatgccctgagcttctactctgtgtgaagtctcttagatgggtgtcttgagccggagatgagtcagaccgtccctgccctctcagggcttgatactcatggagaaaatagacaagtaaacagacagtgacatttctgtctactaactattgagttggatttccttttttgataatatctggaacttcctgctacacagcacatgggactgctggagataaaaacaataaacatccttttaaatgcacaaatggatctgcagccatttgggttttaacagacatttgggggagatgaaggctttgacttacatgaagttaagggttgtaactgagatccctgataaatctaggacactgaaagggctgtaccaacagtgaaaatgcagactaggggaaaacaagcaaatgtctgagtacagaagacaaaagaagacaaaaaggatacatgtccttagcaaagaagacaaaagggatataggtcccaacaaactggtctttggatgaggcaaagacactatctttaagaatttgaaattgcatgcttatccttgatgaaaatgaggtgacgcatgtggggttcatatttacatacctgcatatctagggaactccaaggctaagaaattaacatttaaggagatctactgaactgaacttcaaaagtacctctcagattcctagcagaaactaatgcaaatcttctccagatctcctccatggacccccttcctgccccaaccattgcaggttacacagaattcctatatatagagcccttccaaacagctaataatccacaaggaaacaactgctaaaatatacaaggaaacaatccatcatgagtaaggttcagtagacatagcaacatcagtgcaggaagatggcggccaccttagcagctgctcggggagaggggccagcaccagtctgggggcccaaggccattgcctctgactgggaaaaccaggaagtctccacagggatccctatcatggctgtgcaatttgatggggacatgattctagaagccaactccagaacaaccacggagtcatacaccaccaaccaagtgactgacaagctgacccttattcatggtggtattttctgttgccactcaggctcagcagctgatcctcaggcagaagccgatgcagtcacttatcagcttggtttgcacagtgttgagctgactgagcctccactggacacacggcagccagcctccttaaggagatgtgttaccaataccgagaagatctgatggcaggaatcatcactgagggctgggactcccaagaagggggacaggtgtcctcggtacccatggagggtatgatggtaaggtaggccttcaccatcggggactccgggagctcttatatctatggctatgttgaggctacctaccgggaaggcatgacaaagaatgtctgcaatccactgccagtactctgtctttggccatgaaacaggatggttccagcagcagagtgatccgcctggcagctattgcagaatcaggggtagaatggcaggttcttctgggagacgagattgtccaattcactattgccactttataagctttctgaatcctggggttctaatatacaataggagataccccatactgctgcaaaattcaataaacagcttgtcactgaggaaaaagaaagattcagtagacaaaatgcacagaagaagactcctacatacttcagataacagaattatcagatagtgatcattgagtgcaggttagaggcagctgctaagtgctttggaagcatattgaaagaacagattccttgatgaaatcaaagtcttcacagagaaggagactaagaataagccttgaaggataagtgggactttgccaaacaaggacagatgctgttgggatgtagaaagtataaggtaccaagggcatgatcattgataattaattttttctgatgcaaatagggcagaaaagtgagggatgaggcaagggaggtaggtagggggacagatcatgttggcccttgtaagcagtcttacaaggagactttggtttctttttaatatttatttatttttatttggctgtgctgggtcttagttgtggcatgtgggatctagttccttgaaagaaagttagtcactcagtcgtgtctgactctttgcaaccccatggactatataacccaccagcctcctctgtgcatggaattttccaggcaagaatactggagtgggttgccatttccttctccagggatcttcctgacccagagactgaatccaggtctcctgagttgcaggcagattctttactgttcaaatcaccagggaaaccctagttccttgaccagggatcaaacccggggccccctgaattggaagaacagagtcttagccactagaccatgagggaagtcccatggctttggttctagattgaagtgtagaatagatttaagtgtaaaatagatttaagtgtaaaagaaaaccagtgaagggttttaagtgaggggttagtgatattcacttgtcccttcattcattcagttaataaatgtcaggcatgaagaatggctggaggatggagggtggcagcaggtgaccagtcaagagagaacagcagctacttgtgtaggtgagaaatactggtggcttagattagagtggtggtaatgaagatagagaggagtaggtagatttgactgatatttaggtcaaagtcttcaaagtacataagggatggaaagtgcgaggtatcgaggcttat

SEQ ID NO: 54342 - DNA, 769 bp, Bovine  19866880570952
  misc_feature (1)..(1): n is a, c, g, or t
nctgagagccctggtcatgtgcatcacgaggtacttgcgtggccatgggcgccttctgttctgtaagtacatataagccccacctggaaagccagtgtgttatgtgatgttatggctgctgctgagtctgctgcaccagccagaagagaataaatgtgtctgcagttcctatggctcctcgcgtcttcttccaccctcttagcttgcgccttgcctatcctgggttcaactaatagttcgcacagtgagatacagcgagacaactggtgccgtgagcaggatcagcaatataccaagccttccccgaacttggttcctggctcctccaatgaccttgggcaatcgacaatctctgtgagccttggttcccatttgtaaaacagggatcactgtctcacaggcttgctgtgagaattcaatgcaataaacgttagccaagttcagcttcccccactgctcttactgccctaccttctctacagaacctcgagctacttgaggggaagaactgcccctcgttcacgtccaaacacctgttggcagaacccagggcccaggtggaatgtttgaggctgcaaaatgaatccctgttgctgggctgtccttaactcttacctgcccaatgttgaaggtcagtgtgatggcataaaagaagttggagttggcacttcctgcgtaaatccagagatgccacaggacagggaagagcagggagcagatgatgatgatacaggcgaggacaaatattttcgcagaactgcaaagaaga

SEQ ID NO: 54343 - DNA, 745 bp, Bovine  19866880609777
  misc_feature (1)..(1): n is a, c, g, or t
ngctttttttttttctctctacagtgaaggcagcatagtgtcagtattgtttgtgaagtttagtatttgcgaggcaattaaaacaatcaacttgctaaatgaagtcatttgcagactgggaccaacttctccacaaaactactttgtggagagatacaagagtctagcatctcttttctagggataacatcaaatgatgcatggatttcatgctccggaaaggaaaaacaacagtcaggccaggctgaaagaagagggagagcacaagccagaagtttgctcacaaccccagaagctgggctgttttaaacaaatacctctttccacgaggcttaattggtagatcctacatattttagttaccatggaaattccctgcatattttcagaatctctaaaagaaaaaaaacctaagtgagacttctgagacacaaattttttgttaaggaaacaatctagtggaataagacaaggcagatttcattgctgtgttaatctcatggtaagtaaggtttatgactaagtcatttgcagatctgatttctgaaaacactgagaagaaacccagaatcactgggagataaatctcaatgataacattaatttacttacactcaagataactctctaaacagtcacagtccaattttacaagtgtgcaataggcaaagaaggaaaaggacaaacgttgcaaataaattcttgtcctttggtggtgcaggctctcagaattcactcttgtcca

SEQ ID NO: 54344 - DNA, 1263 bp, Bovine  19866880633710
  misc_feature (1)..(1): n is a, c, g, or t
nagaaggctacaggtttgtgcccttcccagtatcaaagtgtggcgctctattgagatacgtgtaggagaagaacattccgggagggagcagccatgttgcagtgaaccgacaacacccaataatataaagaacaaatccaggaagaaatggaaccataccctagaagcttgaagttacagtggttcatttggtcaacctgctctgaaaataaaggaaaagattctcatgttgaaggtagggcatgtgcctgcattttctctgcttaagccacagggatctcattaaggatcgggacactaacactgatggcttcattttgggcacaactctcagcaggaaagccccatacaaaggtaattacaaggaattggggggtgggtgggcattatagccttttaatttggtctctcaaatatcctgtcagacagatgtagaaaggagatcaatctttacctcaaaagaagtaaattgtaggttgaagtgtttggtttcagtctctatcaggttgaggctttgaaaaacagatctgtgggtctaggaaaccacatacaggattcagttgctttggagtccggtgagtattcaaggatataaggaaatgtataactcaatttgagacaattgtttttaattggcagttttactctcgagtacggtaaacccattttgtgtaagtggctcggggttgaaatacagtctgggaaaagggctgtttctggttcttcaagacagtctgaaggcatctcaaaagttaaaataacatgaaacttgccatctttctgttacaccgcaaatgtttttctcttccaagcacttctgcatatgggtaagcattccagcaaagatgcagttacagtccagcatgggaaagcaaaggagcctagtgttcagagttcgatgaaacagccaggatgctagtcaaaaagagagaagagttcttatagaagcaaaacagaaaatagaaatcaaaaagatcacatatcaatgtgtgtgttggggttgggaggaaggtggatggtagcagagtgtaatctttgattgagataagaaagaatatggctcagggaaaatgtacacaaagaaatagactgtggcttgagagaaaactgacttcagttgggtagggaagatttattcaggttttggtgaggaaattggaaagaactgtaaagctaaagtctgtatccaatttaaatacctgtgcagctgggtctgagggccaaagtagtccctagagccccaagaggtctgcattttgctca

SEQ ID NO: 54345 - DNA, 1434 bp, Bovine  19866880647140
  misc_feature (1)..(1): n is a, c, g, or t
ntatggacttgagttatgtggttggagaacactcactgtttccccttaacagttctgcccacagtcctttgctccatcactgcctctgtctaaaatgcttccagcattctttctcccaacccaaggctgatccagaccactcttcctggtcactccagcccaaagagatctcctcttctatagaaaactctgctatttacctattaactctgacaaatgacttgggttcttcatatataaactgtattatctgtttttataatgtagttttagtaacatctaacctgctcctcacaatacattgtgaggaaagcaagatatagattattaaccctattttatagatgcttctgaattgtggtgctagaaaaggctcctgggagtccctcagacagcaaaaagatcaaagcagttaatcctaaaagaaatcaaccctaaatattcatcaattgatgctgaatactttagccacctgatgcaaagagctgactcattggaaaagaccttgatactaaaagattgagggcaggaagagaagggggcaacagagaatgagatggttggacagcatcaccgactcaatggatgtgagtttgagcaagctccaggagacagtgaaggacaggggaagcctggcatgaagcagtctatggggtcacaaagagttggacacgccttggcgactgaacaacaacagatgagaaaatgaagttccacagaggagacaatgacttattccagtttttatgaccaaattagttccaggaaacaaaagatgttagtcttctaaaccaaactgtcttatcagctacaacttcatgattaccttatctccccagagaccacaggttccctgaagacaagagactgttttacacattcacctccctcacagcaccaggggaggcactcagtgagagccatacagtttggccgactgatttcaatactgtccccaaactgtgagactgaacaaaggcatatttccttttcttccagacctcacggacaatgctaaattgttggaagaaatcatgaacaaaacacagcatcccaaataacatttcttttttgagggaagggacaagagacgaggaagagcccttcaagacagggtaagctccatttcgtagggttccatgctgctaagtgttcaaagaaggctggcagaggcagtagcaatgggtttcaaaaaccaccgattagtcataattaacaagtcaaacatcgatcaaatgggaattccctgacagtctggtggtgaggactccgcactgtccctgctgaaggcctgggttcaatacctggttagggaactaagatcccacaagctgcacgatgcagccaaaatcaacacaaaaaacaactaatgccggaaaccacacctcaattctacttgcaagcaaaacagagagctatcttattttaaaactg

SEQ ID NO: 54346 - DNA, 1980 bp, Bovine  19866880681198
  misc_feature (1)..(1): n is a, c, g, or t
ngcaattgctcattttactttgtttttatttcaacataacatgcagtaaaaaaattaacaggatttattagcatttacaatgcttacaaagaaaaaggactctaaaagcaatttagttcagatttaagaaatcactctaattaaacacttacaataaatctatttccaaatgatcagtttggaccaaaatttaagatagcatttggtagatatttatgtctgctgtctatctgcagtatttttatataacctctgattcttgggatatccagcccccattttcctaacacagcagggaaagacatatacatgtggccatttaaattaaaggaagaaatggagtaagggagatcccaggctgcaaaaatatatacaagcatttaccttttccagaactaaacatttcttccataaaaatattaatagccaagccctatagaactagggccgggactacttcatatataactattctgtattttaaaaatatagggcagaaagccttttggatgatatttatacattttcgcacaatatttctaggtccctaaatgaatcatcaagcatgtagaacaaaaaagtctactttcttacattatctcttaatttaatctcataaatctctagtaaatattgtaggtaactacatttcaatatgagcattcacctcaataggaagtctttatagaaggtttaatctccatagccatatattaccaaagttcagacatataacgaatgggtagttggcagacattcgctctgtaagacaaagcaatagtgttttttgccccctaccaacaaaaaggcagagtcactttgaaaactagggcttttagagaccatagtacatttcctagactatgtagaataaaatcaaaataaagataggactggggggagcccaatctctcccttcacactaacgacttctggatgaggcaaccctttcactcacatgtctgctttatgatggcagtgttttagaatacagatatacaagttaaaaaatgtttttgtcgttgtttcaagataagagtagttagggacaaaaccccccatttcctttccaaatagaacaggggtttgctatttgcttatttttggctcaatgttactttttcatgctatgctactgaaacctgccgaagtccctatttcatgagatattaggttatgagttcagttatgataggcactcagctggcttaggctttctccactgtcctctgacagcagtcatcttgctaagtctaagcaggctaagttaaaaaaaattaccacagagaaagtcaaagtgcattaatcagttactaacagagcaatctaatgttaaatagtcatgggaaaaacctgttaaaattgttagaagtgaacagaaaattcaaatcaggacaagacagaatggaagtaactattataacatttgtcagataaattgtcaatctgtgaagttttaattcacacagacaatacatttctgtggttactagaaatgtattgctgtaaatgcatttactcacttctttaaccagtaccacagctcttcttccctaatgaaaatgaaaatgattttatagatattttcattgacctctagacaaacatttttattttcttttttctcttattctcttatgtaacataaatacaataaagtcaattgtttcctatattgttataaacatgtaaagtcattaagttatgttgattttctgccatactatttaaacattgttaattttacacgataattggtaagttagagaatatcagtgagaagattacctactcaaggactttgcctcctcttcaagccaagaggttaatgcattttcagttgtacacagaataggtatttcatgttagatgaattttgaccttattgtctttttggagatatatgatttgaggagatgtgtatgagcaccataatgacaaggggtgaacttgcgatggttgattttatgtgccatgttg

SEQ ID NO: 54347 - DNA, 1585 bp, Bovine  19866880740583
  misc_feature (1)..(1): n is a, c, g, or t
natattctgctgaattttaatataattaaaaattatatttttctgaattaaaaaatctccagggtggagttttccttccctttcacccactactccatgcagccatttccttgtcccttggaaaattggttttttcaaggacataattcccctactccaaataaagagctttttctaatcactgaagctgtgtctacacacgtttgcatccccaaaacctagggtggagggtagggaatgaatcatccacactcactacaccttcaactgttagcctcaacacctttcaaattcaggaagctaccctccaaattcacaaccctctaagcatatcagaggatggaggtttttatcactccctatcaaaccacctgcagctttctaacatgaattctgaattccaaatgagcacaatctcagcagaggacaggctagaccaattttgcttttgtcaagcaaagcagacgtaaaatatcatgtgaatcaactggtcacaatcaatcagcacccatatttcacatgctgaagctggagatgggggtggggatgcagtcttccctctctaccgtagttttccaggatgcatttgggtgcagatgggcttccctggtggctcagacgttacagaatctgccagcaatgcaggagatctgggttcaagccctgggtcttcctgagaagacttctccctggagaagggaatggctaccactctagaggagcctggtgggttacagtccacggggtggcaaagagttggacccaactgagcaactaacactactactactactactactactactactactactactacagcttcattaccagggataaaaagtctcaaattccagcaagactgaattgaaattattggccctctaaattaaaagtatctcttttactgacactaaagcatgacttgttaggaaactcactgaaatctagtttatttccctataagcttctcctcccattaaaaattattttaactggagtatatgacaattgatcagggggaaaaaaaaggaatacatatgatgttagtatctctaatcagctttcattaaaacacaagaacacagatgaacatctgtttcatctaagaacacagatatgggttgattgtgttcttagatgaaagctaccaaccctcccttagatatttacatatatcccatatacatacaaacacacacacacacgtggtgagtatagacatggatctattttctattttttcctccagtgttttatcttaaaaactttcaaactatagaaaagttgaaagaacaattcaataaaacacctagatccaccaactgttaacacttccacattttatctctacacacacagacaaaaacacacaccagatgcatttttttccaaaaccattttaaattaagtcacagatatcatggcccttcacccctaaatattttagcatgtaacttcaaagaacaaagattggagtttacatacacaatctatcttgggagaagaaaataactactgctattttatctttgaattcctctgcttagaaatctcacacccagtcatttcaccactggccttc

SEQ ID NO: 54348 - DNA, 1762 bp, Bovine  19866880753953
  misc_feature (1)..(1): n is a, c, g, or t
nagcctgaattgaaaccagtttgtctgactccaagttcttattactatcttattccttcaattttatagataaggacacagatactcagagagcttctcttaatggcagacatcaaatttgagcacctttctgttgaatggttaatcctggccaaccaaaatttgaaaagtaaaaacagacctgccgcaacaaagtcaatgtacttaatgccacaaatcagtacacttgaaaatggtctacatggtaaattttatgttacgtataatttaccaccaaaaaaggttcctgggtttgctatctggtcttctctcttcaacactgtagcttgtaaccacacatatgactgagaataacaaaactggaggatctactctaaagtgcacagaattagcagaacctgaagatcatttctattccctgaaaaatatatgacagttctagattatagtctgattatttagaaaagaatgcaaagaaaggaatgtcaaaaagcaagcttcctgtcaaggaaagcaatatgtacctcaagtgtccccaagtagtcactcagaaaacaaaaaggtaagaaggagaaacactagagattctccagccaattaatatccttaatcacgaccaccatagccccaagtccccatgctatggggctcctgggccccccccagagatggctggctgcctcttcactcttacctcccatcggcctcggcactttggttctctgactccaaacgtggggaaccacccaatgctcctgccactctgttcactgcatcactgccaccctctttcagccaagctttctttcaagtcctgctgaacactcactcctcgagaacatcttcgtatgccaccagatatgaaacctggctctggttccagctctggtcaaattagtttctccatctttaaaatgagggtgcggaaaagacacagatgatctaagtcaaaggttcctaacctttttggcaccaggaactggtttcacggaaggcaatttttccatggacagtagggtggggtggttttgggatgattcaaatacagtagggtttgtgcttcgatgagaatccaatgcccacgacactgatctgaccagaggcagagctcaggtggtaatgcaagcaatggggagtggctgtatacacagatggagcttcatttgcttgctctcctctcgctgtgtggcctagttcctaacagacctcggactggtaccaggtccgtggcctgggggctggggacccctgatccaagtctcttatatttccaagacacagtaattcatcagaacctgaacaagtttcagtcagactaaggcttctgccctccttcttccctactgtttacacatggaccaagatacagccccgtcacatgcagatgtcctaacgtgttatctcgtcatgatgaccatgtctcaggtgttggtcttcactgcttcaagaactctttaaagaaaagaaccaccttgtgtctactttggaatgaccttctgccctcctgtcaaccagagccatacgcctttactaataattaagacagaacaaaaacttgttcctcacacatgaaaaaagatcagaaaagtctgtttaagagacagaaaatgtctatgttttaactattcaaccaaagtgggcagagaaattcaggtcaaaatcaacattaactcacgtaagacttgtggccttacgagtcttaaaaccgaagagagaagggaagtcagctcctaaagagcctaaggccaaagaagtcagcggg

SEQ ID NO: 54349 - DNA, 1373 bp, Bovine  19866880779325
  misc_feature (1)..(1): n is a, c, g, or t
ntgtgctgttaagaatgttcctattttttttaatattaaatttttttaatggaagtatagttgacttgcatgcatgctaattcacatcagtcaagtgtgctgaatttaatttcagacattgcagaattccatattcaatgattttacttttatttttaatatactgatgttttatagtgtttacataagaagaattatgacttcctgggagcccacaacctaaaactatgaatagtccctaggtaagaatgaataaattttcaattgctttctttaaaaatgcagaaaacctctacatgttagacaacagttgaattttttttgaaagacctatttggttgtctgcaggaaagtttaatagttgaactaaatttttagtgacttaactgaacataacagtctaatttcagcccccgatgatttttgccatttttctttaggcagtcaaatgtttctatattgattgtcaatgagtccacttaggactttgtgccctgatttgtattgcttataaggaattgagcttgctaacaattcctgcagaaaaattaaatttctctagatcatatatagctaccaagttagcaatgatgccaaagtaatttaccagagacctggtggatttacttattttaaaaatggaaattaaaagagtcgagagttgttcagtatacttatacttacctatgtcctgttatttgtacatattatatgtgtgcatatgttatatatacatatatgtgtgtgtgcatgtattcaatataccttctactctaaaggaagacatttaatttttttttaggcaccaaagttttactaactctacttcttactctttctttataaaacaatttaatattttttggatccacagttgtgatgggaaccaagttacaatgtacttttatttctttctggcccctctcaacccctggttgtcacttctctcatcctttctcacttaccaatatattccaatccctgtaaaatacagactaaaggtaacaacatcattgatttgagattttagagaatgcccagcactaagccaggctctcaggagcattcaaactctgagagttcccatacactctttgacataattccttctcatctctcatgggttgaggaaccaatgagcctataaagcaagaacatggtctaaagtccatagaccaagcaaaggcctggctggtaaagtgcatggctttgtgactgctactgccaacttccagcctaaggaaagactgagtttttgttgttgttcagtcactcagtcgtgtttgactctttgtgaccccatgccctgcagcacgccaggcttccctgtctttcaacatctcccggagctgctcaaactcgtgtccattttg

SEQ ID NO: 54350 - DNA, 859 bp, Bovine  19866880807998
  misc_feature (1)..(1): n is a, c, g, or t
nagaaagagctaaagccctcaactgtaccacaccctttcagggcccctgacagcttcaggagaaagtcacaggaactgattctaatcccagttctattcaagtttccccatagcccagggcaagtcacctcccctccctgggacaaacttctccacctagatgatcagaggcctgggtaagagaaccttctaagaagccaaagctttccagcttaaaactctacattcattccaataaccctgaattactcagaaaacagtttcattccatcagatctgcttctaggggtagcagggcaccataatccatttcagaagagttccagaaaagatgaaaattagaacaaacttgggtgcctgaatggataagtggaggggtctgggactgaggccttgcacagccagcatgcccttgcgcatgtgtgccccctccaccagcgggtgccacgtacatgttgtcgtgggcagccttcatggccttggcggcatagcccatgttcttgagcacctcggtgttggtgttggcattctccagggcctctcgctggaactcgattgttgacagcgtgccgtcgatctgcgccagctgcttttcatacctcttcttgcgcttcagggcctggagtgccgctgcattgggggaagaaaacagggtttcagagagcccggacacagggcagcgtcctagagttcactgagttgtcttcctaattgggatggatgcacttcagtttctgcttcactacaacagagggctaatactctcttcttcacaaacagcatattcaatattctgggaaaactatacaaaattcacattcttcaaaatgcagccaggcactaagccaaagttcactct

SEQ ID NO: 54351 - DNA, 1619 bp, Bovine  19866880856394
  misc_feature (1)..(1): n is a, c, g, or t
nacattaaagccattaaaacattttaaaaaaccaaaagaatgggttgctcttcaggtctctggaagcacagagggacagagcagggaccagggggccacgactgtgaggaataaactagagttatcattcattgtacggacgtggacagtgctgcacagggagggagggggcagtggctcacacaggttcacacagccgccgacttggccaggctcctctcccgacttgccctgctcagatggggcaaaggggcgctgggtctgcaggtacgatgtcagctgaatcccagggcctcagggaaatcccttctcctcagcccacatggaaagccttgaggtcaaacgaggctttctcagccagcctgtgacgtctgggggcttccctcagagagtgcagagcctctaggccagtgtgtccccgacatgccctctccctgggggcagaggcagggcacccactcaggacttcgatcccagaaaaccaagccaacacgcaggactctgtccctcacaccacactcccctgttgctttattatgaaaagtttcacacatacaaacaaagttgaaagatttaaccttgaacacctgtatatctaccacctggacctcagcattaccattttcttatacttgggtgatcacaaatgatccatttctcaatccatcttatttctgtaatgtattcaaagtgaaatacagacatcagtacatttcctgccaaatatttcagcatgtgtattgttaaccagagctcaaaacttatatttttcttatgtgaaatttacatacagtgaaaaacacaaatctttaaaaaaaactttatattgacatatagttgatttataatattgtgttaatttctgctgtacagcaaagtgattcagttatacatatatacatttttttttctcggctgctctgtggcatgcggaatcttagttccctgaccaggggttgaacccgtgcccctgcaatggaagtgtgaggtctcagctgctggaccaccaaagaagtccctgtctgtcttaatgttcttttccactgggcttatcacaggatatcgagtgcagctccctgtgctgtgtagtagaaccttgtcattccattctgtatggaacagtttgcctctgctggccgcaaactcccaacccagcccctccccgccaccctcttgccagcgcaagtctgctctctgtgtgtttctgttttgtagataagtccatattatcatattttagattccacatataaatgatacatgatacttgtcttctgacttacttcatttagtataatgacctctagttccatccgtgttgctacaaacgggcatcatttagttctttttgtttcggccaagtagcgctctgttgactgtgtgtgttctgtacctgttcatctaccgatggcatttaggtttccacgtctcggctgttgggaacggtgctgctgtggacgtgtacagtttttgaattatggtttttatttctggatatgtgcccaggagcacaactgctggatcatatggcagctctgtttttaagttttctgaggaagctccatagtgttttccatagtggctgcaccaacttccgtttccaccagcagtataggagg

SEQ ID NO: 54352 - DNA, 815 bp, Bovine  19866880886479
  misc_feature (1)..(1): n is a, c, g, or t
naacttacagtctgctgaaggagaaagatgttagtcacataaataaataaaaaagttctaaccgtaaacactgttaggagatttttacagttagggcggtggagagtgtgccttcctgaggaagtgatgatttaactgggagctcaaagactgtgtgggagttaactgggaagagagaagaggtcgttcaggttaaatacagaggcctgggaacaggagaagggtggcatgttcatggtgcttgaacccagaaagtgagaggtgtggggagtgggtgtgagctgagcctggagaagtagggccaggcaaggcaggccacatgggggaaggacttttgtcttcaatctaaaatcagtgggaagttactacttatttcatgttttgtctttttttttttcagtttaaaaagcagaaactccttctagaactagaccagtatgcccccgatgtggccgaactcatccgaacccctatggaaatgcgttacatccctctgaaagtggccatgttgtaagtatcctctgaccaaacggggctcagagccaacaaacgcaaggaaaatctgatgagactttctcatgttgtttgttgtatttttggagatttggagtcttagtcatcaagtgtttgctatagttctgttgcacagcttggggttctggccaggaaaagagacagagccattctgtctcttttgggacaaagcctcacacaggcacacgcacaatcaacccttcacagatgctttttcactcgatgctgatctgggttccagcctccatgtaaccagtatttctaaaaacaataacaacaaa

SEQ ID NO: 54353 - DNA, 1895 bp, Bovine  19866880912080
  misc_feature (1)..(1): n is a, c, g, or t
nggcttctgccttacgttctctctgttaagaatctggggtcatccctgactcttctttttgtctcttactccaacaaactaaccctcccaacaaatccttcagaataatacttatcccctccactgctatagttgcatatcttgttttaacgctaacaacagcttcttcacttgtctccttgcttccttgtggagccctttcccctccatatggcagagccttgttttcacatatgttaggccttgtcactgctctggctcccatccactcaccagggtccccagcctatggttgcagagccagttgggtgtagatcccaggcctctcatccctagattcagggccttttcttagccctgcctagtgaccctggtcttctgacctggctgtgaccagccctgtcttgctggctctttcaggtgcggtggtccagctgcaatatcttctccacccaggaccatgcagcagctgccattgccaaggctggcattccaggtgagtccttgctgggggatacaggaatacaggaaggggctctgattttctctgtttgcatcacttcacttttactgctgcagacctccctacagtagggaagagtcatggccacagaatcctcgcctagaggcccatcggaaagagccgttttgtccagctgtcatctcagatcctactgaaggcacttacttgccctattcaagtcagtgattgggaatcacatggtgttgaagagggggaagttccttaaaaagaggatgttccttaaaaagttccttaaaaaaagaagttccttaaaaagaatcagggaggggtactggacagaaaaagagtcccagagatccactgcatagtatctgatggtctaggtaccggggaaggaccacaaccaaagaggaaggactttctcacaggctgctggagaaacagaaacaagtctgcttgggcttggggagggaagtggttcggtctgacgatgataaaataggacattcattcacagttccttctaaccagctgcggggggaaggtaaagagttggggaagacctctccatcgactgaccaagggtcggcgtgtccccagctcctcagcctagtttggactccatggccgctttctggaaaggccttgttttcaagaccattatctgccccagtttgagggaggggaagctggccttgcttggcaggtgtcctttgctcacaggaggttcctgggagccccgcacctgtgtcgcagttgtaccacatgatgggaggagcctgagctgacagtcaggagcacgggactctgttgcttgctcagcagtgccatgctgggacttctctggtggcccagtggttaagactcggggcttctggtgcagggggcatggatttgatccctggttggggaactaggatcccacatgctgtgcggccaaaaacagcaacagcagagtgtcatgatgagtgacctgggcacatctcagccgcttctctgggcatctgtaggcgatgatgatggtaatgccagcctcacagggtttctgtgaggacagatgagatgggggcaagaagcagttagagtattgcctgacacagagaaagtgctccatacacggtagctgctgttagtagatgctggccagacgtcgcctaggataacgtattacagagactgtgggcccatcaggtcctttcagtgcagaatggaccctggagcttgtctcttgagtccacctaatgtgtccctcctcccgtcacacctccctcccagcaggaggcacagtgggtaggaaccctggtcactgtgagctgggggcccagacagacgagggtaggaaaagaaagagtgagaaaggaaagaattctttccagatacttatatatagggggtctgtgttggctcccgt

SEQ ID NO: 54354 - DNA, 845 bp, Bovine  19866880998384
  misc_feature (1)..(1): n is a, c, g, or t
ngaaaagtgaaagtgaagtcactcagtcgtgtccgactcttagtgaccccatagagtgcagcctaccaggctcctccgtccatgggattttccaggcaagagtactggagtggggtgccaacactgttacccacctacaaaatagtaagtcctaaaggagatcagtcctgggtgttcattggagggactgatgttgaagctgaaatcccaatactttggccacctgatgcggagagctgattcatttgaaaagaccctgatgctgggaaagattgagggcaggagaagggtacgacagaggatgagacggttggatggcatcaccgacacaatggacatgggtttgggtggcctccgggagttggtgatggacagggaggcctggtgtgctgcccttcatggggtcgcaaagagactaagcgactgaactgaactgaactaaaaatagtaagagtattatctcacacaagcttgtgataattaaatgtgataatccaagtaaagcacttcacaatgcttggatcatagaaagtgcataacgttaattactgttttataaaatattcttacttctcctcctgtttttctaccccctcccaacaaaattagtttcaaggagactacatttcccagcatgccaccccgccctttgatcctagctagaccaaaaagacgcgccgccgagtgtcttcagccggaagactatagcctcccggcatgcagcgcgcctccttccattagctttgaagcacggccggcgcgttgcccaccgggagttgtagtcagcggcgtgtttccctgacgcctgccgggccgggcgtgggggcctgtgggaggtggcgcgg

SEQ ID NO: 54355 - DNA, 847 bp, Bovine  19866881051714
  misc_feature (1)..(1): n is a, c, g, or t
ncaggggacccaggggatcaaattctttattttgtgatgtagcaaacaaattcttgattcccataaatgaacctctgggtaaactgctggcatagctccatgaagttgactacgctggagctgccattgttcatagttctggactgattccagggttggcctctgccacgttgttgttcttgtgaatggtcaacataataaatacgtcccatgttgtcaacccgccactcccagccaggaggtagaggttctggtctatcccacattgttcttttttcaatatgatctacatagtaaactcgcccatgctggtccactctctgctcccaacaaggtgggaggggagcttgaggtacaggatttaatggtctagggcctgcacctccagatatagtaagaggaattattaatccagatgttgctccttcagatgtacttgaatttgtatttgttggtggcagagagcctgtactggagccatcactttcagaagtggtagatggtgagccattgacagatgctggtctacgtggggtaggtggaggtggttgtgaaggtcttggaggcctagaaggtttaaaaccgccatttgagagtgatggagaattattcccattgatcctcctgttttcaccagaccctgcatcctcagggtcatctgatccacttgcgtttgctctcgtttcatccttgggcctggagccatcatcattctgtgaagcactttctgaacatgcagtttcaccatgggcaacaacttcagactctaattgcagcccatcaagacagactgacaaatctcctattgtttctgctggttctttgtcacctacaagctgtaaagtca

SEQ ID NO: 54356 - DNA, 1996 bp, Bovine  19866881063292
  misc_feature (1)..(1): n is a, c, g, or t
ntaacctgtttcatctgctgcatgtttgtgactataaaagcagcactttactgaatctaagggtgctcctgggctgtcaccataggggagaagatattgttcagaaaaatctgaagcctataaaacttttgctgggaatgttaatttgcaaatgccaccaccatagaatgagaaagctttaggagggaaaacagtgtcataaaaaatgcccaagattaaggggaaacagctgcactaaagagcagcatggcacaaactatttggttttaattgcatggaagataattggctccagttggtttgggaaagattcagaaacaaaagaacagcaaggaaaaacaatggttcaagaactgttttaaggcaagacaatgaggttcatttcaacctaaattattccttaaggcacattttccacaaagtgggaaaatatttcaattaaagttttctaaacctgccatggagctttagttaagaagctgtaaatatattagacttttaaaaaatggtctccaatacaatctaaaacctcttctttttcagaggattttgtatttctctgttcttcaacctaagattctcatcatctaggtatgaaatcttttgaaaatgccttaagtcttggatcagtcttggcatacagtcttaaactggtacagtctttccttaaaatcccactttcatcaagtttttgtgattgacctcagggactgactttttataaaggttttgtaggccataaggtttctgtaacagaaagaagagattaagaagaggtgacaagaaggcacagaagaactatacaaaaaaggtcttaatgacctggataaccacaatggtggggtcactcatctagagccagacatcctggaatgtgaagtcaagtcggccttaggaagcattacttcgaacaaagctagtggaggtaatggaattccagcttagctatttcatatcctaaaagacagtgctgttgaagtgctgcacttagtatgccagaaaatttggaaaactcagcagtggccacaggactggaaaagtcagtttttattccaatccccaaaaaaggtaatgccaaacaatgttcagattactgtacaattgcattcatttcacatgctagcaagattttactcaaaatcattcaagcgaggcttcagcagcacgtgaacccaagaagttctagatgttcaagctggatttagaaaaggcagaggaaccagagatcaaattgccaacatcctctggatcacagtaaaagcaaggggagtccaaaaaaacccatctacttctgctttgttgtctacctaaagacttcgaccgtgtggatcacaacaaactgtggaaaattctgaaagagatgggaataccagaccgccttacccgcctcctgagaaacctgtattcaggacaagaagcaacagttagaattgaacatgtaacaatgaactggttcagaattgggaaaggagtacgtcaaggctatatattgtcaccctgattatttaacttatatgcagagtatattatgcgaaatgccaggctggatgactcacaggctggaatcaagattgctgggagaaatatcaacaacctcagatatgcaaatgatgccactttaatggcagaaagtgaagaggaactaaagagcttcttgatgaaggtggtgctttcaaactagggtgttgaagactcttgagagtcccttggacagcaaggagatcaaaccactcaatcctaaaggaaatcaaccctgaatattccttagaaggactgatgctgaagctgaagctccagtactctggccacctgatgtgaagagccgactcattggagaggaccctgatgctgggaaagattgaaaccgggaggagaaggggatgacagaggatgaggtggttggatggcatcactaactcaatggacatgggttcaagaaaacttgaggagatagtgaagaacaaggaagcctggcatactgcagttcatggggcca

SEQ ID NO: 54357 - DNA, 824 bp, Bovine  19866881200128
  misc_feature (1)..(1): n is a, c, g, or t
natagatgtttttctgaaattctcttgctttttctatgatccagcggatgttggcaatttgatctctgcttcctctgccttttctaaaaccagtttgaacatctggaagttcacggttcatgtattgctgaagcctggcttggagaattttgagcattactttactagcgtgtgagatgagtgcaattgcgcggtagtttgagcattctttggcattgcctttcttagggattggaatgaaaactgaccttttccagtcctgtggccactgctgagttttccaaatttgctggcatattgagtgcagcattttcacagcatcatctttcaggatttgaaagagctcaacgggaattccatcacctccactacctttgctcgtagtctgggaaaacattaattaacaagataggcgtggatcctcccttcgtggagctcatggcccagtggtatataatgggatgaacccatatagaataggaggcacaaagaaacactacactgaggatctcaagtatattccacaaccgagggaccccttaaggcaagttgtttaacttctctagacctgtttctttgtctataaatgggaaaggtttaattaggcagttgctgctcaaagttctttccagctccaaattctactagaatcataaaaacttagcccaatacccttttcaagttcctaacacttattagcttcctccctttatctgggaaatcatgatcagttgtcatggaaattaccatactgctccacatattggactatgatgttacagtaattacaaggaaccaaagggaacaggcagcaagaacaagca

SEQ ID NO: 54358 - DNA, 1254 bp, Bovine  19866881278457
  misc_feature (1)..(1): n is a, c, g, or t
ncttcttttacatcctcagggcgctatcctttctaaggcttgttgtttggcttttcctttgattctttgaagaatccagacctctccagtagagtactgccccactttgtttcttaggctagccagaatcagttctgttgtttgcaaccaaaacattctgactgactgactccaaattttgtaaacggaaaacggtagtagcatcaagaggtcagtgacttgttcaagcccacgttcttagaactttgggcacaagtataaggccacgctctccaggaagaaattatcctagatcaatatttacaacaggagaacacacacatctaggacagaactcacctttgttctgtgcatatgagggagacacaggaagagaaatgtgaataatggctgggaaatagggagcacgtatcccagatcttcacaactttcaattcactcaggcagggttttgcagagacccagaaccattctctctggaccctaaggcttgaggaggaatttctgaaaaggtggaagaatcttaggatctcaactgaagaggaacttgggcagataaatatctaaccagggatatgattcaacagaagcaaaactgagggtctgtgggaacagaccacatatgctaacaatagtagtggtagtgttagtcgctcagtcgtgtccgactctttgtgaccccatggactgtggcttgccacgctcctctgtccgtgtgattctccaggcaagaatactggagtggattgtcattcccttctccaatgctaacaatggttctgacttttaacaagggctggtgatcttggtccactaaaccataagctctgtaagaagaggactggacttgttcaccacaatattcacaacacctggcacagggccttgtgcctggtcggtgctcaatacacatgtgctgaaggactgaacgggttgggcttccatgtggttgtctggacccagcagcctagtgattttgtcactaatgaactgggtctttggctttgcatttctggcctcaactggggggagaatggtgcctggctggtgacaaatgtctggaaaacacaggagcagtggctacaatatattcccaatattctaattactgatgacatttactcagcagcagttgtggtacagggaacaaaaggttctgtgggcttgcagcctaaatgacagaacacaaaagagtaactgggagcttctctctctatgggcttgctttgttaaggtataagaagcaatactatt

SEQ ID NO: 54359 - DNA, 797 bp, Bovine  19866881385919
  misc_feature (1)..(1): n is a, c, g, or t
ntcgcagtgttcctgctgagcgattagcctctgattgaacctctctgccgacaggatttgtattaggtgccctgtcctctcacgctactgcatagtctgcctttggatggctctgactagaaaaccacctttcttatttgaaactgagatctgtcttcctctagtgccgacctccggtacaggccggggtggtggctccacagggaagcagcttgggctggcggaaagaatgtgggatctgaagttagaaggtttaggggcgaatgccacccctgacgcttgtcagcggtgaactgtttgcttcagctggaagaacaggtggtgaattctgcctcagaaaacaggtctcatccccctttgggaagatagatcaaggcaaatggggcttacgtctcaacctgcacctctcttggacaggtcttctgtgttccattgactgttcctggcctggtgtttttgttctttccttgttaccctcctgtaggtgggctcctgttcatcagtgtcgctcttaaggtgtgaagtgggcagagctgaccactcagtgactttgccagctgaggtctgagcactgcagcccagaacacggaggactggctgtctgttaggaattaatttagttctgtgtgctgtatggccctgataattcccatatcactgagaatttttcttgtttttttttttttacacttgattgattacactttcccgtggtctttcattagtgaaggagcaagcatctaggagcccctaaaatttgttccaggtggcacagtggtaaagaatcccaagagaca

SEQ ID NO: 54360 - DNA, 970 bp, Bovine  19866881404283
  misc_feature (1)..(1): n is a, c, g, or t
ntccccattttacagacgaggaaactgatctcagagagggaaagtatcatgcccacgatcattaagttgtggcactgagagttataccttcctaattccagaggaaagcttttaaccactcaaatcctctccccttatacaaccaaattactgcattgtcaatatattgtttatttttctgcttcccctgttaggggagggtcgtgcctttgtcatcctgcctttgctgcaccatgtgtggcccagggcctggcacagagctggagttcatttcgtgggcgtttcgtcacacaccctccggtaagtcagtgtcaatgctgctgctgctgctgctgctgtgtcgcttcagccgtgtccgactctgtgcgtggttcccccaattccaccacttctatttcccctccaggaattggcagatcggtgatggcaaaagaaacatcccccactaatcaataaataataatgttggagaatttgaaataagaatctggattattaaagttacaaatctttggtccttatacctttaataaaacatgcatctattaataatggatactgattctggcctgcttatgctgaaaaggggaaaaaaatgaccagtcgaaagatgctaatattttttctccttacccggcttggctgccaagcacttccctgacaaactgctcatcatttaaaaaggtttaaaatttttaacagcacgaaagggtaattgaagaggggatgctcagccctgtggccccttcgtgagagatcactcctcttggagacatctgtctcgtgggctgtggtggacccatctctgctggctcctagcttagtcctctggctgcggcttctcagactcactgtttttcttcaacctcttccctgagtcccttcctttcctcctccattcttcctcttcctctcccctcccttcccctcttcatttatgtttttagttgcacgggtctccattgctgtg

SEQ ID NO: 54361 - DNA, 902 bp, Bovine  19866880264349
  misc_feature (1)..(1): n is a, c, g, or t
ntgttggcaaagtaatgtctctgcttttgaatatgctatctaggttggtcataactttgcttccaaggagtaagtgtcttttaatttcatggctgcagtcacaatctgcagtgattttggagcccagaaaaataaagtctgacactgtttccactgtttccccatctatttgccatgaagtgatgggaccagatgccatgatcctagttttctgaatgttgagctttaagccaactttttctctctcctctttcactttcatcaagaggctttttagttcctcttcactttttgccataagggtggtctcatctgcatgcttaggtacaatcaaactgttgattcattttggtaaagatgtataatttgatgcaggttttccaagctcacatgtccctgggtcttaccttctgtgtaattctttctcctcaggactgcttctatggcagaagttttgggggctataactctgggagtgtatttttgttccacattttgagatcaccattcaaacatgaagggaaagagttacaacgctgtttctaaagatatggatggcttttccattgaagaatatgttctttcaaaaaaagtaaagaaacggttttattccaactccaaaagcctgtggttcttagttattttatcaatggctttctgttttcccatacaccataaaaacaagttagcatacgagtccaaggagcatagaaactcccagagttacttgaaatatgccgaggagggtttaacatacataatgataagactacacattcatgttctcagagctcctttaagggaagtttgtgggatgattattatcctgtaaatatcctccagcactgcttgccgccttctctagtccagatttcccatgggtgtgtgacccatctggtaga

SEQ ID NO: 54362 - DNA, 1761 bp, Bovine  19866880372596
  misc_feature (1)..(1): n is a, c, g, or t
nctgtaggtagtaacacatcctttgtctctttacagcaaaaatagattaaaaaataaaagttgtattgtacatataaccaacaagaccatatactacaattaattggttttgtttcaaattcattgtgtaggaaatggtgtaattacactgctccagttgcattcctttctctcagcattgttgctgttctccagtggattgtggtcaataatatttcattttaaaatcctgtgctaaaggtggacaggtcttgaattacatgttgttctttaaaccagctcataactgtgctccgtcacaccaagtatactgatgcaacatttatttactttcattaatttggaaactgcatgatttactaaattacacactgggtcattcagagtcatcatatcaggtgtagtcaaaggccagattgaatggcatttttctgctctcagtttccagtctttgttgaaatagagcatgcagagttgtttttgatcttcataatgaaggccgtctccaggaggcattcctcgagcccagtctgaccagagtgcacctcttgcaagaagaattcccttccttccagcccattttgactctgccacttgtagatttatgtacatattaccaactttcaccatcactcagaataggaatgtagctaccttgttacagggaggtggtaaaaaatgcattctgagccagtgttgcaaaaatgtcctattagatttcattttagtatttttattatgtaattttgaagattcaactgtttttttttttttttttaagataaacaccaatggcatactcaggtttttactctgtgcaacaccatattccataatataacatacacgttagtggaagacagtctccaaaaggtgaactgacagtagtcactgtttgctgccacattttaatagagatatctaaggagatagacagaatattttaagctgagagaggtgaagatgattaattttctttttaaatggagaggtttgtacattattaggttattttataaattctactctgcagcctatacatatttgcattgatttttgtaggacaaaagtgaaattgattcctaacccatcacattaatgtaatttataacattttttttttgcacattaaagtttttctaaatgatgagctcacacttttttcacaagtttgcctaaatttaatttaatatgtggggcgaagagtagaaagaatggcatctcggtgattctctgttctttaaaatatatcataaattttttttcctcttttgttctggagttcaagcatcatgctagtgatattaatagctaatagtttgtaagttctgccatctcttcaggtatttatttcacttgagatgttttaaccaagcactgttttatttacttgtttttttttttttttatcttcttcttccactaaaacagtaaactccatatgggtagggacttacagtgatcataaaggatctggcagatcacaagataatgtaaaccattatcttgtggggagtaggcggggcaaggattgaagtggggcaataacctgatcctatttgcatcttaaagacagccaaagttcagagcaggatcatgatggtcttggtggtgggggcacatttggggtcagggagaggacttaaaaagctggtccaataagaaataatgatagaccaacttaagatattggtagtagatttgaaagtcatggactactttaagcgatattaagcaggtagaatctatgggactgcgtgg

SEQ ID NO: 54363 - DNA, 1130 bp, Bovine  19866880392017
  misc_feature (1)..(1): n is a, c, g, or t
nagaaagcaagggggataaatctatttgacaattattgaaccagcatttattggggtcttattgtttgagtgtggtcttcaaacttacccagtaaataaatgcttatccccagctttcagagtagttcattaaaaaaaaaaaaaatccccgcaaaaattaattcctgatcatctaataacaggttgtgccttctgactgtttccaccctttaaaagacctttcccatgtagcaagggggagaagaaaaacaggtaaatgaagagccatcttttcagtattcaggtccaaatgtctatttctctcaggaaaacattcttttccttgaagaataatttcattcattaagagaaaagtagaagttttcatagtgttgccaaacaaagtggttctctacttttattttcagcaaagctaaatctactgcatattgaaattgtatcttgatatgcagagaccctaaaaatgaaatgctgacacacttaactgatttttttcatttcactttcttactgttggctgtgcacataggcagacagtcatgtgagatagttaatgattatatggatgaaagaaaatatgatattttgcataatatgatgagaaaatattaactggaaaacttaaggaaaacagaaattcaatcctagtcttattttcttctctttagtatggtaatctgtgtacaattcatacctgtccaatgtgatacaatgaaatgcttttaagttgtgtggtatttggaaaataaccctactttaatttcttgccgttagaatacctctacttaaaattcttactaaaatgatatattaagaacagaagtaacatatttattatttgctttaatcaatgaaacgcataataaaatggtaaatactcaatattaacaagaatttaaatgaaaatactaaaaaaagtttggataaacatgtagaaaaggcataacacattcaaaaattataattttaaattataatttacaaaaaataacttattttatagatgagaaagctgagttggaagaaggaaatttatttgactaaggtaccttgacaagtaaatagccttgagattgcataaggccaatttcatgaagtcgcgctgttccttttttcttaaggtgttatca

SEQ ID NO: 54364 - DNA, 1885 bp, Bovine  19866880488691
  misc_feature (1)..(1): n is a, c, g, or t
naggctccttaatactgtgggtgaatggttgtcattaagaaagtgtttgaatatagcatcacatttcaataggtgtgtcatgaaaaatacccctgctgctgttgcctgcttcactgatattaaatggctcagacagattctgcatctcataatctccttgacttaaaagcaggtgcatcttatgtgagagccagaaaatttgcagagcaatatagtacttaaccacaggcttaaacattttctaccttgcacataggaggtatacttctgaagaaaagaaaataaagttctcttttttactgactcacttgattttcagattgaaaaaaaatttttttttgcagtttaaattgtatcaatctacagtaagtaacatgagtaggatgctagactatgggagtcttttccctagtaagttaaaaaaaaaaatcatcatgatgaattctaatctggctttgttgtgctctgtacccaccagcagttaaatgtctgtagccaagacttgcagatctatttatgtcattgagtggcttaatattcctcacaaacttcaacatccattgataatttacaaactcctgatcacgcctatgaagcccactcattctagcgccttccaactttctgattcttcaccccagttgatccaaggtcatggctgtgtctttgaacttgacccaggccctccttgaaggctgtggcagagaccactgaagaacagtgctgttgaccatgctgaccaaaatatattgcctgtctgttgcattgcatttcatgaaaggagtatagaatatttgaatcactattttttttttttttttctcatgactagactgacgttataggttttggtgaggaagactgcagattggcaagagctggaataaatcatgtttacttaatataaataaaggtggtaacctacaaaaatgtttatagatttgtgtatattcctgggttagtatatacatgcaattttctgtgttctggtagctgagaggtcttagaaacagtgagcacacctagcactcagaacttggtttctaatacattctccagtgaaaggaaccacaactgcttggagaaatggttgattgcaggtttgagccagaaatcttcaatatgagcctagagcatcttaaagtgctaggaaataaggaaaatatcaaacaaaaacacaatgaatggggacatgtaaaagggccccagggactgaacccacatctcttgcattggcaggcagattctttaccactagcagttcttgggagccccaggaaaggcatgcaggggcaattggaactacaaaataaagtagtattgtattataacaggaagtataaaatattcacaaattcatctgatgtaaatacatgattgaataaataaatgaaggagaatagacatatccaatgtaaaaacattgctaataatttatgtagcttaactctctactccttaagcgtgggctgtgcgtaattagttccttctatagactgcagtattgaaggagagtaattttacagcggataaacttaccaaatactgtcacccaggtgatcaagtttaacgtaaatagtgatgtcatattgatagcttctggagtaagaaatggcaatccactccagtattcttgcctggaaaatttcatggacagaggagcctggcaggatacagttcaggggttcacaaagagctggacacaactaagcaactgagcacattaatagcttatgtgatgaaaatggctctttttacattcatggtcatcttctccaaaacccatagccctagcctaattatgagaaaatatcagacaaatcttaagtgagggtctttctacaaaatacccaaccaatacatctcaaaactgtcaaaatcatcg

SEQ ID NO: 54365 - DNA, 1194 bp, Bovine  19866880530784
  misc_feature (1)..(1): n is a, c, g, or t
ntacctgtgtatatttctattgcgattatatcatgactttctgaagaaccgtgaaaaatccttaagcatgagtgaatcatgccacattgctgattacttaatatgtattcctgccccaactgtggacagtttttttcttttcttctcaataagatttggagtgctttttacaaaagttttcatgtgatttttgaaattaagttgatgagataattaaagaagggactttgatgaaggggccctcatttgcagtaatggcttcaaagtctaaataaatcatgcctagcttgctttcagatgctaatgcagttaggaagaactctactgactatttaagagcgaagtatatttattgaattactttgtctttagtttaaaagggaaaattcatcatgttgaaattccacatgaggaccgtgaacagaaaaacatcttctggatttttaaattttaaaaattaatttttgtgtgtcttgtgaagcatattatttgctatatttcagaaagaatttccgaaagttaaaattcaagattttatgggtatatttgtagagaaatgccatgacaaattaagtagagaccatttatatgggtagagatcacttatattggttttctgtagcttctatagcaaattactgtaaacttggtggtgtaaagcatcccaagtttattatcttatggttctagaagtcagagatcctaatgttaggatattggtaaagaagcattccttctggaggctcgagtagaaaatctgtttctttgccttttccctgttctagaggccattcccttctttggccccttcctccatattcaaagccagcagtacggcatcttcaaatctctctctgactgacctctgctcatgtcctcatatctaatcctgtctcactcttagaaggacccttatgattacattgggcccacacagatactctagaataatgtcctcatctcaagatctttgagcaaatcacatctgaaaagtctctcttgccatttttaggtagtatattcagactttcaaggagttagaatatggacaaaatctcatctaaaattcatcagctaaaaatttccaaatctcatcatctaaatcttctaaattaggtatgagtaaggtttagatagggacttccccgggtggggaaatagtaaagaatctacctgttagtacaggaaacacaa

SEQ ID NO: 54366 - DNA, 1798 bp, Bovine  19866880549089
  misc_feature (1)..(1): n is a, c, g, or t
nctttctacttctttcctcactgtgtaatttgtgatgagattccagacactgtgcattctactttgttgggtgctggttagttttgtatttctatatgtgtttttaagctttgtactgggacacaggtaagttggttgcaaaaaaattaagccttttggatcttgctctcaaaacttattaggcaatatcaaagtgttgacaaatctagagttaattaccccttaatactgaggtaaatccctcaagtcctgaaaccagtgtctcataattcatgagatttttccaatctcactagcataaactggtattatcactgaatgtgtgtgagtaccaaacacacttccttctaattcttttagtgattctttaccagcctcaggtctcttccttacatgtatatactcatcagcactcggctgattacaagtggggaactctctgaagatctctagaattccctctctgtcctacactctcttctccagtattctgtcctgcacatgttaggtacctcagtttgcccattatcacatcttggtttcctcaactcagcaagtccaccagtgtatgatgacaatcatgtgtctccactgtgccccgaaaactctgccaatgtagaaatatgggcaatattatggctcatctcttttactgcccacctctcaaggatcactgtacattgatgtctaactgctattgtcttataaactgctgtcgcacataatttaacacaggagctaaatttggtctcccttactgcatcttaaacaggagtagtaatccccactgggtaagcctcttcttcctccaaatgagaacatggttagttttcactataaaaaatggtgttgcaatcaacatgcctatatggctcttgtctccagggtatataactaggaattgaattttagtatcacatgtactaaagatgtatacaggtacatctttactgaaaaattattctcaaactcagctgctccaatctgtattattaccaataacttatggtaattagagtttccacataatgttcattaacattccacctatagtaagttttattagtttatactaatctgtaatttgcattgcccagattatcagttagtttaatatatattggaatttgtttcttagattgcctgttcaaaagcttagcccattttttaattgaagtatagttaatttacttagtttcaggtgtacaacaaagtgattcagtttatattatatatataattatataaggagcctatatatatatatatatatatatatatatataggcgtttctggatgcctcagacagtatatacatataaataaatactcttttccagattatttttcattatcaccatacttgtgcacagtcactaagttatatctgtcagtatgtgaccctacagacagctgccctctaggctcctctgccctgagacttcccaagcaagaatactggagtgggttatcatttccttctctaagggatcttccagacccagggattaaacctgtctcttctgaattggcaggtatgttctttatcactgagccaccagggaagcccatttttcattacaggttgttacaaaatattgaatataattcactgtgctttataatatgttcttgttggttatctattttatatatagtagtgtgtatatgttaatcccaaactcctaacttgtctctccctcccccacccctgctattcatacatttattttctatgtctgagtctatttatgttttataaataagtctctggataattcttttagattctacata

SEQ ID NO: 54367 - DNA, 1372 bp, Bovine  19866880611340
  misc_feature (1)..(1): n is a, c, g, or t
nctgattatctaggggcctattgaagacgttccttaaggactaccaagtaatctttgttaaccaaatttaaatgctgccttccatacactggtattatggacctcacagcaggaagtatgactttacatcagctcatcaacactacagagagattacctgtaatcaataggtagacttttggtccaggttcccctctcttctctgaccaaaatacaggcatgcatgaatgctccctctaacaggtgaaaaaagggaaacaaatggcctcgaaaggcactgaatactgattatgtgtacaaatacagattatgtgtaaccaacatggaaaatactacatctcacagacaacttcctccagtaacctctcaaagcctgctgctctttctctcaaacacaatttcaattcattcaagtattatgtatctacagggcttgatctttctccagcccaaggaagaatcttagcttttacccatggcagttatgcagaattccacataattgaaattttttaccctcacccaaaataccaaccgtgatcttattaagaaacctaccactacaaatgtggtaagtttatcagcaccagtaaatagcaaattagaaatacagtatggaacacactattgatcctcattaggtttttgctgcttgattagaggaaatatatgtatagttattttaggagatatttataaaactaaagttttctgttttattttattttatttttttaaaaacctttgttttagaggctcatttagatgtaaacagaacatcccaagttctcttctaagatacaagttggctctccacagaaattttattgaagcatattttactttacattcatgaatttttaagtgctttctactttcagttttacagagtgattataatttctttggagttccttttatattaagcagtattttataaatagtgataattattttaattcctgctttaataaaaagaccttgaaatattttattggaagaaactaaattagcctcaggatagagatctgaatttgaaaaaaagcatatgcactttaaaccactgcaactgcttcacaatttagaaatatacaccattaactacatagtcagctgaacatgaaaattaaaagggtttacaaagctgtgaactgaattcatagaagcaattcaagggatataaaacaaatccatcttcagtggaatataccatagatcctaaaaatgttaactcacctacaattgctatttcaatcaagacactgaaaaactaaagattaggaaaatcaagcaaagggactgcttcagtgagactggaaggatagtttggacatttagaaaataaatggagagcacttcaacttttcagatg

SEQ ID NO: 54368 - DNA, 1112 bp, Bovine  19866880630356
  misc_feature (1)..(1): n is a, c, g, or t
ngtctctgggttttgagggccagtgggaggaaggagggtaagagatggcacaaccagctgggaggctcttctgtggccaaagctttaggatttcagcggtcatacagtctggtctcagggacctctgaactcggctggccatgagaagaggcagtgagaagtggccagatgagcagccaatgatgcgtggtctgcttctgaggctgcagtggtgttagatttggtctccctttatcctgatttctgatatttaagccagcagaattttccttctagttacattcttcttccttatactcactgatcaattattggcaccagtaactttttaaaaatgtagcttgctaaatgaaactgtaactcttatgagtttagtgttttgtgcgaaatatgctttcagtaaaagagggaaaagcagtatctcttgttaatagtgtgtgtcacgtctctagcaaaaagtagagatatttttctaatagtgtctatataacgagcagaaatagttttatcagtaaaaagggaacttctctatgtatctggcccctgccaaattgttttcacaccgttgttctgtgcacaggcagagcaatcacttgattttattgtaggaggcagggtggaggtgagccctccattagttggttttcctcaactttttccttggatgagaagagtttcccaagtgtgcagtgtttccagggatgaaaggcaatcaccaaatgctgtccagagatcaggcagggtcaagactaaacagaggccactgtatttgttcagtaagaagttgatctcatgttgatctttgccagaatagcttcaggaaaatggtcagctcagaaatctgaagtagtattgaattgagaagtgaataaaaagaaaatgaaagaacgctagaatacccgaagtgggtagcctttacctttctccaggggatcttcccaacgcaggtatcaaacccagctctcctgtattgcaggccagttctttactaatagagctatcaggaaagctgggaatgcaagggaaggggggaagcagaaaggggaaaggttagtttgcttcattttcagagaagcagctcaagcatgagaaaccatcacaagtagggagtt

SEQ ID NO: 54369 - DNA, 1082 bp, Bovine  19866880697938
  misc_feature (1)..(1): n is a, c, g, or t
nagaaataaatattgtaatgcatattgcaaaaaaataagatgtggtatgtaatgtgtattgaaaaaaaagatgtggtgtgtatacatgcacaatgaaatattactcagccataaaaagaatgaaatagtgctatttgcagtactatgtaaagtaagccagacagagaaagataaatatcatatgatagtgcttacttacatgtgggatctaaaacttgatacaaatgaacttatttataaaacagaaatagacttgcagatatagaaaacaaacttatggtttccaaaggagatagatgaggtggaagaaataaattcagagtttgaataactctactcatatacacactattatatatcaaataagtaaacaacagggacccgtgaatagcacagggaactgtactcagtaacttgtaataacatataccgaaaagaatctgaagaagattttatatatatatatgtgtatgtatatgtataagtgaattactttgctgtatgcttgaaaccagcacattatatattaacttcaatttaataaagataaataattttcaaagtgtaatttaaagattaatgagcctatgagaatatcatttctaccgtcagtcttcttattggtgattttgtgctttattatcctaagagtataggtaatttttgccatattattttcttggctttgaaaaataaagggaaagtaaaaagtatgcttgatttttttaagatctcctgcagcgtggtagttaacttttaaaaatgaaaaaaaatgtataaatgacttgaatatgatgttattataaaacatagccattgtaaatgtactatgggaaccctgtggtaatagctaagatggtaatttcattctaaactgcagttttcaatggctaatttaacacaaactctcaatttacactgttgactgaaactttccaagcttgtttgcatccccaaggggaatttcatgaagagatgagacaaaattcctttaagctgagttattcaagcatggtaaaaatgattttcaccagtattaaaatttttagaatatttttgtgactcatgtgggcttcctggaa

SEQ ID NO: 54370 - DNA, 1528 bp, Bovine  19866880740747
  misc_feature (1)..(1): n is a, c, g, or t
ntggatgaaactgagagcaagggtgattggcctaggccaggggtgatgagatgctgctcagttcattcttgagacctcatgcccctccctggggtctagtatcagctgtgatttctgaatctagttgagaacagcaagtctgggattttgatttgagggagcaaataggtctcagggtggctggacacagcctaggggaataggatatatccagaatcaggggaaaagttgcagtgcttcccctccaccactaaatattctgtccagatgccagtgtgggtctctgccccaagaacagatacagcatgcagttcaaaagaggatttagctataaatatgagcatataatcaagacttagcagatgtttgaggaaaagctacactataaaatacaaataaatagcaattataagctataaaacagaaaactcaaagccactatatggtggaaaggattcattctgagatgcaaggaattctgaaaagccttataaatacatcagctacctagactcactgattcttaaggattttttttgtccctatggctttgctgaaaaaagagcacaggttctttctgccttttgtgggacgttctattaccttctcatcctcagaggtagggtaatcctctgtggggttttcccagtatagtctgagtttacacctgtttttaggtaattatctatagtgtcgctttggtaataaagtatatgattatttattcaaggattatctgaggcatggggtcgaggtccagcgtctctttcctcaggggcctatgattgcctaaatatcttctacttccttttcagacagtccaccttcttccagattgtagaatcctgtgtaggggatggttaaacttgtaatgggcttccctggtatctcagtcagtaaagaatctgccttaggataggtaacctagttcttcttcaggtaatctgccaaatctgctatctgtttgctgagtgagtcctctcctggggctctttccccccgcctttttttttccactaaagcttccctaatcttaagcaataagtccaaatggcttaggtgttccaaatggggaagaggaaataggtaaaataaagagtggtaataatgcacacacacatatacatgttaatattctaaatactgtcctacaacatcactaagtgccctgtggtctttgggaacattatttaaatactctcagcctttttgtcctaatgtgtaagctctctgaactttgagattcctcctgaaagctcatgataaaatcatccagcttagggtttgtaggaactttgtgcatcactcagccaaacccttcaccctatatagatcttctttccaaatatttgtgccatgtgattatctaaccaccgtaataatactttaaagaatggactagaggagataagaataacattaatttctaaaaattaaatataaagagtgtggtttgtgccagtatcatactgtcttgatgactgtagctttgtagtacagtctgaagtcaggaacattgattactcca

SEQ ID NO: 54371 - DNA, 1315 bp, Bovine  19866880746244
  misc_feature (1)..(1): n is a, c, g, or t
naactgactagacattgattgtgacttgccaaatcactttgcttgctctgtaatttggagtaaagagcagagactaaagcatttaaaacttttctatagactagctttcttgataacttccaataaaagctttagtttgctaagcaggatagacacctcagtgcaaataaactacaacacccacattcctatgaatctgataaaaataatgcagaggtgtagatgactagctaaagagaatatgaaacagttgcattcatttccctcccagacttctcactgacagaaaatattcagaagtcgataggagataaggtttaaaagatattaaaagctttgttagcagattaaattgctctagatgtagcactaaaagaagtttggcaattgaaatatgtatccaaattatgatacctagaaaaggagtgataatgcaaatctagtttctattctggaaattttcgcaggttaaccaaatgttgagactgagtcattcaggctcctcggatcaaatttaccacattgtttttataagatgaaatcggaaatagcaataatcttcatttaaagcctttggaaagtgacatgtaaatcatgcattttgatggtccaccatttattaactactatttcatctctgtcctcatttctgagctcacttgggtactggttttcctgactgaaagctcaaaggcatttccaccgtttattctattttctttcctccctgaagctaggtactctaaccagcactgtatttgtcaatctgtgaaagcagaacctccagtggattgaaaaatttgagctacttacaagtctgcccttcctcctttattcacatcctttttttttttcccctgcaggagataaatagctattaatttatatgctaatccatataattccacattttccttaagatgaggctatgtgatatgtattcatgatttaatatacaaaggatattttaaaattatgagataataatacactatttctggacagttatgcagaggaattttacaatttttttttttgtactcaaggtgacaacacttgtcaacacaagcaacaaaggcccatccggtaaaaagaaaggaaggtcaaagaaagcccatgtactggctgcatctgtagaacaagccactcagaactttctggaaaaaggtgaacagattgctaaggagagtcaagatctcaaagaagaactggttgctgctgttgaggatgtacgcaaacaaggtaggaagaataatattattttagagggatgtatatgatgtttaaacagtggatttttctaggaaaataagac

SEQ ID NO: 54372 - DNA, 1114 bp, Bovine  19866880837170
  misc_feature (1)..(1): n is a, c, g, or t
ntgagaaatttataaaatgaaaagtcagtatagcctgggtccaaaagagaccttgaagaagaataaagaaagaagaagagagtctgggggcaactgtactgtgatgaataagactttgagaaaagtatttttagaaagattggctgaataagggtgtcttttcctgaataactggaaaatattaattgttcatcatttccttctggttcttacacttgtgtatttctttagagtggccatctgtgctaagaccaggccacaaggtagctcacctggaggtaactcacatctcagtttagatatactcaactttcatacacgtgcaatttggggattatacttggatattggattaactgaaaaagcactgcagtcaggggctctagttatcaactacttatgtctgcatattgttgttgtttagtcactaaattgtgtccaactcttttgtgcccccatggactgtagcccaccaggcttctctgtccttgggatttcccaggtaagaatactggagtgggttgccatttccttctccacttatttatgacttactccaggtacttaatgtggctgtaaaatgaagagattagtttaaattatttctaaggacttggagctgaaattttgtaatcattcctcactagtcttcagaaagtaaaacagtgatccaagatgcagactcactgtattccaacgatatggccttattaaaaagtcagcaaccttcctccaagttcttaatctccaattcagagtcagtcactttatcttcaggattttgttgccctgcagctgctacaagccccgcctcagttctcaccgcataagtctgctcacctagacttccactgtgggcattgtaccatccctccaccagcaaacctggtatattagccacctcatttacagaagtagtcctgagctccttggcatgtagaataaatcttcaatctttttcccatagaagtatttacacctgaactatattcatatattgtttcccaagggcagtatattttaaccacaccaaaggtttttgccaaattttaaaacttcagtcaatgggaagaagtattagtagaaataaatacttgagcaaccattttttcta

SEQ ID NO: 54373 - DNA, 1299 bp, Bovine  19866880894751
  misc_feature (1)..(1): n is a, c, g, or t
ngatactagtactcttgtaaagtcccacccttatgagttattaaccgtaactgccttgtaggtccttgctctgaatgcaattaaggcttcaacatacaaatttagggaagacacaattcaatctatagcaagtacttagcacagctctgaaaagagaacaaatactcaaagctagttctctgctctttagggtatcaactccctatgctggcctttctttccatagtactaaactaggaacaggataccaaatagagacttctaattagacagataagtgataagacttattaaatagactactggaaggattaaacttggtaatgcatttcaaatttggataaaatttcacttaatattcacacatttttttacaacctggaatttttttcaacaacatattatgaataattttctatttcactaaatgtaagacagcaactttagttggtgaatatcattttaatccaaattcaggattattctatatttattctcctcttcaatggcatgtgacttatctatttgtttttatatatgatgccatgatgaacatcctcatatctttgcacttggatagctagctttctcacattcatcttcaagtttaaagcaaaattctaaacagccattcattgtactcaatattttgaccattcttgacttattttgtttcatattctttgctgtccaattattcaactatgagggccattgcttccttcttgaggcagagtccacatttgttctgctatttgttattttagtcactcagccgtgcctgactctttgtgaccccatagaatgtcacccaccagcgtcctctatccatgggatttttcaggcaagaatactggagtgggttgccatttcctcctccagaggaactttccaatccagggatcaaacctatgtctcctgtgtctcctgcattacaggcagattcttttctgctgaaccaccagggaaaccctacatttattctatcccccaggatttacttctgcagataaccttggcacttactttgctgaaaagaaatactgttgtattctgaaagccacttattcagcttgtaagctttcctcttttttaaaattaagcaccctgaattgggagaatctggttgctgcattagatttcctgtgctaataaaattcaaattaaatgccagctctaggccagaagtaaaaggcaatggacatgagaaatgatgccaattctttctcccaatcagtggaaaatgtgcttttctccacttggcggctttcttgtgtttggttctagcctaccccaaca

SEQ ID NO: 54374 - DNA, 1427 bp, Bovine  19866880901427
  misc_feature (1)..(1): n is a, c, g, or t
nagatttagggattatttgttacctcagcatcacctagtctagatgagtcatatagcaactgacctagttccatgatggtgggagaaaacacatgagtctcagtttctccatctgcagaataaggaagccacagatgaaaggttatcactaaagtctctttgagttctataataataatagtaataataatagcaatgaggatcagacattttataaatcaaggaagaatgaaaataatctcattgataagctctgagaatcaaagaatagcagagggaggcaaaatctaaggtcagctcttcccaaagctggttttttagaactctagtcacaagagatggtttgtatcagacagttccctgaccaagtaagtatgggaaatactgcatatgacagctatctgttaagtaattttcatgcatattatcatagtctaaggactcatgaaggaaacctttttaaaaaaaattattgattgacttggctgcatcaggtctttgctgcagtacgccagatgtttccttgtggtgtgtgggcttgtctctagctgtggcacatgggcttagtagttgtggcacacatgagcttagccccagggcatgcgggatcttagttccctgacgagggatcaaacccatgtcctctgcattgaaaggtgggttcttaacactggactaccagggtagttccaaggaaatctttaaaatgcatttcacctagaatttaccaataaaaaatcatggtggcaatcactttcacaatgaactgggttgctgtacttttcatttgtacagtaggctttctcatgcggtacttcaaagtcttttagattccttctgcatgtagtcacaagagtgggcatatggacaagagcatctcatttctctgatcatagtaatgggtttgtatatgaacacaaggcctctgcgtagccaatcagagccttcaccatgattaatagttttgatgacatcttggatttagctgaacctcactgagatacactttagacttctcaggtatttgagccaaaatgttccttttactcaaactaatttaaattggattgcagtcatttgctattgaaagaattcaggttggaactcttcctccttagaacagagtttagaagaatgctcttccaggataacagagtaaaatgatacaattttgaaacttattaagcaattgccccatcttcctctaagggaacttgggtctactggggagcatgaagatgggagtgacatatttagcttgagaagacatattacagctgttttttcttttttttaaaaaaatttagaaataaaaaatgatggaaacagacacaaagtagtcaaaatatattgatagcaagtaacaatcttaatgtctcattcatttcctcattcatagaaaaatattagttaaagagcacatctat

SEQ ID NO: 54375 - DNA, 701 bp, Bovine  19866880940929
  misc_feature (1)..(1): n is a, c, g, or t
ngcttggtttgcactctgcctgctttggctgcctctcaccccacccatcctctgttttgtaggggcaacaggtccagacttgcctctggagtcagtcctcattctaccctcctctcagcctatgttctggttttcttcccctcaaagagactcagaaaatacattatataaatgcacttgtgactaaaactctttgaaaaacaaacccctggtttttggaggaatacaaatccttggagggagatggaactcctgaagtggtcgctggcccattgggcatccggtgcccccactttctcgcttgctgttggtgtgggtgctgagggcattgtcggtctctgcacacccctgcctgtcctcttctctgctgtgtagtaaatcttcagatattaccaaactgtcaagagtgtagcattcttttgatcattttctgtcaagagtgtcatctcctaaaaccaaggcctcccttcttatttattattgtcagtgctgtcagccttgtggtcagatgtgttctattttggagtctgaccccctgcttcttcagcctttggcgggtccctatttttttttaacgcgtgacacagaagtgttttatcccttgttttcaatgtttatagtttttattttccataaagcctttctctttttagtttagggttttttgttttcctcccagtgcttttattttttgttgttat

SEQ ID NO: 54376 - DNA, 1360 bp, Bovine  19866881238607
  misc_feature (1)..(1): n is a, c, g, or t
nggctgaatgggaactatggctgcagttgcctagcatcaggagagagcactgaaccacatactgctcacctgagaaaagatcaaatttcaaaatttgaagtacagtttctactgaatgtatgtcacttttacaccattatgataagttgaaccatcataagtcaaggactatctgtaatattcaaacgaatacaacactttgacttccaacatagttgttagaaatgtcaatgctctgtttggagaaagcttcttgaaggaagtaaatattaagcaggtttggagaatttagtttgttggagatgcaacagttaattttaaggagaaacacagactgtactccagagccctctcatcctctgtcttcactgcttggtgccatctctgcaactttaatttatgtgcatcatgttatctgccttgtctgctgttgtctagtccaagaatgtgccattcttcaaatatatactcacaggatagaaaagaatggataataaattgctaagtgtcatgatgaccccatgtaaatcatcataacagtgaaaacagcatactagataaacagagaacttgtttatctagaaatgttctctggattctccagcttctgattttctgcatttctgacttaatcatgatctcatggtctcctatttacttttaataggacatatgaaatatatatttgaaatatacataatatgtatcaaacatataaatatatataacagatgactatttaaaattatatatatataggaaatagtgagagaagacttgaagttggttaatgccaacaaaatacttgttaagtacactaaactgtttttactttactttttattattggcaacctcaactgatgttcaagaaaaaaactttagtctctaaaagtgcttggttttgagatttgttttctaaagtttctatatgttattttcagttggatttaagttccatctagaattaccacaggaaagatttattagataatttttttactaatgctatattggataattctacttgttaacagaatatattgacattagctttcttaattttaattatcttggtagcatctatagttgtatatttaaacaataacaagctgagatagaatattattagtgaattgtttctagttgtatatcttttggtttagccgcaataatgagcacatattctgtgatgtaaaatgtgggaatacaataaatatcatgaatataagtatccaaaatggaattgatttcttcacaatttacttttagctgaagaaaatgggagaaatagttatctagtacttgaatagaagccactatactagagaagagaccagacccgcaggtgtataattggt

SEQ ID NO: 54377 - DNA, 978 bp, Bovine  19866881279128
  misc_feature (1)..(1): n is a, c, g, or t
ncagatgctaaccctcacctgttccctctgcccttttgagagactgaagggaaggctgccatcacagcttcttctcccctctgaatgcatacacacttccttgactgcctcagatccctggctcccaatgccacagtgaatggaccagggttcagccaaacccaggtcatgctcagggctggtcagcttttctgtgccctgctttcaccactcagagaagcttccttccactctgccgagccacactcccactgagggcctgggctggagaggaagggttggaacgggcttcagatgatgctgccgagaggcctgtggagggttgaagtggtggttctggaatgaaagatgtgatgaaaggagcatttctctcagcagccatacatcatggaacttctccaggcagaaaaaagtgagaaacagatggcaatgaacaggcaaatgcaccacagggacaaagctggagtgggagggtgtgaggaggcagcagcccatcggcagcagcagaaagaggggaaaagcccaccctgtggtactaacataaggcaagtcagagttggagacaggagacaggaccatgtgaccagagactagtgctcacgacacttggagccaaggatagggccagctgtttcccaggcagataggagaactcttcctcagaggtcccattgaagactcatttctgcacctgggaaaataagctgctctaaaacaattagggcagtagatttcaaccacactgcataataatcacatgataccaggatcttccctcagagattaccatactgtactttgcttagtcaatcagtcattgtctgactctttgtgacaccacagactgttccttgccaggcttcctctgtccacagggattctccaggcaagaatccttggagtgggttgccatgcccttctccaggggatcttcccaacccagggatcgaacccagatctcccacattgcaagcagat

SEQ ID NO: 54378 - DNA, 1152 bp, Bovine  19866881735397
  misc_feature (1)..(1): n is a, c, g, or t
ngaaggtgtgctgcctaacagcagaattctgggcatgttagagctgctatgtagcagttggtagtgtgaatgggaaatgtgtaaagtttttttggtttttggaggacaggcaacatatccttgccaaatattgttgttgtgaaggaacccaagtctaaattggtctatatggttggattgctatgcttagtttatttaaaacatggcatttggagagaggtaaaataccagcatactgcatcttcgccttttttttttttttcttgaagcaaatttgttaggtctgtttgcaaaaggactagctgtagcagggcagtaaagagacatgtgcctcttgcgatagaccttttttgtagtgttaattctaatagaaataatcatctacattgatcaataagagtggaatggagcggggacattgattcaaaagagaacagctgtgaacagtttgatttatgatgatattaaagcaaatgattcagattcaccttgcacagtctaaggttgcttgtccagtggttagttgtcaaaatatattcatcagagaacagtcaacttctcagtgagaagcacacccctaacagaatgtctgatttactcttttgaggctgggatgatatcgtgtgctcgatatgtgcaaggttgctacgtgcacacccgtggttcttaggtagaaagggattgttgtagaatgaaataaataaccttatcagacactcattttatgggataagaatgtaaatgcagtgagtaatcagagcgtatgtaaatagcagcaagctaattttcagaatcattgcgactcattttgtaatatctctcctatttaagagaataaaactcagcttttccaggaagcataatatcctcagtggtcagttatggtgtgacaaaaacaaagaagccttttgttaggacctggggtctttcatctgattgtcatgatgagtttattgtacttctttaaagtctttgctgatctcctttggtgactgactttgatgtcctttcttcagttcttctgtggctttctctgtattccttgatcacagcacaggccacattgaggcataactatggccaacctctgctatttgaaaccacaggtactggagggcagtgaccaaggctttcccagcaaatgtgtgtgtg

SEQ ID NO: 54379 - DNA, 626 bp, Bovine  19866882155101
  misc_feature (1)..(1): n is a, c, g, or t
ntttatttcctgatttctgggggaggatagacagttttaaacagaaacaaggaagagattaggaattccgctggatatgaaaaatctatattcattaagtagagctatgcaaacagctgtaaatttggataataggcaagggaagatatctgaatttcattagtcttttttcctttacagttagcagatatctcaccttctaaaattactttgattgtggttcaccacaataagcatgtaattagaattgaaggatgtttaccaggtgaggaaatttgatgaaatggagccaggagaagggattggaaaatgtgcaaagaataactcaagaaacacactgcaattgggaagttattttagcaaaggtactgtgggcaaggatttcaatcaagtagaggatgctgggttaaaactagtatgtagaaactaagtcacgcaggatgtttttggtgttgagcattaattaagtcaatattcactgatagcctattatgctttgatttctatatcatatcctgggagaatcattggtgagaacagtttctgtaatcaaagagtatgtattctagttatggtgagaagtttgcattactgtggagtgttactgtgtggtgtgtgcatatgga

SEQ ID NO: 54380 - DNA, 5746 bp, Bovine  19866880485390
  misc_feature (1)..(1): n is a, c, g, or t
ngagcttctctgtgggctagcgacaggtggctgggcatctgggcgggcagggagctggggtgggggagctgggctcggctgtcccctgacacccccatccctccagattccggtattcagaggatgatgtggccacctatgtggtgcagctgctacaaggcctggattacctccatggccgccacgtgctgcacctggacatcaagccagacaacctgctgctggcccctgacaacgccctcaagatcgtggactttggcagtgcccagccctacaacccccaggctctgcggcccctgggtcaccgcacgggcacactggagttcatgggtgagggcaccatgctatctaaggggggaatggggtactcgcaaaggggcagcagccagggctcaccccacttcacccacacacgtggcatttattgagtgcttactgtatgtgagccgcgaattaagtcctttccgtggatttttttcaatttttcttcacagtagccctggagattggcataatattacctctattttacggatgaggaaacagaggtgcagggaggtgtttgttcagtatcagtgtacatggtagacccaggatgtgataaacacaggagaattgattattaatttatataaataagggaaactagctaccatttagctacctgctaaatactctgttcatcatctccattccctagaataactgtgcaagccacactttacagaggaggaaatggaaagccagatgggtttagtacagtgctcagggtcctgtcactacaaggggcaggctgggattagagccagcccagctgatttcagaggctcttaatctcggtgttggccatactcttcgtgaatgagcgcctacctttggagctgatctgagacagcttgtgatcatctgcttcttagctcctctgtagttctggggacccccacacatacacattcagtgcctgggatgattcctcaggtgccccaagtctcgcctgggggccatgcagcccaccagtatccggggcctgctgctctgcttgtacccattgtctggtgacctgggcaccgtcctgcttcccaagcccccagtggcgtactctgcctctctctggtcccttgccacctggaagctggctcaccatgggctcttgtctcctgtcagctcctgagatggtaaagggagaccccatcggctctgccacggacatctggggagcgggtgtgctcacttacatcatgtgagtgcccccaggccccaccctctgcctgcaccccacgtccccacccacacatgcatgtgcactagtcatgcacacatacacacatgcatgtacacacacaaatatccaggtatccttgtccccgagtgctgtgcccctagaaatccccacactactgtccccctggacctgtgagttgaccctcagtctgcatctcttaactgaactgtctcctctgcaggctcagtggacgctccccattctatgagccagacccccaggaaacagaggctcgcattgtggggggccgctttgatgccttccagctgtatcccaacacatcccagagtgccaccctcttcttgcgaaaggtcctctcagtacatccctggtgagtgggtctcacacctgccagcctcccagcatgaccttctcccagcctcacactgccctggcccagcccacacctaagccccccaactcctaccccacaccaataatacactgctgctgctattactacggttactacgcctacttctcctaagtggctgttctgccaccatttaaagcccgtaacagccctatgacacaggcagaatcattgtccccatttcagagactgggaaactgagtcccagagatgtccaggctcattccctagggatgaatccaggattgggagtcctgtctctgggagggtggagtctgtcctcctctgggagccatgcctccagcctcactgtccctggcttggcctggcaggagccggccctccgtgcaggactgcctggctcacccgtggctgcaggatgcctacctgatgaaactgcgccgccagacactcaccttcaccaccaaccggctcaaggagttcctgggcgagcagcggcgccgcagggccgaggccgccacccgccacaaggtgctgctccgctcttacccaggcagcccctagcgcctcggaccacagcccggccttgcgggcttcgacttggggttcccgctgacgccccgggacattccagggcccccgtggagccgggtgggcccaggggggcttcggacaccaccagcaccaacatccggccgggctattacctcatggacctgtggggacagagaccctgggcttcggccaatgccacccagctggagtcagagccggagacccatgggccaggctgggtggggtcaggatcaggtcaagagggacaaggagggaatgggcaagtgaggaaaagaagccgaggcatagggagggggagactctatggaggttccgggggagggagactgagcatctgggggagaacccaacccaagagggtgtgaatgaatggagaggaggaaatgggggaagcccggggtgtctacaggccaggggctgggagtgtcactgaagcaggaacaggacgtggagacagtgccagagagccagaggcagtatgtgagagagggcagcgaggtgggagagggagaggagagaggactcaggtgggggcgcgcggccagctgccagcctccccagaaggagaagcgtggagggctgaaggctggaggcggggtctcaagccagcagcgctttcctcctatcccggtgaacgcagtgctgggccctctgcgctggcccgaggatgtccccaccgcctctctgtggccttcaccctccttctcattcatatttatttatttattgacttttatgaagtctccctgccatccaatccctcttgcctatgttgtcctgaccatccccaccccacccccagccatccagctgtctgtgcagctgtctgtctatctgtcacaaggaaaataaaaacagcaagcagcaggacctatgtgtgtggtctatggggagggatgactggggggtacagcgcgtacacaatgccagggtactgggacggggcattccagccttttctggaccagtgagaaccgaggtataccacctagcaccttaggactttcctcccctgccctctgaccctcctggcccctcacctgtcccttatttcttgagaaaggaaagatgtgggtgtgtttctccctctaaagtttctgaaatcctggcaggaccactgaatccccacccccagcctctaactatatgggtggccccgacttcttctcacatgttccatcatcgcaatgggaggatgctgggctctggaagggaccagcccacacccccatcctggctcagccttcttcactctgttcaggggacagggcagctctgtcctgacccctggagcagagggggtttcatcatgatgattggtgagagcagatggtgaaagagctgtagaggaaagcagggcaggctcacgcgcccacgctctgtgtcagagcaccaatcagcacactcacaccaatcagctgtgagtgccgtcagtgcgcctgctgcgatggggccatagataaggattttcttggggcccagggacactaagtctggcccttcttattcccacggcaagccagggatccactgggtgctaaggtaccttgactctagctgccctcctgcagtgccacagaaggatcactgggtcctgtaactgggctgccctgccctgaggtggatggagggggagccagttcttgtgtccagagggactgtgccccactgtccctccccagactgaaaactctgttcttggccatgtaaaaggaataaagcctttcaccgtgagcacattgagctggtgctggtgtgttgctgatcaagtttgaggctcccttggctgtagtccaaaccaccttttgcccagcccagcctctctggcttctcaggacacaagggaagagccaaaccccatcatcataaaataacagaatattagggccagctggaaggggccagagagccacctttaccacctgccattttagcgatgaagatatacagtttgcctgtgagagtctctaatcccctacacactgcaagtgttttcatataaaaatgaggtgcctgaactcatatcttgataaatggtaaaattcttctcccgtcccccctctgatcttgagcttccctctcatctccattggaaatggcatgtgaactgcttgttccaaacctggaggagcaaaggtaatttatgtcaacagagccgtgtcaaaactgctctgatcaaaagctgacagcgctccacacctgggcaggcagttacagtgaagggaagcaaggcttatctagtgccctggcctgggtggactggactccaggcaaatcttagaggagttagccccctcacccccggtggtctgatgcccctatacaccagcttatgcccagggagggagcttgggcagacctagagggtcagagtcagtgccaatctccagggacagtgtagcgcagccagaccctacgatgtcccatggaggggagtgtgggaatggggcagcaggaggggtggctgttctcaaaaatccttaaggtcccttctaggtttatctgtttaccaccaggaggcacagcgtggaaatgacaaccctagactcctggggttggggggagtaaggtgtttccagattggtcctgactgccacgtgggcctctcataattggctagctggacagtgaagcccatcaccactctggctttattcaagggcacctccaacaaacactcacaccccttaactgactgtgtccaggacccacatgttgtctctctctccagggactgacctgagtgtaaacttccccagcagggagctgagtctcctgtcgacctgaagctgtgcctagttctcctggaagtgagatggatagcccctgctctgggaaggggatggggccatgcccagctgcccagctctctgggtgctgacgtgtggtgcaccccagagccgcccaggtttcccctgagggctgccccagtggctgagctagcatcccaggcatcctcaggctaaataaggagactgtgtgggtcagggaatggaggctgggtccccgggggcttggggcagcctcgccaaagaaggcaaggaggggagccatgtataaaacctgggcctggggctgagcaactacccgtgccctggccctgccgtttggaaggccatgccgcctgccacccagcagggtgaagctgagccctcacagcgagtctagatcttcaggtcagcctagacactctcacatagggggatgttctgaacctacagggaaaaggctgaaattcggaatctctgtgtcaacctagacctctttgtttcctgctccccagctcctgccagaaaaccagctgctgtgttctgctccgctgcggcccctccccctggatgtatgctggatatcaatgacccccaggttcagaaagcagccattcgcatccaggcctcttaccaggaccacaggtaagggggagctctggagaattgctggaggaagggagctggagctgcagaacgctcacgactgcatttgggggatgggggtagactgtatttggggggttggggagactgatgctgcagctgaaaccccaatactttggt

SEQ ID NO: 54381 - DNA, 1199 bp, Bovine  19866880529619
  misc_feature (1)..(1): n is a, c, g, or t
ngaagaagaaacattcctgaccataggaagtgaccccccccccaataaaacaagagatgttatttgcacaacagaagcttcttgtctctaaatgagctctggataacaaattttcagcattagatgagcacacaatactttctcattttaagctttaaaaattggtcctgcttggggttaaagaaaaaaatcaaatgaaaatacagaattttatcaaagtttatggtgtgtaacacagacactgtgctagtctttgcacaaaagaggaaggagacactgatttcaggaagcacacaggacttcccggagggtccaatggttaagaatccgagctgccactgcagggggcacaggttcgatccgtagtcggggagctatggtcccgctatgcggccaaaaagactagttgtgtctaggtggaaaagcctccagttgtcctgagcagtccataagtcctagacacagatggctagggttcttggggacagctgagtgagcttcctgactggcctgggaggccgggaggatttggagaggccctgccgcgctcaggcctgcgcgcccaccctcgcaggtgaacctggtgtcggagcacatctggtgcgaggacttcctggtgcggagcttctacctgaagaacgtgcagacccaggagacgcgcacgctcacgcagttccacttcctcagctggccggcagagggcaccccggcctccacccggcccctcctggacttccgcaggtgagccggcatccctgggaagtggggcagcccgaggaaggctcccagaagcccgggagagagcagcctaggagcaagggggcccgggagccgggctctggcgcctccccgcagcctatcagctcctcctggggccccaggtcaggagaggcaggccctctcgcccgacctggagcctcagcttctggtctgctggtgtccccttctagacacccccaaaccaggactgactctgacctcctggcgtccccttctgaacaccaccccccaaaccaggactgacgctctgtctcgctgtgcccatccgtccattgctgtggtccagctcctgactgctcgctctctctgctggctggctgcctcttccctctctcttgccctctttttctatctcccactctttctccataaccttcttctccctccgccccgctataccctgaaaggctcatcttgtt

SEQ ID NO: 54382 - DNA, 1654 bp, Bovine  19866880981518
  misc_feature (1)..(1): n is a, c, g, or t
nccctgcactgggccccacttaatttgtttctgagctgccgtgtccagagttaaacttgggccttagctgcagggcttcgtctcaggtgccatttgatgactcatttggcttaggtttctattggtttgggttctctttttcacttttaaatgattatctagtccccagtgtagttttttaacactaaattatttcctattccttttgggaagtgagaaagctatctctccattaacataagttaaaacaagacaaaaatctaaggattatcaagagctgaatagcttggtgttactcttaactgcaattgcccggaaaatcccacggacagaggagccctggcgggctacagtccacagggccacaaagagttggatgcccctaaacgcacacacacacacacacacacacacacacacacacacacacacacacatgcagttaggttccaagaagggagtgacccaggtgggcagagggtgtctggaagttcctggggggcagggggcagtggtgggattgcgagtcaaggtgaaaagcaagccctgtaacccaggggtacccatgcccagtgagacatatctggggagcggacgaatgatgttggggtgggaggcctgcttggctttgcagccccatgctcgcagggcccggggactgagttctcacccttctgacaggctgagaaaccgtcagcctgtgcgcccagaccagcggcgctttgctgaggaggcagaggatgggctctgccggcttcggatcctggctgccgagcggggcgacgctggcttctacacctgcaaggcggttaacgagtatggcgctcgacagtgtgaggcgcgcctggaggtcagaggtgagtacctcacactctctacaaacccctcaccctggccctagcctcatccctgcccggttgccaattttcacacaagcttagttaatggctttccacaactgaaagggccttcgaggtccccaggttcagctgctcatgctgtagtgagtaaactgagacccagagaggggaggcaatttgccctaggtcacacagcaaattattgagcgctcagcttactacacagtactgctttccctaccctccatcacgcctgctccggtgccagctcgagagaccctgcttcctgtcgccggcggtcctcatctcacactcttctaagccttggtcaccttgccaggccccttcctcacacccactccctgctcctctcttgcttcttccacccatcccattgctgtgtggacgataccgtggttgggggtggcagtgggggagtgtttgatagtcggacccgtccggaggggcccttggagtgacttgggcatggagcgttgcagggacccgggggtcgccagggtgagcagagctgggaagacacggagaggactgggcccccggagttggggcgtaaggacaggtggcctctaggcctcaggacagcaggcggccccttggggctgatgcttttcctccccagggcaggccctctgcctcaccttctactccccaccttccctgtgggcagttcagggccaggaacccctctccccagctccacactcagccaccaccccctcctcctggcagaggccagctctgaggagccccccagctccctattggagcatgga

SEQ ID NO: 54383 - DNA, 1605 bp, Bovine  19866880988626
  misc_feature (1)..(1): n is a, c, g, or t
nacggcctaaaactctgagaaatgaagtgacttgtccagttacgcagctgccatatggccaggcaagaactggaaccccagtccaggtgtggttgctacacgctggcagtgggctccccaacaggaatgacagtgaacactgacaccgtgtcaaacacctgctttgtgccaggtgtgactgccggtgctgccttgaaggaggcaggtgtactgcactctctcaccccactgctcttctccccagagatggaggcccgttttctggtcgtcttattcagcaccagcaccatcggggctcctacacttccactcccctccctccagctcttgggagccggcagcagccctagggcccaagtgggcagttacctttggccgtgctgagcttgcaggtgtagacgccgctgtcgtcctcatgcacagaggtgagcagcagcttgcatttgcggccatcgaaatgcatcttgcatttgagtagtgcaggctgcagcaggcggcctcggcacagccagtctacctccacgtcggtgggacccgccaccaggcactcaaacagcgccatctccccggcccccacgtccacgtcctgcagaggggccagcacggccagggaccggctttcagggtgtgctgggtgggggaagcagccacagggggcacacacggagcagagaaacacgtgccgagggagacacacacgcacacacacagagagacagacagacagacacagagagagagatgcattttgttcctttggagacagggaaagcccgcccgcccagcaggccaagatagcaaggggctcccaggcctggcttccgcatggccatcccacctgggccagagagggggaactcgggggaagcgggagggaatcaagggcatgaaaaccgagagggccacatggggacagagacggcggcggaaaaagaagacacagcacaccagctgggtacaaactggactttatttgaactaagaaacaggtatttctgaatatgtccacacccactacagcaggcccctactcctgcgccaagcctggctaactctcatcctcaaatagagcatccctggccctgatagtgaacaagggagccccgaagggccctaagcctgccgcccacggccaggcttcagccaggcctcctcatcagcacagggccaagggcctctggcttttggtctcttgtgaaatagaaaggattgtgccatttgaaacccatttctggaatggtcagtgccccctgagccccttgcccacagccccctgcccctctggttccctctatcctacggacgccaggccatgtcctctccccctttgcctgaccccacgccagctggagggcatccttccctgactgtcacagacacacagtacagacaaacagaaagacagacagggcctatagcagaggcagcacatgcactcgctgggtgctccccttcggggagagactggggggtggtcttgatacccctcacagccgccctcccctcctggcacccagtccgtgggggagctcccagcctgcccgaccatgtgtccgcttggggagagggggtccataaaggctcatgggctgtcccaggacgctg

SEQ ID NO: 54384 - DNA, 1325 bp, Bovine  19866881082570
  misc_feature (1)..(1): n is a, c, g, or t
ntgccctggacttgccttttccttccctgcctttctttgccaggccccagccagagcctggagttgctatggcaacttccgaggaacccatttccttagtgatgtctgtggtacacaggctggcctggagcttgaaactgccagcaagagatctcctctgctgtccccaatttctctccctgcctcacccagttcccagaggccgttcctcagggactctgctgtccctcccccagagtagactctgcctccctgcaggtggctggttgaggtttttctccctagggcactctagattgcatgccccccccccccaccccataccctgttggaggtgaggtttgctgtgtaggtggctgacccaggtagcctgacactaaggcgctggagaatttatgcttatggccaataccatactttttttttttttcaataccatactatttctcccgtctctgtgcccccagaattccagacatattggagggaataagggcttagaaaccagactactgggctttcaatctagcaccaactatttcctagctatgttaccttggtaaggcacctcacctctctaaacctcactttcttcatctgtaaatggagataataacagtccttgtcgcaaaggattgttgtgaggattaaatgactcaatgcattttaagcattcagtacatgcttgacacacaataagtactcaatgagccatttcataagtttttattaagctctctctaatgtgttaggtaggatgctaatatctccaattccttttctcgctaatctctatgtttggtgtgcccccaagagtccagatgggggaaactgaggcccagctcttgggcatcaaagttctggaggtgagaggggcagtctggggctgcccagctcctttcttcctcctcttctcccacacccactgttcaggcccacacagtagttattttggagctgagttattcctgagcatacccctttggggagcttctgtgtttctcagggggtggtttccaaggactcaaggtaactttcccaggggcaggacaaagtcagaggccttgtaccgggggcagattaatcaaaggcacgggaacctgggtaccctcgtctcccactccagggacctcagctgtcacctgctgtcagcactggtgggggcacaggtctgaggagctgttaggcaatcccagggatgagggtattgctcctggaaggcgtgtgcctgttcttcctggggcacagtgaaggggtatgccctgctgaggaagggcagggctgtgggggccagctgggggcaggaatgagtgggaggctgaatt

SEQ ID NO: 54385 - DNA, 1773 bp, Bovine  19866881219128
  misc_feature (1)..(1): n is a, c, g, or t
ncctgtgatagagagctttggagttggcagtcttggctatgaatcttggcctctacctgctgtcctaaagcaagaactcaagccagactggacctccaggaatcaatttcctgtcggtccaaacaggataaaatattagtaatggctggcacttacttcacactcactgtgtgctaggctgagtgctaagtgctttacagtccatttctcattcagtcttccccaaaccctatgctattataatcattttacagatgaggaaactgaggctcagaggggtgaagcaactcacccaagagtggtagatccaatctgaacccaggcagtggcccaggagctgctccccaaattcctccctttgtcccatacccctgcaaagtcgaatggaacttgggccattggctggctgtctggacaggtgtgagaagagttctgtctggggctataaaaacactgaaggttcaagaatgggtatcttctgggacttctctggtggtccagtggttaaggctctgcatttccactcaagaggctcaggtttgatgcctgggcggggaactaatcctgcgtgcctcgtgcagtgcacccctcccccaattaattagttaattttttttaatggccattttctggaacccaagactcactttcattgtgtatttggaaaatctgaagaataagcatctgaccccagcagtgaaaacagctcaggatgctgtaatgggctgtggtctggagtggcagagaagaccgtggggtctgagtggaccccaagctgactgtgactcagctggctggaggaagaggaggatgatcctataaggctatagatagcaactgtgcatagtggccccgtgaggtcattgccagcctgctcaggctctgtttaaagcactccacagcctcagagggatgtaggaaacctggaaagcgcccaggacggcagggatatgaccaaactggaggggttgaaaccaaaaacagcctatgaagaaagataaaaggaatggggataaatcaggcagaagagaggggtgagtgatggcactaagaatggcaggagaatcctggggaagaagggaagctctatttctctatctgggttaaggtctaagaaagaaggaacttacatttcagcagacaggttagagttaggccctgagtgactctctagagtgtgagtccataggtaggcagagaaacccatgaaatctcctttcacagaggttggagcagggctgggtgccaccctacaccaagctcagctgctcccaactcaccctgacaccttcccaccccagttctcacacccctgcccctccttcaccctgataaaccctggtctgatcaaggacagttttctcttattctccttgggtttcagctgaggggacggtgcatatttgtgttggaaagagagggctcccctgcctcttcaggaaatggctcaggactgaggggacttggagaattcaggggtatccccccagatggctgggaactgtggggaggtggctggatgtggtgggggcagcagtgtaccaggacagctgagacgccaggaacccatgaggaggtgggggctgtgtctgttctgtggggcaggaacaggtgctcacacagtgaggacggagccaacagagacaggggaggcaggaggaacctgcggggagggagaatgtgtctctacggaggaggctgagtccatttctgctggcaggtgtagctgcctctcatcaacacacggtggggttgggtgtttctaggtacgcg

SEQ ID NO: 54386 - DNA, 1079 bp, Bovine  19866881342899
  misc_feature (1)..(1): n is a, c, g, or t
ntaaaacttgcaagtgcttgaagactggggtggtaaatcctgggaggggccagagctgccccactcccacttggctctgaccatctgagggcaaaaaagtggtgtgagaaaggatcttgactagaagccttccaaattccagttgaaataaagcagattccttccactatctcccctgggttcaatggtccctgtccccctcacctgaccccctcctcccttcaggtcttcctttttattcttccctccccccatcaccaccttccctgtttgttaacccctgccacctcattcacttttggtagcaacttccagataagagccaagcttacaggcaaagagcagcccatggagggtgaggtaagcagatactcaaaaagccacacacataaatggataatcaggtgaacaggttgggcatggaaagtaggggaattgcatttagggaaggctttaaagcctggaggggattgaaggggactggagtgtggctcagtggtaaagaatcattccatccttgggtcaggaagaccccttggaggaggaaatggcaacccactcctgtattcttgcctgcataattccatggacagaggagcctggtgggctataatccatggggtcgcaaagagctggacacaactgagtatgtgagtacgcatgagcacacacgcatgacaattggagaggagtcctgaaatctttagaggaagaaagtattggtatgcataggttttgagtgtctggagccttgtcctgaaggctaaaatttgccactgggcatatggaaaggctagggggatggagataatccctaatgctatacacttttctcattccaagtagatggggtagggttggagtctggttttttttttgtttgcttatttcttttttcttttttttttttttgagggggtggtggtgtttgtttccgacggtggaattaccatgagtcattatggaaaggaaattctcctcccgatttaaatggattctattatttccctggctttgagaaggaggaaaacgtcatactaagaaggaatataagttcggaaggagatatcgttctctgg

SEQ ID NO: 54387 - DNA, 2899 bp, Bovine  19866880245897
  misc_feature (1)..(1): n is a, c, g, or t
ntgagttttccaatttgctggcatattgagtgccgcactttcacagcatcatctttcaggatttgaaatagctcaactggaattccatcacctccactagctttgtagtggtgctttctaaggcccacttgacttcacattccaggatgtcttgctctaggtcagtgatcacaccatcatgattatctgggtcatgaagatcctttttgtacagttcttctgtgtattcttgccatctcttcttaatatcttctgcttctgttaggtccataccatttctgtcctttatcaagctcatctttgcatgaaatgttcctttggtatctctgattttcttgaagagatccctagtctttcccattctgttgttttcctctatttctttgcattgatcgctgaagaaggcttttttatctcttcttgctattctttggaactctgcattcagatgtttatatctttccttttctcctttgcttttcgcttctcttcttttcacaactatttgtaaggcctccccaagacagccattttgcttttctgcatttcttttctatgggaatggtcttatagacttataaagagacttatagatacatccaattcttttgagacctatcaggacacacacaacctttgaagacgggacaattctatattacactatgtgatgtagtcctttgttgggaaagactgctgacaaggccagaggttggaatttaggatcactgataatctgggaactgcctctgtagtctcacaactaacctagaattgggaaggctttttgttctttggatgtaccaaagatggatccccgtttgcagattccaaattctctattctgtttctataagattcttattgtcttataactgtatttttaaaagaagaatttaaaaaataatatcccctttgccttagactataaaggatcaaacttttaactactttgtgtcataaaatcctcttaaggagctacaaatatatgtaagtaacataatttcaagaagcttctaaaaccatgtttatccacacttagaaaagtgtggatctctactatataaaattaccatcaaataactgttattaaatggtgctcttctctctacagtgtatttaaactgctagatatgtccttcataatattaaaggcatcttaaactggcttgtctagagacttaacattatttgagaaaccccattaggggaaaaagttctacatacataaagataaattggagctctgaaacatgctttctgggagacaataggcttttttaatttgccttttttgaatatcagtttctctctctctccttctctctccctctccctctctctcatttcttccctttcccgtttgtttggcctctatgcctgtctttctattgttgcctattttgagctctctgtttagaaatgaaaacatctttgtcactgcagatgtgtgacctttagaactggtatactaggctttttttttttaaacattgactctacctgcatttttcaatattcttctccattgtctcaatttctgttgaaaacacacacttacacacccacacacatacctgaaaatgctatattcatttcagggaatattgatttaaatatagactagatgattcttcaaggcaaaacaataaaatcatgtgtaagaggaaaagttagcaaaaaccttataaagcacaattacacagctctctacaatgataaagtgatttttattttaggcttgcaaaatattcctgcacttcattatcaagtccatatcagtgtcccagaaatatggaagagcacaaaagttttggaaaggattcagaagagattattaagatgagctgaattttcagaaaagaagccagatggctaatctaatattggcaatgggtaggtagagtgtggcaagtgatggggaacaggggtcacctcagttccagtttcactattgacaaagtggagacaatttcaggaaaagaggaagaaaatgatgtcctgatattggtaattctaactctttaaatccgatttcagagaaggcaatggcaccccactccagtactcttgcctggaaaatcccatgaacagaggagcctggtaggctgcagtccatgctaagggtcggacacgactgaacgacttcactttcacttttcactttcatgcattggagaaggaaatggcaacccactccagtgttcttgcctggagaatcccagggacggagagcctggtgggctgccgtttatggggtcgcacagagtcggacacgactgaagtgacttagcagcaaatccgatttagtattttttttccttaaatatttaagtttactagaaaattggattaggcccgctgaaaggcagagggacagattagttaacaccttggcaaaatacctggttctgtgaatcttaaaactttgagattgtatgaacaccagtagaaacaggtaggaaatgtccagggcagtgacagggcctgagatacgctattagtcagttcagttcagttcagtcactcagtcgtgtctgactctttgtgaccccatggactgtagcacatcagctttccttgtacatccccaaattccagagtttactcaaactcatgtccctaagttgctgatgccatccaaccatctcatcttctgtcatccccttctcttcctgctttcaatctttcccagcatcagggtcttttccaaggagtcagttttcttgcatcaggtggccaaagtactggagtttcagtttcagcatcagtccttccaatgaatattcaggactggtctcctttaggatgaactggttggatctccttgcagtccaagggactctcaagagtcttctccaacaccacagttcaaaagcatcagttcttcagcactcag

SEQ ID NO: 54388 - DNA, 2517 bp, Bovine  19866880388641
  misc_feature (1)..(1): n is a, c, g, or t
ngattcaggttttacaggggaataggagtttgccaggaaagaacaggatgcacaaaagcatgacattttgagtcatgtgagtacttaaggaaatgtaaattgagattcaaagataagaaggagctaaagtggcccagactcctttcatggagtgcttcaaaatcccatgaaatcagagcactgcaaaatcttatcttggcatgaattacactgtagctttttcactggctctagattaaagccccaaatgaattaaaaaggtatctactctccttctgtgtccactctggcttcagaagcagcagatagtaaatgacatacattatgagagtgggagggaccagaacttctctttcctgaggattacctcccacccccatgactaccttggggtcctgcacacggggatgaagtcattgccagattcctgaaagcaggcactgctgatacatagcaaggaaggaaaaggaccgccgaatacatcagcagatcccacccaccttcctgtgaggcattcctggagaaactgctccccacatgtcctctgatcactgccagtacatctttatgtcctggggaaaaaacattatttatcttatcccactcctgtgatatttatctcatcacattaaaatttgcaccattccaacagctttgtttatggtagcatgcaggataaatattttatttcctgatgggtgcttgggttttctttgccagcattaaaatcagggtactggagataggaatctggatatttaccagtacaaggagatgctacacagatgctaatgaaagctctgagggtagttttcccgggctgttgaatgtaatttctcacatctccaaatggttataatagggaaacaccctgaaaagaattctctaatggctgtgcatatatagcaggggatcgttggaaagttaattagccatgaaaagcagatctttcctcattcattcatacggtggactgtgtcagactgaacactgaccctctgtgcctctctctctctgcccactttgtctccttgcctcaaaccctcacctctgccgagttagctttcctttaaaaaccaagattaaaactcttatcttgctttctcttagcagctccccaaacctctcagactgaggtatctcttcctctctgtgtgtaacagcaccacaggtacacctccagtgtaataatacattttaaattaatgttgtgtctacctcactgcatagttcactggactatgattctttaaaaatggagagcatactttatttttcactgtatttacttcaaacctttgaaatgtgcgctgaatatggcaaagatctcagcatctattaatcaatcttttcattctttctggcacctaatacatgtttggttaatgaacaaatgaatcaacaaggcaggagaccttggttgactctaagaaaatcactttattttttttcctgtattctcaatgagggaattcagtaagtattgtgtttgacctagaaggcattcatgtattcattaaatcatttcacaagaatttaatatgtcgctaatagcaagcaggacacagggacgatgcaagcacctaatctcaaacttcatagaatcctaggaggaaaactgggagaagccaggactaagtaccataaaagaatgttgccaaaacggttgatagaaaattcagagaaaacgtaaagtaagggcaggatcaagacactataattttgctcttaacttcctaggactacccactgacaccaggaaatggttggctacaaaattttgcagactcaagactcagaaatgtgctgctattgatctttcttaattcccaatatgaaatctggcaccaagataattgttttgtatggagtcagcctagtacagtgaaatctcagttgttcagcctagattgaggcaaaggctccagtcagagatctagtcctaactgtaccgggctgagatctccaagcatcatgcctgtgtatacacagtgtaaagtgcgggcaattccttcaggctagatcacactgctttcacccaacatactttaggtgggttcactgttcttgaacgaagttcctctgtctgaaaatgcagatctctgatactgaggatctctgctctagtctccatgaaaagtctgacatactatgccagatccacttcattcctagagaccattcactacatataccacacagtcccttggcacaaacactgaggctgttagctacaaaggaagacagaactgagcgactgacaacgcagtcctaagaacaattaatcgctccacatctggtttccacttagagcagagcatgcagcaacctcgctgtctatcgtctgccccaaccttcaagcagtaacgcaccctaccatttccatactaacaagcaattagcggaacgatatactgcaagctgagcaaatcttgccatgataaaagaacgggtttcatgttatcttttcctttgtatgccaaagattagaaaatacaaattcaagggactgaagta

SEQ ID NO: 54389 - DNA, 1723 bp, Bovine  19866880625976
  misc_feature (1)..(1): n is a, c, g, or t
nttcatatatattaattttataataattgttatgaattttcaaaatcttagaataacttgtgtcttttcttaaccctcatgttcacaattttgccatgatttcttactccttgtttccttgttatttatcacattttgcttatttttctagtagtacttcctggagagacattttttttaactttttattttgtattggatcacagccgattaacaatgttgtggtagttttaggtggacagcaaagggactcaaccatacatatacatgcatttatttgagagacatttttacaactccacatttcttaacactttgttagtgatatgatgtatactcaggatctacctgttgattgatcgccaattttctagctttactgaatttgtatgtagactgtttgaaaagaaatttaacacatcaaatagcttaaaatcaccaaggtgtctgatattattatacaggtttttattaaatactgaagtttccatcccacataagggtatagttctgtggtttagtacatgccaagagaaaatagatggcaagatatccatgaaaacccatgtagaaaaatttagtggctaatactcataacctcaactcttaactcacttgtctgcacacatagaaatgactgtaattctgaccagtctagggtattgatgggctgacactgagtagattctaggatgaaaaattaaatggtgttcccactccagagaagatgctagtgaaaagattgaaattacatggggtagttgcaaatgacattaaatatcatttcctttgtttctgccaagttctgccaattcgtttagcttgatttaaagaacatatgatgaaaatggagaacagtttctaatcacagcgattaattacctaggactaaattcaaagagattttctaattaaaatttcaaagtatcttaaatctaatgtcatgctcaaatgatgaggcaacacaggcattttttagaacagcctacaagacatcaaggaagaacagatattcccaagtatacagaaaagtagattcttgtttaaaatgttctgagtctcaatccattgggagaagccattcttattccagttgtaagtacaaaatcagacatggagctgctgggagtgatctgtgagactcatcaagaaccatgtgttgtgcagaaaacaaatgtaaactgtcaggacatgatgagattcaagaataaccaacggggataagcagtaaataagttgcacttgcatattcattcaacaaatatttactagctgcattttacatgtcatgtactcttctaggtactggcatatatcagtaaattaaatggacatatccctacttttgtggagtttatacaagcagatacagaaatataggaaatgatgtaacaaataagtagttttactatatttttgtatgtgagaaaataagtgatacagataaaaggaaagtaggaagatgagagtactggttatgggatggaagtgaggagggttgcaattttaagtaaagctctcagggtaatcctcattgttgtttagttgctaagttgtgtctgactctttgtgtacagactccatgtactgtagtccaccagcttcctctttaagaaagagtattatttgaaaaagactcagaaaaagtgagtgaatgagtcatgtggctctttggtggaagaactgcctcttccctagtgcaaatccctaagcctagagtatg

SEQ ID NO: 54390 - DNA, 2645 bp, Bovine  19866880657616
  misc_feature (1)..(1): n is a, c, g, or t
naatatatctacttaaaaaggcaaaagacctgcaatccacacactgtaagacactgaagaaatacattaaaggtaatacagacaggaagatacacagtgttcttggattggaaggatcaatattcttaaaacgaccatattacccaaggcaatgtacagattcagtgcaagccccatcagaacactggtggaatttctcctagaactagatcatttttaaaaaatttgtatggaaacacaaaagattcagaatagtcaaaaccatcttgataaagaacagcagagctggaggaataactttaaatggaatttaatttctaagaaatattgaatcattatgttgtacatctgaaactaatattgtaaattagctataccttaatttttaaagaacaaaaaataggataatagaggtaagaatttatcaaaagaagtgtaagatttttacactaaatattacaacactttcctgaggagaagttaaaaatctaaagaagagatattctaaaaaattaaaaataaataaaagtttcgggcaaggtgattcagttacacatatagattattcccctttaggttattagagaatattgtaactttgctgtacacctgaaactaacacaacactgttaatcaactcccacaataatataaagtaaaattaaaatataaataaatgttgcatgaaagcagaaattgttttactcatagattttagaaccttctttggcaaatggctatgaagtaatgagaaggaatctgtttctatttatagtactttttgtataacattttcttaagaaaaaaacatcactttctctacctcactgacacacactgaataaatatttaagaaatatttattttggagaaggggctcatttatcagcttgcttggggctgctgtgtatttttggccagctttctttatataggctgtgttgctgcgacactcaacattttgcctatgttaagtgatactatctttcccaggatgcctattctaagcacaaggtatttttccaattgtgtggctggtgactatcaggatgcctgttagagcaattatttctgtatctgtctggattcttgagctcaaggaacagccactagagaaatggagaccaacctcatgcctgcctgcaatctccatagaatgcagcactctcctttccacattgtggggctaaatgaatacttgacacatgcacagttctctccaaggagtaaacagtgatgagaaattaggtggaaccccaaagtgctttttagacaactttaccgtgcacacccttttatggatgcaaaggcatcagaattgttttttcttcattgagcccatagaatctggagacatttcctgcatttcacagtagtaattctaacttatgaatacaaatgtagatttctggatggtgacagagttatctgaattgtacaaaaacttgaattccaaaagactttttttcccccctgaactatactgaacagggaccttgaaaggattttcacttttctatgagcattaagccaagagaacatcttccatgagttagtttattctgccgattgcttgtgtgtattgctaagaagcaagctgagatgttggtggagtatttcttttagccgtgtttctgttgttctattttacctttctgtttattatacttagcaatgtgattcctactcatggtattcagttcagttcagttgctcagtcatgtggtcccgactctttgcgaccccatggacttcagcacgccagacttccctctccatcaccaattcccagaacttattcaaactcctgtccatcgagtcagtgatgccatccaatgatctcatcctctgtcgtcccctcttctcctgccttcaatctttcccagcatcagcgtcttaaatgagtcaatttttcgcatcaagtggccaaagtattggagcttcagcttcaggccttccagtgaatattcaggactgatttcctttaggatggactggttggatctccttgcagtccaagggactctcaagagccttctctgacatcacagttcaaaagcatcaattcttcggtgctcagctttctttatagtccaactctcacatccatacgtgactactgaaaaaaccacagctttgactagatggaccctatgttggcaaagtaatgtctctgtattttaatatgctgtctaggttggtcatagcttttcttccaattagcaagcaccatggtattacaggatgcaaatcagctttgattgaaaactcttgcagacacatctttacctaaatagtcagttgtaagctccttcctcaagacaggagagaagggaggagaaaaaggaggaatgatttttttggttaacccgaacccatagtaccttcctgcttaacagcaagttaatgattgctgtaggaggagaactggggtggcaggtgtcctatttttagcatcttcaaaatgcacaacataatgacctgctttaccatgtccctaggctttggatgtgcccacctccccgagcacacagggccattccctgcaccatattcctcaaaaactgcacacagagcacaggctggtcttagtatcctattagcagttgttttggccaagccagtttttcttcgcagcctacaca

SEQ ID NO: 54391 - DNA, 1111 bp, Bovine  19866880713269
  misc_feature (1)..(1): n is a, c, g, or t
ntcttgacttatttcttccgaatgtgttaataattgtggccacatttattttcctccagatgtgaattaaaaatgccacaagggccaatttcaatgcaaacctggaaatggttcaagctgatttctttccttccctctctccaacttttgaaagattttgccatctttcaagtgtaacatagagtatacccatcaatcagagagctgctgggagtcccagaagcaaactgcaggtggcaagtttcactacacataccttaaatggcatcctcatgccaataaatactcaactatttaaacagcaaccactcccacatgcaaatataacaatatcagtgcgacttaattcgtccctgaagtgtgtgtcacaaaataaccaggcaggactggaatccactctgccatttttatccttaagaaacaaatttttaatcaacattttcagccttgccaacatttctctttctcttggttaatatttaagagagctagtcaatttgtgaggcattggagctgtcgttaaaataagttactctctgggttttcaaaatctctttgatgcagcctacccctaaccactggggctggctctatattaaacatttcttttacaggtatttttcatttcttagaagcagctttgcacttttctgttcacatgagatcagatctccttttgcaggttagctcacagcctgagcctctattgattttgaaagctcataagggaagatattcagagaagcatcttggtggttaaaccaagacacttctttcctggttgtgttgttcaaccagtttcaagagttgcctttcatcgtcattcatctatttacttatattaactcacatgcacatgtcatgtagctcccctaactacacacacacacacacacacacacacaagttgctctaaatattataaagcaatgcatagccacatgaactgaatgctcagccatataatagcaggagtccaggaggagccggattcattttgatatttggcaaaactaatacaattatgtaaagtttaaaaataaaataaaatttaaaaaaaagagcaaaaaataaataaataaaagcagcagtaataagggattaagaagag

SEQ ID NO: 54392 - DNA, 1716 bp, Bovine  19866880760746
  misc_feature (1)..(1): n is a, c, g, or t
ngagaaagatatcagaaaatatatcttagtcattttcactaagtaaaataattaacaagtaaataagcagaaaaatatatacacaccccatatatatacatacatacatataagccaaaattgccatgggcagagaaaacaaaatagccctcacattttatagagcacagtgagcaaaacaggtctctttaaagtgtgtgtgtttcctttaccttcatatctttaattccctacaggagataagagatagggaaatgcagtgggagaatgactcccagatttatcatagcaatcacttgatgcttcccaatatggcagccaaaatataagcacagaataatttcaaagactcttaatttgggaaagcatgtatttactcttttaaaaagttctctaaaggtattagatatttttttcttccttctcctccctcaggaactgtcaagaagttctaattagtccacttagttctatcattggacagtgtagacttcgactgaagtatactgaaatatggattggacttttcacagtgaaaattccaataagaagctaatacagttcctgtggatatttttttgacaatgtccctttagaaactcctcgaagaaggctgtttctggacaaaaagacatgatgaatcattccaaactgcaaaaacttcagcttacagagaaatgtgggctaataagcttataattcaatgaaaatagtatttttttatttcaatgacagaaatattagattatgtctccaaaaagttatctaaaatgaatattattatcagtaatatcttagaattttactaacttcacactaaaagagcaaagatttataacaaagctgtcatcttacagaaatacaataaagttaacacacaaatgaacagtttattaaagaaagaataccaaattgtagaaacatttcaaacataaaaagttaattgagagacttacctaagtctcaacactgctcaactctttccgcaacatcaaacaatcttgaccgctgctctgcacaattgcctagaagtccaggctacttgggggtattcacaagtccctttacaatctggctcccatctttccatttggccttgtctccaaaacttgcatgctttaccaggggttctcaaacttcatcgtgggtctgaattacctgcactgtttgtaaaaacacagattccttcttgatggtactctttctgacaggtgtgaggtgatatctcattgtggttttgattccatttcccctgatgattaacaatactgagcatctttttatgtgtctgttgaccatgtggattttccctttgaaaaaatgtctagttaagtcttctgcccatttttatttctttttatgttgtaagagtttgaagtttgtagaggtatacctgccaaatgttttaatgtttacaaaggaaagaatccagggtgttgcttggcagaactaacttcagatgactgatgaaacagcagaacactctaatatgctaaaaatatgaattctcttcagccacttttgtaagtaaaatatctgcatgacagataacactgattggggaaatgtgaagtatgtctgagaacaagcaagctttctaagctttctcctcccctgacttagatcattagcctcacacgtcccccaatctagttgtaggacagcccacatgagaaaatgtgagttctctagagaggttcgaatcactatacttaa

SEQ ID NO: 54393 - DNA, 1018 bp, Bovine  19866880770297
  misc_feature (1)..(1): n is a, c, g, or t
ncatttgctgaagacactgccttttccccactgtatattcttgtctcctttgtcaaatagtaattgatcttataaccctcaatctgaagacaactcaagtgtcaaaaaaaataaaatagaatggataaattgtgatatgttcatttaataaaaaatgggttgaattgaaaataaatatattaaagcaacaatatacatgaatctcactgtgtcgaacaaaataagtcagatgcaagacaggacatgctgcgtgattccatttatatacaatttcaaaaacagggaaagttaatctatggcattagaaggtcaggattctgattatccagggggaggagtaacagtaactagaaggagaaatgaggggggagcttctggagggctaataatttttgtttcatgatctgtgtatatcatggaagagtgtgtttccttttttgaaaatatatctggctgtaaacttgtgtatctattttgtagaaatatagattttatttgaaaggaatgcatacttggccaaataaaacatccccaagaaatttcttgttaaaaagagttccacaaaaataactcttctgtggttggagcccctgtctgcttcacatagcactgcttacgtttacatactctaagattggtaagcgctgggcacatgaattgattttgagaggacagatgctttatttgcaaacgcttaccctcttgtgctacaattaatgagcctgctcaacaagcagcatgcagaatagcctgagatttacagctgagctgtacacattcacagaaggctggaaaatacgggaatagccaactattgcatggtgatgaagtgacaagacatcctgaagtcattcagtgttcaagaaaaacataaaaataatttgggagtccttggcattggacccacaggaaagatgggctcttccatggcatttgtatgcctataagtaggacttaaagattgaggcatatttccaaatcctccccttaaagagaaatattaaattccttttatgtg

SEQ ID NO: 54394 - DNA, 1429 bp, Bovine  19866880817985
  misc_feature (1)..(1): n is a, c, g, or t
nttaagaaattttctttacaagggcacttgtgtctcccctagcattagattttctatgttggaagcttaatccaatggagaaacattgaggaattccatgaccagtccaatgcttggcaaattgagacctccatcaacaatttttattttactcaatctaaaggcctgtcatggtttttgtctgttttcaagctatataaggaaggattagtatctataaaagaaaaatgggtgtttgtttttttttttttttctttttacaacatgaccttccaagagatgagacattgactaattttgaaggtcttttatcacactgaggcttcaacagaggccagtcctgtcttgctggaaaagatgagagagagaatgttggcataaagtggtctcaaatctagggaaggctccacaccctcatgacattgaacttcaatctcgagtggtatggaccactaagccaccactggtgtaattcacagctactctgcttcacatgctgacaagacagggaagtaatgcgccaaatagaatttctaatcactacttgctctgttttgagatgcctttggtctattatcaaacctttatctccctctgttcctgctagttgtgtgaactacaacctgctgattctaatactaacatgatgttatttgtcattcttcattgcaagtgtttacatagaatatactatccaactttcacggaagaggacttgaagttcgtctcttcctttacttcattaccctgagcctaagctcagtttcaatatcaaacacagaggatgatttgattctaatagaatagagattggtcacggagaagaattagccaggcccctatgtgcaaacatgatttctcaaagcaatatcctgctgacagcttcttcctcctgacagcttctccttgctgttttattaaaatagcattataacttataataggtctagattttttccatcagcacccaatatgttattctaggactttgtagaggaagattatattaggttgtttcatagagttggcattgaatatatagttatttttccccacttgtgcataataggctactttagttcatcggattcttagcacacaaataacttatcagttcactgaacagctctaatgaaaccagtctctataagtttaagtgctacctgaagtctattccattccacttatcctgagttgcctatgcatgtagaacctggtccatattttacattaagttttatttgattaaagagaagctacttgtgttttctgttcccaaacacaaatagcaaagcaaatatactaagaacatccctcacctttaacaggagagaacaatggcagtgatgtctgttcaatgcaaaagagttggtgagacagttgggcagcggaaaaagaagtatgaagcaggaaaaaataaaacccttaa

SEQ ID NO: 54395 - DNA, 1460 bp, Bovine  19866880997772
  misc_feature (1)..(1): n is a, c, g, or t
nttccgtttatcctcacagatcgcaccaggaaggagtcagatggatgaagcacagacagggaattgtctacagaggagcctggaacaatggatctttaatggactcatagccagaaagggtgggggctagaaatggaacattctgagtccaggtggagaaaaatgtctcagctgaggctgctaataaagtgatcttggcagaggtgcctgagaagtacctccactgaagggaaggctgagtttttaaaaggaactccctccaggaaacgtgcatgcaatggctgttcaccaggcttgatgtggcggaggcggcttctcccacaagtcttgccaggcaaatccttgtaattgcctatgatccaagtctgaaagatcacacagaggcctatctgaattcctccgtaaggatagcgttcagtctacacagagtccccagttccctctattcttactttccattatttttgtgctactgttcttatgtagttcagtgcagcctactcaactaaatacacaccatttccttctgattctttagtcctgtctccctatgcagaaaatcccacacattggtaacagagactctgttcacgtcatccaaaaccgatttttaatggacattaaatttcaagtttcttatatgtgttttatacattttatatacacacatttgtatatataacacttatatattagcaagtttgatagattattctctcagagaaattctacacatagacaagtttagtcagtctgtctagtgggaatgttagagaaataaagtttataaacttctaagtctataagactttattattgagttttttttctttaccggttcctcttagaggacaaagtcccagaatcagttgattttgaatgacactgttggaggtttttcagttcaaaagtatgagtatttcctcttaacttctgttcaccccttaggggatttagtcagcccaggaatccgagttagtgtgtgtcttctacagtttaatgcagcctccattggtggtgtgggaaagctcattttccagtcattccataagaaaaaataccatttaaattttgtagaataaatactacatagcagaaatatagtatatcattttatgcaatgaaaacaatcacatctgctactctgtacaagaggaggacccctccccccaatctgctttcatttctgttagtgaatcatcattgcttctgtatcagatttctcatatgtatacaatttgaggaaattatgagatttggagtttttattcatcgtgtaaccttcagctaaacctccatgacctagcaactctcaatttcttcctgtattttaacatgtcaataaaataaaaatggcactcacttgacccccagcttccaccgtgagcccactgtccggtttaattgtcagctgggattgttccacagcattcatcaaaaaggagcaggaagggtacagt

SEQ ID NO: 54396 - DNA, 1103 bp, Bovine  19866881010704
  misc_feature (1)..(1): n is a, c, g, or t
ntacaataatctctaggtccatctgtgttgtttcctggccccaagtctattggcactcccaatttcctggcatagtgcagcctttccaaagaataaaggctcagctgcctcaaccgcatcagtgtgtagactttccctgaagatctataaagtcagacttgatagtctcaggcaagtggagagggcttcatgtggatagagacttgtgttgtttccatctacaattacagcttggctttattttttaataacctctcaaaacctatcatcaactgtctaatctttaacagtgcacttcccttctctctccctcattccaactctgctgcaaaggttggaactcactggattaaacaggatgggataaaaacagtgacttgatgatgactatttagaaactgcattgtattcctcttagaaaactggcccagtttcctaacccttggaaacccaggatttcctagaagtatgatgtgaggaaaaggtttttctgatgaagggcaaaatcaagactcagatttgcttattcacttgaggggggtcttaaagaccccattgtcctctacaacacataaaatgttcttttaattgagccccacattcactatcaagaagagtgagtgaaagatgagaaataaaatgcttccattcttttccactggctattacctcggtaatggcactaataaaagtggcattagaaagaactgggagaaaaatcatcgttactcttggacccataagaaacgaagattcaaaaggttattacaggtaatagattcacattttagcatgtgaaatgatggtgggcttagatcacgtgcttttggcttagagatgattttctaaggtaggagtctcagggttggtgaatagaagaggaacctctgggtcaaggagggaaactgggggctttgttccaatcctgggccttggagcagggtcacactataaacaacaattcctcctcaaatgtgttctgaaaagcccagggaaaatcagtttctctgcttgcagaatctcagaggacagggaagaaagatagtgcaagatgaagacaaggtgaactaatgaaatccgtctagcctgagtgaacacgctgt

SEQ ID NO: 54397 - DNA, 1573 bp, Bovine  19866881082375
  misc_feature (1)..(1): n is a, c, g, or t
nagctagctcagtttaaaacagctcatagggaaattatgaattcactaaggttttctttgagctctgctgacctctactttctgtggcctttcagttctcttgtccctgttctttctcttgttttcctgggtccttatatgttcttttactttctcttcttcatattaaaatttaattgtaggaaataaggaatgatttcttagtattcaaatgtcatttctttctcaatttaggaaaattttggctacaagtatgagaaacaccttctctaactgccttaaaggttatagaaatgaatttttaaatatactaagtcctgtatcagagcaggattcagctatgtcaattccactgctcagtagcattattagaggtcagtttccttgttctgccagtaacagcattggcttaatcctcaggctggttgcacttatcaaaagatgacttcttataataactcagtctatctgtttcttctttcacatcaatcagccaaatataagaaatgaaaaactgtcttttttttcataattatagagtaaatgatcttcccttcagccctcttggaccaagttaaatgcccagtactagattaaacacggtttttagagtgtcacctctccctgccaatcagccctacctttggaactctgaatgagagtatcttcctctaggcacaaaggctacctagagggctttgtttaggaaagaaaaatggagctgtgatactacctagactattcacacctaatacacatccctttcttcctctaaaaatgacctgtctcatcaaagagccttcatgatccagtgagcaggtaataggattcattgggatgaggatattctctgtaagatgtgcaaacatctgcctaaagtcccactcagaagagaaccaggggcttttgtgtccctcatcatgaatccccattttctgcgggcttgaatggctggaacacagaaagacagtgtgtgtgtgtgtgtgtgtgtgtgtgtgtgtgtgtgtttatatatatcttctgctagccttctagcctgaatcaccctcaattttgtcccttatcaaccagttaagtcaccctgcacctccttccctctccctactctctgagtcccttagaaaagataacaaatgaaagcaagcatgttgatgcatttttaggaaaatgttttacaaaaacaattctgaaaacagtggcatctaaatcctctaaatataagaataaaatctcctccttccctgctattcttttcaaataggactgaggcttggagataggatttgctaataatacagatgtgtggatacccattccatttggtttcctcatagccttgaggacagttatttggttccatcagtttactactgtcagtgactacttttgattctttcttgagctaatttctctctctccctccttccctccctccctccttctttatctccctctctctcattttttttttttttttttgtacagaggaatgtgaaagatggattctttattgacatgcttgttaacacagttctattccccccaaattatatattaataaaaaagggaagat

SEQ ID NO: 54398 - DNA, 2037 bp, Bovine  19866881152820
  misc_feature (1)..(1): n is a, c, g, or t
ncagtccttccaatgaatattcaggattggtctcctttaggatgaactggttggatctccttgcagtccaagggactctcaagagtcttctccaacaccacagttcaaaagtatcagttcttcagcactcagttttctttatattccaactctcacatccatacatgattactggaagaactatcgctttgactagacggacctttgttgtcaaagaaatgcctctgctttttaatatgctgtctaggttggtcatagcttttcttccaaggagcaagggttttttttaaatttcatggctgcagtcaccatctgcagggattttggagcccaagaaaatagtctcttactgtttccattgtttccccatctatttgccctgaagtgatggaaaagactctgatgctgggagggattgggggcaagaggagaaggggacgacagaggatgagatggctggatggtatcaccaactctatggacgtgagtttgagtgaactccgggagttggtgatagacagggaggcctggtgtgctgcaattcatggggtcacaaagagttggacatgactgaacaactgaactgactgactgatgagagcagatgccatgatctaagttttctgaatgttgaattttaagccaaatttttgactctcctctttcactttcatcaaaagactctttagttcttgactttctgccataaggttggtgtcctctgcatatctgaggttattgatatttctcccagcaatcttgagtccagcttgtgctttatccagcccagcatttcgcatgatgtactctccatataatttccttattgccaaattcagactcaaattgaagaaagtagggaaaaccagtagaccattcaggtatgacctaaatcaaattccttacaattatacagtagaactgacaaatagattcaaaggattagaactatggaccaaggttcatgacattgtacaggagacagggatcaagatcatccccaaggaaaagaaatgcaaaatgtcaaaatcgttgtctgaggaggccttacaaatagctgagaaaagaaaagacacaaaaagcaaaggagaaaagtaaagatatacacatttgaatgcagagttccaaagaataataaggagagataagaaagccttcttcagtgatcaatgctattaatagcctttgccctattcctgaagaagtatatgtttttcctctttcagtgcagtgcagttcagtcactcagttgtgtccaactcttttgtgacctcatggactgcagcgcaccaggcctccctgtacatcaacaactccccggagtttactcaaactcatgtccattggagtcagtgatgccatccaaccatctcatcctctggcgtccccttctcctcttgcccctaatccctcccagcatcagagtcttttccatcacttcatggcaaatagatggggaaacaatggaaacagtaagagactattttcttgggctccaaaatccctgcagatggtgactgcagccatgaaattaaaaaacccttgctccttagaagggttcaatctttcccagcatcagggtcttttcaaatgagtcagctcttacatcaggtggccaaagtattggagtttcagcttcaacatcagtccttccaatgaatattcaggatatctttttacatcctgagcctctagaaagccacacctatattagatcaacttacaggaaaaatgtaattagtgaatttcatagtatttaatgtagtttgaatgtagcacttgaaaatgtctatgtccatgggaccttgctaaaaacagagccttgtggtctgaaagttatactgcagattggtctagactgaatttgccttcatttgtgactgagacaaattaaatagcaactctatgagacagtcttttgtcctcatggagaattgagatgtcttttatacatgaactgctattttattatcttatgatcttcactttaaattaatggcctagttaattagggtgaattcaagtcacatttctata

SEQ ID NO: 54399 - DNA, 672 bp, Bovine  19866881175442
  misc_feature (1)..(1): n is a, c, g, or t
nactgtgtatatgctggcaaaacactctaatgatcttaaactaggtctgtcttgagagtggatggaatttatgaagcccctcactggatgctataaagacatctctccctattatcaggttctacagaattggagagtaccagagggaagcaggtagggccatggggtagggggttcatgaatgattaaataatcaaaggaaataaaataaagatgaactgtcctcaaacccaggaggatcatattataggcataataaaagcgacttgatataaaatccttaggactagtagcatttgggtttgcagataagcaagggaagaaataatgcaattcttttagtaactggctttatctagattttgcatatgggcagtctctcaggaccattctctcttcctgtgtatgtagtcaattcagaatggaactctcttgttcatggtactctgaggctttaaaaaatgactgagatttcagatttcactggtaaatggaatatttccagtttcattttaaggaaatcctaaatgctaggctgattttaaaccataggaagaaggccaaagggaaatttgttgttactaagaagctatgttttcattttatgtttgccatccatgacctgtatctatcttccctgacctcaaagtaacatacctattctatttacag

SEQ ID NO: 54400 - DNA, 1119 bp, Bovine  19866881277229
  misc_feature (1)..(1): n is a, c, g, or t
ntcaagtctgttctctcttttattttttaattgacaagagatttcgatgcagcatatacagggtgaggagcttaccttgatgcttctaagatattccatctgtgctttgggggatcactacctagtaaagagcactaattaaaccagtctcactatgctcagagcctgctgctgctgctaagtcgcttcagtcgtgtccgactctgtgcgaccccatagatggcagcccaccaggctcccccatccctgggattctccaggcaagaacactggagtgggttgccatttccttctccaatgcatgaaattgaaaagtgaaagtgaagtcactcagtcctgtccgactcctagcgaccccatggacttcagcctaccaggctcctctgtccatgggatttgccaggcaagagtactggagtaggttgccattgccttctccgatgctcagaacctaggtctacattttagtagaattctaccacacggcacaggaaaagtctggctgacaagcaggataatacagataacattattgtttgtggcaaagggaaaagagaaccagaaggagcctgtgaaaccctggaagcagtccttttgagtttcaaacagtgacatattgttaaacattcaatatatctaaaattgagtaggtttcccaatgtgaactgatgcaggcttctgggaacattttgcccaagccatcttacactgttacttgaaatctgcagtgaaattggatggaagactttgtttcaatccgttccaatattccctgacatgcacctgaatccccatgtaggataaattagccagagagaataggagctgagtgagcaggactggcaggcagtctttttgaatcatgtaccagatccacatttacacttcctatttgttgcttctctcatagaaacggactcatgtgtgaaatgggagaaatgtgagcctatcactaaactacatcagatagcatgacaagagatgccattgatggatgggtagctcacaagcctgcacaggctccattaccaaaccaatgagcatccttttaggcagtgagtctctctaataatttgtgttgatgatgatttggtggcaaattagaatcaattagtgaaa

SEQ ID NO: 54401 - DNA, 2077 bp, Bovine  19866881279156
  misc_feature (1)..(1): n is a, c, g, or t
natctgctagacatcacctctgcctcaactacatcccttctgggcatgacatcacttggctactgtaagtcactgcctccctcattctagtttcccatctctgagcagcaatatacaaccatccactctcagttcatatgcttagatcctggctgaaaggaattgaggagggggaaaatctctcagtttccatttctatattgaggagaaataatgttcactccctcctactgactttccccaaattaggcacatgggaacatccctacccaaagaagaagagttctttatcattctgcaggaaggaaaaaaaaaaaaacacaacaacaacaacaaaaatcaatgcctactacaatgtgtctagtaactgggaatttttatgtagaagttggatgggtaactagacataatactgtgcattgtgttgctgtatcaagagaacagttagaagatagtttcctacaagcccctggtctaatttgaggcatctacgagataagggaatttttgagttatgctggtgtgactgctgagtcgtgagataaagcaacacaccgtgtgtgccctttccctggaagcttcacgttgctttataagggaatccatttctaccccctcgagttcaaagctggtcttaattaaatactgtaggtttggcctattaccgctaggggtcattcttttacatgtgtcattcaagaccatctaagaggaggtactgattctaagacaactttagaggtttgttctttccaaatattttaactacagagacaaattgcatttggtaaatctgtggttccagtgactaggtatagaattgattgcgatggggcttgtgctgccattcaaaaataaataaaggtctggtgaatgacactggcgattcttaacattctgtgtgatttaattttcaacctagaattccttgcactttcagcccttccctctctgctcagtatcaatacatatatggggcatttcaattgagttcagcttgggctaattaaaatcttaaggttttattaaaatgtgagacagtgaagacagagaattaagatattaaaaatgttaaatgaaacatcccgtaaattaagattaaaatgatgattccatacatcaagctctttgagtataagggtacatgtctaggtttctttgttaatacaggatgagacacttgtgccctgcaccctattgttcccatccaggatgggtcctgcatgctgggacatcggatataccccccatgcacgttcactccagggtactgggctttatctcagaccttgaaggactcggtctttggctgctccctttgtgaggatcaataatagtgaacacgcagtctccattttacagtgaaagttacctttctgtccttaatgaacattattgatagtcatcataatcagagaagaggtagagtcagttaagtgcatcacggcatggcaggcacttcacgtggtactctcacacaccctgaactctgccaacgcttgcctacatgctgatattttggtttttgttgcattgcctgtttagattcagtttgcaagtttgattataaaatggatcactgagttcaatcacaaaagaagggagagctgtcctgatgttgccactccagaccacaagtgctcagagtcctgtgtctgaggaataaagcctgatctgaacacgtgggtttgttagggcttccatgctgccctgccactctcatgcctccctttcatctttcccccgaaactctgcattaaccccctacttgtccactcccctcgccttcaacatccttcttcttcatctttcatttgtccttctgctgtcctgtctcctaatcagggcgttggtgggggacgatggcagagcaagaccagacaacagcactggatttgaaagaatacacatgaagacattcttctgagcactttaatgagctctgttttcctggaatggcagagagagagagagaaaaagatagtacacagagttcttgctttttttcttattgctgctatttggataaagatcaaagtctttacctgtgattatccataagacatgcaataaaatg

SEQ ID NO: 54402 - DNA, 1046 bp, Bovine  19866881364288
  misc_feature (1)..(1): n is a, c, g, or t
naaaaagaatcatgtggctagaaaagaatttatggcttatcatagcaataggaaccctactatagtgactccaagcaagaagccatattatatacatgtgttgtataatgtaagaaaactcatgaagtaagggattgtttaggcttgcatcctttacagatataccactttatatttatctaattatctttgtatttcttcgacatcaaattctttcagctccacaccttaaaacaaaaaaataaaacatttaaaaatagaaatcctttttactaaggataaaagtataactttgtatgtggctgttgttgggaaaataaaattagaaacaaaatcccctgctaaccaaaaatcctttccacaaaaacagtaggtaaagaaaacttccattatttaataaacattaagacaagatctaatgtgtatcatagacaattcatgaaagagacttcagatacagaaagatgttttatgctttcatatagtcagtcagatttaatctgttcatacatgttctaaagataaatgataaatagtccttaggtaaatcaactggacagtaccatttaccacacataatttttcataaattcacctaaagacagctttactcaaaatataattggagtgactgtgttagctaattggctttattcaaaggaaaaataaagctctcatatcattatgacagggagtagttttgcaacttgaagtgagatcctcactgaaatttggtttccacttccccacagaaaagaagatagggtgctgtcttccctgattgtgcttcccaattcaggaaatacaaagagatgcagtttagattcctgggtgggaaagatcccctgtttgtagaaaatgacaacctactccagtatttcttgcctggaaaatcccatggacagaggggcctgatggactgcagtccatgggttgcaaagagtcagacaggactgagccactgggcacacacagcacttcttgattattgcatctcaaaagagatggcttataggttcttgaggaaacacccctaaactttgaga

SEQ ID NO: 54403 - DNA, 1474 bp, Bovine  19866881423403
  misc_feature (1)..(1): n is a, c, g, or t
natcacccaatgtagtaaagttaaattataaggccagcattcagagatattttcctatttgcagagcccacaaactttgaaacagacctaacctactagaatcccctttcttctttgatggcctcttataagttgtggactgttcacagagaggcatataagcgtgtacatgtacaagaaagtttaaagcacagttaaaacttttattggtggacatgaagaatcagtgaatcaaagagacatgaatctgcatgttccatccatgtaatatggaaacatatatggattatctttcatttcactcatcattagaatagttgcaaatacctagcactgggaaccatatacagtgcaattctctcagttagatttttgcttttgcgtctgttcttcaaaaggagaccccgggggctcttgaaatgtttacacctgcagcttgaagaaagtgcctcagcctggataagttcctctgagagattatgctcacccatctgttttcataaaaatttaatgccaggcagcaaactcatagattgttttgttttaatttaatttttatttaatctgttagaaatcagacttctgcaatctggtggcaggtgtgtagtaacaaacacagaatgtgttctacccgcacttccgcaaagaaccatttgtgattgcactgactccatacacggcagtaattgggactcttactaggatgtagtcatgattcccggagcttcacctctattctataaggaatctagaggcgaaatatgctctacttaaagagtacagttctcatcacttaacccagcccaaataccagcatttctgccacctctgactttctaaaatctagagcctgggaagatatgccctcctatcaccacttcactgacccccagccaatagcgggaagcatatgtcttcttgtccttgcagttaaaaaccctcccggtgagtctcaaggctttgtccagtgtcagcagcctcaggcattattttaataatcctcaatgagtataaaaggagatatttttactcagtttttattttatggagttctacttttcaggggaagttccctcaatgtccaaatctcagactattttccttccactcagccacaacacatggtgatatgggcaatctgtcttttaattttttttaatttttattttttttaatctgtggatcaagaagagtagggtagctataacttccaggcctggcattgacccttagtaaatagcaaatagtcatctttctatctgaaagaattttgtctccttccaattaactccccttaagggaaaagtggagggatgaagttgatgagacccgttgtatacggttgggatgaagctttctcttgaaagtgatgatccactgcaatgaatatttattaactatccattatcattactatttattttaagctggatatagggatattattggctcaaatatgatatcagaattaaca

SEQ ID NO: 54404 - DNA, 751 bp, Bovine  19866881572105
  misc_feature (1)..(1): n is a, c, g, or t
ntggcagaagctctattctaagtacagtagggcaagaaaactggaacccaacactcctgcctagcttgcttatagtatagaagttccatgtcaaataggaaaagtccagaaggtcaggggcagcttccctgtccacagtcccacttgctgagcaggatgtcactctatgaaagtggaccatcttctccaccctcaaccccaatgcaatggcacagaagctcaacaaaagaggaaacaaaaaacagagttcccagcactgcctaattaagattaacttactttggaagaaattgtgggaaagttcatgtctaagagcattattgaacacaatgaagatcatcaaatgaacaattaagaagagactggcagctctctgacactaataactgaaagtaaaactgttaacaaaagagaagtttaacagaaagagccaggaaaagaatcaactaaggagagctttcagggagtcagagcagccccaaagactggcaagcctttgcccaggtagaggagccttactttattggatcagtctgtggaacagtttatgccataagatattgctgccaacaacactgtcattagctaacactggagactaacaattgggtgtggtattcatagaggtagactattctaagtgttcagagagactgtgcacacccaaggatgcattctgtgagaagaaacataaaatacttcacatactgggaaaagtcaaattcactaaactagggcttccttagtggct

SEQ ID NO: 54405 - DNA, 1005 bp, Bovine  19866881945065
  misc_feature (1)..(1): n is a, c, g, or t
ntccaatttggaaaatgaatcacgctttccagttactcaagcttttcattttgcttcaagtgtcttcctatctgcttaccaaattcgatctccttcaagtcccaccttgagtgataaatcctacatgaattatcctcagaaacccactaaatcatgacttctacctcctttgaatctcacaagccttcatttctaagtatgacatcctgacagacatcttcagtcctgcataatagttatttgtgttcttgtcttcacatgatcaccatatctatctcaccgtgtcctttcttgaaggaaaagatgtggattacagtcgtctttgccgaccagaaagcagttggcaacgtaccttgttgacgccagtttttagcactgtacaattttgtttgcttgtttttgctcttggtcatggtgcaatgtgtactgtgctgacactaaggatatattacaggatctaacactatatcctccacagagcccacagtccagagagagcttgtcatgtgtacacagaaaaaaaaataaggtgaaaaaatgaactgaggacactggtggaattgctcagtgagagttcattatggaagtagcaagattctatcatccaaattgaaataatgtggcataggccctgaaccttatctcacaggtccagtcagtggattacaatgattttctaggaagtcacatgtgaaggtatacatttgacaaaggggatgagggccaccttataagttcagggctgggtgggtccagtgacaatactttccagcatccataggctggaaaaagggtcaatggaatcccctttcacaagagagtagtaactgattttctttatgtttataaagtacatacttcttgtagaaagtttggacagcagagaaatgtatcaacacagaattttaaatcattgtaattgtattatttgatattatactacgtgatgttatctgaatcctgtcttttcagctaatgatatgttggcaagatttctccatgtca

SEQ ID NO: 54406 - DNA, 2343 bp, Bovine  19866880508883
  misc_feature (1)..(1): n is a, c, g, or t
ntcccctggagaaggaaatggcaaccccctccagtatccttgcctggaaaatctcatggacagaggagcctggtgggctgcagtccatgagtcacaatgagtcaggcatgactgagcgactaacacttatttacttacacttaactctgattaaaacatgaatttctacatcccaagtctgtaagactgaagtaaaaagcattgccatctgctgatttgaagggttcttaaagttcacccacccttcttaaaagaaagatgttaaaatcatgaagcagcatataggagactgacttccagaatgaggagttccactgacccacttcccaatgcaactggtcaatactatataataaactcccaaccactggaagcctctagaaacggtcttcaaaacaaaaataaaaaagaattgaagtatgaaaattcagtaagagaggcaggagtctgtgggaaataactcgttcctttccccctctccactcagcaaggcagagactccacactggactgctgcagtcagaacacagggctccctccctccccagctccggcacagaggactcgttctgggaagggctgggtggacctgtatatttcacttccggcccccagatccccagtgctgaggctcaggcacaggaaagtggatcagaagctctaccctgggcctggctcccttagaataaatactgggaccttgaaaactcttttcctagtcctcaaggcatggtggttccaaacaggaaaggcattctgagaaggccttaggctacttcactaaaagaatccagccagttactaaacaaataaacaaacaacaataacaagccttcatcatcagtgaaagggtggcggaccagagctgctataatatataatctaatatattcagcttctaacaaagtatttcaaggcatgtgaaggagcaggcaagtacggcagtacgacccatgtatacatcatgaaaaaagccatgaaactacctgtgagagtgaccaaacgttggatttatgggaaacgattccaaagtagccattatacattcacagaactaaaattttacgttatacattcacagaaccatacattcacagaactaaaagtttttaaaaagttactagaagggctcaagagaagatctgaactggcataagacagaactagtgaacttgaagatacagtgattgatagtatgtaagctgacatcagagagaaaagggaatgaaggggaaaaaaccataacctcagagaaatgtaggacatcgtgaaatccataaatcacatgaaatgggagtaccaggagaggaaaggagggggaaaagtctttaaagaaatagtagctaaaaactttccaaggttattgaaaaacaataacctacatacccaagaatctcaaactctaagtaggattaatctaataagacctaaaacacacaccataaaaaaatgctaaaagtcaaagacaaggagaaaatatggaaggtatcattaaattaaataaacagaaaggccattagattgaggtggctttagtgccttaggagactatataatcaaactaaaccctaagccaataagtctctcaacattaagagattaaaacccaagcacaactaatcacacagagccaactaggactttccaagtaaagcaaattcttatgctatagccaatcaagtaattccttgtttgctctgcctcttccatggaagtctttcctctagagggctcctcaccacttccagtttggtgctgccaaattcaagtcaatttttgctcaaatagactcttaaaatttttaatatgcctcggtttaccttttaatagtagcaaaagaaagacaatgtgtcacttataatggaagcccaatatgataaaaggctaatttagcagaaaccatggagaacaggaaggccatggaataacataatcacagtccttaaagaaaaagctgtggaccaagacccgttattcaataaagctgttattcagagacaaaggtgaaacagcatcctagataagcaaaaactgaaagaattcactgttaacagatccactttagaataaataaaggaaattctttaggttaaaagaaagtgacctcagatggtaatttaaattgatatctacaaagagtactagtaatataactgtgtaattataaaagacaatataaatgcctaattttgttttttctcttagctgatggaaaaagtaatggtataaaataatatgcataaaacatattattgggcctataacatacagaaatgtaatacatgcatattatatgtgctattaatagcacaaaggagatctgtaagagcaaaggtgttacag

SEQ ID NO: 54407 - DNA, 1602 bp, Bovine  19866880844985
  misc_feature (1)..(1): n is a, c, g, or t
nttggattttactttcagcaccagacacatcccccaaatgagtgtcatttccactttggccagctgcttcattctttctggaatattagtagatgtcctcctctcttccccagtagcacactggccaccttctgacctggagggctcatcttctggtgtaataccttttttcctttttatacagttcatggggatctcacagctagtttactgtaatggtttaccattccctcctccagtggatcacactttgtcagaactctgtactgtgacccatccatcttgggtggccctacacagcatggctcatagcttcattgagttatgcaagcccctttgccactaggcagtaatccatgagggggatcatcatgcaaaatgctgggatgagtgaatcacaagctagaatcaagattgctgggataattatcaacaacctctgatttgtagataatacttctctaatggcagaaagtgaagaggaactaaagggcctcttgatgagggtgaaagaggagagtgaaaatgctggcttaaaactcaacattcaagaaactaagatcaaggcatctgttcccattacttcatggcaagcagaaggggaaagagtagaaggagtgacagacttcattttcttgggctccaaaatcactgtggatggtgactgcagccttgatattaaaagacactagctccttggaaggaaaactaagacaagcctagacaccatattaaaaagtagagacatcactttgctgacaaagttatgtattcaaattgtggtgttggagaacactcttgagagtcacttgaactgctagaagatgtagtcagttaatcctaaaggaactcaacctcgaatatttattggaagggttgatgctgaagctgaagctccaattttttgcccaccttatgtgaagagctgactcttcagaaaagactctgatgctgggaaagattagggcaaaaagagaagggggtggcaaaggatgagatggttagatagcatcaccaactcaatggacatgagtttgagcaaactaggagacagtgaaggacaggaaaccctgctgtgcagaaatccatgggggtcacaaagagtcagacacaacttagtgactgaacaacaagaaagctatctctcctctggcccagtcctatagctgctgctgcttcacaatctgtgctgaataagccttgagcccagcctcctcctttcaggtgtctctcatgttgtatgtatattgcattttcatatgatcaaaagtgaccttaacacctttcctccttgtgtggaatttaatttcttaactgcagttttatacagtgcaaaatgaagatgttgtgtctctgatcttgcaagaaaaaaccagttcctcacctgtgtgggtagtgtgggattgattgatatgttaatgtaggaggatgcagtcctgaaaggatgtcaggtacttctaaatatacactgtgtgcggcccagttctgcctgctgcaggctttgatgtcgaataaaatgggataagggtaggagagtgacgccatatcacagatcttcttccttctaacagaagggcaaaggtcagcaaaatcctagtcagc

SEQ ID NO: 54408 - DNA, 803 bp, Bovine  19866880946592
  misc_feature (1)..(1): n is a, c, g, or t
ntgaagatattcagaaccttttttccaagtgcaagataaagcagcagctaccagtgcagattccagcaatggaatgatttgctggctgtgtgatcaaggtgcatctcgttactgatcttaatctgttttttacctggaatatctggatgctgatggcacctatgctctggggttgtgggaacaattagacaggacaagatgcagtctattacagcaaagagcctggtgtattagtgcccagtaaagattaactatgatagtgttactacctgtgggtatgacacagtgaagttttccacactgaatctaagtgacttgctgctctaccataccagagatgccatggttcctccaaggggtgtctctgtttaaggcccaaaggtcaatgtaaaaataaaagacaggacacagagtctgacctccttgtttagcattctgaagcaaccaaaagctcccctccaacccaagcatatttgcatcagcattcttaaattgcatgctgttttctgaggatcatcatgattcaaattttaataatcttgttgaaaaacaaatcaagaaatgaaaagaaaaatgagctggagatattgcatttctctggaaggctaccactaattaagacattgaaagcaattttaacaccatttctcaccaccgtgacaaatctgacagatttacaaattagcattctgggactctcgcactgaatgtccatgttttgtcagattctgtgatggatcacaaatgggcttggtaattgccccaagttatacaatacctgcaaaaagtaagcacattctcag

SEQ ID NO: 54409 - DNA, 1896 bp, Bovine  19866881279230
  misc_feature (1)..(1): n is a, c, g, or t
ntatctttgtctagttgtttctcacagagaagtttggaggcaaaagtcctgggtttgggaatctattcaacctgcctcttattaacctcgtggtctcaggtaaatcactcaagctcacggtacctcaattttctcccttgtggggaggaacactaacacatgttttgtcaacattacaaagtgttggcaaggctcaaatctgctaattcaggtgcaatctgttaataaattattaaataaaacatcatagtaatttatcattgttctcccttaacagccatttgcaacatcattgtcttgttctctagtttcctaggatggaaaggaaagattgacaatttgagttctgagtcctgggttgctatctgatctggtattaatgaaaatactactatgtcattataaaagtagagtggggacaatttgaggtgcttccatgaatgaatcttttagtataaatgaagaaggagaaaataaatgaaagtgagacatttccaaacatgttttttcaaaggaagaaatcataaagcctggttgacagctgttgatcttcttatcagaccagtagatcttctctgctaaatcccattatgaatgttatgaatttagcccaaatagagacataccggtgacggctcagcacaaaaattgttctttcactctctgtgactctctgtcactgaggcagtaaggagtattatatcacctgcagtggtcctgcactgcttggtaagtataaacttaaggcgagtccgacaactgcgtacatcattccacaaagagcaggctgtctcggcagtaatctgggaaagcagcttgtgtggctctgctgtgtcctgcagggaaaccagtggctgcttcagggagcttggacaatgaatcatgattttctctggcacctattttactgtcctttggaacaggctctcagtcaccctgcaccatcatttatagagtcctttacagctcattagatagctctgagagcaaatcctatgcaatgctgccttatgacccaggtgccttctaacttgggatgcaatgaagggcaaagataaataggctataggaaggcccagcttctgccatacaaagaactatggtgtgggggtgggtaagaggggctagggggacgttaggcccaagtcccacaggcaaggctttgggtagaaccaaagtagtctacaagtgaagtgtggtcagcacaagaaatgacacccaggatccctgagaacagctcttctctttatccatcaccctttgtcctcctctttaggcatctcattctaccatcctgacagcttctcaggtgcctaccatgtgctcagcctcacactcagaggatctgaaggcactgctcagtccattcaatgttcatgagttattttcataaagttagttgtcagttaggagataaccagctttatgtactgtttctccaccttatacacctatactacagacatcttattgcacatatgacaagatgaactgacttctgtggattgtgcagattttggcctccccccaatcctctgtgaaaatattgaaattgttagtctaattttccctgcctatttccctccactacctctgcctttcaaaggactcttgttctttagcacctgttgtgtgactttgatcccccaggcttataggatggagaggttcaccaagagtgttcagacaggaagttaacactgctgaaaaggtccatgctcccagcacagagacaggaaatggaagaacacccagaaagcaaggcgccctggctgtggacaccaaggagatgacttttacattttatgtgggagtgagtttggtgagtggaatggcactggagacagtaaggtataacaaatgaagaatttttaaaaggaaggaaacaggaaaata

SEQ ID NO: 54410 - DNA, 1248 bp, Bovine  19866881414396
  misc_feature (1)..(1): n is a, c, g, or t
nacacttggaccagattcatatgtagctccataaataatggcaccagattttctgtaggacacctttcatcatcaaaagcggcttccaggccatttccataggatccaactgctttttgcaggtttccatttgtctttgctttcttctactgcatgcccatcttcccttacctactacctgctgaagccctgctgaccacacataaaacatcagatgcagaataaatagccacacataagctgctaacttgctttcacaaaggcataggatcaagtccctgtaatcaatcccttactcttcatcactcctagtgtttctactccttatattgaactctgactgatattgtcaccatgcacccctgcagagaatcagatgggcaccaataatgaaagtcattcatagttactataaagattttaaaatataaaatgcaaataatgacctaatctaatgtctagcatatagtaggtcctcaatgatggtagctatcactgtgtcattagggaactggactatttccttagtgccaggagctatttccacatggatagaaatacatcatagtttttggaacctgaatatgagatcaaagactctgcactacagttcccatgatgaggagtttaattatgaacaatgagaaggataatgcatctggattgtttgcagatagctaatgacctgacattctaaatatagctgcagtttcccaactgaaagtcaatctgctctgtggtagcagacagaaagccccactgctgggcaacattggtgagaacagctagaacaaacattttcctcctctccactaaatgataaatcacagctgtcaatgaataaaacattcagtctcagcaatcaagcaatggatttttaaggagccctcccatttatcaggttggctattgattgcttgtgaaaagtcattgcatcagagggataatgaatgggagagtagagctccaccacacaagatgaactggttgataagcttgccttcaagaacttgataatatttaaatgtgtcccctttatttaaagaatttatcataaatataaccacatgccattggatttacaatagttaataacaggtgtgtaaagcaagaaacaaatgctgattaaaggaatccaagccagtcgcccaaaaagcaccccttacccagagccctaggcctctgatggaaacatgataccgctttcatatcaataatgtggtccagtccagcagttgggattgcaca

SEQ ID NO: 54411 - DNA, 1678 bp, Bovine  19866881514256
  misc_feature (1)..(1): n is a, c, g, or t
ntgagaaaagttaaatgactggcttacagtcaacaactgagacaagattttaaacgcttttatcagattgcagtgctagagtcaaataagcttccaaggatgcagggggaaatgcatatttgatccacgttcaagtacaattcttaaatctttattcaaaggatgtctccaggaggtaccttggtaaatccacctggttttacattgtttctctgacagaatataatgatgggagggaaggttgtgtgttgctgtttttaaattatttccctttaccttccctttaccttttaaattatttcctttacctttcaataatgaaactcttttctaatggggaaaaaattgaaacacatccatattctatcaagctggacagcattacctcagaatacaaattgttctgttacttttcagtaatttttaaagatctctttcttattataaaattaatacaagcatcaaaatggaagtaatatatattactttagaggaagtttgaaaatgcagaaaagtataaaaaggaaaaacataaattccacaaaattcctttatttaaaaaaaacaacaaccactattactgttctggtgcattttcttgcttttctccagttttctgtatatcagatgtacacatgagcatgattacagggccctccaggcactgggggaataagccagtgacaggagaggaagagggagcagggtgagacatgttcctaccctggaagaaattgatggccaagctaatggccccaaaggaatggacttaaatgatattaggagagacacagtcagcaaagttacaattcaaaagcaaggggaaaaacaaactcagaagaaaagataaaatgtcctagtccatcatcagctccaatgtgggggctctcaggcgcacgggtgcaggttctaaggcagtctgctctgagctgagttttttggcatcaactatgccaggaggggtttagggtggtgactggcaggaaggactgcagaggagaggactggtgtgagcagccctgtggacaccctgtcatctaattctgcagcctccagaggggaacactgagctgttgagactcacccaggtcaccagctggcctgccagtgccagcactctgagaaccagcactgtgagccctggagttcgtgctttttctgattctgggctcagaccctttggtgcttagcagctgacttactaatccaagaaatctctgaggcactgaacccaggacagcccatcaactggacccagacctggccagggatggacagagtccactctccagggacatggggaacccagttccacctcaggggacccttttttggacccacacaaggaaggctaagtattctcataatggcaggcatggacgtgctaaattgcttcagtgatgtccaactctttgcaacgctatggactgtagcttgccaggctcctctgtccttgggattctccaggcaagaatactggagtggatcgccatgcccttctgcaggggatcttcccaacccagggactgaacccgtgtctgttctggctcctgcattggcaggcaggttcttgacctctagcgccaactgggaagccctaggcatggacacagtgcacaaaattgtagcttgatttctctgcttgacaagacaaatatgagaacaaagcagcccaggc

SEQ ID NO: 54412 - DNA, 1418 bp, Bovine  19866881561052
  misc_feature (1)..(1): n is a, c, g, or t
naactcgattctggaaagcaggtttaagtgactctatcactaagcctcgatttccccttcttgacatgaaagacttgcattctttccgcgctgaccgcttgtgcatctgtgatgcccgtgaaaaagaaaaggcaacccttttcttgacccctgctgccgaagcgcccacggtccccgccgcagttctgctcccagtgccccgccccccgccccagttcggcccttcgatctctttctgactgtccactgtctcagtttctctctccggctttcattctctgtctctccatctctcttcctgtttcactccctcgttctccccgcccagcccccggcctgcgggtggacgcacgtgagtcctagattgccgactcagacttttctaactgccccctccccgggattcaatttctccaaactcatcctgccctcatccgggttcatgagcttcgtgtctctttgagcctctgactaggtggaaaggttgaaggtctgcaggacctagctgtcacctgtcgggaccagctaaggactggggatccctggtgggaccaagaaggatccgtttttctgcgaagggaggggcctacctcctcactgaatccctgaatacctcatcctttggggaagctcaaggagggcaggcttctcacttaaggagagggagggaatatggttaatacccaggctgcaaggagtggggtccatatggaccagacttgtgattctgggaggtctggaaagtacatggtggacaaggaacatgtgaataacatacatgtggaaaaaccctgtgtcactcacagacacaccagtggcatgacatctcccctccttcaccccacgctcacccttggggattaaggagcccacccccaataccagctgtacaagtgcattaagtgtgcatacacacacataccatgctcttgcactcacacacacatccgactagctagaagagcaggacggaggagctgggctgaatgaggggaggggaggggagggacaggaaggcagggtagccccacccccgccccatgccccatgcccaccgtccgcctcctgcctcccggtaactggcgaggtctctgcccccttgacttttcccagcttcgaggaaatacctccctttaggggaaagcgagatcgtgaggggaagcaggggaagcactgactcgggcagaggcatgagcctgattttccagtctggggcggggcggagcgaggtggcacaggggacgcccgggtgatggggcctgactcagagccagaaccacagatctcgtccgctatattgtcgtcggggaacaagaagccaccaggtttataagaaactgcgattcatctctgcccccttccacccctctgcaagggatcacagtagactcgaggaagaacttcaggtaggggaggaa

SEQ ID NO: 54413 - DNA, 1006 bp, Bovine  19866880445549
  misc_feature (1)..(1): n is a, c, g, or t
ngagaactaggatataaaagtctcaaaaaggtcttcccaagggcacccaagctgcctggggccaaacccaggtctcttgagtttaaagttcattactttatgcttataatttttataaatatttgagtgcttcccaggtgatgcagtggtaaagaattagcctgcccatgcaagagactcaggagacccggattcaatctcgaggtcaggagcatcccctggagagggaagtcacaactcactccagtattcttgcctggaaaatccttggacagaggagtctggtaggctacaattcatggggtcacaagagttggacatgacttaacgactaaacaacaacaaaaatcattgactacagagccaaatatagcagatgtgtaaagtctcgatccttttacatatatataaatatgtaaatgaaatttaggcaaacaagaatagtaggaacggttttagaaggctggactttaggtcctaaaaaaatgcaaagcacgatagatgaagaattctggtatgagtggatttctaacaaggctctctgatatgtatcatacggtttgtcacacatatttttcctctgatcagttcatttccacatctattgttcatatctgtcaggtttgccacaaataacttcctcctgcagtttttcataatcagtcttctacatgttccagtgaataaagtgctctgagccaggtgatagatgattgtctggactggcaagcttgcaagattagtacttggagttaggaaagctgtaattgtggttcttgttcctgtgtgtgaccagtcagctttgctctaagaaaaaaatgcttccttgctcataaattgcatttgtcacaaggcaagtattcttgtatgggaaatcccatggacagaggagcctggtgggctatatagtccatggggtcacaaaagagtcagacacgacttagcagctaaacaacagcaacaacaaagtctttctgaagatgttcagtgtggccatgcagcacca

SEQ ID NO: 54414 - DNA, 1268 bp, Bovine  19866880496380
  misc_feature (1)..(1): n is a, c, g, or t
nactctctttatggttaaaaattcttgagtatataattttatctgtattaagacatttcattttcggcaggagactcataaaagcagaatacatttcggttctagagtagagtagtagtttctggtatcagccatcagtgtgcagagaaaaatgccatctgaattacgcttttcactttatagattcagattggcaagtttatttctcaagttgtttatttctatgtactctcctaataatcagagtaagatgccaccatataagaaacagtatttgggttatagccagcttataaaaaccctagctttataccatagaagtggctatctaagagaaaaatcagtgtcttttatacagttttatccattttaaaataaaaatagaattctttactgtgacagctaggaatgtttagtacttctaaacttaaaaaaaaaaaagtgatacctaggcataaaaacaagcactggcatgcagttggtaccagtttcaccaagttctaacttgcccagtgtgtgctttagatttttgctcatccgtttacccttagttcagtacggaagttgcacctcaaattaaaattcctttccccaaatcttccttcatagttttatctgtcactttcgtaattaaaaaaatatcttcgtactatagattaaaaattgctttttgttgatgtatgatttgtatttatttgattacgagggaagtagaaatcactttatgtgctttttggctatttctttgtacttcttttgtggaatatcctttgccaattttaatactggtgtgtctgtattttctagtttaggagtgaaattagagtgggcagagagcttttattggcaatatactttttctttacatggtgaatggaaccacttttcttttacaaaattcaaatctatatgtccaattaaaatttttttatgaacgttagtagtgtatcaaattttgccaaaattaatttcctctaaaatatgcaatgaaataaatgaaccaattgcttcaaaacttaatgcattctgataagacagagatcacctattttttttagtttgtcttaaattgtattttagaaatatagtaattatttacctcttatatgctttaagtgtgttttctttcttgagcaggaatttgaagtaatttatacaacatgtgttagctgaagtttttttgtgtgagagatgggttgagtcctttttgacatttatttttatgaattatatatctattatacacacggacatattttatcacttta

SEQ ID NO: 54415 - DNA, 1330 bp, Bovine  19866880583545
  misc_feature (1)..(1): n is a, c, g, or t
ncacatgtgctcaagctcctgtaagcagttctctgtgcactgatctcagagagtcagaaagccataatggatgtactctgcctgtatctcatcataataatgagacaatgccccccctccaaacttgcaggaggaagagaaggaggaggggagacaagccctcctttgtccccagagcacagcccgcaagctgtgggagatgagtgtccatccaaggtcctagtccaggtcaggtccttcatgctccctgtggagagcatggagggggtctgctcccagatcatcacagaaagctctgaagttagagaagcacagttgccaagctgtcacaataatgaactccaagtggtttccgttgcaagtggtgctccccagaaagaggaagtacagggcaataagggcacatcacccaaacacattcactgcaaagaggaacatatagtaaaatctggcgcacaagtcatgccgcctgaatcagaagcaactctgcctgtccaggctcaaagtgaggacaacgaaaaacccctgaaggctgaatccaccgccaccagcctccctgacaacagaagtcatttagaaaccccccaaagacccagtcagagtgctgtgaatggccagggcagtcctgccagtcttttgaacatctctgctggtagtgatgatagtgtattcgattcttcttctgacatggaaaaattcactgagattataaaaaagatggacagcactgtgtgtatgccccagaagaaaaagaagaccaggctaccaaactcccctgcccctcactttgccatgccacctattcacgaggacaatttagaaaaggtgtttgatcccaacgtgtttacctttggtttggggaagaaaaaggaaggccagttggaaatgtcaccagctttacatttgatgcagaatcttgacaccaaatccaaactgaggcccaaacgatcatccactgaacagagtgtcctcttcaagtccttgcagactcatactaatgggaaagatgagcccctggcagctccagaagtcaatgacaaagagaacaaggatgtccaaaatggtggagtcaagagatcgaggctagaaaaaagcgcacttttctcaagcttgttatcttctctaccacaagacaaaatcttttctccctctgtaacatcagtcaataccatgaccacatctttcggtactgctcatagcagttctctttctcgaccttccgtgttgcagcctgtggctgagagtgccccaccctgtagtacagagaaagaacaaccaagtctgccagccagtaacttaaagggtcttcaatttcaactcgtcagatacg

SEQ ID NO: 54416 - DNA, 1603 bp, Bovine  19866880669314
  misc_feature (1)..(1): n is a, c, g, or t
ngaatttatcctaaggaaagaattatcaatatatacacaatagaccatttatccagcaatgtaatcagaatgatgtttgtaaaaatgaaatctgaaaatatcctatctatcctttgtgggctttataaaataaagaatatggttctattttggtagagcacctatgatcatgggagcagaacacacaaactattgagagtgttacagctgtgtcaaggctaccttttatagttttgttttgttttctctctcttgttttttttaacaattttattaaacatgttctatgttactgtttgtaacaagaacaacaaagtatgttgtatgttgtttttaaaaaagataaaagtagttttctctgactcaaaggagctatcagacctcatctctgatcttttcttgttatctgagctcttgcctggaaactcccatggacggaggagcctggtaggctgcagtccatggggtcgctaagagtcggacacgactgagcggcttcactttcacgcattggagaaggaaatggcaacccactccagtgttcttgcctggagaatcccagggacgggggagcctggtgggctgccgtgtatggggtcgcatagagtcggacacgactgaagtgacttagcagcagcaggagcagcagagctttatcttatctgaatttgcccctttattctgttccccttcccctgtctcaggtagtcaaaaaatcttagattcttaattctccacgcctaacactttgtagagccctaactagtgtatctttcaaacatgaatttctttcatttcctactctctgcattcattgtagtcactgcctgagtttagattctcatgatttctccttttcttcagtgatcttcctccctttgtgtcctcaaccatctgctgattaaatggctaaaacacaaatctgttctcattactactgcttaaaatatttcactgaatccccactacctaatcagctgttggcaaaccttgtcggtaaagggccagatagtaatattttaggcttttcaggttactgtcaactacttgaaagcatctaaagacaataggtaaatgaacaagtgtgtctctgtgccaataaaactttattagaaaaataaataggtggtgggccagatgtagccaccaaccacagtttactgaccccagctcaaaagaataaagtccaatcttgattgtatttactttttcatatcacattctagtctctagtccccagtgtctccactttagactcttaggtcctcattcatttacattgacttacacttctatgcaatggaaaataaaagcaaaaaaacagtattatttcctcttcttgaaagaactcttctttcctgaccccttgacagaggcttatttttctttcaatactaagatttgacggcgacttagctgagaaaaatttccctgatcacttacattcttcttgaccattttaccgtataaactttagttattgtgcttatcacacagtccattcagaaggagatcagccctgggatttcttggaaggaatgatgctaaagctgaaactccagtactttggctacctcatgcaaagagtgactcatggaaaaga

SEQ ID NO: 54417 - DNA, 842 bp, Bovine  19866880731188
  misc_feature (1)..(1): n is a, c, g, or t
ncctctaccccacaagtcaaactatctgcagacattaccacatgttccctggttgagaggaagaggataaaattgcccccagttgagagcactgctgtagagagatactgtaaaatcttttaaattttcaattaagataatagacgtgcctatatttaaggatttagagcgaaacagacctagttgggaatcctggatcctctgcttgcctactgtgtaacattaggaaagttacttaacttcttagtctcaatacttttcattaataacatgaaggatgataatacctacatcataggactgttaaaagtgttcagtgagagaacctttggaaagcatctagcagaatgcctgatacataatgaacatttaataaatatagattctccaaccagatctccagtctttaatattattgtatccagttcacaatatctagtattgtgcttgtcatgccataaatgctcttaaattagttcagtctttttagctacctactaacaatttaatcattttctaatatattgccagaagttctggggtacacatttttttaaaaccatctatttggatgttctgatctctgttttgactttttccaattaggagtatcttacgccagaattgtcaagtgaagtacaatctctttggtccaaagctgctaatctctttgagtctgagggggccaaagtaactgaagtctccctgccccataccagctactcaattgtgtgctaccacgtattgtgcacgtcggaagtggcatcgaatatggccagatttgatgggctagaatatggtaaagtgcctgtgttttggacttgaggaagttttctcaaaca

SEQ ID NO: 54418 - DNA, 2829 bp, Bovine  19866880791558
  misc_feature (1)..(1): n is a, c, g, or t
naagcatcactttggcttctgcagatgacagcttccccggcacaccgttctggtgactatttggcatcaccttcttttcaggcagctccatttccttggcttttttggctaaattcagctttgccctctcgacaaatgttttattagacgcaggagtgttcttcaaacctcgaatgtcagtgtgtcttgggctgctgtttgcccgcttgttttcaaataaggagattttggtggcagtgtttcctttgtgaactggctggctaaatggattatgctcacttcccaaactgtcaagattcttagagtttttaagatttagttccacgtgtttgggcctggcagggctgcaagaataaaacagtatcaagataaatttattgacctaggttttaaagcaaacacagcaatttactacaaaactgaaaagccaacatctgataggtaacattttatgaaattatttttaaaccatcctatatatactgtcaattatctttaatggatgtttcgctttcttatgagggatgagaaaattatacagctaagaaactctagaggtgagaggttaacaagtttatcataagcacagtgcttggcactagagttggcccaaagaacattagaacaaatttgaatacttcgtgcactcccatactttaaatatgtatgattttccccagaaccaactgtactacttatcataactttttaattttcattatctcaaagagctggattataaaaaatatttattatttacctcttcgaacagtttattcccttcatccttcctccataaaatttttctgattacataaagtgtgttcactagagaccatttggaaaatataaagacaaaaaatcattcataatcctaaccactcaaacaatatccctgtcaacattctagtacacttcctgtcttttttgtatgcatagggaaatattttcaacaaaattgagattagtctgtttatagagtttggcacctccccttgaatttaacatttttcaagttactaaaaacttatttgaaaagtctttataacgtctgcacgtaaaagtccagcgtatagatgtgccataacttactcatcattactcaactgttggttctgccaccatttgttctcctccctttctcacatttcttgggtgtaattgtgttgtgcagcgctaagtctcctcagtcatgtctgactctttgtgacctcttggaccatggcccgctaagctcccccgtccacaggattctccaggcaagaatgctggagtgggtcttcccgacccagggatcaacccatgtcccttacatctcctgcattggcaggtgggttcttatcactagggccacctgggaagcccatgaaattaaaagtctttgaatgtatacagttttctttctgaggaaaaaaaatgtgctctggctcttacgctaattatctgggtgaacttggtcaagttactttagctctctggactctaccttcatctataaaaactaacaaacgaaaaactagatagtttagaacagaattggttcacacacacacacatattatggttgaagacatccttgtagttctcttcaagggttgccgttagggacagtagagactgggggatggaactgctggccagcaaccctccttgcaactagaatcactctgacttatctattacatatgtcacttttacataagctttccaagaagaacagactctaaaacaaaaacaaaaatatgtctaaatcattggtctagtggtttataaaaggtaagagataacagccactaacattcactaatggccaagcacttgctatggcctgcctcatgtgcaattttacacattctctcttaagatgaggaaattgaggtctagaaaaggtaagtaatttgcctgaagtcacacagctattaagtgacagaagccaggtgttcttgtttcagatgccatgttcctaacaacgcttctatcctgttttcccaggaaaacagtaaccttctctagttctctccagtcttatgagccaaggagccagtaaattatcatgagatctataagataatcatactttagaggccatcttgataaagaaaatacaaagtagagaaatatttaagatctcacactgtctcctgcatggactcactggccttcaagaaggtggccctgatgagccctttgaaggaacaggcaggatgactttggatgatgacaccttatccttctagataaaatgagaagaatgagaagacttgagaagtccttcctaaatacatcatttagaattagattttaattttttagttaaatactaaatttgctatattctcatgaatttctcccaggcattgctttctcctgtatcttgagatatctaggctcccccatggtggacccatatctgaaatttaaaagaaaaattaacttataagcacttccttaaattctaaagccagtgagataagtaagagaacttacaaatgttatcagttaataagggatgttcacatatcagggaatatatattttaaaaattctcactgatcacctcaaggaacttagtcaaacatcaaagcagaccttatgatgtaaatggaaaacactctaagttagccagtaagctacattaaggacaggacacacatatctgcacattaaagatttacatgaagatcaaaatacattttacaaccaaactttctgtgctattaacttctgctaccaagagtcactacaattaacctggttcaaactgattaaaaggaaggctcctataattcatgttgtaatgccttcattaagatgtgagaagggaaaata

SEQ ID NO: 54419 - DNA, 4171 bp, Bovine  19866880877764
  misc_feature (1)..(1): n is a, c, g, or t
nacattctacctatcaaatgacatgatacacagctataaacaattttgttgttcagttgctaagtcgtgtctgactctttgcaaccccatggagtgcaggacaccgggtttccctattcttcactatctccctgagtttgctcacactcatgtccattgagttggtgatgccatccaaccatctcatcttctgttgttccccctctcctcctgccttctattttttctggcatctttccctttgcatcagctggccaaagtattggagcttcagcttcagcatcagtccttccaatgaatattcagggttgatttcctttaggattgattggtttgctctccttgctgtccaagggactctcaagagtgttctccaacaccacaattcaaaagcataaattctttggtgctcagccttctttatggtccaactctcacatccgtacatgactactggaaaaaccatagctttgactatatggatctttgtcggcaaagtgttgttaaataaacaacttattcaaatccaaatgcattttagactaaaacttaggagtttttatttctctccttgagcttcttgtattttagttcggtcttaaagcactctattctttcctttagaattatgatgaactttgtactaacaaatgtcctgagaactaaacttactggtctgtctctgggatgtttttctagttatatcatctttatacatattttgtttactcctgagagggtgtaccggttactagtaaagagagcagctaaagcacacttagatttctggcccatctttggtcagtctcactctcttgagcaatcttccctgtttgttcatttctgtccaggatttggaggtgtgggcctcagctggaatgtgcagcactcactgggacctttgtttctatataaggatgggacagtcaggtggccacacttatctgctgggcattcaccattaattttgtgggcttttagagcaaatgaaaatgaatttatgtcctgtatatatgaccttggacaagttacttcacctttctgagtctccatttcttcagatggaaaatggagaacatagtaatactaattctgtaggactgtagtgaatatcatatgctagtttatgtcattaaatgtaaaacttttatcatacctctggatgcaaagtagaaactcagtaaatgtgaaaccatcaccaccaccatcacaattatcattattataaatgttaagctctaatggaaggaacgggaaaaaatagggttggaggggaaaaaatgcttcccctcttaagaacttagcagtccacatgttcccactgggtcatcccagtgcaccagccccaagcttcctgtatcctgccgtggtagattcatattgatgtatggcaaaaccaatacaatattgtaaagtaattagcctctaattaaaataaataaatttaatttaaaaaagaacttaacagtccaatgatggtttaaagtttactgatgtctgtattctgcaaatatttgcaacctttagtgcagatgttctaaaactcagtgaccattgcttgcttcctttacataaaataatttgaacatggctgtctctttccctaaaatgcacccaaagagtttttttttttttcaagcttggttttggtaagcatattagtatgttattttccatagaaacagagccgtcgccgtcctgagtcagcttcatctgctgtcttgtccattctcttgccatctgagggaccacactggtgtgtgtggagagggcatggtgagttttggctagagtttccttagcagccttcagtggcaccatcatttatcaggttttgaattatacttcatttgtaagcattttattcagagtgtgaattctctgtgttgtgcttagccgctcagtcatgtctgactctttgcagacccatgtagaccctttgtagccccctacagccactttgtagacagccagtctcctctatccatgggattctccaggccagaatactggagtgggtagtctttcccttctccagggaatcttcccaacccaggaatcgaacccacatctcccacattgcaggcagattctttactgtccaagccaccagggaagcccatgaatactggaatgaatagcttatcccttttccaggagatcttcctgacacaggaatcaaaccaggggaattctatatctgggtttaaattcctgttctacttactgtgacacttagctgtgtcatcctgggcaagttattatcctttttgtgcttcagtcttctcatccataaaaggggcataataagagttgttataaaaataagttagtggctgtcaagcactcagaacagtgactggcacattgtgagtgctcagtaaatgggagctatttctcctttttcttattaatatcttgcctatacttttgagtagttattttatgatttattttctgctatatgatgaaaatagtgcttcgtttttattttccctaatcagttattttaattagaaatgggttctgagctaaaggtcaattgagtgaattaaaaatgatcactctccatctgaactccaaacctagaagcaagcattaatgctctctgcaggaagccagactcaggtgatggccgtaatcctctgaaaatcagcagacttgatttcatttggaggaaaaatgcagccaacatcagagagcagagcatcctcgtttcaggatgcataggttcaagttttgagattgccaaacgtcgcctagtttttctgtctttgcatggacattttccttctataacaggaaaacaactcactccttagactctataaataactagagggttttgaggataaactgttattttatttcatgagaaaaagaaccgtcattggaaacattctgaaattgtagagtgttcatcttcatgacttgattgattccatttttccatcttttgtgactggtttagtgtttagaactctaaacaggtttaattattttctaacaaaaaggacatagctagataagtctgctgctgctgctaagtcgcttcagttgtgtccaactctgtgcgaccccatagacggcagcccaccaggcttccccatccctgggattctccaggcaagaacactggagtgggttgccatttccttctccaatgcatgaaagtgaaaagtgaaagtgaagtcgctcagtcctgtccaactcttcgcgaccccatggattgcagcctaccaggctcctctgtccatgggattttccaggcaagagaactggagtggggtgccctcaccttctccgagataagcctagatttgttttatctaatagtgcatctaaactggttaatagataccggttacttcccttatttagtttatgccaaaggcaagtctttgaatttttcggtttatattctttcaccattgataaagcaggtatttaatttttagccctgttacttactagctgtgagctcctggaggagtttctttcctgctctagcttcaattccatgagctgctacctacctcttagcattgttttggagacttctaaaatatatatttaaaattagtagcacggtgcctggaagataacagaggcttagaaatacctctgagagcaagttgcagtgacaaagccctaggttgtggtattggaaagactcagcttcaaatttgcctctgctgttaggataagttttgtacgcctcagtctttaagcctcagctttctcacctgtaaaatggagacaacaacatcccttctggggctttctgagggttaaatgctatctatataaaacacctgggccagggcccagggcaaagcaggtgctggacagatgaaaggtagagcgggagcgatcatggcagtggtgttgtaattgctgtctgcgtagtgatggtggtagcgttcataagcccacttgaccttgtaagtggagttaaacaacttcagaagtccaggaggagtttataaccaggtatatcaagacctgaagtacctctgggtgtctggaaatacctttgtagttgtaaaagggtggcctttgtgcattcaaaacttaacagtcttaatatatctgaattacgaagtcaaaggtaaagtttatatttgaggttggtggtatttctcctgaagcagtttggagtcagtttagt

SEQ ID NO: 54420 - DNA, 1263 bp, Bovine  19866881089441
  misc_feature (1)..(1): n is a, c, g, or t
ncacacacacatacacacacacaaatagaatggctgctcaggtatccaatggcccgacacatctccagcctcattgctgttagatcatagcttccccccatctctcttaatccaaaacagtctccatttaaaaaagtcctccatataaaaaagcaacactgtgtttctcagcagtgcttggtggaagagggtgtggttctgtgttggcagcttcagttcctgatgctgccacttgatggcgcccgtgagtgcagaacaggcaaagaacaagcccaatgagtgctacagaccaatggtctgtgtgtgaagcagcctggggacacgccattctctggtcctgcaagctccatgttttgtgcaggcttgaccagggcctgtacttttctttaaagaaggaaaagtccccagattggacagcaggcaaatatattttcaagccaacagtatgtcagctagtactccatggtttgaagccctatgactgaacaaactcttgtactcttcaaagcactttcaataaaaagagaaaatcctgctgtcccttacccctagcggcccttcatttcagtgctatagagtgggagtactttctacccagctgcagtaatagtcacaagatacactgagactccagctgcagtaatagtcacaagatacattcagacttcactgaagcagaagcctatttgtcacagtgaagaaaagtgtgctgtattgcttggtttataaacagcaagtacccaggaaatactctttgcaaaaagcactataattcaaaatcgccaataattttaatcacattcttctcttactaagtccatatgcccagcttcttttgaagtcagtgggaactgaactgtggcagataaaaaatatgggggaagaaaatatgaataattattaagctgctaatgcattttaaaccctagattctcattttcctctgtcatttctgcccgtctttgcactctccctaaacatacgttaaggcactaaggcaatgctgacttctttactgtgaccgagtcactctgtattcagcatctgggcacctaagggctatacagtcacattttcagtatcacaatctcacgagacatggcatcaacacactaatcaccttacaaataaaaaatatatgaaacacactacaaaacagcaggcgatccagaagtagggaactgcctttcaaatttctatattctggctaagccccagaagtcttcaaatgccagggcggggtatctggagacgcggggtcaa

SEQ ID NO: 54421 - DNA, 2352 bp, Bovine  19866881103759
  misc_feature (1)..(1): n is a, c, g, or t
natcggattcctctttaccattttcagtggccgcatggatccaatgtatgcctcctctgtatcccagaaggataagtcagggtattcaccaggttccaggataaaagggacaccctgaaatccaggctcttcataaatcagccatctaaataagtaccaaggaagaagcagacagttcatcatttctgtcagtggaacactgcaccccacagatgagagaggaccagaacaggggaggatgtgggtctggacacacaagtgtgggtgcacttagtggagcaatgttggactccaggaggaataagccattatatgcacctcttgagcttctgtttgtttccttggcttggctagctttgtccactgattttactttctattatgaactgtttcaaagtttaaatgtctgttacttccaagtaataaaagtagttatcttttgccctgtgtatgtatttacagaggctccagccaggagatttcacactttaaaaggttatatctcatttgtaaccaaaaataggatgttccacctaatcatctgtcatagtgtcaaaaattaggaacagctaacaaatatctagagcttacaaggaattccatctgatccttacaataatgctacaaggaaaagatacagtccccattttacaggtgaagttaaattgcccagggccgcacagctacaagtactaaatgcagggctgatccaagctgaccccaaaaccaaggtcctagtcattcttgaacagcagtctttctcattccagcgtgcactgaacataatttctgctttcacagtcactcaggatcagcactgggagcatgacttaatgcacagtgatgtctgtgggggctctcaaagtctaaagactgcttgttcccaggcccagtgctttttgagtccttggacttgatttttatggtttttcaataccacacccttctatcatacttgtcagctgtcacttctgctgtggtcaggcaaccagaagcatcaccctcctctaatgtgctagaaaccaggaaaccagaaaaccatgcctcacatgaactgtccctaaagactgcagtcttatcaatttcttggttccttggaggattctggtgaagtcgctgttgctggagaagtgacttctttataagagagatggtaatataccctcttgacaagcaaatgtgacatcttggtgatcacttatacccaccaattctttattagtcttgctaaagcatcctagctgggctaactgtgccaagttccccagagcacaggccacaagaggaagctggctgtaaaggtaatcttttacctacaaaatgaatctgattctcccctctttgcttttctcttgttcacagttttggcccaagggcacgtttttggtgagtttctgttacagactgtcctggataaatcagtaacttctttagacttactaattatacagggatttatagtcaaaatcctactggagacctgccaacatacacatacacacacacacacacacacaatgttgagaggccgtgtgtggtgtgggtgggggaatcaaaactaatccacagtgttagaagtcagggcaatacttacagggacaactgggaggtggtgggaaggcaggaacagagatgcagagaacagacttgtgggcacagtgggggaaggagggggcaggacaaattaagagcgtagcgtggacacattctttaccgcatgtaaagtaggtaggtgggaaattgctgtacaacacagggagctcaacccagtacaacaacctagaggggtgggatggggtgcggggctgagaaggaggttcaagagggaggggacacatgtattcttccggctgattcacgctgttttagggcagaaaccaacacgtcattgtaaagaattattctccaattaaaaataaattaaaaaaagagaatgcactacgtctttttttggagcccaaagctcttaaaggcacatcacacactgatttcatgccctagctaaataacagcagtttattataaagtgtgcttttcggccaataacaagccaagggccttgaggtctgactcttcacaaatgaacagtctgaattttttataaacacagacgatggctcatcaacaagtgattctgagattctgacatggtgcttactgaagtactctttcattaagtgttttcttctacagtttgagttctaagggtacgtattcatctgctactaaacatctcattttccttgaagcatacagcttagtcatgttaacacttatagaaggaaggtaatctgggataaagagggttttgtccaaaagcctgaacacataaactggcacacctgaagactg

SEQ ID NO: 54422 - DNA, 824 bp, Bovine  19866881194153
  misc_feature (1)..(1): n is a, c, g, or t
ncagaatttagaaaaaggatttgtttggctcttaacagatgttctccgaaggggaaaaaatgaggttgatgagaaaggcggttactggttgataaggaggcattgagaactgcctgcctgccacgtttgattttgaaatctcaggctcttcgaagcttctataaggggacaagtagtcacaatgctatagcttgtagcggattgcaaagatgcttgtaaaacactcaaagcctattaaaaattcccagcagatctcttctcccagatccttcgccactccccaccaatgagctggtatacattcaagggaaacaaagaagcaattctaaagcacaaaggagctgcccaactattccaggagtttccccaggcaggggaaatgtgcgtcctgacatgcttggctggaactgattgggaaccagactgtgttcactgagcaagttgagaaagatttgcctcaagcttcggcacattatgatgtcatcttttggcattttaaatattcaagtgtgtatcctgaaaagcctcttgctttcatttcttgtttaggttgaataaaataggcctgcttccagcttgtgctaatttaaactcttaaggcgagcttagttgctcagtcgtgcccgactctttggaaccctttggactgtagcaagccaggttcctctgtccatgggatttttagggaaagaatactggagtgggttgctatttcctttctccaagggatcttcctgacccagagatcgaacccacgtctcctgtgtctcctgtgattgcaggcagattctttacctgctgagccactggggaaacccaaagct

SEQ ID NO: 54423 - DNA, 867 bp, Bovine  19866881279286
  misc_feature (1)..(1): n is a, c, g, or t
nttcctcttcactttctgccattagagagggattatctgcatatctgaggttgttgatattctccaggcaaacctgattccagttagtgattcatccaacccagcacttcacatgatgtactctgtatagaagtttaataagctgggtgacaatatacaagcttgtcacactcctttcccaattttgaaccagtcagttgttccatatctagttgtaactgtcactttttgacctgcatacatgtgtgaagcatgccaatattttctaatttttttccctgaaaaatgctagtcaggacccacaaaactgatttgatgacccaccaataagttgattgaattttgaataaggtgtgatttaccactaataaatcattagactaaacaacaacccctaagaagattcttctttttaaaagtatcctgtggctaatactaggattttcctaatcttttcaattatcaggaacgataaagtagtatttactcggtatgcatagtgtaataatttgatggaatgtgtaattaaaagactaacgttaaatgtctggtaaggcttctagatagatccagtgccaacagcttttaagagtaagtttactaattgcttgttattttaaccaacaggaagacaaaggcatatacaattggatggatgggagggcttcaaatgcctgttaattcatgctgtggctctgacaaagtgaagatgagaaaataggaaaacactttgaagatcaacgttttattaattttactgtgggaagccaggagagagacgccgcgatcaagctccagtgaggcagtgtctccgtatttgtaaaagtctctgctctcacagaactgttataaccttcttaaatatca

SEQ ID NO: 54424 - DNA, 1072 bp, Bovine  19866881463317
  misc_feature (1)..(1): n is a, c, g, or t
nataatcctaaatcctttgtggtatccccagtttctctctctacaagttatagacaagacaaagacaggttgaacctgtcactgacacagaaaaatgaaacacagaattaacaagtgccttttgttttttaaccttcccatgtatggaagtgaaatgagtaaaaataagttactggtaagcttggcaaaatattctgtggtgaagaagttggctgctgactgtatttcttaatgttctacaccatttcaagtcagcccccctgactgagtgtcatcttttagaagccagggttatgacaatctgaagataatagttcaaataagagatttagccaacagttgcataaagataccatgcttaatacatattttaatttttccaaatcagttaataagcaatagcataaattcctgatagtcctttggattttctagttggatagttctttatcttaaaattgggttcaagaggcaaaataatatgtgctatgaataaagcaagaaaatacagggagcattcgatttataataactttagatcatgtctatgaaaacactgttttccatcaagattttattgaaagatgcagcttatttaacatacattgtgtcagacactgttccaagcactttacaaatattaactcaccacagttaattcataacatcctggagaggcaggtactattattcctattttgagaaagaatgaggcacagaaagtgaaagtgagtaaaagttaagtcgctcagtcgtgtacgactcttagcgaccccatggactacagcccaccaggccctccgtccgtgggattttccaggcaagagtactggagctcatgaggattggggctgtggttctccagctgatggtcttgagtcctgcagttaatcactacaaattaaaagcactggctagtgctaccttctttgtattcccacagtaagtatagttaagctgtaaatttggcaagcagaaattataatgtacataggaaaacaagttaacttttgatactaaacaatttctatattaagtaggaagaaaaaaatatacataaatacattaaaat

SEQ ID NO: 54425 - DNA, 1394 bp, Bovine  19866880120670
  misc_feature (1)..(1): n is a, c, g, or t
natggcatctggtcccatcacatcatgggaaatagatggggaaacagtggaaacagtgtcagactttattttggggggctccaaaatcactgcagatggtgactgcagccatgaaattaaaagacgcttactccttggaagaaaaattatgaccaacctagatagcatattcaaaagcagagacattactttgccaacaaaggtctgtctagtcaaggctatggtttttcctgtggtcatgtatggatgtgagagttggactgtgaagaaagctgagcactgaagaattgatgcttttgaactgtggtgttggagaagactcttgagagtcccttggactgcaaggagatccaaccagcccattctgaagaagatcagccctgggatttctttggaaggaataatgctaaagctgaaactgcagtacattggccacctcatgtgaagagttgactcattggaaaagactctgatggtgggagggattgggagcaggaggagaaggggatgacagaggatgagatggctggatggcatcactgactcgatggatgtgagtctgagtgaactctgggagttggtgatggaaaaggaggcctggagtgctgtgattcatggggtcgcaaagagtcagcgactgaactgaactgaactgaactattacatctccatttctgcatatgaagtgacttgttccaagtaatttctaggtagtaaaacacctagaatttgaactctaaagccatgctttggtgactgtaagattttctagaacaaatctgattgtaaaccattttgtgtttatgtttcactagatcctcaggggaaaaaggggtgcttaccttgacttttcagattttagaaacatttccggaggatcaacttgtctagtgaatgtagagcttaatttaactaaagtcttgattccaaaccctttaaatctgacctaaaattttttatccctttttatctttcaatatacgcatataattgtcctgtattctatcttgttggctccttttcagttcatctcaaattgcaactgcctggggacagaatttgaaacttaaaactaaatgtttataaatttataaagcattgctaccttttttactaagcaaaaaaaaaaaaaaaaaagttaggagtacatttaattctatggaacccaggaaagggacttgaaaactgaataagaaactttctgaaaagtcaagaactgacttttgttctcttctttgaaaagaaactattaatatttttaccataatttctaatgccaactatggcttcctttaacatttctcctgttttaaggagaactatattagcttcctaaacaacaaaaaaatccaatgagatatacacctgatataaaagtacccatagtttcttat

SEQ ID NO: 54426 - DNA, 1307 bp, Bovine  19866880354916
  misc_feature (1)..(1): n is a, c, g, or t
nttggaaaatcctatagatagaggagcctggcaggctatagtccatggggttgcaaaagagtcaggcaccaattgagcacacatagacacacacaactttacatgtatgaggcccatatctttatcttcagtgtctctatcctaaccttgttgctggtagccacgttgattttgcaggttataggggctttttaaaacaaacaaacaaacaaacaaaaacattgcaggcatgttggtttggggagagattcagggtgcacttgcaaatataggtctggagttcaagaaggttttctgtgttggatatttagggagacttttctatgtcttgagaatactaaattgaccactttggagatcttgaattcattattcctcatattaaataatggtggtggtttagccgttaagttgtgtctaactcttgccaccccatggactgtagcctgccagaatcctctgtctatgggattctccaggcaagaatactggagttggttgccatttccttctccaggggatcttcccgacccaggaaacaaacctgagtctcctgcattgcaggcacattctttactgactgcactatgagggaaaaccaaacatattaaataatagtcatctacaaagtgtagtaggaagtcaagaaacacctggagtaacaggcaaatttggccttggaatatggaatgaagcagggcaaagactaatagagttttgccaagaaagtgcactggtcatagcaaacaccctcttccaacaacacaagagaagactctacacacagacatcaccagatggtcaacaccgaaatcagattgataatatactttgcagccaaagatggagaagttctagacagtcaacaaaaacaagaccaggagctgactgtggctcagatcatgaactccttattgtcaaattcagactaaagttgaagaaagtagggaaagccactataccattcaggtatgacctaaatcaaacccttatgattatacagtggaagtgagaaatagatttaagggcctagatctgatagatagagtgcctgatgaactatggactgaggttcgtgacattgtacaggagacagggatcaagaccatccccatggaaaagaaatgcaaaaaaacaaaatagctgtctggggaggccttacaaagagctgtgaaaagaagagaagcaaaaagcaaaggagaaaaggaaagatataagcatctgaatgcagagtttcaaagaatagcaagaagagataagaaagccttcctcaggatcaatgcaaagaaatagaagaaaacaacaga

SEQ ID NO: 54427 - DNA, 1786 bp, Bovine  19866880378113
  misc_feature (1)..(1): n is a, c, g, or t
ntttacaaaaacctcagtactttactgtctatgaacacatctgagggaggtctgtatgcagctgaacatctctttgatcacagggctacatacacaaagcttttctttcctgtgtgtccgagactgtgtccatgtcatcaaagggactgagctggacctctgcatttatttctgctaaaagatctaaaggccttgctgctgtgtcaagaattcttcatgattttctggaataggggaggttgctgccctggatttctattaaatggaaacattgtttatatgatggaaataaccaaagggttatctgacaggataaagaggggattaatgtgtcaaatgggaaaattaagcaacatgagtagataaaccataaaccaatctaatcaccctataaagaagcaattctttggaataaagaaggaaatggaggggagatatatataaaaacatgtatatacaatttacatactatagttacaaatgaaatttcctctaaataaagcacacggagtgaggacttcaaatatgtatatactttgaaaaaaattgcagaagaagcctcacatcacaaaatctgaggattgggagggaatttagaggacatctggtcaagtcctctttagaatatcttcttgtatcagaaaagattcagtttttattaagaggacagagaagaaaaatgtgcaatcattcattcagttaatgcccaacatgaccctataactggcccatcttaagattcagtaacttacattttaaagtatttgttataggaatgaaaatacattaaaaaggaaacaaacttttcaaaataaaattctactttaatgttttatttatagtaatactgacagtttcatctcttaagaaataaacttcaaccctttaaggactatgagtaaaaggaaaacttttttatggtctattcaggagagaaaaatcaaaataccacacattggcatgagagttgtttaaaatttgttaagggggaagcattcagagtcatgaagacagttttaaaaaaccagcaatattcagcctggaagaagagtgtcatgttatctgtctttaaatatctgaaagaccactgtgtagaagatgacatggtcttcctctgacagagtagaggacagactagggtcagtagggggaggcttgtatgactatctttgactgaacaagaatggacatatgttgagcacttctcacagcctcctcataaaaaaactatatacttttttcttttctttttacattttacatgtgaaataaccggaagcagagaaaggttacgttacattccaaagcgacttagttggaaaatgcagaggggccatgtgaatccaggtgagatggcttctctctgggggttccctgggagccaagaatgcaagactctgtcttcactctggggaaatgtgggggctctctttggtttgtctcttggccagttaagaggactgatcctaggaccagcgagcttgaactcaaattgcaattgctgcacttgctgggagggtaagggttaggcttagttggggtaaggtccttactctctctgagcctcagctttccttctctgttatactttgcttccctgttatacatgaatgataggggtagttacctcatgggatcgctttaaggattgaatattttcataattataaagcacttaatgcctgacagtatctacacaataaacactgactaaattatttggagtttcctgtgtggatgggcctttggtttccttttttaatctacttatttgaatttctctttt

SEQ ID NO: 54428 - DNA, 1916 bp, Bovine  19866880500775
  misc_feature (1)..(1): n is a, c, g, or t
natgcaaagagttgactcattggaaaagactctgatgctgggaaggattgggggcaggaggagaaggggacgacagaggatgagatggctggatggcatcactgactcgatggacatgagtctgagtgaactccgggagttggtgatggacagggaggcctggcgtgctgcgattcatggggttgcaaagagtcagacacgactgagtgattgatctgatcttatctctaatatcaactttccttctaaataaatcaaaggggaaaaattatttacctcatgaaatctaatgacactggaaatatgggctcttattataataagctatcctatatgtaagaaatggagaaaataacaatatataataattttttcctatttctgataaggtaataacagtggaaacctatagaaatggttatctgtgaaagagcaaagggttggtggaggggaaccagtggggagccagatttctcagtaggtgaatacctttttattttgtgttcctatttcaaccacagaaatatagcatctatccaaaaatgaaaaaaataaaatagctcaaacttgccacaatgaagccagaaattaaaattaacatgaattctagagaattgttctaaagcaggctctgtcagtaaaaatattttaaatgcatgggtttttgtgcaaattttcattctggcacatacttaccaactctgagactttgcaaagttacttcacatctacaaggctcaattgtctcatttttaaagagtataaaactgtctacctggtaaggttattgcaaaaattaagttagacaacacacatgacatcttccaaacagtatctagcctttggttttattggaaataataataatatttccaacagaacagtacctaggctactggagtcccatatggatgaaatccattcattcacttatacatacgttaattcagcaaatatctattgagagtctatcatatcagatactgctccaggagcgtcagatacagtagagaacaaaacaaagaaggttcatgcctttttgaagtttgtatcatctatgtggcattgatgagggagataaataagtcccagcaaacataatattaataagtatggaaataccaaagtgtgtcagtgagactgttatggaaaaataaaaaagtagaacagggaaaagcgattgtgctgggttggagtgggtaaaaagtcaaatagattagaatattaaatggtgtggtcaggccttattaaaaagaagagtaaataagataaaaatcatcctgtttataccctgattgcttcacttttaaaaattattaaattacataggtttaaaataactcataaagttgtttttcagtatatagtcagagattaagctattctttcttccagtgcgtaatcccaactctatcctccttgcatgacactttcatccaaattttctgtaaaatcaagggcatcttgtaaaatacattctctcaaactttcttcctagtacaaaggtaagagagataatactgtcttactaagatttgcatttgcctgttgctgagtgttaccattttacttagatttggatagatccagaattcaagcatggctattttagtagaattgacagaaagtaatacgcatttaaactcagccttctgtcatgaatagttgtcctaattctgggttactttattagaaaataaaggccacattactaaatatatttatgtaatatggaaaggacctcatcaaattacatgcctagataagtatgcatacttaacaaatatcaaagatgaaaataaaatccaactgatgaaaataactacttattaaaagtgttcattacctcatgtgaagtattctttaatgtcacttcttgccagcagatgcaaaaggaaagcagacctgtatacaag

SEQ ID NO: 54429 - DNA, 1280 bp, Bovine  19866880625201
  misc_feature (1)..(1): n is a, c, g, or t
ntgattaacagaaggatatctgagaagaaaattagcttcacagttttctgaaaatagattttatttaccaaaagtaagacttgttagttagaagtcttagaatgtttattttattatattaagttgttagttacttggattgatggagaaagctaatctgaatgataagtcttttatttttgtcttctgaaaatcacataactcacattaggttgacaaatcactagctgttaaaagttcattctttagctgatcagttatgttacttatctactccaagaaagactgtgttctgaaataatcaaagagcagtctgtttgctgatgtactataatcacctgctaagctagttagaaatgcatacattatatttctgcaaaaagattttgcagaaaaagttcaaattagaacaaaaactttcaattatttttaattgcagaatttcttcttactaattgcttagactatgtatctttccctatatgttatataggtaatagttaagccaaattaattacaaattctggatttaaagtcttgaattaatgagcttttactgaaatttacattcaaaggcttgaatctaagcactacttgttctaaagtcaatatattctctattacaacaaaacttgcttgtataactcggaaatatcaaaattcatgatgcttttatagaagacattgcaaatacactaaatgtctgtgatggaaagtagaaaataagataggcttgatttaaattcattcaagagaacatcactgaagagagaggaccttttcataaactggtcttggttccagagtaacttattaattactgttttttaatagggagtatatctgattagttgagtagctgttgttcagattatcatactcagtaaaagtctttcaaatataacaaatatttccattttcttagctttggcaaattttcattttttttaagtctttgtttttccattttgcagcttgattagctcaatgattcccttttgtagaaactcaggagtcttaaaggatgaattcctttatgcgcttttcatttttttcaatagccatgataaaggataattttagacaaagttgtacaaatttagacaactattttaatctcgccagcagaccctaagttaaacagatgtatgctgccctcttatgttacatttgagtaaaggcaataaacaaatacgaacacttgggagtctagcttgctttttcctattgccagctcttcatctgtggaatggcaagcctcagaattagagtttttaaat

SEQ ID NO: 54430 - DNA, 1842 bp, Bovine  19866880708521
  misc_feature (1)..(1): n is a, c, g, or t
ngtttgaattgcagctctgccgtatagtttcatcacctatacagtagggctaattaatgcctttttgttagggttgttacgagaagggtgcaaaataacacacaggtgtaattactaatataacattaattttatcaagacatggaatggaatgattgtgctgttgctgctgcagctaagtcacttcagttgtgtctgactctgtgcgaccccatagacggcagcccaccaggctcccccgtccctgggattctccaggcaaggacactggagtgggttgccatttccttctccaatgattgtggtgttaagagcagataaatagctttgcccttttttttttaatgaacatttatttttagccacataataatgtttttttcttttttgagaggattactaattttagctttataatagattggttgatactatgattcttaaagctgttctcaatttattgtatgaatgaattaatttaaattacttgatttaaagtcaagaggtataaatctgtttttataaaaactagcagatcaaagtgtaaacagaaaactaaggggaaagaaagcacatatgtatgaaattttatttcagtgcaatccctgaaacagatttctagagctatattcatataatatctgaataaacagtgagaaagtttagctaattataaagatattaaaaatctacaatgtacaatgtcaaataatcagaaaatattccatatgaattttctttttctttgcctgccaaactgctaaaacattgaaaaagaagatgtccagaaccagagccaacatgcatatttgggtacttccagccctggtacactgtagcagggcagaacaggtccagtttcagcccagtggttcactggcatgtggtcagtgtgaagtttcctgctgtactcttctgagctagagagaaggaaccaaaaatgctgacatcctcatttggcttcatcagttatgcccgagcacatagagcaacacttcctgtgcaaaacctacactgactctgcagaggacactctcaaccttcagctgatctgggcggggatgctggcataggttggtgaaatttggaaagtgttagccattggatacttcttcacatcacatgaacgtggcatgtctcattattatacctttcatttcatagaaataagctttcaaagcttgcaatgaaagcttgcaataacaacattgattgacaggaagagcttgttgtaggccagttattagctctcaaaactaccaccccgcgaaagcatgtttaagaaagacctaatttagaaataaaatgccatggaaattgaactgaagaaagcctatgagaatgtctgaaatgtatatatcttgtctctttaatatcaatacgtctatatctagccttccttaacactcttgatctcagttttcttatccatacaaagggaggatttctaaatttctaagggtttgtaattttagtgtgtgtttctccgagtagttttctccatgttttgttttattctacctatcaaaatatcctcaagtactttaagttagtacatgactttcaattctttcagaaacacaataatttggaagaagtgatgttataaagttattctgagtctagattattatagtttgattctgactataccatctaaacatcacatgaaagggaaattagtgtcactacgtaaatgttaaatccatgtgatgataaacctttagatgtttggacaagtctgtgttatatatcatctaaaacattaaccttgattagtaatttatcttataagcatgacaaggatgggaaatttgctcattggtgcctcttctttaaatt

SEQ ID NO: 54431 - DNA, 912 bp, Bovine  19866880833968
  misc_feature (1)..(1): n is a, c, g, or t
natgaatactggagtgggttgccatttccttctccggggatcttcccaaaccagggatcaaacccaggtctcccgctttgtaggcacacactttaccgtctgagctaaactgatgcaaaacacattgtagctaaccaaatccaatatttttattttaaaatactaaataaactatctttatccagtaattgaaaacaataagaatttgaagctagctttttaaacatatttacatcttatattatataaacatcttatatattataatctctagtaatctatagaaacttagaaattttaccccgaaatgaaatacagtagtatttataggacatgtctcacaaaacagatgccaacatcagtagctcagacagttgtccagaaggaaaatggccttcagcacacacgaaagatgctgcatgttggtgatccaagtgtgaaaaagactgccgtctctctgctgaggaatttgtctcggaatctttctctgcagaatgaaattggtaagtgagtatgtgtctctatatgtaatgtgtctgtattgaaaatacaaatgcactaaaacaaaaacattgtccttatcccattctttttacaatgatgagttttgtgaataaaaagcaaaatgtgataaatagaactgggttttgtgtaccgagacatcaagagtatactttcacactggtttcaaatatgatttttcttagtatccaacttcatttttgttccaattactactgaagagaaattttaaaccatactaaaaatgaacaagataggtaatatatatgatatttcttggccctcagctctgccatccgatgacatcttttttaaaccatgtctttcagaatgttctgtgtaatctgcttaagcaccacccttctaaaacattaaataaacacacacaca

SEQ ID NO: 54432 - DNA, 692 bp, Bovine  19866880938050
  misc_feature (1)..(1): n is a, c, g, or t
ntaagtatgggaactggaccacagttacccaaatgttaacaagctctaacgttataattgttgttgtggttttttagtcatcaagtggtgtccacttctttgtgatgccatggactgtagcccaccaggctcctctgtccatgggatttcccagacaagaatactggaatgggttgccatttccttctccaggggatcttcctgacccaggaatagaacccgtatctcctgcactggcaggtggattctttaccactgagttgtcagggaagcccagcattataataccttttaagttcactgtcttactgaatcacccaaatgtccctaggagacaaggattgttatgctcattttatagattatcaaactgaagcttatccagatttacttgtgtataaggcataagaatttggataggtaaatatacagagcataattcttttggaatgatgtaccttttgattgattgacctaccagaactgaaataaaaaaacacactccaattcaatttgtagtaacaggagtatcgtctcttctgcatttttaaaatgtatatgtgtccaaatgtgaatgggtcaagttcatcactggcattgccttgaagtcactcaaagactttcttttaccattgcaggtagaacgggaaaaggccattcttctggccaatctccaggagtcacagacacag

SEQ ID NO: 54433 - DNA, 1543 bp, Bovine  19866881076296
  misc_feature (1)..(1): n is a, c, g, or t
nataatagtgttataatatcataacaatagtgttataatatcaataatagtgttatcatataatatcataacatttatagtactaatttgtggtttgttgccttgattatttaggtcaagttctgcaaaccttttctgtaaagggccagataataaatattttgggctgtgcaggccatatggtttctgttatagatacttaactctgtcaacctagcaaaaagcatcatagacagtatacacaagaaggagtgtggctgtattccaataaaactttattaactcttaacttttacttccaacccacagttttaatcagtcttcaggtagggaaaaatgttggcctgtattccatttatgaagaagaaatacactttaggcctttgaagtctgtagcaagttgtgattgctggatttagtagaatttttgaatggaatagagacctgattccctgaggtcatttattattatcttaatttcttagagtagatagcaagactttatttaaaaactcaaaatatttcttaaacttggtcttgtgacaaatagggggtcattaatgatttaaagggtatgtttagtttctcagatcaatatttcacttcatttggatttaagatcactgtagtgcttgtatgtcgttaatggaatctttggctaagcagattgaatactaatgagtcctcatagccccggaaatactggaaatacagctccaaatcatgagcttatttccagtgcaaaatacaaacaagcctgacagcagggccatgagttgtagaggaaagaacactgacctcggaatcaaaaacctttttgtgactcttgtatttatcactgtttactaaccttactttcttcaaccataatatgcagatatctgtcctacatacgttttatggatgctgaaggtgaagactgctgttacttttcacatgatatgacatatgtggaagtgccttattgccttactttcttcaaccataatatgcagatatctgtcctacatacattttatggatgctgaaggtgaagactgctgttacttttcacatggtatgacatatgtggaagcgccttattggagaggcctgggtcaggtttagcagaagcgacagctgtgtagctgaaagctaagcaagactagactagcatggagtgagcctaagggactctacctattggtttccagagggaatatctaagagtctactaaagagacttatcctagagcaaagataacggaaatcaaaagactgaagaacaagtaaggaggtggttcaaagctgggaaaagggaagtctgggagtctgtctatgttcagtgactccaactaagattctcactcttgcatttttcttaatctagtatgtttttttttttttttttttttttaatggcttgggtatttggaagctcctggctgcacagtattcgttgaaatagaggcacagagtcagggctaatagctatactataacagatgtaatcactttgttacttgctgagtgaaaaccaaaagataatcagctagagtccctg

SEQ ID NO: 54434 - DNA, 1503 bp, Bovine  19866881279341
  misc_feature (1)..(1): n is a, c, g, or t
ncttcggctatgatgaaaaacccttctggtgttgaaacatcctcattcattatcaagatatacaaacttatatcttcacttatgcaactcaaagactggagtatattctaggcctcagtgtgagtaatttcattgttcatacaggttcatacattgttcatacaggttggttaagttcgtggaatattttatttcctaatccttaaagactaacacagaaaagcatgatttctaggtttaatctcttttaataattatgcttcatgaaaaactaaatgctaagtttcctatcctgtccttgctcttatatcaggtaaatatatcattggattttttttgttgttgttcaggaagcaaattctataaaaaaggagaaaagttagaggaagccatagacagcattagaattacactacaaatcatttctttttgaagaaaaatcagtacgtgacttttcagaaagtttataattcagtgtttaaaattttaaaagtttaaaattcatgtgtttccatgaaattaaatttactcattagccttgttttaactcagtaaaaaaggtagcaatgtcttataaatttatcaacttttaaattagtctttaagtttcaacttctgtccccaagcagattacagcttgagatgaaccaaaaaagttaagtaaccaacaagataaaatagaggcaacaagataaaatagtggatacactaaaatatccaaacatatgagaatatcaaaagatattccaggaaggcaagttttcaggtcaaatttaaaggatctggaatcaagatttagtcaaattaagctctacattctttaggcaagttgattctccagaactgtttgcaacatctaaaaaatcagatcattgatttttcttgatttccttaatttcatttgatcacttgaagatcaagtaaaacacacacatacacacaaaatggttaacaatcagatttgttctagaaaatcttacaggcagcaaagcatggctttagagttcaaattctagctatttactacctggactatttggagcaagtcatcttcatatgcaaaaaactggagatgtattataataaaacctcagtcaattataaaaatctaaatagaaaaaagtcattaaacttttatatagtataagctgtattgctatgttccaaagtagatttgcatgtactcttctgggagtacagttaggaagaattcacttattgacaagctttttaatgtcacttcatactagcaactttatttacaaagtaagaacatacaggtatccattgtaagtcagagatcatctctacatttcagaacttcactcggtttaagggccaacaaaaggaggtttcctctttctgtacctatcttgcctgtttttctttgtacatggtgtgtagtactaacaagtgcattaccatagcaggtaatgttttcaatttcaagtttgctggtaaaaaggtgcattgtaaggttctgtcccctttacaaattaacaa

SEQ ID NO: 54435 - DNA, 978 bp, Bovine  19866881749137
  misc_feature (1)..(1): n is a, c, g, or t
ntcgtctccgactctgtgagaccccatacacggcagcccacctggttcctctgtccctgggattctccaggcaagaatactggagtgggttgcccatttccttctccaaagcatgaaagtgaaaagtcaaagtaaagtcgttcagtcgtgcccgactcttagcgaccccatggactgcagcctaccaggctcctccatccatgggattttccaggcaagagtactggagtggggtgccattgccttcactatgtgctagtactgctttatatctgctctgtaagttttcttgagctgaactttctctaaaataaattctctcaccttcgtggggtctaggattcatgaatcttgtgctgtcagctttgcattctcatgaagagatttgcactgcataaattacttagaaaaatttcttttccaagtttataagtatatagcttctcaaagactttggttaagtaaactaggtaattgctttctttaagtacatacgctgtatgtaatggaaacagcattagcctgagagtgaaaaaacttggatccttgttttagaaaagacactactctatgtatcattagacaatatcttacacatagcaggcactcagttaatgcctggggaattgtagttgctaagccattattgtgaaggattttgatgttgtaacactaccaccttgtgggaaatttgagcatgtgagtcaaatatttgagaactattttcaaacagccaaacaataaggcagaatttcttgataattagagtcacaatatatgaacagatgatatatgaaaaaaacatttatggtcaggtcattttagaaaactcaggataaaacaaataagtatttttttttaatgtgaggcttctcaaagcatttttcacctcataatgtccatcttgtaatatttttagaattgtgaacttcacctataatcgatgagtatatttcacaagctatagaattttctcca

SEQ ID NO: 54436 - DNA, 750 bp, Bovine  19866881852001
  misc_feature (1)..(1): n is a, c, g, or t
nacagaggagtctgatgggctgcagttcatgggttcacaaagagtcaaacacaacttagcaactaaacaacaacaacaacaacaaatgtgtataggagtcattaccagctgtccaagttacaggcaatacacagaatgtcatcagcttcttgcacttgatatgacttatattcatttaattgataaaattggtaaaaatagctaaaatctatttttaaatgtgaggtaggtgccaaacactagggaggcacattctccagtgagcaaagctgtagctggatttcagcatttatccaagtatggtgtgtctgaagtttcttctttctagactggagcaagtgctgaaagccaaggggataaaggtgacagggtaatggaatgggccagagggatgtgagcagaagccagccattcatgccacccggacaaggcagtggaggtttccactagccacttctgacccatgctatcatcacaggtagaaatgaaattgggccagtaagccatttcacatcatattttgaagaaggcaacttgtaagttataaattaagaaatgaaatatctccatagttaatctaccgtttaaggagtttatagaataggaattcagccatcataaaaactattgacagaattagggaaacacaagagttatcggctgttttcaagtaagttttgcctttctgcttttgaaatagatgatcaaatagatgatctgctggtccagatctaattgatagctatcatt

SEQ ID NO: 54437 - DNA, 1308 bp, Bovine  19866880374327
  misc_feature (1)..(1): n is a, c, g, or t
nataggattttccaggcaagagtactggagtgggtcgccattgccttcatacaacaaaagttgaaaaacttgtttcaattaacaccaaccaaaaaaatttttaaagactaaaatatgaaatctgataaatttagaatagtttcacaaagaaagtttacatttagttctataaaattactgtaagtgtacttcaaaactatatttttcctcaaaagcttcagttcagttcagttcagttcagtcgctcagtcatgtctgactctttgccaccccacagactgcagctcaccaggcctccctgtccatcaacaactcccagagtttactcaaactcatgtacattgagttggtgatgccatccaaccacctcatcctatgtcattcccttctcctgccctcaatctttcccagcatcagtgtcttttccaatgagtcagctcttcgcatcaggtggccaaagtattggagttttagcttcaacatcagtccttccaatgaatattcaggattgatttcctttaggatggactggttggatctccttgaagtccaagggactctcaagagtcttctcccaacaccacagttcaaaaacaaagggctttttaagaagccctcaaagcttagagctttttaaaagtgtgattgaaattattaatattgtttgcaaacatttaacagcgtatcaatgctcctttacattatttacttgtttataacctaattcatctttactaaagagtacgttatagactttatatgaaaattattataccaatatcccataaaatatgagaacattcagtatgttagctttttaaaccaacttgtatagttaattaagacaagcaagtccaattatacatagcaagagacatgagtcactttatctcaacagaggataatcttgcctcccaagggccatatggatggaggcaattgtgtctactaccggaatcgagtaggtagaagctacaaatacagctaatacagcacaagacaggcctcccaccacagagaattatctagtccgaaatgtcaatagtgctgagaatgagaaatccttaaataaggtagtgaagattgctacatatacacaagtcatcactaaaattaagatttattataccagtaatcactcaaagtttgcctttagtgcaaagaagaatgatcaaatacctaaatatacaaattcacaaagaagaaataaacattttctgtgttatttctgtttggagtacatttgagtttaaacacatttttcattaaagattcattaaatttcttttaaatgctaggcttctttta

SEQ ID NO: 54438 - DNA, 4191 bp, Bovine  19866880517809
  misc_feature (1)..(1): n is a, c, g, or t
ncttctttaagaattccatggactgtatagtccacggagtcacaaagagtcggacacggctgagcgactttcactttcactcgtgtcttaatctaaaggttggcaaattacctctggtgggtcaaggccaaagtgcctcagagtgttgcttacatttttaaaaaggttggggacaaaagaaacacctgtgacctgtaaagcctaaaatgttttctcctttacagaatgagtttacctacttactcctgtcttcagccaaagtaggattgaaaagaaataggttcaagtgcaatatctaggggttttttgttgttgttgttgttgttctcatagttcgtagtgcagatcaataaaatgtttggaaacaattttttattgacacttttcttatgtataaaatcaatttttcacccaatgtcagagctgttaaatagaatataagacaaagttctcagtatctgatcaggtcctaaaccagtgctgttcaagagaatgtttgtgatgatggagatactctgtatctgctttatccagtgtgggagccagtagccacgtttggccattgagcacttgaaatgtagatagtgtgactgagggactgaatttttaaattgtatctgtgtttgggtgcatacatagttgtgtccaactctttgcagccccatggactgtagcccacgaggctcctctatccctggaattttccaggcaagaatattgggttgccatttctttctccaggggatcttcctgacccagggatagaactcacatctctggtgtctcctgccttggcaggtggattctttaccactagcaccacctgggaattattttaaagagccatatgtgactcaaggtgactgtgttggactttgcagacctaaactgtagatttcaaaaaatttctttgtaatactctcagataatgtcaatgttgatatcttacatttttattaataacactgaaatgaaatagtagtgtatttgtggttatacataatggtttatgtttatttctttattcttatatgcagacaacagaagatattcctacttggtgtaagcagtttgcaactttttgttcagagtaactggacgggccctcttgttgatttacaccctcaggattttttgccatctgttttgtttcagcagttcagtgaggtacgcttcttggaaatgtcatatgtaggtattattgtgtttattctttagaaatggatctttataagccagagttaatagtaggtaagagagaaacatgacttcgtggcttgtacagaacctactaagaatacttgttcattgatcagagtttcatgtaattcagaagttccggtgtcagtctcaaactcctcttcaaacgctcctcattttatggagctctgttagctgctctgtttattaaagaatggacagctgcaccagtcctccagctgcatattttaccacagctacacaaagatactttctgaagaagtagaaagtctggagatctgtttaattttgttgcagaaaagttttgcagctgtgcttagaacagttcctggggaggtttcctttgtgtcacagatacacttatttgtatgtacttagagtgtgtgcctcggagatgccccatggtgataatgagtcttaatatccgtgtatggagataatgttactcacctgcatccataggtcatcagtacggcttgcagtttgaacacctcagttgtgtttgagcacatgtacccagggcttgggggaatgtaacctgccctaagaagaagaatggtaactgagttatccagccacctcagaggactggagcataactgttaataactcagcctggaaaaagggcaccttaacatccagaacttacgcagtcaaaaagacctgtttactgtttcctgttttctcagaattagaaatagctgatgaaaggggaatggagttgttagaaatcagtgttaataatttgatgagaatcacaaagcagtcataatctgaagccatggcagttgtagctgtacagtcagtttactgagtcataatgttatattgtgatagaataactaagattcatagtgctggctcgaaatcattactgaaacgttaaaagcccttgcatattttatgtctaagaagggaatttaatctataccttacaaaagttttcatccaagatgattacaagtaaaatccccaagattttgacacttaaagagatgctttgattatccaggagtttatgtatatggaacatctcacttcctctttgtgtatgaaacactttctggcctctgttgctgcccagtgcagggtagaaacctaccagacaaggttgcagatacttactgagcactgatgtgtggttggagtggtgcttcattcccatgtgttgtatcagtttgacattttctgttgatgagaagacggaagctgacagtggtaagagaaacttgcagaggctttatagctgggggattggaacccatgttttctgggtccaaatccagtactctttctgctgtgctagtgtggaagcacctgtggagtcagatagcaattcagacagtgcagaaatgggttacatgagagagtcaaactgtaagaagcattgaaatgaataagacatgtgaggaaagtgatttttgtctgagaagaccttttagtcaagagtggaccttgaggtagaacctgaagggtgatgagggcaatggatcagtagagaagaggaggaaatacgttctagatgcagtcacatgagcacaaatttagaggacagagcagtaggtgtttgtgagggctgtttgaggggctgctttgagcctgttggggcagcagtaaaagatggggctcaggccacatcgtaggaaattttcattaagaccttgattttaatctttttagtataagtacatcttactctcaataaacataccagatgtgtgcagtttaaataataaaacatctttgtttccaccacctggcttgagagagggaacatcaccagccttggagaatggaactttctgactgctcttgcttaggtgttgagcccctttgccattggggtggctctgtgggcccagggctgggagagccttggaactggtctcgtctggcttagcagcctctctagctacctggtgtgcaaatcatagcatcttctgcatgtgctctgacttggaaaagcattagaaggtctcctgtgtgtgcttcttggtgacatcccccagccccctttctcatgaaacactcatgaatttgatgttaacattccattgctttcttcatagttttagcacttacatatatatgtattctcagaaaacatattgtttagttttgccactttctgaactttatataagttaaataagcagggtgacaatatacagccttgacgtactcctttcctgatttggaaccagtctgttgttccatgtccagttctaactgttccttcttgacctgcatacagatttctcaggaggcaggtcaggtggtctggtattcccatctcttgaggaattttccgcagcttgttgtgatccacacagtcaaaggctttggcatagtcaataaataagtaaataaagcttatttaacttatatgcagagtacatcaggagaaatgctggactggatgaggcacaaactagaatctcgattgccaggagaaataccaataacctcagatatgcagatgacaccacccttatggcagaaagtgaagaggaactaaaaagccttttgatgaaaatgaaagaggagagtgaaaaagttggcttaaaactcaacattcagaaaactaagatcatggcatctggttccattacttcatggcagatagatggggaaacagtggaaacagtgacagactttatctttttgggctccaaaatcactgtagatggtgactgtagctatgaaattaaaagatgcttgctccttggaaggaaagttatgaccaacctagacagtttattaaaaagcagagacattactttgccaacaaaggtccatctagtcaaggctatagtttttccagtggtcaggtatggatgtgagagttgaactataaagaaagctgagcaccaaagaattgatgcttttgaactgtggtgttggagaagacttttgagagtcccttggactgcaaggagatccaaccagtctattctaaaggaaatcagt

SEQ ID NO: 54439 - DNA, 1009 bp, Bovine  19866880608281
  misc_feature (1)..(1): n is a, c, g, or t
nttctcgaatttttttaggtttatatattgtgataataacttggttgatgaattttttgggaagttttagaaactgtaacccttcagttttttaaaacaggttgtgcttattcctttgaatattagagtatgaatcctcaaacttgagtggacccaaagaagtttatcggtgttgtacaagtaagaatgattttccttttcacagtcctggaagatactgctctttggtgcaataaacttaacatgtactggcttcctgctaatgtggtgcagttccactaatagtataggtatgtcactgttcttatttttatagttaattattaatttcacttttattgttctcatcttaaataaaggtatgtcttccttaacatggaatatattattctgaaatacaacttgaaagatttaaatgagggaatctattccaaaagtaccttgttatattctgttttggccctgtcgcttggcatgtgggatattaattctccaaccagggattgatcccctgctccctgcagtggcagtgcagagtcttaaccactagactgccagggaagtccctcaaaagtaccttgtaaactataaaatttggttcaattgttaggcattatttaaaatgagctttttcaaaagatttaaatctatttgaaaaacggaggtttctttttattttttaattgaggtatagttgatttatgttaatagtttcaggtgtacagcatagtgattcagtatttttatagattatactccactcaaaattactatagggacttcccttggtgaggaagctatagattaatacatttgtttgttttattttttagatttcatatataagtgataccatatagtatttgtctttctctggcttatttccccaagcagaatatactctaggggttatctgtgttgctgcaaatggcagatgcactcctttttatggatgaggaatcctccttcctgcctgtgtgtctgttgatggccccttgggttgcgtcca

SEQ ID NO: 54440 - DNA, 1620 bp, Bovine  19866880789221
  misc_feature (1)..(1): n is a, c, g, or t
nggaggcttggcatgctgcagtccatggggttgcaaaaagttggacatggctgagtgactgaattgaaccgaactgaaataagtcaaagaaaaataccatattatttctcttatttgtggaacctaggaaacaaatcaaacaagtcagaaacatactcatggagacaaggaacaaataggtgattgccagagggaagggtgttagggtttgggaaaaatgggtgaagggaattaagaggtgcaaacttctagttataatgtcacggggattaataactttttatggtaacagatgtttgctagacttattatgggcatcattatgcaaggagatcaaaccagtcaatcctaagggaaaaagccatgaatattcatcggaaggactgatgccaaagctgaagctccaatactttggacacctgatgcaaagaaatgagtcattgaaaaagactctgatgctggcaaagattgaaggcaggaggagaaggggacaacagaggatgagatggttggatggcatcaccgactcaatggacatgagtttgagcaaactccaggagatggtggaggacagggaagcctggcaatgctgcagtccatggggttgcaaggagtcagacacaactgaacgactgaacaacaactcacattctaccatatacttgaaataatctctaggtcaccgacaacacctaatacaatgtaattactatgcaaatagtggcaggccatgtggcaaattcaaattttgctttctggaactttctgggttttcaaatattttccacctgctattggttgaatttggatgcagaacaatggatatatcatatattacatgataaatgtataaatcaattttcacacaacaacagaatcataccacagggttcaaaagagagacttcaggaattgaattaatcagatgtgaaagagagagggcatttcagaatgaggaactggcagagaacagaggcaggaaaaggggtggggagtagtaagagggaaacagggagtaggtcatttttgcaatagtctatatttgtaagagtgtagtggtgcacaaaagttaggtaaagatgtggccagaatgtggagtttcttggaagcatttgtaaaccttacactgtaaacgatgaagtctttatatccactaggattccttagtttgaggcaacaagaaacaattgcggctaacccaagtaaaaagagaaagagaccaaaaagaaaaaacaaaatagagtgatagatggagagagaaaaagagagaccggggaaggagaaagggagtgtgagaaacagaagagaaaaacagagaaaacaaattcaatagttttgagataggttatcaagtaagtgaccagcccaggaacctcgttagttctgagcatctcaatgatatgaactgatagagcagctctttagagcactcagttcttaacttacctcctatttcagtgtgtctccatgcaagattccagtttctaggacagtatgggtaacctagggcttccctagtgtttcccgtttcccctctgtgactcgggaggcgagattctgcgcttgcagctcaggataatacggcagcagaggtagttttccaaaggaagagacgtcgag

SEQ ID NO: 54441 - DNA, 2921 bp, Bovine  19866880793756
  misc_feature (1)..(1): n is a, c, g, or t
nactcacaaaagacttgagagaaagttaataactgtacattcctaaaaattaaaatacacacattttatagagtgatttaaaacacaggaaatttatcattactctaagacatttcttacaaggtttacatgcatgtttaaaaaataataatactgctactaatttgagggacttagtcaaatacattctctgaaaggaatggactaatattttttattctctagtaagagtatctctactttccatactcactaaaaataactaaataaatttaatatagcaaagtgtgctttgggtatttgggattcaccaacttgcttaattacttcaaaaatttccatatttttatatatagttattacttatttgttcactgaccaatgggaagaatgatgcaatggtaactacatcaatggtatcctgggagccaagaaataattcacctccttgttaaacaaatatccgaatactacttgtacaccaaagggcactaaataaacacttaagtctgcgaagaaacatgatactgtatctcatcaaatttgagatgccatcaattttaagactaactcttaactaataaagaaaaaatgttttcaattacattatgacataatgccttggatgaatcacatcaacttctcattgcttgatattttttaaatctactcagaaaaattgggcaatttttcctgcctccagtacactgcttgatattataaacagcaattttttttttcttttacgaatcttggtatgaaacacggcttcatctacattgcggtgtcttcccttcttggctcccataaagcctttagttattgtttttaaaaagtaagtggaattgtgattattttaccaacggcacatgtttacttcactaatgttaaattcacatctctccactctgttttggtcctttaccatttctgtttcattgccaaatcataatgaaatctttttaaatatattttaaatggcaattaaatccaatgtatgtagagctgacactgtacataactcaattgaaatgatgatactaaatatagctacaactaaaacttgtacaagcacaagcagtttgaacctggccaaatggccacctgacagccactgacagatgccatcaagtggcagatacaacccaaattcaaagatattaaaatgtggggaaaaaaatatgagtctcagaatcagtaatagcagtaaatactcacagagcaaatactcacagcaaacactcacgaggaaagagcaccattctatgtacttttcatatgttatgcacgaaaatctgtcgggtacgtagattatgtgcctccagatgaggaagctgaggcttggggttggggcgctaagaagcttgccccaatatcacaaagttaacatgtgccgaggctagcttttgaatccacaatctgggctatgcttttaaccactatgtcatgtggtcacttaagttattaatcaataactagctctgtgacttaacctgagtcattagagactcctttccttatctggaaaaggaaggaactggaatggatgattatggagtcccttcccagaaaatactataattctataatcttttataataaaatgttatcctcatggtagcctctccttaaccctataaaattcaaagactttcaccaccattactgactagtgaaaataacctaacttttactattattctaaaattcacacacttaggaaaggtattaagaaacagacatacatgtaccactatttctctttttcaggatgatggcaaaggctgactatagatacaaatgatccaatttctgggttttactctgcctgtgtaccatacttgtgatacaaatttaccacttaaaattttagtccaaaattaacaaatgatttcaatgtgtccattttaacagatatacagggtgcacagtcctttaaaaattctgttcatttatgagggaaaaaacaacagattaataacagatgcaaatattacaacattttctctcttgacccaatttaaaggatggaattaaatgtgcattacacacttgtcaactcttttgccccaaggtgggggggtggccgagggggctgtcctaacctgtggatcttctacaggtcgagctgccctccctcctaggtaaccttgcttctgacccacagcctctgatcatcaggcaacctagtgatgcttaaaatatttcctaatagttcactttgaagttgtctacagaaggagagttaataaaggaaagagacgaaaatgtgcaatgtctttaaagctttcattatttattcataaacatcaaacactgtattagttttgggccttgcttttttcctttatagtacacatgcagacataaaataatctgccccaatggaagtcagagaaaacattaaaaagatttctgatgaaaaaagtgaaaaaaggaatataagcgaactgttggcaaaagtaggtttaaaaaacaaaacaggtaggatgatggctcaaagatgaaagggtctggccagagcataaaatttcactattacataccttcccatgctgcccagctctttcatagcaaatgacaacatcttcccacatttctagcttctcaaatatctgaagggctgaattggtacatcccaactcaaagagtaaacctgcaagttggcgctagaaaaatcaaataaaaataatgaacaatccttcacacattcacacacagatttctgttccatttgtaggtatatctaatctgccattttaagcatctgcttattgcaaaaaatgcctaatatctataattcaacctctgctgaaaaaacatatatgtttcctacatgttgaaaaacatacaggaactgttcaaaatacacaatatatcaattttccccagaattcaggacttaaaaggcaaaatctgca

SEQ ID NO: 54442 - DNA, 1014 bp, Bovine  19866880795623
  misc_feature (1)..(1): n is a, c, g, or t
ntgtgggtccagttttcataactgtttttgaacgaggcagtgaattactagcatgtgttaacggatcttttctttttggaacagctccactttctatcaaggaaaaaataaagtcatcatggtcagaaaattgtggctaaacattataaaagttaatataagaaccagtacaaatttgaaagctagtaatattatttttatttcagcagtatctcaaaataagacttcagtcagaatatatactaaagtgttcataatgattgttactgggtgtggacaagattatgagtatttagccttttccttttcctggtgtataattttaagaaatacatatttgtcataaaaagaaataactatttgtgggggcaggaggaggatacaaaaaaggtaccaaaaaaataaggctgccaaattttttttcttttttgttttgttttatttaaaagctgcaaaaaattaaagaaacaaaatgtagtaaaggcactaggggtaggctgtatgggggtgggggcgggaacaaaccagcacatcattccaaacttttcagactacaaaacagtaggaaaatccaatctgtgccaccagaagagttttaaaaggtaattttaatttaaagagtataaagatgtggttaatatgccaagtatttcgtgctgtatctatgttaccaggtggctcagtggtaaagaatccacctgccaatgcaaggagacacaggagatgggggttcgatccctgggtcgggaagactactcattcagtattcctgcctagagaatcctatggtcaacggaccctagcaagctaaagtccaagggtggcaaagagtcagacatgactgggcatgcatgcacgcacatataaataaacaagtataagatattttctaataagtctaaaaggtcacatgacctacctactctgctcttctacataaattatacactttaaatgttcaaatctcactgcttctaaataatattttcatatactatataacaaacatcagag

SEQ ID NO: 54443 - DNA, 2498 bp, Bovine  19866880841618
  misc_feature (1)..(1): n is a, c, g, or t
nagtttcttcatgtttctgttccctgtaatcaaaaatcagcctcaggattgagagaggaagaacctgacggcagaaacacaatggtgttacttaccaaaccactcacagttttcaggagttactgtgagggactgacttactcagcacagccttggtcagttgagtgctgtctccactcagaaaacagtagtgccaggcatctgtctttgccactcacctttctttacttgctgtatcgttggttccaggtaccttttcactagtgcctaaagatactatccatgttttctgatacataccattaagtctgatttgtgttaaaattttttatgttttcttataaatagaaaaattgattcctatccctgccccccaaaaatgcataataaaaatataaatgaggtataataaaaatcatttcatatgacaataaaccttaaaaatgagatttaaaagaacaatcacttgtcaaaggaactttgatttgatgaaatttcggtagtaaattctatactgagtgtattcaatgtttcaaaattactcaaaggtcagaagaaacttctcaacttcacaagcagacaacgtctttgctgctgtgagaacagcagatgtgtgaagttgatccggtttattagagatggcccaagttttcccctggttttgccttcctgtttttaaaaggtgcagcttatctcagatctgtgcttacaagttatcattttgtattcaccatatgctcaaatcacaaagttgggattcattttctggttttattatagtatacttaaccagaggtcgactttactttgagaaagcaaagaacaagtctattataactgagcaaagtagatgaaatagcaatgttgactttattcaaggggagagattggaacttaataaagtttaaatgtaagaattagttaagaaattattagtacttccttaagaattactagtataggtaacaggttaaggacttaagattccaggtggcgtgatatgtctgatggtgctttaaatgataattcacaaagctgttcatatgcacatcctttaaaattattagtgaatttactaaatgaattaatgtattttgcattgttattctcacagagcattgagagaataccaaggaaataccaataaaagctgcttttttaaagactgctttaaatgggcaaatttgttgcccattacataaaattgttagtttacaagtacatataatgtgtcccaggttctctttctcctcgagtaaatgttggcctgtgtttggcggatgctttgagttcattcttgctctatgagtgaacaagtgactagtgtcttcaagtttgttctgaggcactctggggatcctcaagatcatgtcaaggcatctgcagggtcctcccttttcctacttcatgcttgtgtgagaccagattttagtcatgcatttcaaccaaaacaatatattacaacaaatggaatgtagaggcagatttaagtcaatatcttttttattaagctatatcccatttcaaaaattttagagattttcttaaatataaaataataccacttttcctcaccaagaattttgttgttgatgatgacgtttggaaaagagtcttcattaaaaacatatgttgcttgtattaatctataatagctgctaattcatttttcactaatgaagaaattgtaatgccacataaatttagatcacatctgaagataaaaatttgttttaacagacctaaccttagggttttgttgggggactcagatacttggacataataacatttcaattttattcctagttctgggtgtttacttttaaaaagcactcctttcaactctgtttataactttccccccttctttctcaggtttgtttaagcatcttaaatacatggcatggaagaccagaagagaagtggaatcctcagacctcaagctttttgcaagtaaacaaatttctcttacagtttcacttagaaaataaagaaccatatatgtttaagaactttttttttagtgaccaagaataaacaaaccataaaaaataaaaatgcagattgatagaaagtacatatgaaatagcttataggtaagcaattcgtacaatggaattatatctcatttggagttgagattcttaagttaagacattaaaaatttctttttgtcaaaattccctgttaaaaaaatccctgacttgccttaaagtacactcaggtgcaacaggatcagataagttagattagcctctcccatctcccagtcagtccctactggttcaaactcaggtgagtagaatttaataactactagtattatgtaggagaaggcaatggcaccccactccagtactcttgcctggaaaatcccttggacggaggagcctggtgggctgcagtccatggggtcgcaaagagtcagacacgactgagcgacttcactttcacttttcactttcatgcatggagaaggaaaggaagcccactcc

SEQ ID NO: 54444 - DNA, 1465 bp, Bovine  19866880867700
  misc_feature (1)..(1): n is a, c, g, or t
nctagcgctgtaaacagtgagtggcttgctctgagccaggtttccaaaaggttttgatatcgaagaagctgttccttgttacaggcttttagtgaaagcagagtactgtagtgtcagaaaaaagagaacaaatggtgacttaattttgaaaggaacagctggcatatgattacagctgaatttgcactattttttaagtttcacgacagttatttttatcagtataatgacttctaagtattttcaataaaattctgttttagtataaaacttttgcccatggttgatttgatttcatctaaatgaatattccaagaattccattcaaaatttctaaattgaaatattgaatgaatagggttagtttatacatactattttacactaaaatgtaaagatttctgtttctggatgaaagcaagggtaccacattcttcagatttctttaacatttttttttttagtctttttatatgccaggcgctattttcttggctttgcatgtgtaatctgtttaatcctcacaattaccccctgaggtgaagatactgttgggcttccctgatagctcagctggtaaagaatcctcctgcaacacgggagacctgggttcgatccctggattgggaacattccctggagaagggaaaggctacctacgccagtactctggcctggagaattcagggtcgcaaagagtaacacgactgagcgactttcactcactcaatgacaaatttttatggaaaatgataaatgaaattataacattttgaaaatccctcctttcatttctaactccagtttgctgagatcttttccctctaactactcatttgcattgttcattagtataaaaaaaagcagtctgcagttcacgtgtagtgtctccactactaactccacaaactgttctagtttttcagtttcattgaaatctatttcctttgtgggcccttggactggaaagtaggatataaggaaggaggcaggtattcatgggcttggagtgaaaggacagagaggaggcttcagaaagttgaagaaaggagacacatttaagaaaagaatactgtgtgtttttggagggaaattttttattaactactttatttaccacctttaaggaagatccaagatcacctgaggaggatgaagaagcatatactattatccctttctagagaagcactattttattgcactattttattataatagagtcctttgaagtttactaatctaggtcaaaagttgaatagagggatatatttgaaggtagatcatttgttgcatttgaaaagagaatgccagtacacacaaggaaattttgttaacactgggtgatgggagttgggaggtagcaagagagatcaacgaaaacttaggctttaaaaaaaggtcctagactcttaaaattaaagagaaatcagttccatgtgaagggtaagtgatgaaagtggaa

SEQ ID NO: 54445 - DNA, 1345 bp, Bovine  19866880871943
  misc_feature (1)..(1): n is a, c, g, or t
ncctcaatgatttttttcatatctgcttaacctaataccagctttttctgttctcttattacccttttgtcaagtcattcaaattcttcaggccttaaaaaaatgtcttccaccaatgtgttttcataatacctgaatgctatgaataaaactaaggcttcacatactatctgttatattccacctttacacacagttgcatttgtgtcttacttctacagtctataactgagtagtgacctatagatatgaatatacagcacagtttaaaaaaaaaaatccttgtgcatgaaaagaattccccgccctattctcaaacaatgtgtcataaacaaccgatttacatataaaacatctaaacatccctttaatagtataatcctaataattttttaaaattcctaattttatggaaattcttatctgtatttacatatgatatgtagctgcttcataaagtcttgttaacttggaaaacaagaagaaaataatttatcttacactttgattttctttcatttaaaaaattttctgtgcttcaagcttatggagattacaactcacaaaaatctaggaatttctgtatcttggcataaatgtcatttgcagttaatagaaacattttataacagtaaatggaatgacatactaaataccactaaaactacaataacccttcacagacttccttctcattaacttcacttatatatatgttattcctggtaaaggtaacgaatatcttacatatattacatatagctggactctccaggccaaagtcagttctggaaaaattgcatattcattcaaaatccccaccagcagattattataaacgtctgatacctgtcataaacctctccctgtctttaccattcaaaggtttctttgcagctgctgcttcatcttccacagttgccacataatccagcaacctggacacgagcataacaacccaactgatcatggggatatctagtactcctgtacagaaatgaaagggggagaaacagtcatgtgaccctaagaatcctaatgaagtctggtaaaataattataaaattaagatattttataactccaaaatacaccatataactatcaatactaatatttatttatattaagcctcaaaattgaaacctgtggccacaaattgaataacacatcaaatctaatggaagatttaacaaatctttcatggtacaaaaacgattcataagtataatttgaaatctaataggtaataacttacagaaaacaaggtataagaaactattcttagacttaaagggggctgaaatttttttaaaaaggtctcaatttataagtcatatagttt

SEQ ID NO: 54446 - DNA, 2610 bp, Bovine  19866880873527
  misc_feature (1)..(1): n is a, c, g, or t
ngaaacagtgaaacagtggctgactttatttttctgtgttccaaatcctgcagatggcaactgcagccatgaaattaaaagacgcttactccttgggaaaaaagttatgaccaacctagatagcatattcaaaagcagaaacattactttgtcaacaaaggtccatctagtcgaggctatgatttttccagtatggatgtgagagttggactgtgaagaaagctgagcgacgaagaattgatgcttttgaactgtggagttggagaagacgcttgagaatgccttggactgcaaggagatccaaccagtccatcctaaaggagatcagtcctgaatattcattggaaggactgatgctgaagctgaaactccaatactttggccacctgatgcgaagagctgattcatttgaaaagaccctgacgctgggaaagattgagggcaggagaaggggatgacaggatgagatggttggatggcatcaccaactcaatggacatgggtttgggtgaactccagcagttggtgatggacagggaggcctggtgtattgcagttcatggggtcacagagtcggacacgactgaacaactgaactgaactgaactgaatcagacaaaattcaagttgagggtaattgtacagaataactggcttataaatttccaaagtgtcaagatcataaaagtcaagcaaaaatgaagaactattccaaactgacagaaagaatacaaacataaatgtaacacatatgttccagactggatcctgtgctataaaggagattactgggacaactggcaaaacttgaatggggtctgagtacaatgtgatagtaaagcatgagtgctaatttcctgattttgataaatgtatcatggttatgcacagaagctcccttgtttgttgaagacacacactaaagtatttagcggtgacagaatgtcatgtcaaaaaatcattctcaaaagtctttgcaatgccttgcccttgcaacttttgcccaaatttgaaatcactttaaaacataaaatgaaaaacgatttctactacacataaggttctactatattaaaaattctatcctctgaatatacatgtcctcaaagatcaaagtagtcacctctcctaaatatttcattaggattctattcaggtggcctttcccttctccaggggatcttcccaacccagggatggaacccaggtctcctgctttgcaggcacattctttaccagctgagccacaagggaagcccagccaaggctaacagaaggaattttctttaccaagcaaagagacgggtaagtataccaacttacaggagagtcctaatctctaaccctttcattggttgcccaactcttctctatcttcataaccgttacaagactcattcacccagaactctggggaccttttgaacaaagatttccgcaacacaagagaatcaatacgcaagaaattcaaggtggccaaataagtcattaacttaccagattccaaggataacagcaagctcttcagcacatagatcaggcatctgaaactgttcacaatctgctaactttatctcatttagaacggtatcatcattgagctcaagattctggtggaataccaaagaaaatatttaaaacaaaaactaagtttgatttattcaatagactatatgcaacagactgctgggtaggataacatttttttgtttaagattttacagtgtctatacatggtcaataggctgttctccttgtgaaacacatatatgggaacaatttactgtgcagaaatggaggacatgccatctatatatgccaggaatgcactgacatcatcaataacagggagtaactgctactccctgtttgattgagcctagtaggcaaaagctcctctctgatatttcagatctttctaaatcggtttctaaatcataatctgaaacatagattcccaactctgtttctcaagaagatctagaatagaagaaaaaaaagccaattgaaatagaaataaagcctgaagaattacagaacttggtagagtacgtgatttcaagaacagctacaaagccaacacagtgttgtactaacacgaagacagaaatatagatgaaaggaagagaacagagtccaaaatttcagacccatattatatggtcaactgattttcaacaaggtggctagatgactcaacaaagcaaagttttttcaataagtgatgttagaagaactttatattcacttgggaaaaaataatgctctgcccagatctcataccatacacaagaattaaatcaaaatgaatcacagaccttactataaaagctgatactaaaaaacttctaagaaagaaatcataggagaaaagacttgcaactttggggtaggcagagtctttaattaggatacaaaaaaaacttgaaccatcaaataaaaacttcagctctttgaaaacactgttaagaaagtgaaaagtcaagctacagattgagaaaacatactcaccaaacaaatatctgggaaaaggcttgtaatcaaagtatggaattacagcttaataagaagataaaaaaactcaacataaatataactttacaaaagacc

SEQ ID NO: 54447 - DNA, 1066 bp, Bovine  19866881046309
  misc_feature (1)..(1): n is a, c, g, or t
naaattatttttgtgaaacaataaaagaagatgattttccccaccccctagtctgtaaagtatatagaccattattagtaatttgttaacgttgagtaaaaggaattttggctttggaatcagaccggagacccttaggccagtgaattactctgaatatcagtttcctcatttataaagtggacttgagttggcaagcaattactgggtttcttttgagtacactcatgcgccttgccttctagaaggttattcactagtatgacttgtcaatcagaacaagtaataagtgcactagtcagaagataggatctgggaactgtctaaagcaagacttcaagtttcctttttcatcaatgcctcagattttctattaagtgattcttaacagatagaaaaaggtacttttattttctagtaaaaaaaaatagatcatgctttctttctttgcttcacactcccccttctcccatgtgaagattttcgattaaagagttagtttatagatctgatttttaagagctgagcatcataagttgtatttttttaattaatcatttatttattgacaaacaacccttggtggtttagtcactaagttgtgtctgactcttgtgaccccatggactgtagcctgccaggctcctctgtccatgggattctccaggcaagaatactggagtggtttgccgtttccttctccatatatgtttttttaacaggggcagtctgtttgactggatctatcttaatttccatgtctagaaaaggaaagaatatgttgccagacctgactcacttactgctgacagcagataaggacagataattggaatatagactgacttcattagcttagtgatagcaaaagaatgaaaatgaggcaacaactcagggaattacattaaaaatgatgtgaaacttctttctattagataattctacctttcgtttccttacatggcctgaggaaatagcattagtaattagaaaagatttttttttttcatttgtgattttatcattgttgcaacagttgtgtgtagcagtttagaagggaaacagg

SEQ ID NO: 54448 - DNA, 877 bp, Bovine  19866881141241
  misc_feature (1)..(1): n is a, c, g, or t
naaaactgaaggagttcatttttggcaaagactcctcattgtaatgttggtggttaccgcacccaaggctccccacttaattggaaacagtggaatgtaatttagttatggttgtttctctagctgttaatttagctgatttgaatgccattaagattttaatggaaacaattcctggctaattaagcagaacttccatctgctggtagctgattacaggtaggatgtgcacagaattcactcttccatgcttcttaaagcaagctctgcaaagacactcagccccagctccgaatacatttggcatctaaaaactctggtgtttgtaatcaaaaccagagtctgttcagtgaccaaacactaaaactgctaggtttcgtttttctcgatgaatttccagtgacagaatattgaaaatgttttgtttattggctcttcccaggagatctgctgctcagataaggttaaagctttataactttgtttaaaaggagaaattagcatctgaagaaaatgtctttaaaaaaaaaagtcaatactttccacttcattattttaataagacttcaaatctgatattgtgtgctcactcttgtggactgattgtggttttctaagttttctgcaggaaggttcaagctgatcaggcatccccctgctgtgaaacctttacaagacaggaacagcgatccatctcagtcatttctccagatcaggaaccaacctcagcccagttctgagggaagagacctgaaccccagctgttcctgctttgggcacatctaggtgcttctttcccccttctatagatgactctgtgccatggaactctaaaaccaaactttcttctacagggtcatggtaaagtaataatttt

SEQ ID NO: 54449 - DNA, 817 bp, Bovine  19866881183314
  misc_feature (1)..(1): n is a, c, g, or t
natgccgattctaatgattggtggggaggaaagagagagacataggaaaaaatgtctgggagagctgggaattgtgaaggaaagggtcattctgtagcataagcatggtaattggaaggacattcagttctactcttgaacaaagatgcctcaggccatatacatttcttgccaatttcctttcaacctcaactaataacttttcatctttaaactctgtctgagctagttggcatagtgtaaaagcattttctgtttgtgtttggtatagttagatttccatgaagctttttgccctcatcattttgtttataaatttctgcccaacatgaacctttcttaataggctacctgggaaatgtgtttggtgttcagtcacaaagtcgtgtctgactctttgagacccagcggactgcagcatgccagatttccctgtccttcgctatctcctagagttggctcaaactcatgtcattgagtcggtgatgccatccaaccatctcatcctccgttgcctccttctcttcctgccctcaccttttcccagcaaaaggtgagaggtagcaatattcatcagtagctgcactttttacttggtagaatttatcttccagtggtgaactctagctgtacaacggaagcatgtttacccctgaaactggacatggaagcaggatcttaacgatcccagaatggaacgccagcctggcataacaagggatgtgcagtggagatgaccctggcattagagccgcaaagactaggacttgactccaggttgtaacacaaggacaatagtgactaaggactgactgaa

SEQ ID NO: 54450 - DNA, 2741 bp, Bovine  19866881280227
  misc_feature (1)..(1): n is a, c, g, or t
ncagcagcagccttttcaagatgtgaatacataaatttgtaaaagcaaacttatctctctgaatcaggttgttactcttaaaatactggtgtgtatacatggtattcttaagtaccctagaagtggaaaaaatgctgctttgagtttttggtttgtgtttttttgccatcagtatagttctgatttttttttaaattattttttaacagagtaaaatggagcaggtattgtgtacttgcagatgtttaacattttattttgtaaataacagtgtaaaagacgattattcatgtcagtcagggcttacatttcagcatcactccttttgttgtccttgttaatctggagctcattaaatctcagtcagggctcttctgaggttgattttggatttctccaataataagttccttttctataatttgaaatatctgaggtggatttttcttatgcctgtatggactccgtgctagttactttagcctacattattaacttaggctatttgacaaatgttgtaattgattagacaaaaacatggattaaaattcctttcttttaaaaccaatttcaaattctgcattcactgttattaaggagttgatttattggtggaccagccattcaccgttgacatcttgacatctctagtggagctaacccgctttgaaactctgactccacggttttcagctactgttccaccatgctgggtggaggttcaacaagaacagcagcaaaggaggcatcctcaacatttgcatcagcagcatcacggggatgctgctcagcatactagaacttggaaactacagactgacaggtaaaacattcttccaaggtatttaaattcagtttaattttataacttaagttcatcttatagtaacaacatagaattattattatatgttactctttctgttaacttttacatgttaacagttttgtttgtttcatttgtcaccttggttttagaaattcctatattcttttttttaaaaaaatatttatttttggctgtgctgggtcttcgttgctgcgtggactttctagttgcagctaggggctactctgtagttgtggtgtgtgggcttctcgttgcgatggcttttcttgttgtagttcatggactttagggtgtgtgggtgtctgtagttgtggtacatgatctcagtagttgtgattcccaaactttaggttacagattcaatagttttgacgcatggaattagtttctccatggcatggtgggatcttccttgattagggattgaaccagtgcctcttgctttaccactgaacccatcgaggaagcctggaaattcctgtatgcttgttcttagttgtaggataaaatcctgagagtaatccagccttccagttagttagttaaatagatctgtagattgtgtgactaaatatttaaatgtctgttttgtacaggtacttttgttgttgttgttattgaagtgtagttggtttacaatgtgttaagtttcagcggtacagcagagtgaatcagttatacatatacccactctctttttaaagattcttttcccatataggacattacagagtattgtgtagagttccctgtgctatatggctacatagtagtgtgtacatgttaatcccagtctcccagttgtgcaggtactttggaagttactagtaaaatggctcttaggaaatttacattctagtggtgatagacaggcagttaagacagatatctactatgtcatatagtcataaaagctttgaaacacattaaaatagaatggcaatagagttgttgggtgtacatctctgtgagagaaaatgtgtgtgatatttttatataaggggtctcagaaaggcttccatgaggacattaatttggagacaataaaaagtacagagatcctgaggagtatatgttatgaattttaggaggagcatggaggctactggttaagtgcaatgaacatggaggagagtgataggaagtgagatcaaaggaaatagttgatcatgaatgtctttataggccacagtgagacttttacattgagtgagatgggaaaggtgttagatagttttgaatttaggagtgatgcgatataatttatgtattagaaggatatactaagactactgtgttgatagtatatgagtggttgtggtgtgtgtattagagggaagaggcaggagcaagaattctaacttgaatgctgttgtggtaattcagataatcatggtggtggtgatggtgaattggaccatgatgataattgacagaggcattgagaatcgtggtcagatacagcttggaggtagaaagaatcgtaaatgctgatgtacggagtgtctggtgtgagtaagagttgttagggatgactaatgttttggactgagcacgttaaaaaatggaatttctttttacagcttttagagttggttatcaagtagtttggggttatttatgttaaatttgagatacctaataggcatttggatttgaatctgaaatttagtggaggaattttacttttcagcacatatacagaatttaaaatcagaggatggacatgtataagaaatacaaaatgttcttattttaaaatacaaattcctgtgaccccactcttagaatcagagtgggcccataagtctgcacataattctgatgcacagtagttcacacttagaggaacaagggtttttttgagtgtacagtgcccaaggtaggtatg

SEQ ID NO: 54451 - DNA, 1339 bp, Bovine  19866881293121
  misc_feature (1)..(1): n is a, c, g, or t
natgaaattaaataataaagatagccaacagcatttttaacttcttcctgatattaatgggaacttttaaaataaacataatagagtctggtttgttcatgttttttttgtaattttaaataagatgatacaataatatttcattaaaagtttttctcagaaagcaacattggcttttatgaagtatctcatagtatgctgaaacgattcataaatatgatatatagtatatgatattgaagtattcatggattttaagaatcaacccattatggtcacagtttattctttttaatctattgcttgactttggtaataaattttatttaggattttgatacgagattaatatttttcttttttaagatatctttatcaagtaggtttcaaataaaattactagtagctttaattccttacctttattctagaataatttaaagagcttcaggtaaatttcaggtagaaggtttataactactaatctatgaacccattagtccattaacaatagaagaagcttaggatctgggagagccataatgaaaagaaaacaatcaggaaacatatcaataaatctttccctcttaattcttgatatcatcctgcttgtctatccccagataaactcccaacaaatgataagagaaactttatttggaggattacctattgcttctattaatacatcaggaatatatgttaatgacattgaagtttacctttctgttgaaagtatatgaattagcttgagcaaaaattcactgaatatctgaggacatgttgaagaaagatgcacttgcaatcgggtaagaaattcttgcatagcttgcgtagctgttggaccaacctgaagaaaaatgtaattctactgaaaactgcttagtgattccatttactgaattattcatttaaaagtatcaagtgttaagagccatatggttgaaacttctcatttgaaaaacaagataatatgaaaccaactaagcttttaggtcctgatatgtttcaaactgaaaattacagattctatggtcaatatttttccattacgtcagacttatttagttcaatatagaaaaagactcacctaaattacacaaaaaatatctctacaatgctttcaaaagcacaaaaactgtgatttttcacaatcttaattatcccatttcaacagacaggctaagtgatccacaaaaggtcatgcttctgatgactacaagagcaaatactaaaatgaatggagggaaaaaactctccaaactagaaccatagagctaaaaataaacctgtagcaatctgcaaaagaaaaataaaaaagcttttcaaacttctatct

SEQ ID NO: 54452 - DNA, 1453 bp, Bovine  19866881414595
  misc_feature (1)..(1): n is a, c, g, or t
nacaaaagcccacctgggtctgaatctcctggctccttttctttctttacctgaatagctgtcagtttatgtcttatattcactaagataattcttgctaataacagcaggataggctttgtggtcaggctgtagattgattcaccatctagaacgagcagactcagaagaaacgcatccagcgctttgatctgaaaaaaaaaaaaaaaatatatatatatatataagttcaaataatttagaaaaaagttaacctttgtatgtcttaaaaggatacataattcccagttactcagttctgaaacacaatcatttatctattacacagcaactggcactggaccaagtcctaatattataaatgcctttagagatctacaactccagcctgccctgatcaatgaccacccatctgcttatattttagaggaacagaacaatcaagaaaatgctactattgaagaggcaccattatcttacagacttacttacaacaaagtgttttctcagtaaagccatctctatgtgaaagtattcatattaaacacctacatttcatatacgcttcaccagtcagctaatgtcgttacaaaccacagctgccccttaattactctcaggccaaagaacaacaaagtcttgcatatcagatgctgagtaggcatacaatcacggaccgacgtgaacagagcctgcccaacaggaaggtctctgaaaaacccagttctcaactgaacagattttctacactggaccagacactcatgtttttaaaatgtgggctgaataattttgacagttgccacaaaatcaacagcaggaatgctcaacatcaggaaaacaggctctaagtcaccgacacaggatggagtccttttactgtttattagtttgtgggcataggcagatttcttttaactgagcctcagcttcctcaattataaaatcaaataacagaacctacacctcacacgtttcttgtaaggattaaataatccaagtgatgccagtgccaggctcaatgctttatgtgaaagtgaagtcgctcagtcatgtctgactcttcgcaaccccgtggactgtagaccgccaggctcctccgcccatgggattctccaggcaagaatactggactgggttgccatttccttctccagggaatcttcccgacccagggattgaacccaggtctcccacattgtgggcagacactttaacctctaagccaccagggaaatccctgctttataaaaacattaaataaaggtacagaaggaacagccccttcatcatcactgaaaagtgtacttgaggaataaagacaatgtgaatgaccaccagcaaaccaccaataaagcttactgttaacctacactgagggtagaatgaattttttttttcaagttcaataatcaaggaactattctgaagtattacaactgcctcaatctca

SEQ ID NO: 54453 - DNA, 809 bp, Bovine  19866881531933
  misc_feature (1)..(1): n is a, c, g, or t
ncttgccgtgaagggtctagtaagaagatttttgtgatactgtgaaagtcattttccttggaattgaaatacagactgcctcatgtagttttccttacgagtgagtattgttacgagtacattgttagtgttatgctctttaaggacaatttgagcaaaatgatgtctaaattgatatgagatgtttataagcaagtgttttttcaggagttttaggaaataggatattgaaacctatgattctttttcaaggattcaagaatgtaaaacatatgatatataaaaattatataagattctgttgtacctttgctttaatgaagtatttcggtgtcagttattaacatcgacttcatggtaataaaattatatggaagcatttactcaaagggactccagttgatgaaggaaggtattagttcaccggcagtaaaatgtcctgtcgtaactggtttttgtttctttgtttgtcaggtgttggtgtctgttcagtcccttatattagtagcggagccttattttaatgaaccaggatatgaacggtctagaggcactcccagtggcacacagagttctcgggaatatgacggaaacattcgacaagcaacggttaagtgggcaatgctagaacaaatcagaaacccttcaccatgttttaaagaagtatgtttaataaaattaatgaaatacttttttaaagacactatataatatagtttattagtatcatgcttgcgtttatacttagtgtatctgtgctgtatttactattgtctttatcattaaaaatcagtagtagtaagtacaga

SEQ ID NO: 54454 - DNA, 1038 bp, Bovine  19866880451697
  misc_feature (1)..(1): n is a, c, g, or t
nggagtgcgggcagttgaaggaggtagctagaatgtggtacaaatcctgactcttggccgtgaccctagatagaacactgagcctccctgagactcggttcagcctcagcaaagcaggaataatgaacctggccacacagagctgctgggaggatgaaatgcactaatgaaagcagctaactggggccagcccagctccagcgaacgtaagagccctccctccccaacctcgctgatgagaagagcacgtccaaagcaaagcagaaacttaattaggattggaaaaatgtgaattccaaggcttattaaattcatgatatttttacttaccatgtacccagaaatatatttagcaaagcaatttacaccatcactggctgatggattgtggttttccaagttgagttttaagatgtaaatgggctccaatcagggcttggctgtgagaagatgctcccctcccatcctgtcctggccctttgggctccagcctcacctgggcagcctcctggggtggacagatggccctgagctcctacctcccagggaggctctgctgggaacgtctctgcctggcgggagagggaaggggtggggagcaaagaggcaatataataacagtgataacaaccatttatcaagcacttaccgtgtgccagatactgtgagcttcaccacgggtaactcactcacccctcccagcaaccccaggagataaagagcacctaggcacctcttctgagcagctgtgtgactttgggcatatggtctgacccctctctctttctctgcctcagtttcctcatctgcaaagtgagataataagagctatatgtgataagcgctaagcacaattcctggaaattagtcaactctcaacatgagatatcagtgagtctatgaagcgacaaatctcttgctcaagatcaaacagctggcaagcatagaatcgggattcagcatcaggtgcacagactctgaagctctaaactgtaggtggggatggccccacagtatacggtacccaggccaagcctc

SEQ ID NO: 54455 - DNA, 1244 bp, Bovine  19866880452327
  misc_feature (1)..(1): n is a, c, g, or t
nccgccctgcctgctgtctaggctgcattcccccagattcttagttaaaaagatgctaatgcttttcttccatcatttcaacttctcccatcatttcaacagatgcctgcagggcaaaggcccccaagcctccctccccccatccaccccctaaccaccccgcaggttttattctgcctcccaccccactccccacccgtgacagcaaaggctggtgtgagactactgggccagcgagaagccctgaagcgatcgctggcccacccacccctttaagaacgcgagcccccttccccaacttctagcctggtgacttcagaccaggggctgaatctcatcaacaagaaatttgaagccattaaaatacaataaaatagaaattaaatataatcgctccgtaaattataactaattgaaacatcaattgtaatttttatgatccgcattctgagtgagtgatgcctggagttacaaaatgaaagttaaatgacggtgatggtggaggtgtcctggaatgccccccgccccccagattccaccccctccatcagccgacatccttcccttctctgccagactccaccccaaagtgctatcttctagaagcttcccccagggagcctcaagatctcacatccatggaggtctcagcttgctcttgttggcagtgttttctgtatacggcccctgtatgctcttttgtttccctgaaacccaagaagacctgggtctcctccatctttcctgctcccccatggttggaccagaatgtcaggtccacccaacacacgtctggcagtcagatcgcaagcatgagagtgccagaaagcccagattctgtgatgctcccagaccttcctcatgtcagccacactatgttagactcatcttgtccattcccctgcctctctctcagctgggcactggggttccacagcaccagggccagctttccaactgctgatctacccaagcagtgctgtgatggggaaaatcacaccagcgagggggccctgctacgttcggtgtctcctcccgcctccctctttgcctccacaggttcatccctctccatctgctgctccatccactccatccaggcacctggagggcacagggggtgcagggtgaagacaagcagatctgcattcaaagctcctccacaaagtagcaatgaggccgcggacaagccacctagcttctctcaaaggctccttttgttcaatagtaacttcaagacaata

SEQ ID NO: 54456 - DNA, 1345 bp, Bovine  19866880481362
  misc_feature (1)..(1): n is a, c, g, or t
naaaacaatgcctctgttctcgctcctggcttggccttgggaagcaccaagaaggaaagcaaagctgttaacaatatgatctgggctaaagaggctatttttgtcttcctaggcttacctcgtgctcttaagaccccttgtgtcccctaggagctggccgtctcgtggcagttgtctcttaacagagggagggataagcagcctgtagttaccagagtctgcagtccttgggggcgagcgctgggaggtggaggggcggggacgcaggcgcagccctgctgtgtagttcagcaatgtgctggcggccagggtgatgctcactgggtgtgcacgcttttccacgaggctcactcttgtccatgaaaaataaacccttagggcaacctgctgtcatccgtgcttctgtccccatcctctgttctccaagccattgctcctacccttcctgggtgtagaaaagttgccaaaccacaggaaagagtgaaaaatattgctccctgcaagtctgatggagaatgagctgtactggggctgagaagtaggcagttgggacggtggtaccgtctccaacaaacaacacctgcggatgcaaagtggcctcgtagttaaccttaacctcatcgccctcacccccgtcccagctgctccagggcctgaggccacccaggcacatgcttctaggctgccacagagctcttggccctaaatctcgggggacagcagcctggacccacctgtctggttccttaaagccctggagttgggggaggaaggacagatgcatatctggtcctaatagtcatctggagtgaccgtactaatgtctaagcctcatctcagacatgtagaccagtgtttacaggaagggggctgggaatctctatgttttgaagggacattccagatttgagaaatgttggttgtgagattaagagccctcactttaagttggtggttctcatccttggctgcatgctgagagattatgatttaattagtctgcagttcagcctgagcatcatggttttttccagagccctccaggtgtttctaagtgtgtagccaaggttgagaagcactactgtattttcgtttgtttgttttggctgtgggatctcagatcagggactgaatcctgcccaccctgctgcgatccattttgagtcatctttttgtatggctcgaggtagaacctggggtcatgcttttgcctgtgaatgtacagcatccccagcatcatctttttaaaagatcatcctctccgcattgtgttcttagcaccttcattgaaaatcaattgaccatagatataaaggtttatttctgagctctcaattccattcca

SEQ ID NO: 54457 - DNA, 1331 bp, Bovine  19866880482580
  misc_feature (1)..(1): n is a, c, g, or t
nttagtggcattaagaacattcacgatgttgtgcaatcctgagcactatccagttctggaaatttctcaataccccaaatggagatccacactcactgagctctcactctcacttccttttcctttataagccatttctcacgaaacctagatgtctcaacagggcggagtcactggccttggagaccccagcgtggcatggaatttatggctgttgtcttgtttaggaagttcctgtgaacaagactgctctggccccagtgacagcagctcaccctgggaaagcaggacagtcaatgtgtttgaactggaagttattggaaacactcatcatgtgttttggccaaatcagtgtgattttcatgccgctgatttaggaatatgacaacagggtcatcccctcagtctaatcttctccgggcagttgttgacataatcaggagctgatcacctactttggacagaccaggagaaatcttgggttttgaacagcaacacgacactcagttctcttatcttagaggcacctgtgaccagaacgttctatgggaccatttctttttcacgagctgggcgggtcctgtaggtatgaatccctagccccctcagatgcctctcccagctgttgttgttgttcagtcgctcagtcgtgtctgactctctgcgaccccatggactgcagcatgccaggcctccctgtccctcaccatctcccggagtttttccaagttcacattcactgcatccgtgatgctgtccagccatgtcatcctctgacgccctgttctcctgccctcagtctttcccagcgtcagggacttttccagtgagtcgtctgttcatatcagatgaccaaaatactggagcttcagcttcagcatcagtccttccagtgaatattcagggttgatctcccttaagattgactggtttgatctccttgctgtccaagggactttcaggagtcttctccagcaccacagttcaaaagctgcaccaaatgcctaaaacaactctagcaagagtcttagaggggaggccagagagaggagatcttgatttgcattcgcctggcccagggagtggttggtactggggcttgtcctgaccctgggcaccaagctgggactgggggtgattctgccctcacacatcccgcatccgcactggtccactggcttcccatgggaatggagtcacgcagtcccacttaccagccctgacccacaaccctgccagaccacacctccactggcctgacccttggctcagggacccacctcatgttccgacatgctggtggagcactggatgcccgtgtccaccggggt

SEQ ID NO: 54458 - DNA, 1526 bp, Bovine  19866880535516
  misc_feature (1)..(1): n is a, c, g, or t
nggaggcttgcctggattgtgcagtggccccggggacccaggcgagttgatggcggctctaggtcaggggtctacggggtcagcctggagcctgactgcctctcttccccaacttctctacgcctgctttctcatctgggagatgcagatactaatcagacttgccttacaggtcgggggaaagtgagggaaaatgtggaactcagggacttcccctgcagtccagtggttaagactccgtgcttccactgcagggatcatgggttcaatccctaatcagggaacgaagtcctacaaaccgtttgttgtcgccagaaaaagaaaaagcatggaactcagggcagcgcctggggcatggaaataaaattcagcatctttgtttttcttttgtctttttctggttgagccatgcggctcacaggaatcttagttcccggactagggaacgaacccgaccccagctgtgaaagcgccaagtcctaacggctgggccgcaggtgatttcctcagtctcctcattactggctccctgattggccttcagcacatccacgagggcagcaatggtgtgaatggatgggggaaaaaaaaagaataaagggataaagggaagggagtggggagagagagagaacccacaacttccagaacctgaccaacggcggaaatgtgcccatgtgtttcaaggcatcctttccagggatgtagcccccacagaacaagcctggacacgtcaagatgaaggaagaggggagatggggcacccaacccctgacatctcaaaaccaagccttcgctgcacagtgagcaaaattcaacatgaaatgtgtgtttagcacaaggactgatgtcgagctcagctactttggaaaaccagacagagacaatcgttttcgcttgttatttctttcttttgctgtcacttcaaagccatttgattggtctgtgttcaagaaatgttttttaatctcccatattatggcttctctatatgttcttgtcattgtaaattacattgtgagtccctgagccaattttttttttttttttttgctgatgtcaattaaaaattccctgcacgggcctctgctgcgttctacctgcacgctgctcccatttctgcggctgcctcacttctgcctctgttttctccccaaatccggcttcctggaacctgcagaagcatcagcttcgctcagctccttaccctggggaccgctgggacagctccaccatagctgcgggggcggggcagcccgccgtaagcaagccctggtccccaggccgccccaggagaagtgtgactcccagaggcccttcggcccctgaggaccggcgctcccgcggccgggacgcagctctggacccggtggccctggcctccaccagctgcgggtgatgctaatcgcctggcacctcggctgcgcttgtcacatcacccagccttcccggctaatgagtcatccgtacgcggccatgtgtttgtgcgggcttcagacagactaatgcttttaatggcacataat

SEQ ID NO: 54459 - DNA, 3023 bp, Bovine  19866880588059
  misc_feature (1)..(1): n is a, c, g, or t
natccaacccatgtctcctgcgacttctgcattgcaggaggattctttactgctgagccaccagggaagcccctaaggtgagactggggatgacagaattgggggagtagagaggagttaagatgcctggaccaacccccgaaggtctgagcatcccatgttggatttgtcccaggtgttcaccaaacagttgccatctggcttccccctctgtatctgctgcatcctccgaccgctgcctgatgactgcattaaaccagattgcacagaaacttcctttttaaaaacatttaaaaataaactctgagtagctgtaaggctacttcctgctcagagagagggaagcacactttctccaggcgcccctggtttcttggtcctgttgctgccgcctcccctcgggccaccggcccggccctgaccatgaacctgctccactttgctctcacccagcctgttccctccgtggtctgcggggatgccgtgccgagtggccctcttggcgcttctgctttcaggaaatattgcctctcacctcacatttgtcctgcccctcatcaccactcggggacggaggctagggcgggctcccagccatctattttcctgcctgtgctggaggaggcggacaggctggcaccaggactgccagggggagggctggggctggggagatggagccctcgttcagtaagctgcaagtatttattaggagctcgctgtgtgccggaagggcagggaccagaaggagcagagcccgggggacactgccatcccctctggactcggaacagtgcagctgatccctttagaaactggagcctcgaactccgctggcggaagttggtagaaatgggttggagggcaatttgaaagcgggttttgcaaagctgacacgtgggggtttcctgggcggttcagtggttaagaatccaccttccgaaacagatgatgcaggttcaaatcctggctggggcgctaacagccctcatgccttggggcaatgaagcccgcctgctacaatgaacacctgatacagccaattataaatatatatttttaaaaactggcatgtgctctgaaccagcagtccacttctagaaactttcctaataagtgtgccaagagctttatcagcgcatcacatagagcaaacagaccactggaaagcagcctcacaggaattggacgtgactgaagcgacctggctcacatgagtacgctgggcatttttatacacacacattttttttttacccaaatgaataggctacttttttaccctgtctcatctccctccccgaaagtcctagggaaattttggttaccaaaaaaaaaaaaaaactagatggggtggagactagggagtgagagaactgtggccccctgggccgctcacggagccacactgtcacatgggcctctaaaatggtgtttatcgtgagacccccttagagctgggtatcatttagaaaggcagccacatatgtaacatcatttaacattttttccacttaatacagccagcaaaaaaaagttctgatagcaaacgaggacatttgttattgaaaatgtaagtgtgtggaaaagctcatacgttgcagtcaaataaatatgtgtgagacctgagtgtcatcagggtctctcattttcttattagaagcttttttttttttaagcctccatcccaggctgtaggcatcatttggaaaatccccgaatatcctctacctgccatgaagccctggataaggcaatggcaccccactccagtactcttgcctggaaaatcccatggaccgagggagcctggtgggctgcagtccatggggtcgtgaagagtcagacaggactgagcaacttcactttcactttcactttcctgaattggaaaaggaaatggcaacccactccagtgttcttgcctggagaatcccagggacaggggagcctggtgggctgccatctatggggtcacacagagtcagacacgactgaagcgacttagcagcagcagcagcagccatgaatcccaaatgcttagaaagaaaggtgtaaaggcaacaagaacttagaaattgtccagggaagcgtctgttttagcaactgtgggcccagtgctaagcaaaaggcctgagatgaatgagtgagaacgtggtctctgagttcaggtgtgggtaaggtggaggtgagctgcagcgatgcccaggggcttccaggaagtcacagctggacctgaaggtgcagggaggttccagctggcaggtgaggatgatccatatcagcaggacaaccagctgagactcagtgagttcttgtgaattacacccatcatgcagtttcatagggagacttgaactctgatgatgctctggcttctgaaggaccacgcaggccacccatggctcctgactgggaaggaccaagtctggtgaggaggagtgggggacggccacctcactccacttgatgaggtatctcgtacatggttatcatgtgctggatgctgcagagacaagccctgcctcgcatcccgctcatttgcatgtgtaaatgtatgtgtatatatattgcttattagtgtcagtggcatttgcattttaagtggattggttcgttgggcatgttttttagagccctggacttgaaaggaatattccaacttcaatgtcatgcaataaacaacgggttctttccgaggggctgatgagaggtgggtaggttcgttgtggagggaggaaaggaagggtgagccgggtgggtgtctgggcatcagggtccactcccagctcagccaagagtgaccggtgaccttgcgcaggcagcagcgttcctgggtctctgtctgcatttctgccccatcgtgcctgcctgcctcgtggacagactgagaatcacagggaggggaactgcaccgtgagtagggccttgtgagactctgcagttggtcctgcaacccaacaccgctggcccacaccacgtccagttctcagctgtgcatctgtctctgtgcctctacccag

SEQ ID NO: 54460 - DNA, 1760 bp, Bovine  19866880590381
  misc_feature (1)..(1): n is a, c, g, or t
nctggtgtgttttaggtgttgtgtgttttttttttttcccttctcccctggggtctgaaaaccaggcatttgtgcgtttacccagtgcatttattcgctgccagaaattgacatatggactcattaattcctccacactcgttctcacccctaaacactcacttggctgaaccaggaggggagctgtgtccaagagggctcttctgaaggaattatgtagacctgggacatgccttaaacatgccttcagggcttccctggtggtccagtggctaagaattcaccttgcaatgcaggggacgctggtttgatccctggtccaggaagatctcacatgggcgactgagcccctgtgccacagacactgaaagctgggcgccctggagcccgtgctctaacaagagagtagatgcccactcgccgcaactagaagcctgtccacaggaatgaagggccagcacaaccagaaataaaaacaaagttataaattttaaaaagaaaaagcatgcctttgggccccaccccccagagtttctgacccaggcatctctaacaagttcccagatgacattgatgttgtggtcttaggttccacacttggagaaccaccggcctaaatccttgctcctcaaagtgtgggcctgggaaccagtaggatcagcatcgcctgggagcttgttagggattcggactcttgggcctcacctcgggtctaatcaaaatgtgcattttaacaggatgattggaatgtatattacaatttgagaagcactggcctagatgatttctcaaggctctttgcagctcagtggcctctgtcttgactgcacgttacgtttaaccccggggagcttttaaaccatcgtgagcccaggctgtgccccagaccaattaaagcagcatctctgggggtggggcctgggcatctgtgtttcgtaaaagctccccaggtgatcccagtgtgcagccccatctgagaaccactgttccagctggaagggtgaaatcagcaaaacgcctcatgcagccttgatcttaaatggagaaagagacatttgttcttccctccacggtcactcacccacatccgcttttttttttttttctgacccggagagagctcagctttggttgctctgctgctgctgctgctgctaagtcgcttcagtcttgtcggactctgctcgaccccatagacggcagcccatcaggctcctctgtccctgggattctcaaggcaagaacactggagtgggttgccatttgggttgtctatcttcctggcatgccttctgtggatcacagccttgcctcctctctctcatttccatctcgcggactaggcaaaccgaaagagatgagacggggacctgcgggctgctggctgagctaagaacttcatcttcagaaaacagacaaagacccagatcctggcacctggcttccccagcccagttgggaggcagcccaacagggacgtgtgtacagatagcagacatgcaaaggagttgatgctgatgcagcctgagcatacttctgagagtatcaatccccagcggtggagtggatggagttggggcctaagtggccctgactgtattttgtggcctggtgctcctgatttagaggccacctgtcccccagcctggctgcctcttctcccctgtccatttcctccccccagccattacctccctatcccagggggctcctctctgaccctctgaagcagggaggtcaaagggagatgctgctctgac

SEQ ID NO: 54461 - DNA, 1357 bp, Bovine  19866880664040
  misc_feature (1)..(1): n is a, c, g, or t
ncccgctaattctaattgaaacacgggaccgtatttccaggcagagagtggcaggctcaagtctgggaggacatctagaggggccccccggcttcacatggagaaaactgtggggcctcctcgggcattctgctagaataggccaaggcggcagcgcttgtacggctgccaggaaccacagctgatgataaaagccattaaaggtcagctgggaatagaaaactatttatgttaaatgtcacagattaagccgcagaatgggcctcgggtgaagagcagagggtgaggtgagaaagactggtcaccgtgcttgcctctcgaggggcctcgaaggggtgggtggccttgagaggtagtggacggggctgggggggcggggctggcggtatgcttggtttccagctgctccagcctcgggaagcaggtggatgtcagcagccacaggtgattggccaggctgaccacccatctaggttgctaggcgacctgagtgcaggttcagggagagaggacccagctagtctccatcacatcatagtggaaggggtctggggtgtctccaccacctcagagaaggcagcctgggtgtgtcccaaggtccgtgcaatggactctgagtccagacagactgctctcacctacagaggggacccaggccggctctgttttcctgtttatcatcctgggtttggcatggctgtgcttaatcataatggagatttaatgcaacacaactgagccaaggaggtcacagagagagaacaggaccttctcttctccaaggatcctggatgtggggctctgaagggcgcgagagggactgccaaggctgtgatgctcccgggaggggctttggggctcagcggggcctggaccaagttctgaaacggcaggtccgcccagggaaccaggtagcccgcagtttccccaccataaatgcactggggctcccaacccgggcctgagcccccggcaagagtcccccgcgtggtgtctgaccccatccattcaccaaaggcacgtaaagacggagtctccgctgacaggtggaaatcgcccccaggaggccccacaggaaaaaccactgcaactacacacactgcctacctggggactcttcattttgcaggttgaggcagagccttaatttccatatttttcaaccacccacccttcctctggacctcccagccattatatgagttgctgtgtgtacagggactataagcacattttaatattggtgtaagcgggcataattaggaaggtaaatctagtggaaaaatacactcaggctaaataaataaataccactccaaccccgtccttccatcaagtaacaagagggtgggctgca

SEQ ID NO: 54462 - DNA, 778 bp, Bovine  19866880715261
  misc_feature (1)..(1): n is a, c, g, or t
nggtgagcacggcagtaaccccttatttattggactcctccagccccacaattgctggttctgctcaatatttcattcttgttgctcctgcccgggcagcagagctacaggcatgtttgataaatggattgaaaggtttgtctagttttgctgaagcttcagtaggtgcttctgtgtcttccacagaaattatatttcccagcttcctccaaggatgcctctcctctagggacgcctctcccactgcctgccgcttctcactcaccctctccccttctcccttccttgtgcacgcacacacgcacacacacgcacagtattcagagatgtgtgtatccgcacactcacaaactgacttgtacacaggtgtccatcggcatccaaggagccagggagcgaaccttccccattgataaagaagcacacacaccagccatgcacgcaagcacacgccctcacgcgcaccaaggcagagccactgaaatccctcggttgccttttctgagcccatctggtctctgagttgtgaatgtgtgacccggccttcctccaccctgagtcggggggctgcagagacccaaggctcacccaagcaaagggtggacaggggtggggcggactccaggaaggaggagcccagggacccctgcctgtcctcctctcgggggaggctccgaggagccctcccgcccgccagttggcagcttcctccagccgtcctgcccccttgtccacctgcctgggcctggcagccccactgggccagctggaggcttta

SEQ ID NO: 54463 - DNA, 1164 bp, Bovine  19866880715266
  misc_feature (1)..(1): n is a, c, g, or t
nacccagacaccaaggccctctgcatccgtggcgttttctccctcagcccaactcttcgtccagcccgagccccctgcagggtcctcgccaccctcactcccaggcagaccccatgcctttgcccacactgatccctcatgcccttcttctctattcactcaacaaaaccttctctctagtcagctcttaatgaagccccctgcaaactccagtccttaaccacatcccctgtgcaccccctcatctgccctgtggtacccagtctgctcagccagacccacgtcctcaagagcaccaactgtgtgcgccgcacccctgcagccctggggacagcacacagtaggggttcagggtgaggccaatcacgtgacctgttcccttgtctcctctgggactatgtcagctcttggtctccgtccagaatacccacttctcctcccaggaggccacccctcttctgttagttgatatttatgggtaataagccaagcacatcaaaacccgaggtgaaatgcctcttcaaataagtacgctcctcaacaagtccagccagccagccagcatgggcgttgttggcagccggggaagtgcaggggcgaaggtgggagagggaggagagggtgcccctctccctgggacactgagggaggggagtggggtgcatcactccactggggggccgtcggggagagtggaagtagaacccatcacttctaggccttggcagccgggaagaagtgggtcaccatagaggctggctctcaatggcgaagatgacagctcagagcggatgttcctccaaagtggggagggtgaggaatcaaggccgcagaagtcagcaaagcttccttctgcatcgctccggctgggatgtccctgggaaatgagagaggccggtgctggagcacaggaggccccaggacatggacggggccctctctgtgagcgagggctcaacaggtcatcaggtccagccccctgcctcttcactgacccgtcactcaacccaccctcagggtacagcaacctctccaggtccactcaggtggggtggggtggggtgtcactggacccaacctgaggaatggaaaatcactctcgttccaacatccactccctcccgtgagggtttcagcccgcgtctacatccacagttgagtcct

SEQ ID NO: 54464 - DNA, 1603 bp, Bovine  19866880962130
  misc_feature (1)..(1): n is a, c, g, or t
ntttcctcctctgtaaaatggggataatgatactgaaataggatcactgagagttgacacagatgaaaggactttaaaccacacggtaaaccttcttgttcggtttcgttctggtgtgctgcagcaaactcccaccctgcacctggacccagtgcggccgcccctgcacgtcacccgtgacctcttgtccgggagcctgcaaacctgaggctgcttgtgttattatttatctcagtgtgactattgtgctgctgcgcgctgcactgagcggcggggacgcctctgaggcgcgctggcctttccaatgaggcgggattgtattagctcctgattacagcccgcagaacacaatagaggcgcccggcgcggaaggcggccccctgcctctgcctcatctggactgctttgtgcttgattcccttctctgcggccccattttcctttgtctcttctttacttttctcccgctcccccctcctaatctgcttaacaacttgcctggctccctccgccgcgccccgtgcccaccgtgtctgaacacctctcccggcccctaatagcaccgctgctcctgcttctaataaaagctgctgacggggaaatccgggctaactgaattacttcctcattaacgcggcgggcagatgctccacacctcccgtgtcctccagccaccccttcctgcaggcccctcccagccgcggcagttaggtgaagatgctctggggaccccgtgcaggcctgggtcctagagaggacaggaggggctgtgggcttctctccagggtggctcctagctctgcttactcccccaccttcccagacatcggggtccccagccttggacctcccagctggctgggaggacagaagaagggggtgacttgccctcactcacccaggcctcctcctcttacctgctgtccctcctcctgacccctttgtccggggcaggtgagccggtgatgtgcaaggccagcctttggcttcagaggaatctgcttcctgggaaggctatgtacgaggagatgttctctagctggggggttcccccaagagaaaggaaagaggatccagactccaggtatcgaccccaactcctcctgcccacctctcagaggcccgtgtctgtccgacaagcacccttgggggtccccaggtctgtgctttctcgggcttccccctgggtcttccatggttggacatgctcatctgctggtaccccaagcctccatctcccaatctgcgcagtaaacgtcttgtctgcaatgcccccgcctgcatatcctaccgagagctccagggtgtcgggggagcccccccgtgccaatcagctagtaagagctttgcaggtgcagcgagcagggagaccagaaacagttattttaacagccggctgcactacgagcattttactaccaggcgatggaagatttacctgctcctttgtttgggaaagcaccttaatgggccttttggcccctgggtatctctacatgggagaagattgagacaaagaaacactgacttgctctgcgtcataaagtaaagaaagttctggctccttaagcagcccaggaatgggggagatggtagagtcggg

SEQ ID NO: 54465 - DNA, 784 bp, Bovine  19866881000524
  misc_feature (1)..(1): n is a, c, g, or t
ncaaagttagcaaaggaaggaaaataagctggttgggggccaggcgtgcacaggagtggagcttggcccagctcaagctctgttgtcaccactccaggggagcgggttaattaagggccccctgctgcagagccttcggaaaggtaagaattctttggaaatgtaactaattaccccctacctgactttaagactatatttttgtgtctgcgcctccttcaaaagaagccttacctgtgttgctgccggcccaggtggactcatggtgtggaacggttgggggagtaagggagggaccaggtcaaatggacaagtgagaagtgaaaatctgcccacctcctggtgcccagtaggatcagtgtcctccgcttcctacctttggcccgaattgtagcaggagtaaaactgagttctgtcctcttcctcccccaccccatctctggtggagatgctaaggagctggagggaccagggctgggagatgcaaccagggcatcatgtgggacttgacagaagctctcaaataacaggatgacatccatactcccgggcacaagggtctgcagaccaatggagatgagaagaaaaatgtcactgtcgtcatccctggaggaggaagagacagaggaagaggaagcagcaaaagaggaagggaccacatgaagctctggtttaggaagttaaaatcaaactcgaagaccagtgccctacacagggcttcattctaagaagatgcaataaagagaaggcagtcaggagggaagatggagggagagaataaggg

SEQ ID NO: 54466 - DNA, 1580 bp, Bovine  19866881067094
  misc_feature (1)..(1): n is a, c, g, or t
ncacagggatcctccacccaacctggatttctcaccttgtcttctatcctaggggtcatctggttcccaaaatgcaaaccaattcaaagcagcttcaagaaaaggtagaaatctgtgtgcaggggaggggtgagcttcacaggacctggaagagaacgtttaagctgctgtcacagccgcgaggaaggtgtccaccagctcctctttctccgaagctcctgtccctgactccagtgttcatgcacctaccttggcttctcccgaagaggctccccgggcccccggtttggatgaaaccccagacaatcagccacaaaacaaaccagaggctctaagctctggctccaaacccaggattgtcccagcttggcccaatcatccgaggccttggggcagggtcacattgtcatggggaagagggagtcacatggctgctgtctctttagctgggagccctggggccaactcagagccgagaaactggcccacctcacagactagcggccaaggccatgaggacaggaaatgtgttgattcatctcgagaccccccagtcccagcacagagcaggggcccaatacatatttgtaaattcaagcaatcacctcaatttgaatccttctctcagcaacctgtgacccacttggtccctggagagggaggcaaagggctttgaggaattcaatggggaaatgctccaagctcaagtaacgaggcgtccttttccttcagtttctggctgtgtgaccttgagcaagtggcttaacatctctgtgcttcaaggacctcgcttgcaacacaaggactgtgatcttgcctaatgcatggctgtggtgaggatggtgggacatggtggtcccacagcagctggtgtggcacccaacaccgtgtgtgtgttagtcgctcagtcgtgtctgactctttgcaacgccctggactgtagcccgccaggctcctctgtccatgggattctccaggcaagaatactggagtgggttgccatgccctcctccaggggatcttcccagcccagggatcaaaccctgtctcctgcattgcaggcggattctttaccactgagccaccggggagcccctggagcttctgtcctgttctaccctgaacccacagaacagggtcccccactgctctcccattaggcttcctctccaggtctgatgtgactccagtcagccgcacacagcgcctcttccaaccccaccagggccctgctcccagagggataagtctgcatggacacccaagggcagccactcccccctactcccgccctgcccccagatctcccccaaagacctcacctgctgtccttcacaagccggctgcatctgccttcctccaccaacaggagagcaatctgccctgcaagggctgagggggaaattctgaacaggaaagaaggaggcagagttgggaggacccaactgcccttcggccttccccccacttcctatcaccccccgtctgggagggtaactttccagagaccacaggctacttctcggggagggatgtgccgtgctcagtcatgtctaactctgcagcctcaccccatggga

SEQ ID NO: 54467 - DNA, 774 bp, Bovine  19866881263413
  misc_feature (1)..(1): n is a, c, g, or t
ntggccctgactgtaaacatgtgtatacaaagcgagtgtcacttcagctaatttgagagggcctggctgctttgctggttgctgcagctgtacccaggggtgtggggcggggcaaagtcagggacagcagggtgcacaggctggcggcctttcttccagcaacatctgcgggcggccggagggaggcttcagacacccagcccgggcagcatgggcccacgcttcctcagggcccacagtgccctcccatccggctctctggccatcattgctccggcatttaattcacgctcctggcagactgtaaatgccctaaaggcaggccgtgcgactctcctgtttctccgtgtcaagagacttgcacttgagacgttatcattgaattaaaataaatccctaccagaaatttcttcttcatgtcaattgcacagcccttctgctctttctgcatagatttccactctttctgcctttgctgggcagagagaggcactgaatccccatccctctggggtaagaggaagagttctctttgagccaggaacttggagatcttagctttgtcttacactctccccaaggtctcacttttatcatccttgtaatgggatctgtatggcctcgcctatgcaggcaccatcagaggtcccccagcctgggttcctgcctgaagatggggcggggaggaggggtggttcaggcccacccccgtatccaagtgttggatccagtgcagggtgcggccaccagggtgcgcacgctcaaaaggcccca

SEQ ID NO: 54468 - DNA, 1260 bp, Bovine  19866881280069
  misc_feature (1)..(1): n is a, c, g, or t
ngctcttgtcttccctgttggccttgattgcttttgaacctggaggctcccgaggatcgggctcttgtttctcttccctccagatgtgcgggcagggaggcaggaccagctcccgtgtacagatcatcagtaaaatgtcctccagcccccttcactgcagggctcagggtctggcagctattaaatatttttctaaccaactataggcaaatcatcgaccccctggacccctcatttatcctcctctgggtcatgggaaaatagctgattcacccagaggggcagagggagctgggggagaaggtggcgaatgcaggcgattgccggaagttgctgattgtttagtcgctcagtcgtgtccgactcttttgtgactccatagactgtagcccgccaggctcctctgttcatgggatttcccaggcaagaatactggagtttgaaatggcaaaaaaaaaaaaaagaatactggagtgagttgccctttcctcctccaggggaccttcctgacccagggatcaaacccatctcttctgcattgcaggcagattctttaccactgggccacctgggaagccccggtttagtagaggtgggtctaaaagaaggaccttttctgactttcgtgagtaattaaaagctgtgtatggtctcccaaggcactgcggtgaaagagctgtcacaaaattagcttcaaaggtggtggctttccccagatgtttgcttcagatgcttggcttctagcatttaaattcccattaaggagctgccgtggctgcgggcaggccaagcccactctttacttgaaagggatcaaatccttggccagaaatttgacttgaattgtgattgttcttattcatcttgaaattcattgaaggccataaatccactcatcctgcctcattctcttaactctatgaagattaaattgatggggaaaaaaaagtcatacttcggaaggtttagaatttgggcacaagttggctcaggtgggagagggcctggaaaccaggtggtgagggttccagctgtgcttgcaaattcagttatgagctctgctaagatgggctcagccctttcagatggctgctggaaatctaaaagaagcccttgaggactttacaatataaaggttttaaggaataggtactgaccagttctccaaccccacagacagcaaagcaggagagaatcttccagagagagaagcaagttggacaggagaaactttgttcctacaggttgcagaactagcag

SEQ ID NO: 54469 - DNA, 864 bp, Bovine  19866881280291
  misc_feature (1)..(1): n is a, c, g, or t
ncagggtccctgatggagccccaggaggcaaagagagagggaactttataaatcaccagctccctttaaaaaatggagtttaacctccctcagctttcctcctgaatttattagcagtttcatttccttgggtaataattcattatctctttcccaagcttgggggggcagtgctggcctagaagtggcatttaccttccacaactttaagtgatgcttttttagctgtcatcttcagatcactttcagccccggccctgtacttctcatccccacggacaacatcgacgtgtctgacacagacttggaggggtggtcctctcctcacctccacttcccctctcctcccctccccgccccagcactgcaacccatctgtattctgatgctgtttgcaccggagcctttctctattgtgaagtaagacagccgcgagctgcagggagatagagccgttctgttggagccgagataagtgctgctgggagggaacccagtggagggttggagggggccacatgtgtcagcttaacgggaggatctgaaaaagttatttcaatcccgtctctatgtgggaaactggcagatgcccttctgtggagtgaaagtttttctcttcctctccatcctctctgccaaggaagggagcttgattatcaaggggcgtgaggatgctttttcactggggaaaaaaaagtccttttcccaaatccagtctctgctctaatgccagaaacactgcattctaacgcccaatatggcaggctggggaggaggatgggcagtcaatcccatcagccagcgtgcgttcctccacgtgttggtgcactgctgtcccctgtcagcacctactgtgtccagaca

SEQ ID NO: 54470 - DNA, 1805 bp, Bovine  19866881306809
  misc_feature (1)..(1): n is a, c, g, or t
nttggcagttattcagctacacaagcacagtatgcaggctgtgggaagccagaagtaacaagctgcaaacctgtataatcttatttcccactgcacgtggcgtgaaacctaccaaaatcctcacaacaaagaacacagcctcctggaggctgcacacaagctcagatctgatccgggccggccagggtgtcagaccccctcccctgccgcagcttggctctccttcagcccgccccgattgcaggggggcaaatgctgtccccaagcatgtcaggccatcctctgctctctgggatcagcatattcatcaggtggaaaacaattcctggctctggggcgagggggctgctgggcagacggatgtaccctgcttccgtttcatcttcctcttaaaatgaggtcgtttggttgaggagggatttggggccaaatagcacacgaaatgtattattctctgggtttctgactgtctgctaaaataaatcgcttggcttgtgaaattcaaacacattgatgaaaaatagcagatgcccgttaaatctgacaattagctttgggactagaaagctaatcagaagcagagccctgacagcggtgatttgatcctgtcttcctgaggattcctgctgacgttcatcagctacagcacacagagccacgcacacacactcacacgcaccgagtctcctgtggcaacaggcattctcagtctcgtttctttcctaacacctctgaactgtcaccttgaggcagaacaaaggcagagatgctcacatcccaggggagacccaggcagggtcctcagaggcatctgaatgcccgcaagcaattttaaaaagtaaatgggggtcaaactctatcaggggaagtcggtgacaggatctccacggcccaggacgtacatggtgctcagattcctgctccgaggatgttttcttccttcctagcctgtcgtgcagcatttccatcttctctccaatccaagcgccagcatccacgcctggcctgcaggccagctcaccagttgcagtcacttttgtctgtcgcttggctccaggatgaaacaaatttcccaatgcaaactgggaaaatccccaaagcacagaagctgaggtgggcccttgcagaataaggatggaaccttgtcgagttctatccccagctcccttcctcctacaaagctgcctgcgctctaagaacctttgcaatctgccaagctgcgcacaggagggacccttctaactcttgcggctgagtctgtcctaaaccagctcagagattacctctaaaagatcctcttcctgggcccaggcagccgtgatgctgagagcaagtgaggagccctctgggctggagggtttgctcagctgtgagccctgatgcggcagagcaatggcttttcgcctgcgttggtgtattcctgctgaggactggtttatgttcccacagtccataatgggatttaattgtagtgattaggtattgaatttcccttaacaatcagggggaatgtatcctgacttggtaaaatgtgtttacaaatagtgggatgattagacctgtgtgtgcacctctgctctgggtgtgcagaagtgggggtggtcaggaccgaggggaggaggtgggctttgaggaggtgggaccagacctgtggtgggtgattgcagaagactgctctctgccccggggtcttccctccacaagcttgtggtagagctgggttgtgtgggtggattgtgatcaattgcatgcactgatgcagttgggaacttaagccacaaggttcagagtaacaaacatcatca

SEQ ID NO: 54471 - DNA, 870 bp, Bovine  19866881402775
  misc_feature (1)..(1): n is a, c, g, or t
naaatgacttaatgactgaacaacagctaggagactgggcatggtaactatttttcagtctgcttaggaactttcctattgtcagaagttaaagaataattttccccaaaaaaggcaaaatcatgactctcctactctacatgtattaaagattttatttggcttggtaattagtgaggaaactaggcagatgttacaactaatccaaaggagaaatctaaaaagtgtaaatttacatggagtgaaggaaagtggaggtgaattgacaaatagttggaaactggctctttccttaaggaagagggaaatctattgaaccaccagacagaatttatttgcatgtctatagacaaagaattattttgcattgctatcggttatctacaacttacaggaccgtaaaacagtgcaaagacactgaaaggctagaatcagacagcctacaaggatgttctctgaacggccccattttttccatcagcaacacccagtgatcttggggatttattccaggtttcgtcacgggaacaagtctagacaatcttagcacctcattctgcctgataatagcagttaatatcaggagtgagaaatcagaatgcttccctgatggctcaggggtaaagaattcacctacaatacaggagatgcgagtttgagtcctgggttgggacgatcccctggaggagggcatggcagccccctccagtattctggcctgggaaatcccatgggcagaggagcctggcgggctgcagtccatggggttgcacagagtcggtcacaactgaagcactaacactttcgcaacagagagtgcaggatagcagactgggcgaggacctgctcctatccctggtgccctgatgc

SEQ ID NO: 54472 - DNA, 1582 bp, Bovine  19866881434557
  misc_feature (1)..(1): n is a, c, g, or t
nagctatgaaatgatgaggaggtatctacagtggtagagtgcattcaaatcagattaattagttaattacaaataaaaagacccattaagatcattaggaacactcagttgatttagcatcccagctgtaaacccctcgcagcttttctcaggactgtctcattgatgggtgagcccggctctcacggcctgattggtgaagctggatctgcaggccttcatttatgtaacgagcatgcatttccaagtggctcggtggtaaagaatctgcctgttgggcaggagatgtgggttcagtccctgggcagggaggatcccctggaggaggaaatggcaaccagctccagtattcttgcctggagaatcccatggagcctggcgggctgcgtggggtcgcaaagactcagacacaactgagcgactaagccaccactgggcaccatgccttcggctgagcctggggacccaaagcggagcaagacggggcctcatccttgccctttcttgggagtggggagggagacagcccagggaatgactggtgctggctcaggagccgggctgagcactgggaactcggaaggaagcacagcttggggaacaggaagcctgacgcccagagaggctcgtgaaaaccaccagtgaccttattggtgctgcccgccatgatgatcatgaatgtctggctcagcggatcagtgctgctgaactctgacaaggcgttgttgctggtgttcagttgctaagtcgtgtccgactcttattttcccaggcaaggatactggagtgggttgccatttccttctccaggggatcgtcccaacccaggggttgaacccgcatctcctgcattgatgctggtgggttctttaccactgagccaccagggaagccccgtgcagcccataagtccgcccaaacccattccccatccccagaactcagaaagcatcacagtgtcctctggcttcccagggcacatcccgtccccactgaaggaggaggccagctggcacttctctccccctttgcggctccacccacatcgtatctttgctcagtgttatgtttcagttaacaaccccaatcctctggatccaatttctcatttgccagggttatgcgtagtgaaaatactcactctgatgataaatattggctgtggctctgtgctctgcccagggccccagctctgcccacgcagcgtaattaaaaagccagccacgtgggcacatggaaagcctgatgccccctccggccacagagaggacacaggaggcccgtggactccaaacaggccattaatgccaggctggagccaccagcaaataccgaacaaaacaaacgaagccaagggagaagcctaataaatcttgcccaaagtagctttcacttggggccgtgagctgtgactgggggtggggtggggctgcggggagcctgctctggaagccggctcactctttgcctttgctctgagtgctgacccctgggcccccgccacggggagggcgggcaccacagctccccctcacttacttcccatctcaccctgacctgcctctggggctcccggggcagc

SEQ ID NO: 54473 - DNA, 680 bp, Bovine  19866881636172
  misc_feature (1)..(1): n is a, c, g, or t
ngaaggttatctgctgcctccgtatgtttcctatgaactcaagttctatcattagagactgatttatttaggtcaagccctgactccccctaggagcttcccatggtttcttgcttgtaatagaccattcagtaaatatttgtcaactgagcctccattaaaatggaaatatccccgaggagggatcaaccggttgctcctttgctaacacttcactgtgaatcagtttatcagctaactagcgctctcaccaggcttctcggggcagaggcccagagcagatgtgttctgagggcctgcctggggggacagggccatctggagctcagtcctgagtccggctgtgaagaggctaagagcaagggccaggggctcaaggtcagtgcaaggacactggggatgcctgtggcccacagatgtgatcatgcccctcctctgacagctctttaatgctctcctcaggaaaatgtcccaactcatcaccagggatacgtatacagaccctcctgactggaccccctctcacccttccagccgcaagtcttgacattctattttttaagaacctgtatttatttatttaaaattgacgtatagttgatttgccatgttgtgttaatttcaggtgtacagcacagtgatcacaaacacacacacacacacacagatctattctttat

SEQ ID NO: 54474 - DNA, 985 bp, Bovine  19866882025613
  misc_feature (1)..(1): n is a, c, g, or t
ncgtacatgtactccgagacgggggcattggagatggtctgggctgggtgcaggctgccctggctgcccaggccgctgctgtagctacagaagctgcgaagctgcccccgaggtgggttgtgggtggcgatgcgccgggcctgggggttgaaggggtcgtcgtcgtcaatgtcgtcatagtccctgtccctaggatgacacgcaggacacggccgtgaggggcaggggaggggcgccaggcagtggggtcccggcccacttcccaatctttcctcccaggactccccctctggctgcaggtgtctccttgaggttctctgaaagtatggtcttcagccccgccttatacatattactctgctccgttcccagctgcacacccacctcctccaggcagcccaccctgctgaccacctgcacgctgatcctccctaccctgcctccttttctgattactctcgagacactgaaaatgctatcttgtctgtctcctccatgagactatagatgccctggtatcagtgctacaatctgttccttccggcattctgggggcacccctcccagcagcagcatcaccctgcaaagtcctgcagaggaacaggggacaagctaaggaggccaggctgtggcacaatgccctcatcatccttggccctgctctggccccctccaacctccttctggggtcctgcctggactttcagggacgctgcctcagaaatccagccagcctgttggggctgaatgcccggtccccttgctgcccctccccaccccaggttatcggttctcagctcagccagagagcagagcctcccgcccccttccccaggaagcccacctggtggcacagtgcttccaagcccctggccccaggcagatcatgatggaaaaggccagggcggccaggagggagaagaggccgaggtacagcaggccctcgaggccgtcgtagcagatgccggcgagggcgtccagatag

SEQ ID NO: 54475 - DNA, 852 bp, Bovine  19866880168997
  misc_feature (1)..(1): n is a, c, g, or t
nactttactagcgtgtgagatgagtgcaattatgtggtagtttgagcattctttggcatttcctttctttgggattggaatgaaaactgaccttttccactagaataccttatgactatttaagtcaataacacgttaagctgattagatgagaaagtgaagtgcctaagagggatagaaaaattaaagatagcacaaagaaagcaaagagctttaaacgtgagttagtggggtcagtagatgatgtcattactaggaatatggaaaaggaaaatgaacaggtttgggagagaagaattaatgtcatttcttacagtttaaagggctgtctttcaattggatgtatgtctctgttttcatcaggttacttattttatagtcttctatgtcttgtacacatcagatttgaaagcaaaattttttttaacttgtagattcttttcattggagactcaaccaacagagggataatgtactatctgattgaaagattaaatgaaaccctggaggaatggcagaaagtgcatggcactaaattctaccacaatgtcaatggagggaagaccttgatcagttattcctactatccccggttttggatgagcccttcattgagaccaacatttgaaaaagcccttgaacatctcttgcaaaggtacaatggaacagttttgaatgaaaccataccacaatgtagtgatattttactagcagtcaagattgtttgctgtgtatcagatgtgctgaaaagtttaaataccaagtattaataatatggctgaaaacgaggtagaaatgataaggaggtcttgtgatcaggatgccagctagggttcaatgaatgtgaggcgg

SEQ ID NO: 54476 - DNA, 1463 bp, Bovine  19866880349559
  misc_feature (1)..(1): n is a, c, g, or t
naattttctgtctggttacattctgaaaattaccaagtgagtttatcaataagcctgtgttatcacttcccatttctgctgttcctcaactttggtatgggagtctgactttgatctttgcatggtaatgattgccaagtataaaattcttactacggcaattttctgggtcataattttctttttcaataagaaaaatatggcatttttaactggtttatattgttttatggtactttacaaaatattatgtgcctacaaaaattaaatggaaaagtttccataattaaagaattaaactaccagttagaaatgtggttttatctttggtgtaatgtccatgtttatggctgagataaagaatcaactgaattaactagatggaatttaacagaaatgtatgtcatattttctgcttataattttacaagtatttaacaagatccatcaagtacaacttgtcaaataaaaggcttagaagttgtgttggacagtaagcttcatgccagtcaagagtagctttgaaaaagtgaatttgttattttgctatcttataatagaatattgtgttggataatctactcttctctttactggttaggttatatctgatgtattctgtataatctagtcatcacagttcatgttttttctaaaagatacaggccagggtcccatacagtatttcatggaacatattttatcaacagctgttgggggaaaaagaggttctgaggtcagccactgaagtaaacagatttctttattgtaaggctttgcaatgcttttaacatgcaaagcacagtttacctctatgagaggatatagtgtatacattttattccctaaggtaattgacactagaattctcttttcatacagaagctattaccatattgaaaaataacccaagtgataactgggttctacagaatacatctgagaatatgctgatacattcgactgggacttgatcaaacaagaataaccagcaaagcatttttccattcctggcctggcctcctcatcacaccagtgtctctcttctggtctcttttctgtgacctagatgttgtcttgaagtttgacttatactcagataaaaagaaaaatttattttttgccttatgaagtatctgatgcagactcaagaacagatttgcttgctcaaatttaaaagtcaaaactgggatattagaatgtatgcaagctgttgaaggtgacatatttacaatgtagtgctttcctttaatatggaacacttctattggaattaccatttagagatggagtttgttactgactgttccatagcttcatgcatgcatgctcagttgcttcagttgtgtctgattctttgtgaccctatggactgtagcctgccaggctcctctgtccatagggattctccaggcaggaatactggagggattgccaggcttcctccaggggatcttcctacc

SEQ ID NO: 54477 - DNA, 1653 bp, Bovine  19866880479606
  misc_feature (1)..(1): n is a, c, g, or t
nttttcttgaaacgttgacatgagccagtatgatcccatagaaatgtacaagacttagttggctggattaatgaaaggtccatccccttcttcagattctaagaatctcccagtgatgaaagagaaatttgtgtttcgtgtgtgtatagtttttattcccccaaaatgtaacagaataaagggtgactggcattatgttttaagaacaatgttatagaagtctacatagcttatagtgggaggatgataaaggaggtttgtgtgggataataagcaaagaggaagagaagcaatggtatgtggaatttgaaagaaattgtcagatcagggacttctagtctctggtggtccagtggttgagacttagcgcttccaatgcagggggcatggattcaattcctggccagggaactaagatcccacatgctgaacaatgaagcaaaaaaaaaaaaaaaaacttaccaaaaaataaaagttctaaagaaaagaaattgtcagaggatatagagaagatagatgacatgtgttttgggaactttactgtgaagaaaaggggagaggtaaaatgaatactaggcgttgaataggagattttccattatgctcgttttaaataggagtgatctgggttttagctggtaagagtgatccatttaagaaagcaaaattgaaaatacaaagtggagggaaatagttgtgttcagttcctgagaggatgatagagaatggattagaacacaaatgcagaaattagaaaggaagtagaacaacaactctgttacaacaggatgagaagagcggaggtcgatttggttggtcctggtgggttttgatgttttaatgctagtaagagttgagtttttgtctggtggcttctactgcctctgtaatcaggaaaaccatctgctgagaatgaggagagaagaaaatggaggtttgaatagagcagagcaaattttaatagagcaaatagagcaaagtttaaatgtcttggtagagggtaagagtgtggtgtgataccagaaaactggcaagtatccagatttagaaaagtgagaaagaattcagaaactacatattgctaaggttaacactgatcttcaccaaaactgtatcaaattataaagcaaatgtttgtaagaacttctaaggaaagaagagtgttttccaccaagagtgagccgaggcaaactgttcttatttccttttgcatgaagttttggggcttgaagatgagaagaatatttattcaggaaattatgtggtaaaatcttctagttgtccttgtgaacatggcatcaatcagaatgcaaaattttatcaaggaatactactagggaggaaatggatctggagaatctaagagaatatccattttagcattaatacaatccagagcattaaggctgactcacttctcaggattgtcgcatatgccttaagattaaaaaaccactttaaaccaactgaataattaagctgtagataacaatgcagtcattaagcttgaaatcttgtgtttcatacatgtagctttctgtgtgtttgagacaaaagctcatgagcacacatggcttaagattcagattctttctactgatattggtcaggttctcactgaccaatttgtacttggtcatttttttctttttt

SEQ ID NO: 54478 - DNA, 944 bp, Bovine  19866880508449
  misc_feature (1)..(1): n is a, c, g, or t
nttatgtaatgttcagcagtattggaaaactgaaatttgaaattttctttgagcaattctgtattttccaagctaacagtattattttttttccttttctctctttccatccaaaagtagaccaataaagctgaaatagttgaataaaaatgttaataattttgtttttaattttgtagaacttgacctctttcccgaattaattggaactgaagaaataatcaaggtatcatagctattttttattcaagtgcgtaaatattaaaaagtctattttgaattattggttaggtttcagatgttgcgttaataaaaagttcgtgttgcatgcatgattcattgtttgtagcactagttgctgagctttgtagattaatgtataattaataacatgagttttatgaagaagttggaagacactttaattggtatagtttttaaaaagagataggaaaggtttgttgataattagaaaaatgatggactttaaaaataatgatagctatgaactgtagttgcaaattggaactttttcattttctaaatgtttctaacaaactaaagtaatatttaagcaattcataatgtcgctacagcttatttttgactaacttaaccagtgattgatagattgataataaatgtgaaccagaatataaagtgtatatattcttttgcccatttaatttgattatttttgtttggactatgcatattataaagtctgttgccagcacaaggtccttgaagtaaatgggcctttaaggatatttataaattttaacattgtcctaagttttgaaatagagagaaaatgactgtttgtatcttatatttcatcctaagcccaaatatgctattcaccagaactgagataatatgttaaatccaggttttctattgttaatggtagtaggaatgtgtccattagtacatatatgtgt

SEQ ID NO: 54479 - DNA, 897 bp, Bovine  19866880568892
  misc_feature (1)..(1): n is a, c, g, or t
nttactcttttaaaaataaaaacttctaaatccatgctgcattaaatgtgtatttaaaaataatactgcacattacaaagtaagtttgaaaattttataaaatacagtgataatatagttgcttaaggaaatgtttgattctgaatataattttctacttttggatgaatttcctagaggtcaaaatattatattctgggggcatttagtatttgcatttctaccactgctctttcagagtcaagtgcttttgctgggataaaatgatcccaaccattaaagtaaaatgagaaaaattttaaatgattccttatctcataaatggaatgttcaccactagtccatatataattctacataagttctatgtttgactcaaggcaaacatctgtataagatcattagccacaacattttttcaaaggcggcccagggagcttaactcttccatcaggcaataatggaagcaggaactgtgccccagctttttcagccaaggaaactggaatgaagaaataatggcttaattcagtcctgaagtacagtagtttcagcataatttaatattgaagcctgggagagaagtgaaaagaaaaacctgcatacacttgtatgaaattgtgatccctgacataatgactcccatcaagtgtgagcctcaggcagcctttcatcttccaaggataggactcagttagacaacaggacagaatcacagcatcactatgtccatattcttttattctcagctcccccacccttttttttcctaacaaattccactctttttttcattgctcatgatcccaccaacagagttccttgtttgaatggagaactttttttctaaaatagaaatagcccaaatctactaaaatataacaatcagaagttttt

SEQ ID NO: 54480 - DNA, 1398 bp, Bovine  19866880592821
  misc_feature (1)..(1): n is a, c, g, or t
nagctactgcttgcctagttactacatgcatcatctcccaactttctgagcaacctttgaagtatctatcaaaattcccccattttctgatgaggggcctgaatcattgagagatgtgagcaatttgcctaagacctcatagctgaacatagcagatccaggactcagacgcatgtcttaaatactttttgcgtgtgctacattgcttctctttccatgataccagaccttaaatccaaggacaaagggatttatctgtgcctctttttaaagggcaggacaaatatttaaggtttgtaataaaacatatgcatagtatactgctcttgtttttattcattcatttattcattagttcagcaagtaggcattggaaacacaggcattaatacaacactccagaaagaattctaaagtaatcatattcagtagagaaatcaaatactcagagactttaatcacttaatgcacttaataggttgttctgggatatacacataaaaagaaaatgcatttagaaatgattctgaaggtagcaaaatagtagatggttggaaagcaaagaactacacaaagaaggaaattattttgccaggtcaagagaaagcaacatgataatcattttccagtgtatgaaatgttgttatcctgacaatgataacagactgttctccatttctaaatgaaatgagacagaaagaagtataagaaagcatagatggtttgcctaaatgtattcagtagtctcctgggcatgtttttaaattttggtttaatttatggaaaaaagatcataaaacttcccagaatggtggactctaatcacacaagagtgtataaactctggtggtttacaaatgataaattatgattttctttaagtaaggtacatgtgaagagaagaatgggggggaaatgacattaaaatagctgacatctccaaaattgtgtagaatgaagcatgttaatatcactatcctgcaaaacacctagttttaccactttccaccttaagttattctaattattcctgcagaagagttagccaatatttccatgaccatgtatatcttggtggccacagccttgcccttctccgtcacatctacatgtgatttggagcaggtgttatctgaagagctcccttcccaaatctttcctaatgcaagaacccttaagttttatagatgtaaaaactacatgggtaatcactggtgctgactcacaattatggggccaaaataaaactaaggagatgaagtaggaaggagaaaaaaaaggtcagtaatatatttagaagggattcaggaatgacacttgagcaagctttgtatctctcttttatttattatttttttattgatgtacagttgtgaaatattatatattacgggtata

SEQ ID NO: 54481 - DNA, 1874 bp, Bovine  19866880594280
  misc_feature (1)..(1): n is a, c, g, or t
ntggaagaagattttaaatgtacacaggttagtccccagtactaacacaagctgaaatacttttttctctttctgaatatgaaggttcctcccaccactccacacctgtaggcaaatagttaaagaaaatgattaaatactctatagacagattctacacctttgaatacagttctgtttcaaatacctacaacatgttccagctattatgccttaaaatgatttgtttagagaagggtttaacaaactacagcccatgggtcaaatctagccagctggctggctggctgttttgtttttccactcatgagcttagaatggttcttatatttttatatagttacatttaaaatgattatgtaagtacctacatcatatccttggttttatcttttggtcctcccagccaaaaatcctatcttgctcgtcaatgtggaaaaaaaaaatccctcaaaatagtccaccacataacttgtgtacaaacattaagacaataataaaagatgaagtattattcccaatatctaaaaaaattatccccaattctctaaaaaaaaaaaaaaaaaagctataattcatgtatcatgtggcacctcatatttatacctggggattttctaaatatttctaactaatgagaagtttgaaatccatctaatttccataatatatcttgacggcatctacttgtcctttaaaccatgaccatgaccctattttaatctttgtttgtactggggtttctaaatcttagtctacgatgatattataggtttgataattcatgaggaagggctgtcctgtgcactgtaggaaatttaagagcatccttagtctctacaagaagcacctccgtaactttgatgccccaaaatgtccacagaccttgacaaatttcccctagggagaaaactgcccccactgagaagcactgatctggactagtagtctgcaaaatgagtttgtgtatacttacagcatgtgtaggaaaatattaaaatttctacttatgtattcttaggatccacttacatatttcagtgagcacacatgcaaacaagtctcttgccaactgtgtgtggcagggggggaatcgaaagactgtgccagcacctgggaaaggccctccaattgctctgtctactcttacttctctcatcatgttatccagcagtcagatcattttcttcaatataaatgaagtgaagacatgccagactttgaaaaccttcaacaacctctcaacactctcagaaaaagatctcatctccttttccacacggcctgtaagttccaacgacctggccgttatccacttctctccagctctttcccacgttgggccttcaagcttgctctttagaatggtcttcccctggcggtcttccttcttatcctttaattctcagactaaatatcactgttttagagaaacattccttgacccactcactctaaagttggacacctttatctcatctcactgcccccatcagtatctatcacaccctgcccagagcagcacaatttctaactatttctttgcatttactccttaaatatccttctccctaccagactgtgtgttccatgagagcaggaactgtgctcagtaaatacctgttgaataaaaagtggatggaatgaatgatgctaagaaaattcagacttctttaaaatttttatggaaaaatcaatacagaattagaacatactggaaagaaagcactagactgaattgtccctaccggttctctactaggtatacctggtcaatagttcagtcccctatttcaaggactagatttcagggcctggggcataactataaaatcccatcaattattcactctctcacaggaaggcagaaaaat

SEQ ID NO: 54482 - DNA, 1103 bp, Bovine  19866880605579
  misc_feature (1)..(1): n is a, c, g, or t
ntatgtagaatgacagaaggtgctggagtatttcatatggtgtggggttgaatgaagagtcagagtcagttgtaatttttcagtattgtccacactgaatcttgaacatctcaagtgttcttgaaaaatcacatctgaatatatgaacctgtgaaatgagacccagctgcatacttctctttttggcacagtcaccctctgaagagtcaccctctggggagaagagaatccacacccaccttctctagttcatactgtaggaaaataatttctatagctttcacaatgagagagatatttttgtttctagtttctgcattttcctttgtataaaagatcctatgcatatttgtccaattgatagcaaataaaaagttttaaaagaaaattaaatacaaattttttttgcaagattgctttaataacagaaaatagcatggattcatttttttttaaggtttatgtatttgtgggtaatttttaaataagggaagacagtaacacataaggatgaaaaatatataactttgaatttgaattgtctaaagtcagtagtaatttctgtttgctactcttcagcttacaaaattaatgagaaagtcctattcaaaaattacccttttagaaaaaaattttagatgcacgcaattcaaattttaagtatttgtcataataattctctgctaatggattcacgttggacaagatcatatgtcttatacagtgtagagtatatttcagttatgtaatgtgctatgaattcaatctcttttaggcaaaacgggagaactaatagacaccagattttttgacatgtggggaggaagtaagtatgaattacgtgtaactgttctgttgcttgcactaaatcataccaatataatgtagtctgttgatgagaaaataatggtactatttggttttcattttgtttcttttcactgaatgtccagctcatatttaaatgattagtcatactggatgcacttcacttttttataaaaattgttggtgatgtgtaattaagagcagtgataatcacacttgagatttgttaaagtctgagtcctgttttctgcaggacaactaattcaaagctttag

SEQ ID NO: 54483 - DNA, 1382 bp, Bovine  19866880644213
  misc_feature (1)..(1): n is a, c, g, or t
nattgattttaaattaagcctgtaagaaggctttatatcccatgcttgtctctgacagaacaaggaaaagtgcattttcacatttaaatggcaaggaaatgaaagtagcaataaacctagattttctctttaatgccatagagttttgagaatacatccttgggaacttacttgaactgttcagatcacggttgtcaggggaaaagaaaaatataattattttactatgttttataatctgatggtggtgagtagagataaccgagtgggacatgtagatgttgaaatatcagtcattagcttataaccagcaaaggcagaagaggaattgctctcccattctatggaatacatttgtcttagtacaactaacaattatcttaatctactaagaagtgtcttacttacaaaaaattattttttcagagggtaaacatttaatcgatccaacctgatgacttctgctgaaatatatttgtctgtgacaatagataaaaataagtaacaatgtatgtgagctatgggacttcccatgtggcacagtggtaaagaattcacctgccaatgcaggagatacaagactcaggtttgatacctgggtcaggaagctcccctggagtaggaaatggcaacccactccagtattcttgcctgaaaaattctatggacagaggagcttggtgggctacggtccataggaatcacaaaagagttggattcgactgagtgactgagtgcacacccatatgagctatatgggaacaatgtattactgtcatagtataaaaagcatagatactttacttcccctttaattccatattttattcactgactctacagtattcttcagtttcttagcacttccactgaatttacaagtcaaacagattatgcagataaaacaccccccttctaccatctgcctctatctttatgttaggaacactttggaaataatttgccaagtaaggatgcttatgggaaacaatggacatttcacaaccacaaatgactaaccctgacatcagacaattcccagatatataaatgtgagatggtaagatttagcaaataaaaatataggccatctggttaaatttgagtttcaaataaacaataaacttttaaaaatagaaatatgtccaaatattgcatgggggtacattaaaaattattttgtactaaaaatttatttactgtatttgaaattactctttaaatttatccattaaatttagtgcattataatgtactaaattatcctgtactaaaaaattattcagttaatcttaaatttaatttggcattctgtattttatctggaaatcttctgcaatgatagtttgtagtaactttgtcttcctcttctgtctgagtgc

SEQ ID NO: 54484 - DNA, 2055 bp, Bovine  19866880718186
  misc_feature (1)..(1): n is a, c, g, or t
ncctgtagttactgattttcctcaattcatctactcaccacccaatatgacactttttaaaacactgattttacctcttcttgtaggatgattatgtacttgaagtgcggcactttcagtgtcccaaatggccaaatccagacagccccattagtaaaacttttgaacttataagtattatcaaagaagaagctgccaccagggatgggcccatgattgttcatgatgagtaagtgccacaccttaaacctctttcacacctgacatgctctgggtgtgtgtatatttctgttatctttgtactaacctaatattttggacccatggtgaattattcagccagggtagattattgcttctcatggacatgattaacacagaatagtttggggttttttttccacttagagctcctgctgaaggcagaagatgggtgcagggtcataggcatttgctcttgcattctatgctgagaacactttgtgtgatgagtcagtgttttagaacctggatttttacacgttctaaccagggagacattcctcagccactgacttcatgggattggaataaaattgatatcatgatatcatttttatttaccagaaatagaaatctgtatccaattgatctttccaagtttctgttgtaaaccaaaatgcatgtgcatattatatatgatacttagattaacctcaatcagattattttgatttatggccaacccattccatagtataataaaacgaaatgtataaccaaatacttaatttctataaagtgtctcattactaatattgtgaacattccacagtgtttcagattaaagcatagttccatggacaataaagtgaggagacaatatattaaaaatttcattgtccttactgccaagttgtcaaggccacaggctctgtgagttccaaatgtgaatgtttgatgcatctgaatggagtctttgtcccttccatttgcctccaggcatggaggagtgaccgctggaactttctgtgctctgacgacccttatgcaccaacttgaaaaagaaaattccatggatgtgtaccaggtagccaagatgatcaatttgatgaggccaggagtctttgctgacattgtaagtaacaagacagcgactcaagcttttcctgttagagcacctgttactttctaggggctaccaaaatcattttgttgtgtatcaaaaagaacacattgataacattaacatgaagttttcaagctgaattataatccatttgcaatccatagaactggaactataaacaataaacttttaaagtttatcttccagaaaattgatggatcaaaaattttcaatttcattgtgtgccttttttgtgagacttagtataattctgaaaaaatatctgtagtagaagcaccaactaatctgatttatccagcaaaataaacattttattccagcgttcaagttctgcatagcctcaaagagcagtcagaaaatagaattcagttgttcgcttttttatcaagccaaattcattttctaaacttaagaagtagctaattctaagagtacttttaaaaaagagaaagacactcatacaatcaagaaaaagcataacacatctggaaagataagtctcaactctgagaataatttggaagcttttatactagaaacaagggctagaaagacaacagggaactttgtgcatgccctagtgggagaagcttaggtgaatgcagaaatcataggctcccttctaaccttctggtctgtatatggaagggccttataaagggtccatcttcaaagctccagcccacaccagctggtcagagagcagggaaggccttgtgcacacacacttcagaggagcccttgttaaaagtctcattcaggcaaggtgagttgtatgtaccaagcttgtcatttgaaattgctttctggagactaaacctacacccaagtttcacaaatgcatttactaagacatgtggtgccaatggtttcctactgtggtgccagccattagctcacagcctttgcaactggcttgcccccaa

SEQ ID NO: 54485 - DNA, 1382 bp, Bovine  19866880739364
  misc_feature (1)..(1): n is a, c, g, or t
nctaaaacaccttaccttttcggcctctcgagttgagtttagattcgggtctgccttctcgccctactgcagttgccttgaatacagttttctttgcctgtttcattctgtatgccgcaatttttgttttgatgttggctgtgccactttctatttatccattcatcaactgttggatacttgtgttgtatcctctttggggctattgtgaaaaatactgctttgaatgttcatgcatatatttgcttttctatttaaaaattaaacattaggctcataacacattttttagaattgtccataaaagggtagtcatttaaggttaaattctggggacaagtgttttttcatgatcaaggaatacatacaactagatgtgaggacctcaaaggtcatttgattcagaatttaacagcctacaaaatttcctattttagagataagacaaatcttttcaatggaaatttaaatggtttgtacaggcaaaaagtgaaaaaaatggaaacaataatccatggctcctgcctcctactcactaagtcttccccaatatcaagggttcctaacaatctggagttactggttattctcttaagttctctgcctgagtaggaacctcttcaagagaaacaaaataaaaaaaaaatttactggggttgaatttcccagtaggaattatttgggcaaataaagagaattgaccatatatctgacctgacctggccatcacttggaattttcctctgaaactttgccctgcccatagggaaaggtttattctcatcatttatgttttgaataaaaatattttttttaatgtaaagacatttttgacatataaatgtattttggtgatttcagaagaccaaatgccatgtagaacctataattaacaagtattccactggaaaaaaaaaacaaacagtaagctcttgttttaatgattcaggctaaaggacgacagcaaaatatcagcagattttagctttccttggagggctttactgctacacaatcagcatttgtccttggtttttaattacttacgttaagaaagcttttttcaatacaagattcccaggtgttggtagctctcttcagttcctttatgtactgttcccttaattgttacttcaaacaatccgttacacattcatatgctaattacatggtccttgggcgtgagagagtaccccacttttaaaattctacttagaggtctgatagatgagatgtgatagctccaatgaacaagaaaaaaagaatctaggttcacttttttttgttgcattgtatactttgaaaaccagtaaatcctatatagagtagagtctatcaaagtgcttacatattttaaaatcaattaaaataatgaaatatag

SEQ ID NO: 54486 - DNA, 1079 bp, Bovine  19866880770543
  misc_feature (1)..(1): n is a, c, g, or t
ntaatgactctccttataataaccatatagaagataagtgctagtgtctccccccacaatattcaaacattatttcatgaacttttaaatttgtggaaaaagaaacttactacaaattctcatgcttggaatttcaaggtaatttgcaagttgtgacgtaaaaattcaaagcatattttatcaaagatagagaaaaaataaagatcacaaacaaaaatttggatatcatttgcatatgtgctgctctgtctgctcaaaattgtaaataaaaaggtcttggatatgcaataacaccttgggtaggaaggcaaataaaaacatgaaactaactgcctttcttctcctgggtctgttttcttaattatgttatggtagggcaaccagtatagctactaaaaacatgcatttcataataattggtgttgtatccagttcattgggtatagttcttgacactcttaatacattatcatacatggctaattagctgtttgaaaagcattcacaatgtcctgtgtcaggtgacttcatgcccactgcagttactacctgcccactgcaattttcccagcacattgtttcctccagtcttgttagaatagggcttatgaattgcttgagcagagaatctcagttagcaacagcaagcggtgcatctaaaaatccattaggaaactgtgataattggacacaggtcagcaatagcaattcatcacaagaacccccagtaaacacggtttgcccataatcaccaaaggcagttgcttgctgagctttgcacttacaaattacggtgcttcatagagatggagaatgaagtgcagaaggtagccatgttgaacttgacctttctttctctagtttctaccacaacctccactataacttagatattgattccacagcttaaaattatattcctaattccaggcagggcttccctggtggctcagtgataaagaatccacctgccaatgcaggagacgtgggttcaatacctgatttgggaaaataccacattccatggagagactaagcctgtgcgccacggaactactgagccccatgtgttgcaacta

SEQ ID NO: 54487 - DNA, 1197 bp, Bovine  19866880814042
  misc_feature (1)..(1): n is a, c, g, or t
nctattaatttttctgtcaattggaataataagcaggtacatgttcttcattaactgcctactatatgcaagggatttttttcctatcaagctaaatcaagtaaaataatttatgaaaatgtgctctgagaaacactaagctccgtagagttaaatcctgtgtgtatatgtgtctgcatgttatctgctcttgaactctgcatttcaccaaattctccttatggtgattgcattgctttattttatccatatttgcccaagtttctgccttggagtcttacaaaggtatcatcatttaaattgtgcatcacgttatttgtctttgtatcatagaatataaatgtgaataatattcacatgtataataaaaatgctttcttttcttatttttaaggacaaaagtgtaatggaattaaaagacattagaataaaattccttaaaaataccttcggaaaatttagttaactccgggtatttaaaagtatcttattttctagggcaggaaactcgccccaaatttcagtacaaattcagcaggtgttatccccagattcaaaatcagtcttctcttttatccttcaaacctgagcggtagtgtgtcaatttggactgatgctattgtgggctgaggaattgcaggaaaacctgccagatcagagcctcccaatatcattgagttcctagcagtgtctcatttgttgaagacaaattgttgatttgtctcattgttgaagaagttggtctttattgcatcctcttgatgcagtttaccgatagaagggagttaaaacggttcaagtgttttggtgagcatccgttctgtcctccatgacttgcaaattggcaacaccttacatgatgcctgaactgcttaataaaaagtgagctcctcagtcaagaatctgagcaagaggcagtcctaaatcataagtgatgactgtaatgaaggatgatcaggtttcaacgcataaacttacattcttagatttttggctttctttggacaatttgttttatggctacctggcattgattgagctctctttttcttatatccttcggacacttaaaatctgaacaaaagttggcagattgcaatatttttaacatttatttacctggagatattttaaagaattgaaggttttgtgaatatcaaatgccatcaatttaactgaatcagtgtgtgcaccata

SEQ ID NO: 54488 - DNA, 1018 bp, Bovine  19866880860919
  misc_feature (1)..(1): n is a, c, g, or t
ncttctcgtcgcaggggcttctcttgcggagcacgggctccagggcacacaggcttcagtggttgcagcacgtgggctcagtagttatggctcctgagctctagagcacaggctaaatagttgcagtgcctgggtttagttgcttctcggcatgtgggatttaacttgtgtctcctgcattggcgggcagcttctttaccgctgagccatcagggaagcccccaagatattttttaatgaaataatctttaaaatatattactgtatctcgtttatagtttttaaagatctgtatgtatgtacacatatgaatttcaatgcctagaatgggctctagaaatgcacacagctttctggtagtgattacctctgagagggttatacgggaagggtgagtgtttagagaatctgtgtatacactttggtgacagccctcctaagtctgaatcctggccacttgctgtatgtcctctctagatccttcagtctcctcatctctaaagtatctgggtgcctgtgagtattgctttgaacagatacagagcataatcaacattatatgaattagcaagtgtgaaacaaaggttcatcagcattattaagggagaattttagtgcaactgctgttttatttaactcttgcagaataaatcaatgtactagcttatagtctaaaataagagcaaatccagaaattttgatgtaattgttctaataacgatggaattgtgtaacaatgttgaggcattgagttccaagacctcctgcccattcactgctaactgaactaaactactcagagtaaataattgctcctctgctatctcaagggcaggaaattattgctctttcccctttatgaatcccacagtgctgtgtacacagcgggtgtgcgctgtttgctgataatgataatagtggggatgctgacagctgtgacacactataaagcttaatttaaaagccatcaggaaaatgtaacacaaaatatggcccttctgaattttgtctgcatggg

SEQ ID NO: 54489 - DNA, 1655 bp, Bovine  19866880889136
  misc_feature (1)..(1): n is a, c, g, or t
nctggtcttacggaaaacgatgatctagagtcggcagttcctgccgagcgcttgcacacagagagatgcctttgtgaagtcagccatagaaacctgcagaaaattggccttctttccttaatagaaccacgcgaacaaagatgagtttgttgctgactcagagctgaaagctttgttttgtaaagctctctgaatatattgcactctgccaaagcagaagggctccttcttaaaaaaaaaaaaaaaacgaggaagaactgtcagcggaaaccagacaacaaatcaaagtgcacacccttggggtggatatttgtgagcaaagtggtctgaaacttttttttttttttggtgaatactggtcacatttcacaagctgaataaaaatgaaagggaaaggaactttaattgatgggttgccttttgatttgcagagcaaaactgccagagcagatgtaccagcaaagaggattagattgtccctgctatgatgcactgaaattttctttttttcccctgtagtaaccccattgaagagaggctgtctttagtgtctaagattcagcgctgcaaagaaactgttgtccttgagtacaatgggccactctcccaaggccagacagaatatgtgaggagaaagctaatatctctttaaatccaggcaagacagtttcagttttactgttttcaaaaggcaaaaataaaagagaaattcgtggatgcattcagagttattaaaatatgcattcgtgtgaagcttaaaacgttcatgactaccgttcattattttcaaaactcaaattgaatcaagaagggctcacagcttgttttcttgtttaatttcatcagtccaggatgtttagagcatttgtttgtttgttttgatttgtttttctgttcttgttgagattctcatcagaaagatagcgctcactctcattaaaagggaataattaccagaatgttcatttgaattgccatctgagaaaccaaaatgatctgtaaatcacactgatggtaaatggtgtgcttcagtgagtctcaagtgaaggaagatggagcgggttgttcttgttatcacccttagtatgcttgggggaggaaatgaagaattggagaagtgcgtttcttcttatagtctagtgccacatcgttttgtatttttcagttctgggaaaaaaagtaaaagggcagaatgctactcagctggggtctgagtcccctgaaaatagctgtggttctctgtacaacctaggttgtggaaaagcatgaatgctggcaacaccacagactcacttattcaagggaaaagtgaggtcaaccgactgcagaagtgaaagaaacagtcctctctccctctcctcatcctccccactacagctccttagtgatgagctgcaggtctgccccaggggagagaaaactatttatgcaaatgatttctttctacactggctagccccagggtcaggccatctcttttcagctgtgaagttctgccttcggacaataacaagtaaatgcacagttcacacacacaaataagcaactgcacaaataagctagcatccccctctgttttgatagcagttatcacttcttaagatataattaattctcatgtgaaaaataactttcaccttatggtctcagtgatg

SEQ ID NO: 54490 - DNA, 1540 bp, Bovine  19866880897074
  misc_feature (1)..(1): n is a, c, g, or t
ntagacagacgctttaccatctgagccaccagggaagtccaagaggtgagagaggcttgacaaaaaagcccttggacatctactgcataaggtctttactgagctcctagcttttaatccagtttcaatggtaatgtccttttgtctaccagagtccatgaattaaagataaagctgcacgaagtagaaagcttctgaagaagggggtttccaaaacaagacttccttccattgagagggctttaaatttctcttttaagcaacacaacctttaggggttcagtttttctgtatgattttgcttttctaattttatcattctgctgggtagtaacaactttcattgtactgcctaggaatttatttcaatgtccatgagctcaattcaagcttttggaaacaaactaaaatcacgctttttacacatagagttttctgagcaattcctaaaggtaggcaatggttttctgtaagagtattgaattgaagatcaatttaaggcatctttttgggggcatggggaggagtattgggttttttaaattagtcttctgtgttcattaactattgctaactttcaatcttgtgttaattagccatatggatagtgcagctcatgttcaaggctataacactgacttactttaatggtaaaatgaatagatgccaaataaattttaaatgagatgaacacaaggaaaaaatcatttcagtttgctataacccatttggacaaagcaatatttgcagcagttactaaagttcacgtactctggaaatcatgaatacaggacttttgatattagacacaaatcttaggttttctaacaaactttggacaacctgtctaagctctgaataatttgaatctatctctcaagttccaagaatgggtttggccttaacaacatgaaggctgagttatttgaaacaaaatggattcaattcagtaaaaccagcaaatggccattgtttccaaaaaaactgactttgggtctgtctctctctttctcttcccatgtctctttctttgattttaatggacgtgtgatataattaactttatgtgtttgacatatttcacccgggcttttggctaagacattaacattccattccactttctcgtttgtagcgcatggcagttagaaaaggcagatgccctgtccactgctctgtggtccctgctgtcaggagccggctgtgtgaatgtgggggccaggcttcctctattagacctgccacagcagctgggcatttgtctatcagtccatctgtcaacccctagcaaaatcacacaagtatttccgaggctaatgctgactctggtactaagataatgagctcagataatgaggcaccacttccctttggatagcttagttgcacaaaaatgttgtgatgagaaaggactatttaggtctaatgaaagtatttcttagaaaatttaatgcacacacaattcctccaaagagtgcatttttaacaaactggaaaattcttgtggagagatacaatctccaaatggaagaagagatta

SEQ ID NO: 54491 - DNA, 1926 bp, Bovine  19866881040216
  misc_feature (1)..(1): n is a, c, g, or t
ngagttaaaaggagattaggtaatcacttatagtaaactgtatctttatttactctaaccagctttatatggtgaactgtcacttaccttgtgacttgataaactcacagggaaaacactgcttgacagtatgatttgtttttataaagcagaggggaggatttcagggttatattctgagtagtaaatggccataaatacaattcttcaaaggcctggaaaacacaaagattgcttataataaaaaccatcccctagtatatcttaaataacaattaattatctatattgtgctgacacacactttacattcaattttttcttcctggtgtcatacatctttataatgatgaagaaataaagctaccatatgttatatgcttccagatttatgacaattacaaacaagaagaagcagagtaagctaatttcacaaaagagagaaatctatttattgaaaaattcagtacctagctggcagtgatttgcaaactgtgaccagaagagctcttaagaaatgaaatatccatgttagtaatgtgattccactgaagacatttttcatatgttattttccatttttccactgttttcactagtaaaaccaatagaaatcatctaaattaaatctaataggaaatctgatcactcagaatcagtaatggtaaatagagattcactgtaaatcctcctgctcagttcagcccagatctacaagcatctaagagctgtttggccctctgttagcaatcttggcagaaattcagaagattgaatggagatgaattcttaatgacttcctaacatgtaggtggggggctctttccagaaggagactgagacacaagatctgtaattacagaatgaggaaattgggtacattgaggcttctcctcaggatggaaatacaggaagtcagttagcagaaatgcgattctgccgttagattcaaataacaacagaggagttctcaatatgcatttaaaatattagtttcgtttgaacaagaagcatttattcatgttggttgtctactgagactttttcggctattgaaaggccgctatgtggctttcttgagtcttctcgggtctaggatatgaattctgttttgtgatcaatttcacatttgacatttggtcctcatgctatggatctctaggtggtcgtattttgcatcttggagatgtgaaatattatgtgccaggttattcactccttgcctagtttgtgtgtcttggaaagttgtttcaaataaccaaattgccttgctgtacacctgaaacattgtaaatcaatgatatttcaataaaaaataaaatataatcataaattctagaatgagaatatctttccttgtgttaccatggttttccttaagtcagattaaacatatgcctgtttcctgtccaatatggaaggcacaagccacaagagaccagtcagcacccacactggggctgttctgattgacttgcaatatgaatataaaatacacaccagattttgaagctgtcatatgaaaaaagaatgaaaatatctcagtaaggtatttgtatcagctacatgatgaaatgatattttagatatgctgtattaaatgaaatacactattaaaatgaattttatttgtttatttttacttttaaagatatgtggctactagaaaatttgaaattttacatgtgcctcatattgtgtatctattaaatagtgctgtatagctatatagtcaatatattatagctacaaattccgagcgaatcactttaatttctttcccctgtcccagtttgtatgttttatgcagcctacaagacatttgttgtgggagaatacacaaggttcatatgaggcagagtcattggtcacccagaatatgaccctcaatagcagcaatactgccggatcagcaggaaagaaggg

SEQ ID NO: 54492 - DNA, 944 bp, Bovine  19866881099297
  misc_feature (1)..(1): n is a, c, g, or t
nagtttgttttggctaattgacaaaaccagtctttggttgggagagtgaagatggtaaggtgtggcagagttttgaatactttcatggaccttcaattttctaacagttaaaacaaagaaataaaatatgttcttttatttctaaaatatttatgggaaaacagaagcatactgcccatgcaatggttaaaaagacttaaaaaaaaaatgattgtccttacacatctgtaaggaaattatatgaattctgacctcaatctatccacttcctacccaaacacaaagcatgaaatgatacatctgctaaaaatggtagagctttgctttaattcctcctctctcaattttacaaacaaattccaagaggccaaaggaaacatattattttgaaagtgtagttcatttctcaaagatattattatttccctcatcacacagtatgaagtttcatgtggtagcccatgtaatttttatagctaaacatatggttcaaggacaaaacagtcatggtccacagaaagcagagattcaacaaaatggccgccattgcttcacttaagtgggttgatcctgactttcttatatatctgggaaagtgtataaaaaatcttcatgatttaaatatcctggggcactattcatcacagaaacaaagtgaaaaagaagtaagttaatttaaggtttattatctttaaagagatttagtgttaaaattctgattgccaatttgcaccatatttatgtttggttatggaaggcttcaattctctctttatgcaccttggctcctgtccgtaggcggatacccattttttttcccttggaagagatgttgggatttgaggttgggccaagaaaagctaaagcggctaggaggcacttacagatggagataattagcatattaaaaataggccagccagatttttttttttttttttttt

SEQ ID NO: 54493 - DNA, 820 bp, Bovine  19866881156651
  misc_feature (1)..(1): n is a, c, g, or t
ntctttcctaatttttgttcccctctcttgctggcattccctattctgttgctgagtgaaggaattagttagggtaagatagaataggctccctttataggaaaggtcacttacagatttaaaattctgggatgaaaatggaatgcatgaccatgatgctctatttctatttctgaaacaattaagtcttccctcatggcaggattattatttaaccccttcacatccactacagagtgggtatggtaatgtgcaattcaccttggatttgcacagctcatttctgtcactggatgtgttcttacctatcacttcaacagaaggtggtaaaatttgataaagataaaattctgtgcttttatacattcagagtgatcgttcacagctcctctgggacaaaaataaaaagagcgtaggttgggggaaaatataggtctacccacagttttgcaagaatttttctttctgtttcttcccaaatagtgataataatcagctcagaattgattaggtttaatagattaaagaaaaaaaatctcatctagcaaaaaacctctttcttttaaggagttttatgcttcaaattttaatggcatagccttttaactgtttactttgaattatgtaaagactaaaaatgtatgttagtttttttaaatctctaattacttggtttaattaatagagacaatttcacagcatagacgaaaaccaaagcttttatgagtcactaatttatttatcataggaattaatttaattgcctgtttcatgcttaaaacagctttataatactggttaagtaagtttcaatacaatc

SEQ ID NO: 54494 - DNA, 1785 bp, Bovine  19866881208051
  misc_feature (1)..(1): n is a, c, g, or t
nattattttatgattattttaaaatgtattaacccgagtactcttctttcttgtaacagtatttctcattagaaatggatttatcacatttctcttaacgctgtagtttgtgaaacgagaacgaattatagaccttttcagaagaactttttaaaataactagatgatttctcctctgtatcatttgttagtgtcacagggatgagaaaacaactttaaactgacttttctggaaagcaaatgagatatatttttgggaagggtgtgggttatgctttcaaggggtcaggtctaatgaccagatttcaaggaggaaacattttagttttgataaagcctcagattggcatattttgatagaaatggtgatttggagtcagttgacttgattgatgaacatatttcaaaaactctggtcacttgtttgctgctgctactgctgctaagtcgcttcagtcgtgtccgactctgtgcgaccccatagacggcaggcagcccaacaggctcctctgtccctgggattctccaggcaagaatactggagtgggttgccatttccttctccaatacatgaaagtgaaaagtgaaagtgaagtcgctcagtcgtgtccgactcttagcgaccccatggactgtagcccaccaggctcctccgtccatgggattctccaggcaagagtattggagtggattgccattgccttctccatctggtggttcataacaaagctcaaaaaagtacattgtcatttgtgatggttaatttcacttatcaacttggttaggcaatggtggtcactagcttggtcaaaccagtcacaccaaatgttaccatcaaggtattttttaagatatgattgacatctaaaccagtaagagttccagtaaagtgggtgaggctcggaaatatcagttaaagaactcgagagcaaagactgaggtttcctgaaaaagaaggtattctcaagactgcaatgtagaaattttgcctgaatttctagcttggaataaattcttaaaaacaaaacaaaacaaaacaaaaacctctctctctaaatacatatatatttatataagcatacacatatatgtttttctaaggaaccctgacttataacttgctctttttcttttcctccttctcagtttccactattttagttggatgtgcagttatcaaatggcacaagaactgttgttcgtgtttcactgaaattattggcactacaaagaatgtggtgccaaagccacatctgggattaagaggtttggaagacatctttgggatggagctgtagctgtgataagaacagttttcttttttgactgtgctgggtcttctcattgaggtggcttctcttgtggagcatgcaccccaggctcatgggctcagtagctgcagtgcgggagcttagttgccccacgacatgtaggatctcagttccctggccagggttcctacccacatccgttgtattagaagatggattcttaaccactggaccaccagggaagtcccaattaagaactctaagtgcctttagttacgtgtatttttactctgttttggttataccacttgttccctttaaacaagatggtatgatggaccgagatgtgtaattcaattgatggtatccatcatgtgtggactcacctttttgatctttgtgtttcttagagtaaaattcctcacagtataataagcaagcacttgaatactcttttgagtaaccagaaagttcccatactcttcactcccatccacaggccagtacggtcaca

SEQ ID NO: 54495 - DNA, 2243 bp, Bovine  19866881211349
  misc_feature (1)..(1): n is a, c, g, or t
nttgtgtggagtctttagggttttctatatgcagtatcatgtcatctgcatataatgacaattttacctcttccccaccaatccgaatactttttacttctttttgagactatttgattcttgaataaactacagagaatgagaatttttaactcttattatcattaatttaatttatatttgttaaatttaccattctttctccaaagtagaatttaaacttaaactatgagctaagaaaccccacagcacccttgattaatgctgaaaaacattataaagatttccccatctgtctacaatttctatgacagcttctcgtcaaagtgatgaagtatttgcatccattatcaagcaaacaacctgaatctcctgccttgagatagatcccacaaaaagtaactactatttcaaaggctttagaaatcccacagacctatttttgctttataagaaattctacttcaatgtcacaaggcaaagtaactgacaaagtgatatagaaaacagctagcgttcagaaagtttgatgagttctgtacctgttcacatcttcggtttgatgtctgtttttgaatcctttatggtctacttttttcctttcatccacttaacatcccacagtgaagtcctcttggggacaaacttttctttcagatgcttttcctttctccacccattaccaggagcaaaatcatcaataatgactgggatcctgagtctacctgaaatgaagagaaatgtagagtctttccaggaaccaaagaaattctaggtttgcatgggtttgagaaggaacaatattgaggattccaatatcaaagaaggcttagaaataagagtccaaagcagctggcatgtcaaccaagtattttttaaacctctccatgtgctcagaggtaaaccagtaagaaaggggtgaaagtgaaagtgaaggtatcagtcatgtccgactctttgcaaccccatggattatgcagtccatggaattctctagcccagaatactggagtgggtagcctttcccttctccaggggatcttcccagggatcaaactcaggtctcccacattgcaggtggattctttagcagctgagccacaagggaagcccaagaaagggtaacaattgggaaatatcaaccaaaggtgtgaaatgagggagcagtagcgtaaaggaatcttactgatctaatagtctgtaattcatgttcttttccattgtagagcttaagcattaaggtaggttgggagggagcccaatcctatgtgtagcaagtttacagttttctaggttattatttgcaagtcatttaaactttttgtacagatcattaaaagaaagaccctggcctagaaagaaaaactcatgtaaatcaaaatgacattgaccaaaaaagaaagaaagaaactaacaagaaagaagtatgtaaaggcctgggaatataagagataggtaaatttgggatcaatgagttaggattacagttaatacttagcaaatgtttatttaacactagtatttgctcaaaatgttatacttattatctcacttaatagagaggtaaagtagtcatcttaagcctgcacagatacttattacacttgaagacagaaaactcgattctctgcctccagggccaatggcctagtgtttttaactcggcacgtgttcataatctggagccttaaagtctcccaaactgatggcctgattttaattgttcaaaggagcaagagcaattgctactagatgcaattgactacggagaatttgtttttacaagtagccagttaacacgaatgaattatgaggtgacttgtcactggcaaagatcagagatcctgtctctcaggtacccacaggggttggagaactatatccttgggctcttccctcttaagggtctgtactttttgaaggggaaggaaatgctggaatgaggactactgtcaccacagggtcagcaagaaagtcagtcctctgagaagagcagatctaatggtgaagtcagcggcccaagataatgaaagaaaccctgggggaataaaagcaggaaagaaacgatctggagatggttaacaggaaaatactagtgcacttgcaagaaagaaatccatcagtataaagtaaaaactgaagaacccttgggaaatcgagaaaatgctgggagaagtcaagggtttcttctattttctttctccttggtctccaggtaacagttatatggcacaagcatattt

SEQ ID NO: 54496 - DNA, 795 bp, Bovine  19866881260796
  misc_feature (1)..(1): n is a, c, g, or t
naatagcagcatcaagaatgtactgattttcgaaatgtgggacagaccattgttctaatcttgaaaattttcaagatctttgctgtcgtcccatcataaaaactaccaagacacattcgcagtattttatttttcttacatctatattttggttgcatactcacttatggcctcttcctattattataataataataatatgataataatatatgttattataattttctatagagagaacaggaagatttcctttttgcagtatgatgaataacgattaaaaattattggtaattttaaaaagtttctcctgattttacagcctcctattggtaatgtgcttcccttgtggctcagctggtaatgaatccgcctgcaatgtgggagacctgggtttgatccctggcttgggaagatcccctggaaaagggaaaggctacccactccagtattctggcctgaacaattccatggactgtatagtccatggggtcacaaggagtcagacatgactgagcgactttcactactggtaatgtcacactaagatgtgctctgacatgatgaaatacataaaatatacaactttgcccacagactttggtgctattgtcttaacacaggacatctaataattatatttcacaaattagccatcaggaaagacaaaaaacatgtggcacatttataactgtatatgctgcattattggacatattcttaacaagaaagaacttgttttgactagacactgatgaggaccaaatcctccccttctaactgtatacgtctcat

SEQ ID NO: 54497 - DNA, 659 bp, Bovine  19866881262828
  misc_feature (1)..(1): n is a, c, g, or t
ngtttcttcttctctgccttggctctcagattggctcataagactagaaatagaattgttgtagaagatattttcaagtatgtaaaagtttatagattactcatatactcattatctaggaagtatttttgttattgccatttagacaagagatcaaacaatagtttgactaaatttttttgtggacctcaccacagtgtcagtatgttgttatcctagggaaattgctgaagggaagtgtataaattcgaattgggcagataacagggtttccttttttctttataccatctttctccatttctgtgatgagcttgccaattaaaaatacattttgattgaggtctgaaactgatattttggactcaaaattcaatgaaaaagaaccacagaggcatgcgaccaataaccactcaaatttaagcgaattagaactcttctgttttgccacactagtcagaaagccacaggcattccaccaccccaaaaagatctggagaactgacggaaagtataaaaaatgaacacagattgtacataattgtgctcctacattcttactccaacaaccatagaaagaaccccaaatttcaattcaaaggtctcccttgcaaaaataagtttttctaataacaatttgactaagtttttcactcaag

SEQ ID NO: 54498 - DNA, 1174 bp, Bovine  19866881279596
  misc_feature (1)..(1): n is a, c, g, or t
ngaaaagctagcataatctaatgattgacagttataataaatgccagatagatttccttctctaatcaacttgatatggcaggatgagtcaactgtggatatagaatctgttattttaccatcatattcacattagagcttggttttgtgatttgagaaatagaaccccttaatggaattaattttgacattgacaaatactggtgattcacttagctttaccttacatacttctgaagtgaaatttcaaaaggttattttgttattatttcaagcataaaaggatcaaatccttaaatgcactcggtttagatgtacctgtatattcctgcatgtacatagctaaagactaaatattcttttaagtggatttgggggcggggatagtagtttggacagaggctctaaagaataggcactaaataaattatgccttcaattcttaaaaaacaaaagctcagcaatttgataaatgtctatgaagttggatttcctttcatcccctactaaggaaacttactcgcagtccaaatggttaataacttttattttgctagaattttatataattcaagtgaatagagtcagagtcaaatataggagatgagaccacccacaaagcagtttagcaatatagtaagaacactagtgctgaaatcaggcctggggttcaggcttagttcctgcacttaattgtgtaatattgggtgtgttatttaacctttttaagcctcagttactcatctgtaaaataaagcttgaattattgaactcaaagaaacatttattttctagaagagtgcctggtaaatagtaaatgctcaatgaattatttctattataatatcaataaacattagcatatctgtattagggttctccagagaaccagtatgaacctacagagatatagatacatatgtattagttggagttctctagaaacccaatatgaacctatagagatatagatatgaaatatatagataagtgtgtatatgggggggaggtggagagagagatttattgcaggaattggctaatgctatgacagaggatgtgaagtcccacagtctgctatctaaagctgatgaaacaggaaagccagtatcgtaacctactctaagtccatgagcactaatgtccaagggaaggagaaaaggatgtccagctc

SEQ ID NO: 54499 - DNA, 1113 bp, Bovine  19866881280576
  misc_feature (1)..(1): n is a, c, g, or t
nactttgcttgcttcacagcttgtttaccggcaaataagaattcccccccatatactcaaggttatctttaattgtaaaagaaactttttgttgtttcattagtactagtttaacatctttaagcttttaatcagagtgagttcacaattgcattttatataattgaattgaagttttaaaaattggtaaatttgatagaccttattttaatattgttttctgatttagttgtctgtattttaaaaaatataaaccttttatggtataaagaatcaggttattttatatcataaatatctaaatgtataatctttaatgtcgcaactatttaaatttataatcttttagagcctggtttttagataagtccctcatcttaaattattatatcctaattcctgaaacaaaaatatgttacctgcacattaaataaggatctattattcttgatatacaaaatgaaaatataaaatcaaaggagaatgggtttaatgtacatttggccaaaaatatgggagaaacctattttgttttctgcaataaccaaagtaatgctgtcattaacacaatcatgttttcaatctgtgtagataaaatttgtttcaaaaagatatactttagttatttggaattgccgagttggaaagagagcaaaattaccttgtgggggaacaatgaaaaggaagacttaagggcaaaatggaaaaatggagaaaacaactagaatcaaggaaattctattttcaggtcatatgcattggatatggaaaagactgtggtgaacagaatgagattgttaggtttggaacagcagttattgtctaaaaggttagctataaataccagcagccagtctgcagagatagaatccaagttacacattagcctattcattcacatttaaacatgcaggaagtgagagttaaattgcttcaccatgacgaacatctttaaatattagaaaaatgcacttgattgattgagaaaagacttctcagctcttgtgctgaggaatatcaaatacttaatgtctgaaaagtaggctatgtgtgaaacaaaaagatgcctatactttagacgggtgggggtggggttggggtgaagtgtggaat

SEQ ID NO: 54500 - DNA, 1199 bp, Bovine  19866881302820
  misc_feature (1)..(1): n is a, c, g, or t
nactagccaagaaatccatttaagattaaaagcagtatacgtttttcttaacaatatcttgatttttaaagaatcagttccaagtcttctgttattcaaatcttgttaaatatcagtaatttatggtaaccttgaaaagaaataaaccattgggattttaaatcatgtttatatgaatttcagtggatctttgctgaatgccttatactatattttaattattttattaacttttctgatactggaagattagactcaagaatcgtgtaaaaaagaggggaacaaagattttttttcctttgattttcattttcatcattttctcacttttcaaatattaaaaagtatgcattggtattttactcacccttctttattttaaactctatttttccccagttgatatttttatgctggacactgatggagtaataaatactttactacacaaaatgttttttagaatgtgctcctatttagaaggtatatagtacaaagatattgaagtacaggtaactatagatattttcttgaactattgttcattcaggaaatatttatttaggccttaagtgccaggttctaagaaaggttctgtgaaattacagtatgagcaagaaacagaaacatactgtattccaaatagatccaggctatcttagccattcaggcttctacaacaaaataccatagactggtggcttataaacaacagaagtttatttatcacagttctgaagaaccgaaagttaaaggtcaaggcaccagcagactttgtatctagtgagggctgtttcttagatcactgttttttcactgtaacctcatatttaggaggggcgagggatctctctggggtctctttaataaaggcactaatccttgatgtcagtcagagcctttatgacctaatcacctcctaaaggccccacctccaaaggctatcacatggagagtaggattctaacatataaattttgggagggacttaaaccttcagtccattgcactgggattgggcttccctggtggctcagacagagaagagtctgcctgcaatgctgaagacctgggttcaatccctatatcaggaagatcccttggagaaggaaatggcaatccattctggtactcttgctggaaaattctaggacaggggagccggcaggctatatagttcagcagtgcaaagagtcaga

SEQ ID NO: 54501 - DNA, 1677 bp, Bovine  19866881336361
  misc_feature (1)..(1): n is a, c, g, or t
nggatgggcctgtcactgctgcccacataccattggttaaaacccaaccatatggtcacacacctgactgcaaggaagactgaggaaatgtagtcatgctttgtgccaggaagcgaaagaaatgagtatgatgaatgcctagctagtctttaccatattctctcacatgctaagtgtgggaaaaaagaaaaaccactaaattcagattttccacctgtgatttagccaaagtatgaagtatatggagggcttcctttgtagctcggtcagtaaaggacctgcctgcaatgcaggagacccggtttcaatccctgggtcaggaagatcccctggaggaggaaatggcaaactactccagtattttcacctgggaaattccatggacagaggagcctggagggctacagtccatggggtcacaaaacagacacaactaagtgactaagcgacaacatgaagtatatgaaaggctaaacttatcatccatacgatgcatagaaggacgtctgctcttagagaaattggttctctgggacaaatacaaacaagaacaatcatttatcagtgaaaatgcaataaacactttcagaatttttgattaaaatataaaataaaacaattttcatcccattttctttcatcatggataaaggaaactaatgatgatgacacccaaatatgtaaatattttactccattacctcctttctccacactcaccaatagtaacaaggcatagttagcaaagcgagttataaagaaacgaagaggggcaatgggggctcactgtgataactcaataggtagcttgttggtctcagatttttctgatctgttggagctggcaaagaagtgggtatatgtagaatcaatagatagggagataaatccttgatttaaaataattttccatcttcctttcctcttgcataggttctacaatattcacataaatggggatatttcttcagagccaacaaagtgcgtgtagatgccagcacagatctcagccggttaataggaacccactggaaccttccaagaggggaaattacataggagctccttgtccattaatcctgacaacacctacttactgaggagctctcatcatggtaaacaacggaaatgaaagtgaagtgaggcgtagtcttattcattacatctaatccagggccaagcatagcctatacatttagaaagctccacggtaactcccatgagcctcatgattgagcaccaccactctcataagataactgccaagtgaggtagtggagggtgagtcagctctaatatgaaggggagaccaatcagatggctaatgatatttagggcaggatgaaaatcaagctcaacaaagcatttctctatgaaatgtaatatgattgcaatgaatgtttttcaatgatgcattttgatcaaactagctatagatgaccaaccaaagtgctctttggggtcaagatcagatgaaaatttacgtagagacaagtcactctaaaacacatgaaatttggcaaaaatgaaaacaaacaacaatatcacctagacatggattgtctagctgcttgaaacaaaggtgacttctagtcttctatatacagaggagagccctttcctgtgtattgtgggctttatgtgtatgccatcctttcctgttaagagtcaggtaca

SEQ ID NO: 54502 - DNA, 1042 bp, Bovine  19866881422560
  misc_feature (1)..(1): n is a, c, g, or t
naaaagcacaagagccactcttcagacctttggaaccttgccagaggcagacagccatcagcaacagaaataaagcatgatgggtgtgaatgtttaggataaataatgaaacaagaaagcctttttctaacagagaaagtggaatttagataacacaatactgggacttcctggtagtcccatgactaagactctgctcccaaagcaggggccaggattcgatccctgctcagagaactagatcccacatgcctgcagctaaagatcctgcatgccacaactaagacctggcagagcccaataaataaataataaaggtaaattcttttttaaaaaatagataaacccagtatttcaacaatcactgatcacagtgaataatacatgactagaacataggctgtcatttaactaagcattactgattaaactccaacaaaatattccatttctgatttttcaaatccatggcgcagtggtaaagaatcctcctgccagtgcaggagatacaggagacatggcttcaatccctgggtcaggaagatcttctggagcaggaaatggcaacccaccccagtattcttgccaggaaaatcccatggacagaagactctggtgggctacaatccatagggtcaaaaagagtcggacacaactgagtgactgagcacacacatacacacacacacatccagtcacagtacagtaagaacgccccaatatgaactgatctagaaagcagaagaaaagtggaaataaagtaaacctcatctccaatgtcaggaacattcttaataaagtatgcataatgagaggcaaatgcaattgtaatgaagcatgatggcagttacaaaataacatttcccatgaaacaagtaagcagaatgggtgaaataagagtgtcagtaagtgctttggggaagggctggcatttcattttacaacagatttcttagatacagaagaccagaacattcataagatcactccaaagttctacttatagccacagagatgttgctgatgctaccagtccacttac

SEQ ID NO: 54503 - DNA, 1034 bp, Bovine  19866881487177
  misc_feature (1)..(1): n is a, c, g, or t
ntcatttaatcattttcttgtttttaaaacacactaatttgacctggagtttttctctagtttaactctagagctttaaagaacaaatgttaattacatctaaattcttttacattaatatgttagaaataataaaaattcctttattagatattatttaaactgaagtgaaaactcattcatttaatctttttaaatgtaagactttatcaaaaagagacatggtgtcagcaggaattactttagtgaaataaattagaatttcaaaaaaaaagtgaaaagcttacatagctatttactgattttcctatttcctaattttccattttgaatcaatattcaaattgaactgaatactcaaatttgaatttaaaatgttacagtgatatattgagttttcagttttagtattttaaaccaaagtggttaagtaaagaaaactggcagaaacttgcaactattccaagcgggttccatttattcactttccaaaaatgtaaaacaaatgcaacatatactttaaatattcctgagagataccgcaacttactttaatttattgcaggagaatgtggcagattgcaacgactactttgggacctttgcaggttattgaatatttacaataatataggatatgtggtgatattcctgtcctgaaaagattattaccaaatagaaaatatatattcctaagagaggttttaactgtttttggaaagtcactatgaattgccaagtaattcaactatgttgtagaactcaaagcttattgcatcaatattcattaaaataagtatataaaagttaaattaagctacagattactccattttaagaaaatttagtattaaaaattcatttataaggttaattaggaaggtaattcttcaaattttcctctccttgaatctttaatatatctctattttaaaataccaaatatttaatacatctatagtttctttacatttatttatctttctcagtttttacagtgaatctacattgctttataataactagttccttta

SEQ ID NO: 54504 - DNA, 906 bp, Bovine  19866881526848
  misc_feature (1)..(1): n is a, c, g, or t
naattgagggttgcatttatgttcaagatttaatctttattagatttaatctgaaaatatgtttttattacatgaacattgtataaaaggaaaaaatagataagcacacagaagaaaataaaaatcccctataatgttattatccagagataactgctatgagaatttgggggaatatctttctagcctttctcttaagttaaaaatatattattatgtctcacaaaaatgaggctgtaccatacttgttttttgattttgcattactgaatgatataaatatatcattaataccattcttaattttatgtatagtatcgtcatagcaatttattaagtttgtcacccagcttgggactttcaggttatacttatttattttgctattttaaatttctaatgtcctcattttgaccaagagagaaggaaaacgtgtcatgaaaattgttagaatcctactcttggtaaatgcatggtagaaaaatatattatgcaaaatacattgcaagtaattgcaaaagccatgtgaggtctgcatatccatgtaaacttcttggggggagagatcaagccttatttgtttttttttttttttttgcattcataggaaaactcaataaacatttgtgactgaatgagtattttaccagaactcagtcctctatttttgcatttttacatagcattgctatttattaaaaggcatgcatttttggcatcatggaatgcacgctggctcttctaagaatcacagaatttagtagaaccatttgatcttgaaggaattagtaaaaattgtcttttagttcatgagaaatatatgtcagtaaccacacaaacaggaggtgatgtccagctttgtcccctgcctcccaggaaccaatacctgcccgctgccctctcctt

SEQ ID NO: 54505 - DNA, 3052 bp, Bovine  19866880633962
  misc_feature (1)..(1): n is a, c, g, or t
ngttctgccacagtggcccatgagataacagctgcccttcttacccatgtacagtttgagaaaaaggttgagatctcttagaccccaaggtctctaataactcattttactgaataaacctatgtgcccctcagagtacaagctatccagaaggaaacctgaaaagaactaacttcactttgctgtatagtagcaaataaattttgcctcttttgaaaaatacatccaattcccactgtttgtgttggtgattttatcatatacctaactcatacatatgaaattttagaagcacacacatgtgagttcctgtgcctatttaaaggcaacatattctcatgtaacttttttttacattacttctgcacccctgcaaaaacaactgtaatgttttaactatatggctcaaagtatgtttgaagttctgaaaagtcaagtgtcttctcatccttcatctcttccaaaaactgtctgtctttttcacttgtttattatttcagctgaaattctggaatcatttggtcatgctccaaataacatatgtgtgttacgtttataaataaattttggaagaattatttttgtgtgaacaaatattaaaaacacaaatttttttaaatgacaactgtttgaaagattgttgaaagaatattatcttctgtaacaacaaacccagtaaagtgctatttccccactacaagaacatcttagctcaatgtgtcaaaaaaaacccaaaatgcttttatcattatttcattagtgtatggttctgctgacaaaaaaaaaaaaaaacacccagacagaaaggaatactcatggagggaaacaggctacatgcattccagaaaagtttggttatgtttttgaaactcttaccaagaaaggtttctagtgtttgactcactaatttcactgctaggaatctacctattaaaaaaaccaccacactattaagggtctactgtattgcacagggaactctactcaatactcagaattgatctgtatgggaaaagaatctaaaaacagagcagatatatgcatatgtgtagctgattcactttgctgtatagcagaaactaacacaacattgtaaatcaactatacctcaaaaactatttttaaatcatcagagatacaatttaatatttatgcacaagatgttgttattcagcaaaaaaacatatgtaactttgcaaaaataaggggcaaataaattagggttaattcaaatgacaagctatccagctgctaaaagacatgtatttgtgaagaactgctaatgccagacaaaatgttcctggtattacacagggaaaggagagtaggattttaaatataatagtatgaccccaaagcaatatgtaaaaaatatatgtgcacacaaacacaagaaatatttacactggcacctataaggtagttaagagcatgggcttttgaaacaaagcgacctggttcaaatcccagatgtgtggctttccagctgtgtaaccctgggcaagtcagttaacctctctgtgcctcagaatgctcacctggaaaaatggggataacagtacctacctcacagagtggaacattaactgagataattcacgcaaatacctcagtatcatgcctggcacactgcaagtattaactcctagcaattattagtaccattaacaccgaaaatgaatgggaggaattgcaccaaaacgctaataggggttatctatcttgagataagattcctccaggttctttcaattttctcctgtgcaactcttctggtttttttcaaagtttctatagtattatagaatcggaaagaaaaaggtgtcacgaaaaagaacgtcttagtatttgcctcgtgctgtagtggatgaaggcagaaagggtacaagacttagagcggagagtgagcaacactctccctcatgtctagcggtttctagtggtttctccgtgcgctgtggctgcagccctctgaacctcgctactcacaggcgcggtccctcggaagccgtcctccccggtgttggtcacaggaaactcgccttgccagatgttggcataatgctggcctttcggctgcagtttgttgccccaggggaaaagtctgttagaagagacacaggcatcagcctgtcaaacatgcacaggcttctggccacaagtcaagaagaggaaggcagtgaaagggagagagcacactgctcgcttgttccaagtgagttattttatttttttaatacataaagcttttaatcaggaatttttttaacttccacacaaccaaatcatgtcaagctcacaacaacatcagtctctcccgaggcctcaggaggcctgatataaatcacctcactaaaagacgggcttataggaggctgggagagcagccatcattctggacttatatggaagcataacggggcaccataacactgcactttttaataaagccttcactattttaaggagcctttttagaagctgaggcccaatcgtgagttttctgtctcatggctctggaagcagagaaatactgatgtttcaggagacgcctaaaataagaaacccctaaaagcgaaggcagcctgccagaggggctcgaaggaggaccacgtggcaccgggatggggctgcgtggccggcgcccaccccaccagccatgcgcccacctctgcctgggtatttcctaaggaacttcaccaacgtgagtaaagcccagtaggaaagagctgccctggtggttgtggttttaaatcaactgtccagagtaagttcctgtggatttagaaagaggatccacatactattaagcaaggggagaccctccaagtacctattttgcaggcctcctcgacagctgtactcccattcggcctccgtgggcaaacgctttcccgcccacgtgcagtaggcgacggcgtcgttccaggagacatggagaaccggggtggtccggcctggggaacagagagcgcatagtgaggagggcggaaccggaactggaaacagggaccggctccagccaaccgcccatcttcgccttcacctaaat

SEQ ID NO: 54506 - DNA, 1571 bp, Bovine  19866880798447
  misc_feature (1)..(1): n is a, c, g, or t
ntaagaatggcatttttcatgatcaagtgatgagaagtatttgcgtacccagcaacttacttatctgataataatctgacccgagattcagtccgaggtggggagtggctcttgtaggaaagatgtaggaaaaccactagcactggagtaaagagcccacctaacctgagagctagcatctggcccaggctctgccaccaaccactgtgacaccgtgggggaaatcactgcattttctccaggcttcggttttcccatctgttcagtgggctttagcttgaagccgtgatcagcaccagaagcaggctggttaccatttcacaaggcagcgctggtgtccaggagccttgtctgtccagaagtaggtttctctttctttgggattataggtcttctttgtcaagataagacaagtggatggaaacagccaagtcttattctaaggccaggtggggacacggccaggatcttgggtcacagggtcccctggactagggtggcagtagcaaactcagcactcaactttctttcacacctgctgtcctttgctgcccgtagtctaattgttgctaagcaacattatttctgctttttttttttccctcccttttctttcggcaaggccttgaaggcatgaaccggtatcttatttagtttttaaatacccacatgccaaggggagggccgctcttaaattttgtttgttcttttgattgtaatccatgatgggcctttcgcagtgggactctgtttctgcctgtcgtgttaaataaggcagagaaatcagtctatttaaggtgcttgtcaagtatatgccttgaggcacattcaaggttttgtgtgtgcgcgcagctgctttgtgggaaaagtctctggcaacttactccgtattcacaaaatcaattcaaatttaataaaaagattagtaggttttttataatattcatttcagatttacccgcttatcccaatctcgcaccaacagactccatctaaagagaacaacactgtaatttaaatcaattccccgggcaacatagaaggctcccagcatgtcacacagtcactggtgcgatgcctgctgcttgattataccagagtcccacacactgcacatggcccttgctggattcctgccgacttgctcacagctttgagatgcttgtctgaaggtgctgggtgtcctgcgcatgggcataggaaagctttttgctccgttgccttggatggctttgtttttgaacagctgagtcacccctggaaagtagaccttagacccctgttgtatattcgttgactcacaatcatctctctgctaatggagagcacatttcagctctgcgtgcacagagtgcttccagagtaagggatctgttttctttgtcatctaattgaatctcgggtctgctgttgtggcttcctccattgagggcaaaattaaagtggacagagagcacgtgtaattgggtcatattttcatactgctctacagttctcctgaaagcacaacctagtggttgatgaaggactttcttttggcaaaggcttctataatcctgtcttcagagcat

SEQ ID NO: 54507 - DNA, 1268 bp, Bovine  19866881392693
  misc_feature (1)..(1): n is a, c, g, or t
naaataatttaaatgacttagtagaattacctaaacaactattctctaaaactggcatgtaaattaacattaaagataccacagaaaacattaacaggctgaccagaatattatgagccaacagactgccctcccttttctgttttctttctaattattgctaggctaacaaatgacattttcattggtactaaacctgccagaggttctttgtgagctggcttgaagaggaaaaacttcataattatacaatctatgtagcaataagcagatctaatatttttcctttaaagagaactttggggaacagatggaccacacactatcagaatattttcaaattcaagtattgggttggccaaaaacttcatcccagtgtttccataatatcatactgaaaaacctcaacaaactttttttagccaacctagaattaacagaagtttgggggtcattcatgtcagttttttcccctgtgttttaatatttgagacagaggtcaagttctgcttttaaattcagcctctttgttttctccttcttggccctctgttttgctctctcaactttgctctctgttctaagctgaaacccagaactgaccaggacggtctggcggtaccttcctgctcctctgatcctaacaatcatactcactataaacaagtaccaatagccagggagtttgggatggacatgtacacacagctatattccaaatggatacccaacaaggactcactgaatagcacagggaactttactcagtgttctgtgtcagcctggatgggaggggtgtttgaaggagaacggatatgtgtatatgtatggccgagtcccttcaccgttcacctgaaaccaccgtactccaatacaaaattaaaagtttaaagtctgaaaaaaagaaacaagtaccaagcaagcacttacccaagtaatttctactaaacactttatttttgcattatttcatctctcctcacaaccccaagaggcaggtgctattaccatccccatttcacctgagaagatgttacctgcctgaaggtggcaaggtgagtaggtggaggagcaaggaaatgatcccagataatctgattttggtgctctctccacacaatgctaagggctttttatttttatttttttaaagacttattttgatgtggaccattttaaagtatttcttgaatgtgttaaaatattgtttctgggattttttttttttttttggccatgaggcatgtgggatctcagctccccagcca

SEQ ID NO: 54508 - DNA, 789 bp, Bovine  19866881713019
  misc_feature (1)..(1): n is a, c, g, or t
ntttctcagaatcattcggagagaagcaagtgagtgactgtggagtagacctttcagcagatgtagtctgtaccctctgatattgggtacactttcactgacccagaagtcacctttctttaggatgatgctactgtgtaccataagggcttcccaagtaactcagtggtaaagaatctacctgccagtgtaggagacgtgggttaaatccctgagtcaagaagatcctctcgaggaggaaatggcaacctgccccagtatttgtgcctgggaaatcccatggacagaggagcctggtgggctacagtctataagatcacaaagggttggaacacaacttagcaatttaacaacaacatctatatactatgccttgtttaggatgaaataaactgatttctctgttcttcagaaccaacctcttcaggattggatagactgtgcacgctcttttgtgtagtatgttagcatattaagctttctgaaattaaagaactacctgcattattagatgacaaattctgtttagcaatgtatgctatcagcagatgatgagaaagttagttcttggttgtggaaatccagtgtgttacttattttctcttaatagttgcttcctctgtgtttaggttgatgggtttttagcatttagttattttatggccttgtgttgaaaaactaccatggattttcacaatttttatgatccatatctcaaataaaacatatgtatctaccattgtagaagtcatagtgttaaccattttcttgggactttgcgctttttct

SEQ ID NO: 54509 - DNA, 879 bp, Bovine  19866880574056
  misc_feature (1)..(1): n is a, c, g, or t
natgcccagcagtgggattgctggatcataaggcagttctatttccagttttttaaggaatctccacactgttctccatagtggctgtactagtttgcattcccaccaacagtgtaagagagttcccttttctccacaccctctccagcatttattgcttgtagacttttggattacagccattctgactggtgtgaaatggtacctcatagtggttttgatttgcatttctctgataatgagtgatgttgagcatcttttcatgtgtttgttagccatctgtatgtcttgaattgaaaaatgaatttagaaagaccacaagagacagaatgacttctggcatgttaataaaagaaaattgatgctttgcattttttctactgtctaaaatgtgtatatccattaggtatttacatctgtagtcttaggcaaaaagatcagttttccatcaatgagaagaaatccgttccccaggtgtatattatatgtgagcatgcttgtaattttcttgctgacaccacaaattctcaataagcctttgactattgaacttcaagttctaacagttgattgggagagaaggcatttgaataccaattcagatcctctcaactcagtagaaatctgtagtgctagttatttgatgagagttgaacactagcctcttctttggaggatttgcctccatgcggtgaaacacatgaaaatgggaaatgttttgttttagaatgactgaatacaagatcaatatttatcatggagactgttgacatcccattaagaaaagttcaactgcaatttggagagatgcttttggtgggtttgtgagggaaatcggctttccattgaatgcagaaggcagtttgtaataaattcaaa

SEQ ID NO: 54510 - DNA, 981 bp, Bovine  19866880857653
  misc_feature (1)..(1): n is a, c, g, or t
ncacgactactggaaaaaacatagttctgacagatggacctttgtcatcgatagtgtatgtgtgtccatccctatctaccctttcttatcccttctttcctatctcttctgttaacatttatatgcagtctcaccccctttcaggggccttcctgagagctccttcctcagctctcctaacaccgcctgcctctgcatctcaccccaccacgtcacaatacaacacctgctgggcttgcaattccctcccaaaggcgaagtcttcttcggagaagacctgtgtttgtttgttttcttacctctctgtccagacaacctatattatctactcaatgaatcagaattaaatacaagaaccaattctctccatttaatgaacattttcctgagactaaatactcggctccatatttgtattagttgcccatgtaagacataaatatttatggaaataaagcgtgggaacatctattgcgcttaggacagtctcttgctgttctgatctaatttaaaattagattcttttttcaagcaccttagttggctctcggagacattcctaagcgtgggcatctggttttatgtagcgaggtgcccttttctgtagacagggggcgctctatagttctcggtggtttgttcctttaagaacctgactctccagccttaggtcatcgggccttctatttctgttgatgaagagattgcctgaaagcctcttcccaaattctgactgctcagcttttggactcttgcccggtgcttgataactctttttaattagccccttggtgatcttccctctctccaaaaataccattttgttgtagagagacaaggacaatctctttgccccaagagacaatcctcaatccccactgcagaatcagatgactgctgtaatggatttcagaggtcccggtgatggaaacgtgtgtgctaaaccatcgttgtccatttcttcatggtgactgtcattca

SEQ ID NO: 54511 - DNA, 3222 bp, Bovine  19866880859619
  misc_feature (1)..(1): n is a, c, g, or t
natatatgtgtgtgtgtgtgtgtgtgatagtgaaggcttttgttgttcagttgctaagtcatttccgactctgtgacttcatagactgcagcatgccaggcttccctatgcttcactatcccctggagcttgctcagactcatgtccaatgagttggtgatgccattcaaccatcttaacttctatcacccccttcacctcctgtcctcactctttcccagcatgaggttcttatccaatgagccagctcttcgcattaggtggccaaagtattggagcttcagcttcagcatctgtccttccaatcaatattcagggttgatttcctttaggattgactagcttgatctccttgctattcaagggactctcaagagtcttctccaacaccacagtttgaaagcattgattcttcagcacaaaatctgataaagttattgtactatatgcaaactttcttttgttgattcaaaaattacaattgtatcacttagcttgtatgattatttgaaaaataaatgattgtgatgatatcagcacagtttccaatacgtggttaaatgttcacttaatgatagtttattgtatctatttctgggttatatacataaacatgccttccatgattgtctgtctttttaattcatgatctgtctttaggattttataatctaagatgaaactcagtctgttttttcagagttcatgaggttaatcaactcaaattatgggtggcaaattctcatggattctcagcatatttataaagcagatgagaattttgtattcttgaatacattaaatcaagccaaaggcctgatatgataagcattcagaatttcttttctgagatggatccccccccccctttttttttttttcagaaaactagtgaaaatttgtctcagatttaacagctgaaaccagatgcatttatgaaagagctggcaatctatatgcaatttgagtgctctgtcccaaaacaaagaggagtagaaactgtaagtggccaataaatatttgtcaagtatgccttgtgaagatctatcccttgtttcattttgattaagcaacactttctgtatatttgttgtaatgtgattctttccctctgagttaaagcatgttcccatatcagaaatgggtctcccttcaaagagtttttagtctcagtgggacaaagacaaaactttatcatttttataatatgcaaaaactgtagaaggcttatgtaattgaataacaaaatgaacactagaggaaaagatgaagaggtacaggaaacagaggtatcaaagagatttgtgtagtcaaaagacagaagtatgatcacaaaaaccatgatagtacgatcaactcaagtcacagatagagatgccctgcactcaagaaatattttaaattaaaaaatgcctcgttagttagaataactctttctgtttagatgcacttttaagaaatctgaaattcattttctaatactgtgtacatttgagacataatgatttgcgggattgcaaaacatttttgttaggattgctagatattgttctgttacaagtttattttgttatagtacatatcctattcatgacaaacatgcatggttagtcgtgtccaactcttcgaaagcccatggactgcagcccaccaggctcctctgtccatggcatttttcaagcaagaatactagagtgggttgccatttcctactccaggggatcttgcctacccagggatcgaacccacgtctcctgtgtctcctgcattggtaggcagatttgttgcctctgagtcacctgggaagcccccatggctggccagtattgatgaggagaggaaagggtgctattttgttcactcaagaacaagttgatacgtgatttaccactttgtaactgcattaatggaaatgcaagggcatctgggacttcacaacagagggagaaatagctgtatgataatgtattaggctcttacatactctgaacatattcacactctgttctagggttgtcaatcagctctagtcacatactcctgtctaaatgcaaagacttttgggaaaatatgggagagcagatagaatgtgtgttagcgtagccatccttttccaaagggaagtgattcaatttctaacttcaaactaataagctcatcatggtcaaagtcaggaatttctcagttcatttcagttgttcagttgtgtctgaatctttgaaactccatggactgcagcacatgagggtgccctcttcttcaccaactcccagagcttcctcaaactcatgtccattgagttggtgatgccatctaaccatctcatcctttgtcgtcccttctctcacattcaatctttcctaccatcagggtcttttccaatgaatcagttcttcacatgaggtggccaaagtactggagtttcagcttcagcatcagtccttcaaatgaatattcaagactgatttcctttaggattgacttgttggatctccttgcagtccaagagactcaagagccttctccaacaccacagttcaaaggcattaattctttggtgctcagctttccaactctcatatccatacacaactactggaaaaaccatagctttgaccagacggaccttttttggcaatgtttctgctttttaaaatgctgtctaggttggtcatagctttctttccaaggagcaaacgtcgtttaatttcatggctgcattcaccatctgcagtgattttggagccccccaaaataaaagtctctcactgtttccactgtttccccatccatttgccataaagtgatgggaccacatggcatgatcttcgttttctgaatgttgagttttagtcctactttttcactttcctctttcactttcatcagagcttctttagttcttcttccctttcttccataagggtggtatcatctgcatatctgaggttatcgatatttctcctggcaatcttgattccatcttgtgcttcatccagcccagcatttctcatgatgtactctgcatagaagttaaataagcagggtgacaatatacaaccttgatgtactcttttcccgatttggaaccagtctgttgttccatgttcagttctaattgctgcttcttgatctgcctacagacttctaagggggaagatcaggtggtctgatattcccatctctttaagaattttccacagtttattatattcacacagt

SEQ ID NO: 54512 - DNA, 1205 bp, Bovine  19866880895159
  misc_feature (1)..(1): n is a, c, g, or t
nggtggggagatttgggagaatggcattgaaacatgtataatatcatgtataaaatgagtcaccagtccaggttcgatgcacgatgctggatgcttggggctggtgcactgggacgacccagagggagggtatggggaaggaggagggaggagggttcaggatggggaacacagggtatacctgtggcggattcatttcgatatttggcaaaactaatacaatattgtaaagtttaaaaataaaataaaattaaaaaaaataaagatcatttagtcaagggctaaagaatgaagcttgcccatcagctgtttttgtaaataaagttttattggagcacaactgtgtccattcacttaaatattatctatgactatttccacagcaaaatgctgaactgagtagtttcaacagagagcatattgcctaaaatatttatattagtatgtgtttgctgactcatgatttgttatagtccacacctctcatttagcagatcgaaagcctgagccccccatgtatgacaggacctactcaaggtgacacagtcttagaggaaggtgagaatcagaacctgaatctcttcactgccatccattagcaccttcttttgccacaatgcatctcatcatcctaaagagttgcacatcacagacaattaattcaactttgttataagatgcagtcaaattcacttattttatgagaaatagatattatctatcaatctatttagatagatatatatctattctatatcacctatatctatatgtagtggtgtgtgtatgtggtttttattgtatatgcaaagtccgacatctaacagctgttttgtaacatctggcacacaagaggacctgggaccagcaaacccccaggggaagctgcaacatcattaatcgagcttataaaagccaagctggaaactgtcacaaaatcacacaaagtttcatagaaaattgatctgaaaaagatgaagctacaccaatagctcaaaagccaattgtattaagatgccagctagctcttttcctttaggggatttttctataaacatgaaaaataaatgtatgttgctcagtggtatattgtagaaaatggggagggtgtgtgttcataatagaagatatgggaaatttgggtagtaataagaacaccagtgttttacaggaggtatctgagtcatcttttccttatggggtgg

SEQ ID NO: 54513 - DNA, 1009 bp, Bovine  19866881000015
  misc_feature (1)..(1): n is a, c, g, or t
ncatgaaagtgaaaagtgaaagtgaagtcgctcagtcatgtctgactcttcgtgaccccatggactgcagcccaccaggctcctccatccatgggattttccaggcaagagtactggagtggggtgccatcgccttctctgcctgcattggcaggcagattcattaccactagccacctgaagtatatttgcactaccttgtttaaaatggacttcccaggtagcacagtggtatagaatctgcctgtcaatgcaggaggtgcaagagatgcagctttgatccctgggttgggaagataccctggagaagaaaatagcaacctactccagtattcttgcctgggaaatcccatggacagagggctgcagtccacgggggtcacagagttggacaagactgaaatctctgagcacagcacatccagcacatttatcaaagctctactaactagttgcatatactttgaccagaaatttagcctcataaataattatcctagtagaataattgaatcaatttccaaagatttaatactataattttatctcaggtctatttataatatggaaaaagtagaagtgcccaaactagccttcaagggagaattggtaaataaatcatgctttgttcatttcatagattgatcattcagaaatcattaaaaatgacattgcaaacctccacttaatgaagtgaaatggcatgcagtgatcaattttgttaatacacacatccatgtaaatatatatatagagagagacacatggactattataaaccagaatagtaattattataatttatgagtgtgagattatgatctaatttttgatatatttgtattttgttgtgtttccatcatgtcataaactttttaaactttattaaaagaagaaagtaaaaacacaagctgtatttaatgatacagttattgttcagtcgttaagtcatgtctgactctttgtgactgcaggacgaagcagatagccttccctgtccttcaccgtc

SEQ ID NO: 54514 - DNA, 1200 bp, Bovine  19866881116030
  misc_feature (1)..(1): n is a, c, g, or t
ncttttaaaggtgttgttttctcatttaaaccgctgacaatctagtgggaatgggaagggtaatttttatatttctgtaactgaaagaaagaacaaataggagtctttctctcttccttgcgctttctctaagaaggaactgtttatattgaatgtgtgtactgaatttattattaccttcaagcttacatatttgagatatatgctgtacatatcttatcatcttcataccattgtactagcctgcctcaaaaaggagtagaatttggaattaaaagacatggatggttgtgcatctgaaactaacacgacatagcaaatcagctataattcaacaatgtttacaatttgacaacatatataattcaatagtgtatatgagagtatttgttactcagttgtgtccaactctttgtgatccccatggactgtagcccaccaggctcttctgtctatgggattctccaggcaagaatactggaatggtttgccattccctactccagggcatcttccccacccagggatcgaagccaggtctcctgcactgcaggcagattctttaccagctgagccacaatatataaagaagtgcaaacaaataaacaaaaaagatctagatgtgaatctcagttctgtctcctactattttgttttgtactatttcatttctcaaactggctgtgggtcacagtgatgatactgggaactgtcgtgtataggtttggagactgggaggggaaccagactggaagaaccaccatttagccaagggtgtagtagaagctgtgtcttaacaaggacggtctcttctgaattgttttttctgaggcaatgtttttctttgacatgcctttggacctatccattatagcttctctatttcatgtcatgacctggctactctatccatcacttttgttggcagagcaacactggcttcttctgacaggaagagcttggcacggcttttgccttcatacctggctgggactcttagctttggataacttctcaaatttttattttattttttttaaaaataaaggttcagtaaagtatgttccatcaccatgctaatattttgaaccaaatattcaatgtaaatgtgttgcttctttaactggttaatttgaaacgaattttatccaaaatattttatgcaagaaatctagctgtttatcacatgtgtgtaggtgt

SEQ ID NO: 54515 - DNA, 572 bp, Bovine  19866881157955
  misc_feature (1)..(1): n is a, c, g, or t
naaaaaagttaatcttccaaggttttctgagggatgtagcatcaaagtaaagttttccagaatgaggaggtgttgcaaaggcacttggaaggagaaatgacagaatcatctgtattccaggccagaaaaaaagtatgttccagatacttgtggtaggcagattcttgggaggtattaattcaaaactcgtactttttatcccaagtaaaacttgcaaaaactagaaaaatggcaacactgtatttactagtttagaggtcagagattcagagttgcctcaaatttgcataaggaagagatggtaagcagtcctcactagcgtatctaaagggatggtgggatgatagatggcattttacaggttttgatatgtatagaggtttcaccaaggaatgtgaaccaaatccatctaaagaactcagagcttgccctgaggccttgaaagaactttctcctgttttcaatacctcctgctttccctgggaccactgtcagaatggtgaaaagccagactgcatttggagaaggaaaaaaaaaaaaaattacagacagtgagagtataaggaagtcat

SEQ ID NO: 54516 - DNA, 952 bp, Bovine  19866881257496
  misc_feature (1)..(1): n is a, c, g, or t
ngtttctgcatccatttggtggtcacagcctctgtacaacacccccacaagccctccccacagtatgcttattgcaggtatcctctcttgctaagtgttaaggggggagggtaaaatgaactttcaaagtcttcactctgtaagtatacataggtgggcagagtaccattttatgatctcaagacattcagcaaaacatctggtttccccttccaattagcactctcaagatacctgagctgtattcttacatgccagtaatcagtgagagctgaatcattaagaaaactgcactacaaagacacaaggattaggatggtgctataaagggcttccctggtgactcaagtggtaaagaatttgcctgcagtgcatgagacctggctttgatgccctggtcgggaagatcccctggagaagagaatggcaacccacccccagtattcttgcctggagaatcccatggacagaggaagccagtgggatacagtcaaatggggtcccaaaaagttgtacacaactgaacaactaacacacacacactgatatggtgctacaaatttcatttgtcccgtcaccctcattttattataactggggtgtaggaaaggtgaaaacacagtgaaggcagtgatacccttgcagaagccaaaatgcaaattcatgtctggaaaaaatattcatttcctgccttagatttttgcaaacgttaatgacaagactatcacattatgcatgaatatgattagcataattctgcctaatgaattaattccttctatgaaactaaaagtagaaatgtttctctttcctctaagcttctctaatagatgcagttttgctaacagaaattattattttctacattatgatacatttattaggtggattctcagcttatgcatagatgggtgaatagcgaatatacttaattgctgtctgtgcaagtacg

SEQ ID NO: 54517 - DNA, 2254 bp, Bovine  19866881288645
  misc_feature (1)..(1): n is a, c, g, or t
naatttatatcattaaaagacttatcaaaaagtttgaacactgttatttggaaagtcatatttaatttttaaatgaatctgggttttccataattcaagggttttatgctatacatagtgtgttttaccaatatagacttcatatatcttttgtttaatatagaaaaattcacaaagaacctataatatgcattgggacatatttgtttttgttctttagaacacaatgttgaacatttaaaacattttttcatttacagccccattctctcttttagttaaccacaggtaccagttttgttaattaagaaagaaaaacattttaactcctttctattttttctttcattatcgtttagtgtctaaaaattctttgtaatgtctatttccaaatatacctggcaagatccttatttagttaaaactgttctggaaaacaagggtttagacagtgagcttgcttttttctctttttttcaaaactaaaatgtattatcattaccaaaattggaatatatttttataattttgaaatattttagagtagtaggaagttggaaagttatcacagaaagtttctctgtaatcgtcttccagaatccctattggttacatcttattatataaatagaatcaaagggtcacatatttatgactatttgtataatattctcaaaatgacacaagtatagagatggagaacatagtaatgattgtaagagataggaatggtaggtataatgattacctggatctaaacatatgatcggagaaggcgatggcaccccactccagtactcttgcctggaaaatcccatggacagaggagcctggtagtctgcagtccatggggttgcgaagagtcagacatgactgagcgacttcactttcatttttcattttcatgcattagagaaggaaatggcaacccactccagtgttcttgcctggagaatcccagggatgggggagcctgttgggctgccgtctatggagttgcacagagtcggacatgactgaagcgacttagcagcagcagcagcaatggtaaagaacctgcctgccactgcaggagacataagagatgtgggtgcgatcctttggtcaggaagatcccctggagcaggacatggcaacccactccagtattcttgcctgaagattcccatagacaggggagcctggtgggctacagtccacagagtcacaaagagttgtacaggactgaagcaacatagaatgaacacatacatgcataaaatgaatattcaaaattatgcataacccatgtgaaaacccaaagtaagtgatatatgatcatgtttacatggttcaaacatacagagtagatagaaggaaactgttatttctcactatgactgtggtaaccatgttaagacacacctttgtgatttgaaaatcagaatgtttatttttagaatagatatctgaaaagtttgttttcctctaataaaagtatttccattctaaaagccccatttacttaaaaacattctgtattttctcctttaacgttgccagatttttttacaacatgaaaaaatctcattcccatgagaaaaaaggcagctgtgtgcctaatatagaactgaagcataactgctttaaaaatgggccttgacaaatccattcaaacttttcccatcttcagttgttagacagtcagtggaaaggcaatgatgggttatggaaaatgtaaggaactttaaaaataaaattttctcttaagctcactattttaaaaaatatcaaaacagtgagaagttattttcacttgatcatttttatttttcctatctttttttctgatttatattcctactaaagaatcttaaaccatctgagattttcatcctgattcagtcttgaataggaccatcttaagtgagaatgcttggaacactgaatttcagaggttttaaaatttattacagatggaaacaggacattccaattaaaattaagacttttcagaagaatcatcaatatttcccatgtgatccatttcttgctgcccttctttctcttccatccgacatgttttatggatactttaaagcagtagctcaaattattacagttctgtgtccatacgtggcagtcgtaatcactctttagcactaagtaattttataatgttagaaatgacactcagacaacttgaatgaaactcattaattttgcaaatgcagaaactggggaccatagatggaaaatggattttcatgtgaca

SEQ ID NO: 54518 - DNA, 1560 bp, Bovine  19866881313918
  misc_feature (1)..(1): n is a, c, g, or t
ngtcttagtagacaagatgcatttagaggagagcttacgaattgctctgagagactgaaagccactctgagctttcctggagtgctctgtcaacaatgtagtgactggaaactataaaaatgagaaagtcatttgtctcttaatggcagcagtttacaatggcagcctatgagttattaaattatcagttcaataaagcccagataaccccactctagtacacactacaatttagtaagaattaatgcttgcttcttagctgcataatttttcattgtcattttaacctaaatgcttccttcttttctgatgctgtttcttcttcctggaatgttcttccttctggccacttgataacagtaaaaactagctgactccttatctgtcctctgaatccatttttgttgcccaaagagtagaaaaggcagcctaagatcaggcttgggctctgccatttatttccatttaatcttgggaaatttagtcttcctgatccttggtttcctgtctataaaataggaaaaatactacctatatcttaaagatgttcagataaataagtaccttccaaataacaacaaagcaccgcctgtgcacagagctggagttgataaagatatgggagtttctaactcccctctgtcctctctttctctctttatttatttttttgaactttatagcattttcctatgtgtctctggcatcctttttgatgctataattatttaacacaaatttttatgtgttctcagactggggcaattgtgaaatactggatcatcatttactcccataattgtcactttgccagttgagatatattgtatgaactaaactgtttatggaggacaggacggcagagaagaagagaaggatggaggaggaaagagtgagaattgtatggattctggagaagggaatatgtggattattaatgcaaccacacataaatttgtgcttctgttgaagcagaactgcagttggcaaaggaaactccagactgatcaatattttaaagggatagatgaataattctgaagaaactttcaaatgacttcccaaccttcctaaaaattctgggacttaatcatctatttgaaaacctctcttttcctgccatacttcgatgctttaaaaataatattttgtggggaagatggaataaattttcaactgattgacaactaaaatggaaaagccattcttattcagggcagaggctgccaaaaacaaaaataaaaacccaaagggtagacctggcctttaaaatgcaacctgtcttctgtgtgagttcccaccttgccctcaatttcagcagcccttccagggtgatccattcacaagggatccactcactgatcacattattgatcagtggtaagtctagactactcatgtgttggcactaggtctctcctccccacagagccctatggtatctccagttaaaatttctctactgtgaatgtgaatacagagctgtcatcatttgttacacccctttccatatctctgccttcaactgaggctcacctggactcacagaaaaagccagtc

SEQ ID NO: 54519 - DNA, 1026 bp, Bovine  19866881371697
  misc_feature (1)..(1): n is a, c, g, or t
naatgcaggggaaaatataaagctaagaggaaaaatataaatgattttttttccacagggctcagtttaaataacaaatcagttgcagaatgagaacagcatgctgtaactcttctattgttatacgcactgctgtggaatcttgcttgtataactcagaacatgtgacacataattgacagagagacataaaacaggctaataacaaggggaatcactaacaataacaggaaatatgcaaatctctctctcaagcctgtcaaggcacttctttacttagtgttaagagaatccctcagagataacactagtgacttttgaagaaaacaagcttcatataaaaaagtagtaggtggtggatgatctaataaagcacggtcagttccctcagtcatgtccgactctttgcagccccatggactgtagcccgccaggcttgtatgtccatggaatttcccaggcaaggatactggagtgattgccatttcctactccaagtaatcttcctgacccagggatcaaacctgtgtctctccagtttcttgcattggcaggtggattctttaccacttgcaccacagaacactccagtactcttgcctggaaaatcccatggatggaggagcctggaaggctgcagtccatggggtcgctgagggtcggacacgactgagggacttcactttcacttttcacttttacgcattggagaaggaaatggcaacccactctggcattcttgtctggagaatcctggggatggggcatcgtggtgggcagagttggacatgactgaagtgactcagcagcagcagcagcaccaccacagaaagcctcctaataaagtgtgttatgaaagagagagagagagagagaaaggggaccattttaagcaatttgtggattttttttttcctggataccccatgtcttttaaatgaaacataattatttgggggatttttcttaatacgagattttgttgttgtcctttttaatttggttgtttcattttggccacaaaat

SEQ ID NO: 54520 - DNA, 855 bp, Bovine  19866881391656
  misc_feature (1)..(1): n is a, c, g, or t
ntgctaacactagtggctgttgggaggatgaaagaagataaagcatttaatagagatctgcagtctctcagggacttcaaaaggaaagggatagatctttctagttctaaactatccctccaaagcatagccagcatattgatagcacacactggttggaggttaaggactcctgacttctgtctctgcttgactgaaaggaagtaatgaacaagaacaggatctgactaggagagagattcttgcaaccagttttgtgggggcaggtgagccagctgacggctctaccagatcgaactaattacagtgttgatttctctatcaacaaataaaaaataacatcttgcagtccaggtttatgtccctgagaaacacgcttattttataatgtataaacattatagagtacttacttggtctaaaccaagcactgccaaaacctgccgtccaaaaaatgctgttggaactgttaatgttggcaaaatgatcgctatgtgaacagatctgtctgttaaatagactttgtagaggggaatcctaaaatcccagcgttcttcatgcatactaaaagaaaatggctatcaatgccattatttttcacagggaaatagaattattgagtctcagtgaagaaatcgaatacattgtgcttctggtcagtgtgctttgatttactgcatgtgtgataaattaaatgatatcaattgttatttgtctcatagagctatcattcaataatcagcaccattagtccacctcaattcttatatgcaattttgaaaaagaaaattgatccaggcacatatttaaaaatgaataattagaagttatgagcacatatactgtactaacatg

SEQ ID NO: 54521 - DNA, 829 bp, Bovine  19866881607977
  misc_feature (1)..(1): n is a, c, g, or t
nctggccttaccctggatattaggctctggacattctttttctttttcccacttttgtgctgtgtggtttcacctaaaatattgctcaaatataggagctcactcttccattctcctcttactgtttactagaaaactaatttaatttttaaatttcctgttcagaacctggtacgtagaagtagtgaatggtagattcactttaaatatggtgggcttccacttacaagtttgaggtttagaacccccagtgaagacagttaagcaaacctcataatgctgtaattgaaatgttaacagataactgcctatgtaattattcctggtcattttactatcagtaagagagaataaaagcagtacaattcctttttttttttgtttgttttgttcattgcaggtttatttttaatggctaacaactggaaacaacacttcctacaacaggtgattagttaaacctatgatacagcttggagatctcaagaatagaaaagcacgaactattggtaggggcaacaatttggatgaatctcaacgacgttatttccagtgaaaaaaacagctggtctcaaatggtcacacaactggggtagttccatttattgtatctttctcagaatgactgttatgaaatggagaatacaaggaaatcagtgatttcctggaattaggaatgttggagggtggatatttaagtgtaatccaaaggagacgcttatgttgtagtagaactctgtatctcgattctggtgtgtgcgtgcaggcatgcctagccacttcagtcgtgtctgactctttgcgaccccatggactgcagcccaccaga

SEQ ID NO: 54522 - DNA, 694 bp, Bovine  19866881775697
  misc_feature (1)..(1): n is a, c, g, or t
ntatgataatctctggatccttcctgttgctgtggattgctttgtttctcctttttttatggctgagtaacattctttacccattcatctctcagtggacatttaggcaatatttccaccctttatatcatgtttcagcaggccaggaattgtatctttagtcattttctaaacatgtacatatttctctcagccctctctcacactgagaatcaaaaaggctgtggatgtgaaaaaaaaaaaaatgcatgtatacaacacatccaggatctttgtgatcatagaatccaacctatcttattcaagtattcagcaacagactttgatttttttaagtgcaattatttttctgtatttttttaatgtagccttttgagacgttttggcattagtttgcaacacattcatgcactagaagttaatgtacattaagtcagttccaggtttggaaccaatccttgttgatgtgaaggtaatatatggtgcttgtcatcggaaatgtgtgtgcaggtgcaatgtatgccgacaatgtgcaattggaattaacattaatcacaggtttgaatttagcagatgctagattttataacatgtataatctagtattaccacaaatggcagttataaaccttctctttttttctgagagacaaattagaaggtaattagagtcacaggcatgaggatatgtgta

SEQ ID NO: 54523 - DNA, 1795 bp, Bovine  19866880368611
  misc_feature (1)..(1): n is a, c, g, or t
naaattgcacaaacattatacacggtatgtattttgccacaaggattaacttggcatctagaaaaatgcttcctttcagtgcctaagaaaaacaaaatctgtgccttttaaagtaacacagtttggagaaaaactgaacacccatgaaatataatttatcatttttaatatcaatgaaaaagtgtgtgtttttggaattttttttttaagttttaagtgatcattcactatcattagtccccaaatgatgagtgcactttcaatttcaaaaaaagatctgtacttatcctgagcttggagatcacttacaatttgggcatatatatatatatttttttttcctcccaacttagtttagctgataacgtaagaatttaaagagagattgatcaaataaacctttgaaatagcttcaatcatgttttaagaaatagctttgttacctgatggcccctggttttatgtttggtaaaagggatcaagtaggttaaaatgtttttaaagtaaaaaccacacatttttcaagaggctgctgctgctactgctaagtcacttcagtcgtgtctgactctgtgtgaccccatagacggcagcccacttaggctcctctgtccctgggattctccaggcaagaatactggagtggattgccatttccttctccaatgcatgagagtgaaaagtgaaagtgaagtcgctcagtcatgtctgactctttgcgaccccttggactgcagcctaccaggctcctttgtccatcggagtttccaggcgagagtactagagtgggttgccattgccttctccaggatggacatgagtttgagtaaactccaggagttggtgatggacagggaggtctggcatgttgcagtccatggcgtcgcaaagagtcggacacgactgagctactgaactgaactgaactgagtgtcttctaggaaactagatctcaaataatacgtttcacaagtataaaatacgttggtattcaaataacattttaactactttggatcaaactcgatatgactatatgtttggaaattaccccaaaatacatgtatatagaatataagtatatcttcaattacccttaatttgtcaatttagtcataaaaatacttcaatgaaacaggaagttcaagttgaaataggagatgttttaagaagatagataaagtggaaactattttgtttggaaaaaatttacactttttccaattttatggccaaatatttgcattaaaaatgaaattgagaatatctagcataaaaatgtaagagctgataaagaagaggaaatcgaaattaatcttcaagtatcttcaagtgaaaggatgcaaattgatctaatcatcttccctctaaagatgttttgttttcattctggcatcaatttttgggaccatagcacttctgctaatttccctgtttgtcttaattattaacttgtttttaagagaatgatttacagtataatgtgtcaccattgttatttgtgtcagaagctggatttaagctttttgagctttctaacatggtcaagagtagtccctggagaaatcagtgttttaaattatgcatttagctattagcaggcaagagataaacaaattgatgtccttggagaaaaccaagtaagtacaaaaaactctgttataaaaaaaaaaaagaggatataaaaggatgatctaatatacatttaacagattccagagaaagagagtatgaaacatgaattgcctgaaactgtagcaggtagataatctctatgaattttcatgtccatgaa

SEQ ID NO: 54524 - DNA, 1805 bp, Bovine  19866880674850
  misc_feature (1)..(1): n is a, c, g, or t
ncaaagcagatgttaaagaaaagttctgcttcagtgtcaccataggcatttggtttattttatgttgtcttttatatcccgcttatctttttagcaacaaataattctgtattgtttattataccttttagtacattcaggccccccctttgtccagaagaaatgaaatgaaaactctctcaagatgaaggaaaactatagaatcgtataatatctgagccaaaggggtctttagagatcagatctggtatctaaggtttagacgtgagttgccaaaggcaatgaaatcgcttgttctggtcacagctagttaatgtcagattttagatcaaaatgtgaatatcctgactgccggataagtaatgttttttagtgaattatgctatttttctagggtagcctctgactctctttgctttgtattagttttaggaggagttactggttcctgtcacttccccaagacttttgcctgctttgtttcttctaccttttgtttcaaagaacagtatcccatgagttatccattttctttatctctttctgtagctccttccatccccttctcccatacctgccaaagtcgaagtcatcttcttccttgtccagaactttcaccacaccatttatttagcaaataataattgagtacatatgacgtaccaggcaaatatcaatagaagtctaagatccagattctgacctcaaagattttgtaatcccattaaagagaaaagacatatacatattaaagtgtcatttgagtgatacagaaaatatatacaatagttgtttaaaggagatttctataggtttgtatttttaaaggcgggataagatgctggctgagacctgttaaaggaaaaaaaaaaagtgtgatagggaagaagagagggaaatgtatcattggcagaagactcagaacaagaaaatagtttaggcagaagttaagaaggtgagctttgggacaaggaatagactggccctgtcacaggatagataaggccttgctttttcagagctttaatatttaggttacagggtttgtactcctatttgttacccctagaaagcaattgaagtgaaaggatgggcttgacttggtctgcaacacgcagtcaagtggtttctcagtctgcagcttacattttatgaagaagaagtggatctcttttctctgtgttattgaaatgaaagcaaagaacccacccttgtccttgatcattgaagttctgaaaaaattctttgcctgggatcacgagtacttcttaagtgaaattctgaaatgaaataaaggggtatttttttaaacacatggccatatcaaatgattaagcagagaaaagtttccttaatctaagggagatgcattggaagccaccttaaaagtaccattagcatctttgaggaatatagtatattgtctccaaggcattcatagtgtttctaattttaagagatttcctttactgaaattatatatgtgtgtgtgtgtgtgtaatcattgtatcattttatacaatataaaattatttatcagaatttaaaattaaattaaaattgaaagcaattttagtagaatgcgttcattgtagtgatattttctaattctacatgaactcaggaccccagacctatttgaattatgaattttactttttactttgtcatctagtgaaaaataattaaatctcactaggccttgatttatatttctgtagaatgggtacttggtttccatctaacttccaaggataatattggaattaacagaaagatgcatagaaccctgggcttattggtag

SEQ ID NO: 54525 - DNA, 2955 bp, Bovine  19866880701045
  misc_feature (1)..(1): n is a, c, g, or t
naaaagtgaaagtgttaatcatccagtcactctatgacctcattgacttaaccccaccaggctaacaaattcttcttatcatatcaagtaaacttgtgatagactatactagttattagcttatcatctgctgctgctgctgctgctgctgctgctgctaagtcacttcagtcgtgtccaactctgtgcgaccccatagatggcagcccaccaggcttccctgcccctgcctgggattctccaggcaagagtactggagtgggttgccatttccttttccaatgcaggaaagtgaaaagtgaagatgaagtcgctcagtcacgtctgattcttagcgaccccatggaatgcagcctaccaggcacctccgtccatgggattttccaggcaagagtactggagtgggttgccattggagggtatcagctccaaatccatctccctcatctccccattttgtgatactgaagctggaccctgtaaacatttctcctttgtcaagtaactcagtgttagattttgtcaatagagtacactggggactactgtaagttagagcacaggaaagggcttctctattttttttttaattgaaatatagttaatttgcaatactgttatttttgggtgtacagcaaagtgaattggttatatgtatatatgttgaattttttccattacaaatgattacaagagatcgaatatagttcctatgctacatagtaaatccttagtgttttatctattttataaggttaaagcatctgcctggaatgggggagacccgggttcaatccctggatcgggaagatcccctggagaaagaaatagcaacccactccagtacttctgcctggagaatcccatggagggaggagcctggtaggctacagtccatggggtcgcaaagagtctgaaaagactgagcgacttcattttcctttcactttcagtgtacatttgttaatcccatgctcctaactgatccctccttccttcccctttaataactaaatttgtgttctatgtctgtgagcctgtttctgctttgtaaacatgttcatttgtactgttttttagagtctacatatatggcatatcatgatatttgtctttctgacttatttcacttagtatgatattctctaagtccatctgtattgttgcaaatggcatcatttcattcatttttatgggcgagtaatatgtaccacatcttctctatccatttgtctgtcgatgggcacttttaggttgcttccatgtcttggctattttaaatgatgctgcagtgactgttgtggtgcatgtatcttttcaagttagagttttcatcttttccagatatatacccaggaatgagattgcggcatcatatggaaactctatgtttagtttttaaaggaacatccttactgtttcccagagtggatatacaaatttacaacagtagtatgggatatttcccttttctccataccctctctagcatttattgtttgtagatatttttgatgatggctgttgtgattggtgtgaggtgataactcactgtagttttgatttgcatttctctaacaatcagtgatgttaagtatcttttccatgtgtctggggaccatctgtatgtcttctttggagaaaagtctatttagatcttttctttctgtttctaatatgacacttcttagcatgcatgtggggataggcatgcaggaacccaacgctgctggcccttcagtgagtttttccccctcaatttttggagaacttctccagcacaccagtggttgtgggttgactctacactatgccacccagcaggtaacttcttgtgtaccagctctggcccacaatgctcaaggaaactctgatgtcaacacagattgtggcttccaatgagccagctccaagctgggataccccaggcagacctttcctagaagtctgaatatcagtcttgtggcaagggaatggaagagcttacaatgtggccccttttttagattttatctattagccctagagatagagctttctccctaaattttttatttgtgtagatttcagaaagttgattttctaaggaggtgtgctttgggggaaggactcatcagcagagacagttactgggaaggctagtagacaacctttccagcaaccaaggggaataagtcctttagtcttgaaagtcttgaaaaggaatctagaacacacagagcagaattggtaatacatatattttttgtgtttcatagacaaaaactgtatcatccatctctttttagcaggaatgaccctgctttgcagcgttgtccatcaataaatttgtagaattgaagcaaaatcatatgcatgatcctgggatagtgggtataaagagaagattaagacatggtatcagtttttaatgacaattagtgtcagactgggagaccaaattataagttttaaaaggaaacagtataagtgaaaagaaaatgtaagtaacagtttgatgtagcagcagaacagatgccacaaggaattatattacatgattaatcaccaaatgagccacattaaatctttgctggaacaaacaaaaataaattactaaattaatgatatagacaattattgctacaggagtttagttggagtggaaagttaggaaaactgagcagttggaggtaaggttgaaaggcttataaataaggaatttaaaccgtttcttccaggatcctagaaatgtttgaaggtgttgacagaagtattgtgaagaccttagggagaaattgggctggcagtagtgtagtagcttaaagtaggatactggggatggtagaccactaataggcaattttcaaagtctagacttaggtgacagaggagagatggaaatggaagcaactctctttattggaacttcctaattctctgcttcgtgtgatttttccttctcttcgccccagg

SEQ ID NO: 54526 - DNA, 1128 bp, Bovine  19866880740341
  misc_feature (1)..(1): n is a, c, g, or t
naaattaattttaaaaactgttgaaaatgttctagacaaaaaaatattttaaatggtggatggatacctcttgtggtttttagtttgctttggaaacaagtgtgaaaacccattcctttttgaacaggtaataggacatgtttctctgtacaactgcccttcctgttgccaatgtaatgaaacgggaaatggacaaggtggagaccttttgcagataggttcaaggacatgtctttgaaccataataatccagcaaactgtaatatgctctttcaagttcatggagaggaaaccttcatatgtactaaggtgctgtatataataaacccaactttcctcacttgctccttctctctacctccccctccctacacaaatcacttacattcctttagttgaacaacagtgaaatgcagaccatggggtgaggagtgagtatgccagaggactgctccagtcacagtgatgccattggaaggcaataactggaaatatttaaatagaatttggatagcccagtttcagaagtgttgaaaagtagatcttaccatgagtgagaagtttaccatctgttctctgaacacccaccaactagcacattctatggttgtaatcccatactggagaaaatgaggtttagtcaagactattggaacttaagatttcagatttcttgatccatgacctaccctattttaacacatgggatgctatttatcatttttataagattgaaataatgtgaaaatgaaaaaaagggaaaactgttactggcatgcaagacaggacaactatcttcctcacactccttaatgcaagacccaagccagccaaggaaattacttaaaatagacaatatcacttattttttttttctttctagaagatgtaaattcactaggcccatttagcttaatagactgtccaaacataatttctgttattactggtgaagaactgatataataaaaaccaattagttacacatttataaaagcaggttcagcatctctgaattcagtacatggtgggatataaaacctagaatgctcttgttttaaccattcagtattggggttcactttccatcctttactaatagcttgaatagattctacaacttttcca

SEQ ID NO: 54527 - DNA, 1336 bp, Bovine  19866880793467
  misc_feature (1)..(1): n is a, c, g, or t
ntaataaatgttcctatggaaaaaaattttttttatttataaatttttataaacatttctattacttccttaggataaattcttaacaatggtacacttaatcaaagtatgtacatttttaaaatttccatgtgtatgtccacataactcttcaaacctcatataatggttttccagttttcctctgttatggattgaattatgtctcctaaaaaatatatattgaagtcttgactcctagtacctctgaatgtgaccttatttggaaatagtttttgtagatataatcaggttaaaatcaggtcactgaggatgggtggcagtcatttgatatgactgatgtctttgtaagaacaggagaatttgaacacaaatacacatagagaagaacatcacatgaagaaacttgtgttgttttaagccatctcagtttgtggtaatttgttaacgtaaccctaggaaactcatacaacctctgataatattatgagagttcattcttattcatattcttcttagatgtgagcattcttactattttattcctttcatcagtcagaaaaataaaatttaaaagagacttcatgaaacgtattatatagaagacagagaattattatatcatttataatataagagtatgtaagaatgcacgctcagttgcttcagtcatgtccaactctttgtgaccccatggaccataagggccaagcaccccaccaggtgtctctggggaaaccaatcatttatatgtatttatttgggaagcccacatatttatttataggggcttccctggtggctcagatggtaaagaatatgcctgcagtgcaggaagatccctgtttgatctctgggtcaggaagatcccccagagaagggaatggctacccactctagtattcttgcctggagaattctgtatatatttatttatactttatctaaatatctaccaattaacctacctttaatccttttctttgtttagtaaaaaagatttaagcagctgttttccagttagtatagaaaaaatgctgtaaatttgaaggaagggaaatttacattaagtaaataggcttatgtatcatcctctcagctgaataactggcaaggtctaggtatttaagctgatggctcaagtagtaactggattgtagggtgcaaaccttatgtttgtgatttctggctaacctcttatctctttgcttcaggtcttggcaaagacctaggatggcaaagagtcatctgctatttctatgggatataaggcagagagttcttgtcattaatgttcagcctttctctcaaaagagctaaaatatgcagagttagt

SEQ ID NO: 54528 - DNA, 3080 bp, Bovine  19866880794921
  misc_feature (1)..(1): n is a, c, g, or t
ntccttattaacttttttaaaatttgagtcctctttttttttttttttttcttggatagtatagcaaatggtttgttcagtgattttatttttcttgtttttagctctggaaatatatgtttcttcccctgctgcataccagcattctctcctctaccataaagagttagaaacccattctgatatccatagttttgttgtagccaatattttactttaaatgttcatcatataatgtggcataaacattttaaacattaacattgaactgaagctgaattcattttatgattaaatagtagaataggagatgccatatgaggaggccaaggttagttgttttattttttgcttagtaattaaaatctcttatagatatgtgttccctttagagtcactcaagcataaatgaaggtcaagattctattcaatgcaattcaaaatttattgcaagatgttgtttctcacaaagaatcggtattattttctactgtagcaactgtgtcgttttacttgacctcagtttcttcttttagaatcatttaagttagatgattaatgtgtggtggtggtactgctctggtaatggtggtggaagtcttgtctactataggattatggcatgaagagagtaggaagacctcaaaatttattctaatcctcttctgtagaacatgtgtctgttttaaacttgatggcgacaaagacagttcaaggaaacaaagctattgaaggaagccataattctgaagatgtatattcctctttgataattgtggtgagaatgagctctagtactcactctgttccgtgatccatttcttttccttttagagtatttctatcatttttcactcgcacatgagtaaattgcagacttagttttatttatttctaatctctagagcttagcactgttcctggcacattatgccataatgtgtgataaccttgtggtggaggtatttttgccaagcctgacttctatattttatttatttatcttttttcagggtgttcatttattatagatcactttaaactttgtgggacaggacaaagattcaaataacatttcaatacaaacaaacagcatttatcaaatttaagttgagaattaggaaacaacaaaagctaaggaatgtcctgcctcctaacttggtagagtttaaaagctggctctagaagaatgtcctttaagttataaaagtattttgccaataaagctaaactcttactggactctgtagttagtttcttcctctaaagaaaatcgtgtaacttacaggcagttcccatcatgctgtgtttatttctctgtaatacactggaatttttagtttgtactgtgaaagttaggttttgattattcctgttattaagattatgtataaaactatatcatagaacataaattgaaagggaatattatttttgaggaagaataatagatgttatggaaaccatttattaaaaaaataaaggggtaataaaaagtaactgcagatttaataacagcaaagatgtgttttaaatccaatcagggcaactgtcgtatgaataagctgttaaaatatatgtatatttttgataagttctaatgtaaaagtgttacctctttattttgttaagaaggaaaagaaaacatgttagtaaagagttccatgctaaatttttggatagaaacattacagaagagtgaagaattggaaagtaggcaatgtgtacttgaagtgtttcactgtcattattaaatcttaatcaccatatgttaggactgcatagttccatggcagtacagggcttagttctgtaaaaacaatacaaagcacactgctagtgtcgcactataaaacctggtttactgtatgttttagtggagaacaaggtgaatctagaatgccaactttaaattaaaaaattataatctaagatgtaattgtacatcagataatcatattaaatactatcatttttcaaaacagctactaaattatctaacaaaaggatttcagatatgtcatttaggatatgtttatctttacaaacagttcctatattaatttcttgaaaatgctgttctttattgtatgctgggggaaataagattgaaatgaatacctctgttatatgaagagttgacttttcaaagacaaatatgttgtacctgtcattagttaatattatcacataatttattcatattttagataattttattatttcttatatgcaatatatgttataatatttttattatgttcaaagatgagagagcagaaagaaattgtccctaagcctcaaccaattaaattctttcattatagatggtgacaacacaatattatactaggtagtcttaggttaattcagtatatatgtgtgtaatacttttctaagattttgttagcaaaccatgcttttaattaaatacaagtgaaaaaattagacaatatctaaaaaaagtttcagttaaataaaagaaaataaatgtgtacaatagtataaaatgtaaatgatcatactataagcccataagctgtatattttttccattcaggaattttggtgcatttgggaagtaaccattccatgttagtaaataggtctttattttgctggtaatttgagaagaaacataacagtatgtggcttttttttttccttccttttggttggtttgcttttagtcaaatcatgatttcatgtaaaaaatataaacagtatcctgttctttaattccattaattgaacatatttctgaggctttctcaaagacacagtaattttgtttctgtttttattaaaaccattaagctctggctttataatcgtcacatagtaaagcaagcgattgattatgggctttgcagctggccacattttgcattatattggtcttaaattaacatctgtagcctagtctgtgtgtcctttcattatcattttcatttcatggcctcacttggcattaaaggctccttttctgtgtaacctatgtcagaatttctatgtttccacctcctctgctttcaatctagagatttgtgcggaaaggctaactaataaacagtgtcatt

SEQ ID NO: 54529 - DNA, 721 bp, Bovine  19866880964563
  misc_feature (1)..(1): n is a, c, g, or t
ngggtggtcatggggtgataaagaccatttggatttaatggaatttaaaacaacagagcactgaacacaactcttaccgaacaagaattttaatggcccattctgggtgctgactaaatagaacgcccttaacaagtttaatcgaaagggcaaggcagattagctctatatagtctttatagttgaagattgtggagttaaaattatacctttaaaagactcattaatgcattttcaagatttaatgtaggttaaataagctttcttcagaccttcaccatgtactgtgaacctaggtttaggaccaagttttaataaggaaatacctttaagagctcactttataaatggaactatatgtgttttttatttcaaaagtaaaagacatttaaaattctttgagaggatccagggtgttgagggtaagtgatgatgaatcctttcatttcactaactgaaaaaagcaaatttgagttttctttaaactttttttttttctttaaacagaacttatttgtactagagaaactgcaaaaataattttaaaaaatgttcttctgcagtttcagtggagtcctggatacttgaccttggtcttatgctgtctttttaattcttcccttgtttttcttaatgaaacttctttgttcaggttaccatactttagtgcattcaggttccttctgcccctgaaaaggacagttctttggtttacactgag

SEQ ID NO: 54530 - DNA, 1814 bp, Bovine  19866881039934
  misc_feature (1)..(1): n is a, c, g, or t
ngattgcaaagaatcgacatgactgaattaaattagcacacatgcacttttttaaagataccttgagaagaaaacaattagatgacaatttagtaataataatagaggcagatgaaagtatggaaacaagcattggaatgagctttgatgttccacctttttatttcataacagcatgagaaattcaaacagtgatggagtaggtgatttctgaattttctttaagatattaaatactttttgttcagttattatttaatatatagctgatactggtgacacaacagaaaataggaaagatatttgtccttctggatcttatatactggtattgtgtatttgactgatttgttgtattacagcttgaagtagatagagtttgtgcttacaatgcaagcattgtttatttaaaaaaaaaagcagaactatgaaaattggcctgaggctaggaagtatagcgtatgtttgaggaaaagttagcaatgtattttacttgggtactggtagaaattttagaaggtctcagaaaagaatttcagttaagacacaacaaaatccactaccaaagagatcttaaagaggaagaaaacataaaattgatttatcagttagtcctaggtgtcttctgagtaaaattcaatgcagtagcaaggcaaagccagattgaagaaatttacagtgtaggtgggtggtaataaagtataggcagcggcatatgggttatgtttaaagaaatatttgtagtttataaacatgggtcaaggaaaatagggtggtgagttacagaatggcaggaacatttttatgttgttttgaagggaaaatagaaaatattggtagacaaagaagcatatgagaatagatttgggcaacataatgatgtctggaagctaagtcagggcaaacttgagtggttaagcttgaggaagatagaagtgaaagaaagaggaaggtgaagatgcagagaaacaaagtattgtttgaacatcaacagactttcaaaatcaggaaaagcttgaaatagttattttagagaacatgatggggagctaaaaacaaggaaacaaaagggaaaaaaggaagaaaagtcaagagaatgagaagataagccacagacagaaaatatttgcaaaagacacatctgagagagaactgctttccaaatcatacaaagaactaatatatcttaaaaataagcaggcaaccaaattttaagaagggccactccagtgttcttgcctgtagaatcccaaggacaggggagcctgttgggctgccatctctggggttgcacagacttggacatgactgaagcgacttagcagcagcagccgcagcagcagcagcagcagagaccttaagaggcaccttaccaaataaaacatacagataacaagaatgaaaaaaatctgtcacataacttgacattagggaaattcaaattaaaacaacagtacaataccataaccctcctattagaatggacaaaatccagaacaccagaccatcaagtgctgatatggatgtggagcaataataactctcattcaatgctagtggaaatgcagaatggagcaaccattttgaaagacaatttagtggtttctttcaaaactatatatagtcttaccacatgatccagtaatcatattctttggtatttacttaaagaaactgagaccttgtgtccacacaaaagctggcgcacagatacttatagcagctttattcataattgtcaaaacttggaagcaatgaagatgcccttttaatagtggaatgaataaactgtggtacatctggatgataaaata

SEQ ID NO: 54531 - DNA, 1033 bp, Bovine  19866881100266
  misc_feature (1)..(1): n is a, c, g, or t
natgcttagtaaggagttagcgaaaatactgcttttcatgatgagttccaaacaatactcaatgatagaaaatgattgagtaagcagagtataatatagcagaagaagtgctgtgatctcagtgggacattggtgaagcatatgtcaagaacacagtgctgtaattacttaaaataaacacactaggttgtgttgatagaaaagtgtcaaaacagccttgatactgggttaagtgctttcacctcttttcggtgtattgtaactaatttagttttctcacctccctccttctcttcttcttttcttcccttttcttttattttaaaaaataatttggagaaaaatgagattacctgggaaagacaatagcaatgtctttatttttgaagaatatgctggagaaaattaacagagtttagactctctgaataggatatcttgtattctcaacagaagtttaaagctttcctgttacatgtcatcactgatgacaatgcaggatgggctctgccttttgattcactgaacttccgtgtttgtgttccactgaataggcttgcactgcaccctggggaaggaacacttttatcctgccttggaagtaaagtgtgtgtaactcaatttgttgcaccctgtaagacctgcaccattgttgaggatcctgtatgaatcaccactgaagtgcttcgctctataatatctcctctcagttattattttattttggattcatacccgtgatatacttccctctttcgatgtgctatggattttttttccaaagcaacttgccttctttgagtggcctcctctacaccatgctctgtgcttttatacatttcaaataatttaatctttaaactggatctttgatatagctatcatgctgctcattgattggcaaaataggttcagaaaagttatcttgctccaggctttccaaggcagtggaggagcctgaagttcaaaccctggctttctcactgtacagcctgcacatttcttccaaacctgttgagttgcactcaagggg

SEQ ID NO: 54532 - DNA, 1403 bp, Bovine  19866881137283
  misc_feature (1)..(1): n is a, c, g, or t
ntagcttagccattgtaatgatcagtttctttacctgtaaaatagagataaacatgttacctatctcatggggttatttacaaattaaatgttaatgcatataaagtgcttaacacagtatctggtcaatgttctatatatgtgaattgatatttattaatagttattattttgattctaattattttaacttggtcccacatcaagctttggcatccatcctataacaagagctggcagttgtctgatatggaaacctctatcaatagtttcaagttcagcatcagtctaactacaggttctgcttgatttattttgtttattcatgcatttatttattcaacagatgtttattgactctctgtccttgaggaattctattctagtatagaatattatgataagcaaaaaaatatatcaacagagaagataatttggctgaatgataagtactatgaagaataatcaggagaaggaaccaaaggtcggtggggtggggaagactgttctatagagagtgtgttcagggaaggcctttctcagcagatgatgtttgaacagagactgcatgaggagatgaagacgtcacaggaagatattttaggaaaaaattccaagtggaggaaatggtagaaataaaagcaaatagatgagaaagtgtttggtgcatttgagttttagagatttagaatcaatattgaagcatctagaccacagggaacaaggatacttctgggatgagaaggggctggggaggctgggagggcagatggccaaggccctgaaacctgtgatgaggtgtttggatggtttatacccagctgcctaattaagttgctcttgatcacctcaaaagcaattcaaactctgcattatctttaaataagcctttaaccatatttttggagggtaaaaactgaaataccattgtggttttaatatatgcccttcattagtttagtgctttcaataacctactatataagaaggttgcaaatttaggagcattaaaagtgtttccctgttgatttctcctaagggacccagtgccttagcctccttcttctaaaccatcaacacctttctcctgggccacaggagagaccaggtgccatggtctctcttggttcctcaggtacacagaagatcagcattcaagctacaggcataggccctgagttaactcctaatgccagaaggatttctgctactaacaagatacttgcattcagtttcagacttttctctgacctccccaaagtgaatttaacctacatattctggtcccaaggtcccaaatccaaaaatatcatcctgaagaaatacttatgtgctctagtaaagatatataatgatggaaaaaaagcattattctgtagaccagaagagcccaaatatgaacc

SEQ ID NO: 54533 - DNA, 948 bp, Bovine  19866881230811
  misc_feature (1)..(1): n is a, c, g, or t
ncacagagcagtggaaatttatatgtgccctggacagaagttgaacaaggagatgctctgctcttgtgtttcagctctcatactataagcaagtgttcttttaacagtatgcatgataccaacatttttgcattttttgtcctttttatcagtgatttcactgtttaaaatggcccccaagtgaaatgctgaagtgctatctggttttcccaagcacaagaaggctgagatgtgccttaagggggaaaaaaaaaacgtggtatataagctttcttcaaggcatgagttacagtactactgaccatgacttccatgttaatgagtcaacaatatatattttaaaaggtgtttttaagcagacagacacataaaacaatgttatatattgataagctgaaatgttttgaccagaggctcacaggaacctaaccttacatttcttctatgagcaatgggtcaatgctcacacattcagtgtttgtaatatattctggaggagggaacagcaaaccaccccagtatacttgccatgagaacctcatgaaccaaataaaaggacaaaaagatttgacaccgcaagatgagtcccccagatctgaaggtgtcctatatgctactgggaagagcagaggacaactcctaatagccccagaaagaatgaagcagctgggccaaagtggaaatgatgctcagttgtggatgtatctggtgatgaaagtaaaatccgatgctgcaaagaacagcactgcgtaggaacctggaatgttaggtccatgaatcaaggtaaactggatgtggtcaagcaggagacggcaagaataaatatcaacatcttaggaatcagtgaactaaaatggacaggaatgggtagatttaattcagatgaccattatgtctattactgtgggcaagaatcccttagaagaaatagagagccctcaaagtcaa

SEQ ID NO: 54534 - DNA, 1594 bp, Bovine  19866881240304
  misc_feature (1)..(1): n is a, c, g, or t
ncctatgttctgcctgccctttgaattctatctttatgaataaaaataagtttccacatttcagaaccatgtcagggtgatgaaaggttttgaaggctgaaaaagggggtaaaggttattgtgaaatacgacgtgtgtcatcataattgcaaaataagtcattagctgcaagacaaaagcatttgattagtgacatcattcatgattatttccattaggaagaagaagctctgtctcaaatgaaataatttagaccaaagaatatggaatatgagtacagtataaataaaatattaatagatttcctaatggtgacttcaaagtagcaacataaaaaaaaaagtagactagaatgttctgataacaaacatcttactaccttgggaatatcttagcaaaactatgaggtggtaaactcatttggtttttagaatattaaaaaatatttacagatttttcactcattaaaaatccattgggaatctaattcctgaagtgacttttgcctgaagctgaaaaaagctcatataagtgtatgaataactttctttgtgagatacttaaatggtggatgtcatggtgtggatcttgtcttgggaagcacttgcttgttgacctatgactgcttgggtggcacagcaatatgtaaagagataatatgaagtgaaagttgctcagtcgtgtctggaattctcatcccaaaatactgaagtgggtagcccattcccttctccaggggatcttcccaacacattggaggcagattctttaccatctcagccaccagggaagcccaagaatactggagtgggtagccaatcccttcttcagcagatctgcccaacccaggaattaaaccggggtctcctgcattgcaggcggattctttaccagctgagctaccagagaagcccactaataaaaaggagagatctaatatagttttgaatcttatgagacctcaataatatatgtgatactgatatgatttattataaaataccaattcatttggacattgttaaactttttaaaatttgtttttccaagaatgtatgttcaatgtttaaattttcactgatcaatgatcttatatttttaatagataatactgttttgctcaataaattctgatgcattagaatttgaattattatttgaatcatatattgcttttgaatgactcctctgataccccaaaactctattttttctttgaaacacacttcagaagctctgtataagctaaaataatgtttttaacttttcttgatttgtgacttgtcaaaaatctagagaaggaagatcttttatttttcagtgtatgtgaattaaaatttatgtgagtgaaaaacttgaggctccaaactttctactgattcagaattctgattattactttaaaagtaagaatctatgtgttcaaaaactatatatttatatcgaattgaatttttgaaaaaagattaaacaaatgtgttttttttcctacaatttatttattaaatatctctgtgcttaagaatccatccatcaaattgcattttatgtggcaaaatctctgaaggaaaaatcagtaaattttgcacagtag

SEQ ID NO: 54535 - DNA, 1128 bp, Bovine  19866881256844
  misc_feature (1)..(1): n is a, c, g, or t
natataacatacacaacaccaaaattataataagatgcgttatttgggagctttcaataaaggcatagcagagttctgacttttagcaaaggacctatgaaatatctcattatgaattatgctattcatttcctctttcatttatacccaatactggattgaaagaagctttcataagcaattctatcagaataaagttcaggggtttatgggacaaaaataaagcatttttagacaaggatatcttcttttattttttcattccttgctggtgaggtttccacagcttgaggaagtcatgttttgggaaaacaaaaagttgtgctaatgagaattctttgcatttccaaaggctttataacatgtaatacaataaagagaaggcaggctgtccagggaaagcattgagtaaattgcatgttgtgggaggagtgcttggggagttttgagatgcccagaaatagaactgtttctcaaactttctaggcagcccaggtgccacccaatccaggactaggttttcgctgtgcacagctgggagtgggtggatcacttgtacccacccaagctgtgaactgaagaccaattttttgaaattgccttagttagaaaggattctcttcctcgattcacccaccagtcagcctcaggcactggatgttttctgtgtctggaaccactgaggatagtgaaggtcctctccattccttttcaacagatccaaccccatggttttaatattttacatttcattaaatacactggcatcaccgatgtgaggttccggaagatggtgatggacagggaagcctggtgtactgtagtccatggggttgcaaagagtcagacaggactgagtgactgaactgaactgaactgaatcctggcagcaggaattctaatctctgtgttacagaggaaggacacagaggctcaaaggggttgaaggaaattatcctgactgtcaaagaggtgattgggaagctcagatcacagggaaggttttaccctttattctttcaacttgggagagtgtccgtggaaaccattcactccttcatacacctcacggaagaacatgatattctggtcaatgtttggtatgctccttggtccttatacgaatag

SEQ ID NO: 54536 - DNA, 1858 bp, Bovine  19866881309514
  misc_feature (1)..(1): n is a, c, g, or t
nttgtatgggctttgcttgtcagatgacgttgtctgggcagctacagaaggatggacgagagcatgtgacagactgtagcaatggggatagtattaaagatgaaaattagtagagcagtaggcaacaaatctttaaaaatacttttattgttctttgtatgctttataacttactagtctcaataataacatgggttttatagttataatgtggtaggataaaacattgagctattgatttatggcaggtataatcacaggtttttaatttgaaaaaaatagaaaagtccaccacaaatgacaacatactttacaatatgcaaaatatttctttctgtagtaaaacatgctagttaaaaaaaatcataaacttggattaagcttgaagctagacactggtacgtttaaagattacgtttctaagtaaagtaaatgcaacaaagaaaatgaaaacatagatcaggtattcatatttttatatcatgtattatgttaagaaagttgaaatgtgctatttttattttgttgcgttttctatcatttcagtagaaattcttttgttagagaatcagtgcttgtgtttcgttctcttaaggtatagtctaattaaaactgtcattcctacattctaagaacatttagattttaatcatgcaattgtatagggacttatttttaatactgtacttcctagataactgtgtttccctcatattgctatcctggttaaaatatacacacacctgttggattttaattatgaatcttaggatattccaaaaggaatatttttaaaatatcatctgtagcgcaatattctaggattctttttattctttgtttttaattaaattctcacaagataagtgtattgagagggatattcagtgtttattcttacttcattttacactgttccctgttttgtgggcccagaatcctgggaaataaactcccctaattcttttgttggtatgattccagtttttatcaatgaaagtcacttgataaaatttgaaagttgtaaggaaagtagagaatattgttcttctgctaatagtaataaatagatatgtgtgcttcagtaaatatgacttttgagaaaactttcagttgagatataacatatatcctgtaaggtgcattaatattaagtttatggcttgatgaatatttacttatatgtgtatttatttatgtaatcaacaccctgttaaagacacagaatatttttaacacccaagaaaaatccttcctgttacatgtcaatcagtctcactctctaatctctgaggtgaccactcttccaacttctgacaccttagatcatctttgtttgcttttggaattcatataaagtgatacacacagtatctactcttccccagattaattgaaatataatttacaaacagaattataatatatttaaagtgttgatttgatatatgtatgtgttgtcatcaaccacttcacatatttacttttctttggtgaaaacacttgtattccttcttaggaaatctacacaatacagtattatcaactattgtcactatgttataaatcagatcttcagaccttattcattttataattaaaaccttgtaaccttttaccaacttcttttttttcttttttaattaatttattttttattgaaggataattgctttacataattttgctgttttctgtcaaacctcaacatgaatcagccataagtttacatacatcccttccattttgaacctccctcctgtctccttccccatcccacccctctaggttgatacagagcccctgtttgagtttccgagccatatggcaaattcccgtggctatctattttacatat

SEQ ID NO: 54537 - DNA, 1597 bp, Bovine  19866881496175
  misc_feature (1)..(1): n is a, c, g, or t
ntgactttgatttaatattaatattgaagtgcagctaaagaaattcaacatgataaataaacacgtataaaggatgatgcaagattcattgacgtatattcatataagtgacatgtagtttaaagttaatccaaaacattttttaaagctctattttctcatccatgtatcaagtagttgtcaatacatgttctacctaagttttcctttacatcaggacaaagcagggagaaatgttatctgcaggcacaacattgttagggaatgtcctgagtgcttaaatcaaaagcatagaaaggaggaaacctggataaaaagaaattacagatcagttttgagtgtagagacagagggaattcgaggcaaaatgttcataaataaaggtgaagatattgaagtcagagaatgagttgaaaaagcacctctattacatatttttcaggtgggaaattataaacatgcatggactgttcacacagctatgttgaaaggaggattgggccaagtggacataagtcacacaaaacacaaaatgctattttaaccaaattcccaacattatatctgtgaaatagaatatttccaacttatattacatagaattatatctgaaagtgaaaatgttagtcactcagtcatgtatgtctgattctttgcaatcctatggactgtagcctgccaggcttctttgtcctggggattctccacccaagatacaggagtgggttgcaatgtcctccagggaatcttcccgacccagggatcaaacccatgtctcttatgtctcctgtattggcaggtgggttctttgccactagcaccaccttggaagtaacttactaaattaagaaaatcacctattatgattatcagaaattatgagctagttaatgtatgtgccccatgtaattttactcttacatatatgcagtgcctccctgatatttggttcatgtgatgagagtatatagaaatatagatatatttttcttaggagagggctgtattcattttagagaaatacttatatagagcattccatctgtattttctgtaatattttcctatagcatgagaaaaaggtttcccaaatgtgatattacacctgctgtaacatatgaagctgtcatctattcaaagactaaaccttgctcattcggaagtaaaaaatgaaaaaaagtcaactttaatattacttggagtcatctcttggcagcatattctataatacctaattttatgagatcgtagtgcctcaagtatgagttcccactcttcccactaaaatctgttgacggcttttcatatttaagacactatcctaggatagaaatgagctttgtagcttgaagaagtttatagtgttataagaaaggagtaataatattaagcaactggactttacttttcatatgtaaaaatggtgataaaatttcctgtcctgcccacctcatggtattcttggaagagtcagatgagtactgaaagcactctgtaagatatgaataaatatacaaacctcaattattgttgttatgatgagtatattatagcaaattatcaaagaccaaaatatgttgagcaataaggcctgggg

SEQ ID NO: 54538 - DNA, 1229 bp, Bovine  19866881691486
  misc_feature (1)..(1): n is a, c, g, or t
ngttcctgtgcaatattgctctttacagtattggaccttgcttctatcaccagtcacatcccccaactgggtattgtttttgctttggctgcatcccttcattctttctggagttatttctccactgatctccaggagcatattgggcacctactgacctggggagttcctctttcagtatatcctatcattttaccttttcatactgttcatggggttctcaaggcaagaatattctgtgcggtctgttgcagccaccacgcttctgtgtggtcccttacagaatataactactgtaaatagtaagaatcaactgtatgtatttaattatttttattttttctcctaccaaattgaatttctttgctactttatgtcagtgggtaatcctttctataactattagatatttatttccctaaacaaatttttgtacaactctagtcagttccatgtgtaaataatcagaaacaatggatactttcagactcaatgcatgaaaaaatcaaaatacacagactattaggtagttaagatttaaacatttcctctctaaggccatattccaatccaaccaggtgtgtttctagtaacccaggaacatggcttggggagggggttgtccttgtaaacactgtattatttttagaggcatagaattctatcatatacttgggtttgaaagaactagaacacttaaaactaatgtcagagacttcttgaattagagtaagatttatatgtgttgaatgtgaggaacgtgatttagtcgaactgctaataaggtgatcagttttactatacttttttttaaagactgtatgagtaaatcagtgttactattcctgaggtaaattgttatggttatttcatttcctttttttatatttaacaagtattctttataatcttgtctcatacagccaagatgtaaacaatctacatcatagaaaggtataactgtcattaaacaggtaagtaagatcacgtggtgtattaagatgttaagaaattccatttcagtttttcaagcttagtattaaccatctggtaagttagctacagaactagccgtatgtttaagtcatttctcttattctgtgtgtatagttttaaaaacagtctttagctgctgttgtccaaaaaccctgcagaatgtatcccaaggtattttcttaataacaaaggagaattatttgaaggagtttagttgagtcatcagtaaggaa

SEQ ID NO: 54539 - DNA, 740 bp, Bovine  19866881835125
  misc_feature (1)..(1): n is a, c, g, or t
ntgttgcttctaaaaatatttttctaataaagctattcaatcaaacattaaaaacattgcagtagaccctaaagtccacaagaggagggattatgtctgtctctgtccccttcaaatggccttgcacatgattacactctataaatactattaatagataagtgaataataagcatctacaatttactgtctttaataattagttggaattattatatgtatgctaaagtaactaaatctgtatttgtaaaaacaaattattctaggcttgctttaataaacagacaaaaatcaattcataaataatagcatgcatttacatatgaacaatgttctaaagtcttctaaaattatgttgtctctttcataaaggttaaatacctcccatcatcttctttaagctattcatctgttcagttaaaatttccttcaatgtaatacgaaaggaaatgtcagtcttggcaaatgatcgccaattccaaattaaatagactctgaattaatgaggttttatggtattttcaaaacaacaaaattcactcacctcaaggtcattgcttccatttttaaatgataaatttaacttttatgtcagtagtgattctcaagccctatggtacattcgtatcttgcaatcatgtcttgggaaacattaaaataattattgctattaaacttcatgtcttcagtataaacaacactatacttttacagcttttttaaatcacatagcttcttta

SEQ ID NO: 54540 - DNA, 1663 bp, Bovine  19866880263460
  misc_feature (1)..(1): n is a, c, g, or t
nttggtaagtgtttggtgtctcaaaaaagaattttttaaaagtccattgttaacgccccattatacaagatacacaaaaaggagatgaatacagcttcagatcatttcagtgacattccaaacccagggaggattaatgcctgtgaatactcaactaaatcagtattttgtcccctcagtgcataatcactacatgatcaggatggagtgtgaacattaataaaagctggtccaatatggaattaactcaatttcagtcagtggatgaacacttcaatcctctagaaccagataactttttaaaaactcctgatatctgttgtaatgcaactaatatcactatcagttgttcaaattctacaataaaagacatacacatgttaatgtttgacaaaagttaggttaatttaccattcattcctcccaaattctgagtgtccttgaaaataggagtttacaaaagtttctttctttcttaggattaaaaaaaataataaaactttgtcaagcattggagtcaagaaaatattatataataaaagctaatgtggactccttgtatgttcagcactattctgaatacattacatacattacacgtgttggtccattataatcatcacagcattttccctgctggctcagatggtaaagaacctgcctgcaatgcgggagacctgggctcgattcctgggttgggaagatcccctggagggaggcaggtaacccactccagtattcttgcctggagaatccccatggacagtggagcctggagggctacagtccatggggccacaaagggttggacatgactgaacgactttaactttcacttacgagtcatacactctatttccttaatatggataaagaaactgatgcatgggtgggtgaagaaacttgtccacggccactgttagttaaatgatggagacaggatttgaacatgggtagtcaggtttcagcggagaaggcaatggcaccccactccagtactcttgcctggaaaatcccatgaaccgaggagcctggtaggctgcagtccatggggtcgctaggagtcagacatgactgagtgacttcactttcacttttcactttcctgcattggagaaggaaatggcaacccactccagtgttcttgcctggagaatcccagggacgggggagcctggtgggctgccgtctatggggttgcacagagtgggacacgactgaagtgacttagcagcagcagtagcagcagcagtgtgtgtatgttagttccaaactcctagtttattgcctccctcctcacacccactatcttctctggtacccataagtttgttttccatgtctatgagtctatttctgttttatatattgtttaattttttaggttacacatataagtgatattacatgatatttgtcttcctctgtctgattcagctcacttaatatgataatctctgggtccacccatgttgctacaaatgacattatttcattcttttttatgactgagtagtttttcattgtacacacacacacacacatacacacacacacacacacaccccatcttgattatccattcatctgttgatggagacttgagtttttcccatgccttggctattataaataatgctgctgtgaacactgggatccatgt

SEQ ID NO: 54541 - DNA, 2344 bp, Bovine  19866880457688
  misc_feature (1)..(1): n is a, c, g, or t
ntcgccatggtgatcgtccttttagtcatgtgcatctacaccaggtccatgttcatcaccctgatgacgatgtttgccatcatcagttctttgatcgtgtcctattttctctaccgcgtggtgtttaactttgaatttttcccttttatgaacctcaccgcgctcattattctggtgggcattggagcagacgatgcttttgtcctatgtgacgtctggaactacaccaaatttgacaagcctcatgcggaaacatcagagacagtgagcatcacgctgcagcacgctgccctgtccatgttcgtcaccagttttaccacggcagctgccttttacgccaactacgtgagcaacatcacagccatcagatgcttcggggtttatgcggggacagccatcctcgtcaattacgtgctgatggtcacgtggcttccggcggtggttgtcttgcacgagcggtacctgcttaatatcttcagctgtttcaagaaaccccagcagcagatttacgacaacaaaagctgctggacggtggcctgtcagaagtgccacaaagtcctttttgccatttcagaagcatctcgaattttttttgaaaaagtcctgccgtgcattgttattaagtttcgctacctctggctattctggttcctggccttaacggtgggcggggcctacatcgtctgcataaacccaaagatgaagctgccctccttggagctgtccgagtttcaggtgtttaggtcgtcccatcctttcgaacgttacgacgccgagtacaaaaagctgttcatgttcgagcgcgtccaccacggagaggagctccacatgcccatcacggtcatctggggtgtatccccagaggacaacggcaaccccctaaaccctaagagcaaagggaagctgaccttggacagcgccttcaacatcgccagtccggcttcgcaggtctggattttgcacttctgtcaaaaactgagaaatcagaccttcttttaccagaccgacgaacaggacttcaccagctgcttcatcgagacctttaagcagtggatggaaaaccaggactgcgatgagcctgccctgtacccatgctgcagccactggagcttcccctacaagcaggagattttcgaactgtgcatcaagagagccatcatggagctggagaggagcacaggctaccacttagatagcaagaccccagggccaaggtttgacatcaatgacaccatcagggcagttgtgttagagttccagagtacctacctcttcaccctggcttatgaaaagatgcatcagttttataaagaggtggactcatggatttccaatgagctgagttctgcccctgagggcctcagccacggctggtttgtcagcaatctggagttctacgacctccaggacagcctctccgatgggcaccctcattgccatggggctgtccgtggccgtggccttcagcgtgatgctgctgaccacttggaacatcatcataagcctttacgccatcatttcgattgccggaactatatttgtcaccgtgggttctctcgtcctgctgggctgggaactgaatgttttggagtcagtcaccatttcggtggctgtgggcctatctgtagactttgctgtccattatggggtggcttatcgcttggccccagatgctgaccgagaagggaaggtgatcttctctctgagtcgcatgggctctgccatcgccatggctgcgctgaccaccttcgtggcgggggccatgatgatgccctctacggttttggcttacactcagctgggcaccttcatgatgctcatcatgtgtattagctgggcttttgccaccttctttttccaatgcatgtgccggtgccttgggccgcaggggacctgcggtcagatccctttacctaaaaaactccagtgcagtgccttctcccacgccttgtctgcaagtcctggtgacaagggaccaagcaagacacacaccctgaatgcttatcatttagatcccaggggccagacatcagaaatggaacacgagttttatgaattggaacctctagcagcccacagctgcacagcctctgagaagaccacttatgaagagacccacatctgctctgaattttttagcagccaggcaaggcacttagggctgcctgtccacgcagcttacaacagtgaacttaacaaaagcaccaaaaatgaaacgagccctgccttgttgcaggcctctcttgaacagcacaccatgtgtcacttcttctctctgaatcagagatgcagctgcccaaatgcctacaaacatttgaaatatggcccgccctcttgccagcag

SEQ ID NO: 54542 - DNA, 3652 bp, Bovine  19866880490346
  misc_feature (1)..(1): n is a, c, g, or t
ntcttctaagttaatgcatctttatgcgttctttggcatgtacttttttttaatagttctcgcttatctttttagtctctgctggatctctcattttatccctttttatttttaatattactcatgcatttctttcttgaacaattctgctagaggcttccctatttcattcatgttttctaagaagcaacttttggtttttggaaatcatgtccattaaatctttgctttctgttgcattaattttgacacctatagttatctttgtttaaatttattctgttgttcttttaaaaatttcttaggttgggtacttagcttattaattttcagcttttcctctcttatactaataagcatttaagtctctacatttctctcatgtctcttatattatctttctaactgcatgccagaagacttggtatattgtattttcattattgtttagatctaaacgtatttaaagttcaagtttttaaatccagaagacatttaaaagtgagatttaaaagttctaaaagtgagatttaaaagttctaagtatatttttgaggtctaatttaattgcactgtggtttaaaaacttggttcatatgataatggatatttgaaaattttaattctcaaatatgatctattttaatttaataactatcttaattctcaaaccatggtctattccatggttggtctttgtaaatattgtcgtatggaatctatggatgtcctataagcaaaactttatcattgcatttttatatttttactaattttttgttctatcagtaaaaaaaagagctaccttgaacatcacccactctaaagatgaggttaattttcctatgtactttatcaattttacttcagatataacataagactttttagaattgttctatcttccaaatgcatcaaacattttgttacttcatagagctctacctatacaatgcgtttctgtattaaagtctagctgacagtagaaatttttcatttggttaatatttgcttcataaatctttcatctccagcatctccctgtccttatgtttgtatatgtcccctgtgaatagcacagcactgaatgctttaaaacatctagtgtggcgacctctgtccattgcgtagtgagtttaatcttttttcattatagtgatgccagatttgtctgtcttttcactatgctgttaccttctgcttcctatttatttttccttctgcctacttttctcttctttactattaaaactttccattttaatttgctttctctttccatttttttttcttacttgtttggaaacaatgttatactgatttttctctgagggttacctttgaaattataccatgcaaaactactacacattaacaggagcacctcaaccttcctagcagatcacacaatttcctctcaaatttcatactattagtctgactatttgtgttggccaaaaagtttgttcaggtatttccatcacagcttatggaaatacctgaatgaaaattttgccaactcagtattttcaatttttgtccttttaactgtttttgtatttctgtatgttagacatggaaattaaatgataatattttatggacagtattaatatgtgcctacttctttgcatctcagagctgtcttccaagattttctcccatcttcctggagtgcatcttttaaagttcttctggtttaggtcaattggtagtaaacttggtttctgtttctctagaaatgcttgtatttcagtctcgtaagtggagatatttttgttggctggacaattctaggatgactgtgattttccttcagcatttagaagatactattccattgtctcctggctttggttttcgtggttgggaaaattgctgtctgtctgtcattcctttgaaagtggtgcattttctcttttttaatgctttgaaaattttcagtttgcatttgctatttgccatgttgttttcaatgtgtccaggtttgggtttactttgtcttgttggataactgccatgattactgtgtccttgcattcatgtaccccagttctagaaaattgtctttaaattcaccctgtcccctatcttttctactccttcctcctggactctgatttgatattgtaacttctttatcttccttgtctctttttctctcttttgtactttacatcttatttctttatactgctttctagaacatttctacagatctaccttcaagttcaccaattcgctcctcagttgtgtttaatagtgtacttacttcaccctctgaatttttaatagttttaactatatattccattcaaaaagttctgtgtctttttcaaatctgcctgttcatatttcctattctctcctgctaggtcatctttaggagtccatgtttttcttaaaacattttatatatggttattctctattctgattctgagaattgtaatgtttcaaatctgtatgggtcctaatctattttattcctgttgatcatcattcatgatgatttgtatccttggatgattatctttgtgagctcacatatggctgctcttgatctgtggaaaacagacatgtatgcttgtctccagagtggtttctttattaggaccaggaacactgctgatctggaccagtgtcatccccttccatagtccctggactaaactgagaatctcagagtcagcttctctctcttgacatactgttatctggaactgtcctcagagcaactctgtctgtatgtgtagtaactgctcaggtctctgactgtgtgtgtgtgtgtgtgagtgtgtgtgtgtgtgtgtgtgtgtgtgtggtgttcccatgaaggtttcccgaatttccattaacccagcaatgcaaagaaagtgtattttatgaaagatatgcgtgcaagcatgctaagtgacttcagttgtgtctgactctttgtgaccatatggaccatagccctacaagatcctctgtccatgggattctccaggcaagaatcctggagtgggttaccatgccctcctccaggggatcttcctgacccagggattgaactcgtgtctctttcgtcttctgcattggcagatgggttctttaccactagcgccagctgggaagcccatgaaagatatacctattctgaaacagaagaatcctcaaagtcattagtccctgatacgataagcagaaatttgggcctgttttttcatcaataaaagagaggagtatgagaattcagggaaagatggaaacatttcattaccattaaagcaactctaaataaatcctagttattgtttgtggcatataatttcctaaatctcatcatcctgtcattgctttctgatcacctcatgtgtatgaagcttgcttcctaagttccaagggctacacagtatcctttcttttatttagcatctcaagagcgcttttgcccacttcatctcattttgcaatggccacatgaggcctgacttgcagactgaatggattataatgctgtatgcaataaacttgtaatggacagagacaagcccaaaggaagggcttgggtcccaaattggtccaacccaagtctttcctggaatcttccatactggaggcaaagaagtctctcttctggattgcaagtgaaaacataagactgagg

SEQ ID NO: 54543 - DNA, 1192 bp, Bovine  19866880521005
  misc_feature (1)..(1): n is a, c, g, or t
ngatcttcccagaccagggattgaaccaatgtcccctgcactgcaaggcagttcttccccccccggaccaccagggaagcccaatactagcattcttaatgttcaaaagaggctaaaagttcatttctgaagtcttttctcttattatggtacttatattaaatttagaaggaataatttatctttaatttattcaggagctcgtgtcctaataaagtgatttctacttattatattattggaatagtttattaaccttattaaactatattttactatgttactagaaaaatattaagtatactcatgctgtgagtgatgtatgctggtaaatgcaaatcctaatttatgttgaggctgatcttattgacattttagatgaggatttaattgttaatatttctaaaataaagaaattaaatagctgccataaacccttttaggaacaagttggaacataaaaatgcaaaaatggattatgacatagtaagtgttctgttgggttaacattttattttagtattagttgaatgatttaagaaaaatttcttcccttcaatgttaattccaaatcaggctagtatgaaatacatgttagtaatgctcagaatggaaaatatacacctgtggtagaagaatatgtcatagtaaatatgtttatacagctgtgtggtaatgttagttattacagagtacatttacagaatcatgtaatgagactcattttcaaacaaccattaacttcggcatagaaatagctaattaaagaataacttcatttttcagatgcagactatataagcagtatctagcatcactgtagctatctgcaaactctgaatgcataagtttgattataagtatatgttagctaatttttgagacattacagacttctataagactatgttttatttataatttatgttttcattgaatataatgcctactcttagtaccagactgagtttccattaaactttattgcacttacatggactcttctgtcatgctttaataaaattataacattgatttaattgggtctgtgtgaaagcttcttttagcattaataattccatttattccatggggttattagttttggataacttgtatgacttcattcagatttgtgctagaatatgaataaatattatttaaaatttaagtaagcatgagtaaaagcaaa

SEQ ID NO: 54544 - DNA, 1175 bp, Bovine  19866880572574
  misc_feature (1)..(1): n is a, c, g, or t
ngcagcctgccccactcactcagatctgcagttcacccacaaatgcaatccattctccctgctccttctgttatctgtcgttttatagaaggagaatgaatccttcatatctgtgctgtttgatacgtgacctcttgagatgatgatgtgctcttttatattgggttggtcaaaaagttcattcaggtttatctgtaccaaataaaaaacccaaaccaactttctggccaatccaatccaacagggccatgggtagtgctgcgggcctaacctaagcagctgatacagcagtagggccttgaggaaaaccatcacctggtcagtcagtcattaagaaaagactgcctgctgtcatccaggagccagagaagtggatggcacatacagttatgttgtagtgtggtctaaagatgtacaaaattagatcaggcagatgaaagacaattactacatggtatacagaggaacatattatagtaaaagagtggtcctttgggaaattcttccaatgcatgtgtagttgacttttcagagaaaagaatgcacaggtcctttattcaaatttaaacttagaatatgtaccttgaactcagatgcatcatgaagggaattagctagaaaactgtagctgtaagatttataggtcatttttaatttcctttacttctccaattttcctgctttattagattttgtcataatattacaaccattgtctgggtttcatattatatatgaaacttttgtttcccacatggtgcccgtagttacacaacatcttagcatagacagcaggaagcagaaatggcctcagttactgtgtgatatttagcagaaaccactgtctgagtaatatttactcaaaagagttagggctttccccccgtggtgcttgatgtcctcaggatagtgattccatttcttaagtgcgagcagttgtctcaaagaaaggttagcatgtgaaacatgtgctgtgtgaggaagtggatttgtaatagggtaaggttaaatgtgtttggaagaaatgtgctgaaatcactaataccgtaaagtttccatatgtagtccatgcacagatatggtagagaccagtgctgtaaaatcaaaaccaaatgttttcaaaagcaagaaaaagcaattattgaatgagtttttaagattgctgtgcatgtgtg

SEQ ID NO: 54545 - DNA, 1584 bp, Bovine  19866880657203
  misc_feature (1)..(1): n is a, c, g, or t
nttgcctggaaaatcccatggatggaggatcctggtaggctgcagtccatggggtcgctaagagtcagacacgactgagcgacttcaccttcacttttcactttcatgcgttggagaaggaaatggcaacccactccagtgttcttgcctggagaatcccagggacgggggagcctggtgggctgccgtctatggggtcgcacagagtcagacacgactgaagcgacttagcagcagcagcagcaagagagagcagggtctgtttttaagttttgaaagatgtcccttgggtgtggaatagggaggaaaatatgaatgaggataatgataacaataaactctttgtaaagcatgcataacataatttaatttgaccatgatgttttataatataaaaataagtatttacaaaaaaaaaaaaaaataagtatttactaaatgctagggatgcgtatggaagagaagcttcagataagttttttatcctcctctttgctgagatatgtaacataccaaagaatcaggccgttttgtcacagtaaataggtgatcattattatgtcaaatcatcttgttttaatgcagttcacctctggagtagctgtgaggaacgtatttattttctgttgaaagctatccatcaccttgacattgccttcccaagctgttataactatacttagcctgaaatgaagtacactaatgggaatttgtaatattttgccttagggttttgaaccaagagggactgcaataggccagagactggtcacatggaataacatggtgaaaaatacaggatacaaagcaacattagcaaattacccctttaaatatgcagatgaacaagccaaaaggtaaccatttattaacttttagacaaaacactgctaatgaattccacttataaacactgcctgcgcaaaacgattacatctaaaatgtgtggctcaaaatctttaccactgaatgtgtcgaaattgtcagtgtcttttaagattgtgttgtctgttagtgaatgtttgggtttgggtttgttttgttttgtttgtttgttttcctttttcagaagtgagaaaattaatggtggttgcttatgcccatccgtccaacttcataccaagcactaaataggtcatgactttgaggcagtattgttaccagtaggcttctcatccttggaatggtgaggacttgactgaagatcaaattgtgttctatttcagccatcgggatgataggtggtcagacgatcattatgaaagagagaagagagaagttgactggaacttccacaaggacagctttttctgtgacgttccaagtgagtagcatcataaatgacaaacctctctaagtttcctgggattgaacgtgactgataacctagactgtctgggtgtatgtgactggtcacacagctttactgtttctatcatgcttcaagagattttgtttaattaacttgtaattttacttctctaggttagtcaaccactaatctgaacccactccagtgttcttgcctagagaatcccaggaccagggtgggctgccgtctctggggtcgcacagagtcggaca

SEQ ID NO: 54546 - DNA, 1590 bp, Bovine  19866880725145
  misc_feature (1)..(1): n is a, c, g, or t
naatggtgattgatcttaggttttggctttatgaaagacgttttaaaaattccttcacattcttttgcttcacagtatgtggatgtagaatttttgtattttgatttatctctgtgatggtgttttcctttgagctgctaaattttgaggttttgagatgtgcaaaatattaaacattcatggtgtctttagacttgattgtgtgatctctgttcaacaacatgagtcaagctcagtcatatgattctgtttctactggggaagagctgtagtgatacagacagattgctcaatgctttgtgattttagttagagcaaaataatttcaggtgaaatcttacgacttaaagatagatctatcacatcttgggggttctgtttattaccaaagcatcttgtgattaattgggttttttttgttgttagtgggataccaggctagattagtaggtctggtgtctggaggctgtctgactctagaattggaacgtttaaaatgcagtcagaaggctttttctttctttttcctttccttttccttccttcctcccctctcttttttttccttcttgctttcttccttcattctctctctccctttctttccttctctttttggtacaaagctttagggagcatgctcttttaatagagagggttgggactttacattggagattgaccaggtgttggggagatatttttttcttgagggttaaataaacttgttagtcaaattggctatattctaaactctattcagatgatcataagtatgggcttggccaaagagttcattcaggtttttgcataacatcttatgaccaacccagtaattgagaccatgtgacaagttgttttgtatttccacaacattgttccacatgaatttcacactgttgcctctcaaactaatgtgttattgaggatttctcttcctggcatccttgtccccacccttataacctcaagggtaacccaaaaagaagtaaaactaatccaaatactataatacattctaacatgaagtaccaggtccaaatgttttagaatatacaataacagtctgcatttcaagcaatattttctgaaacagtattgaatattttgagagttagttgcttgcacttataaattaatcagcattaattaaataaagtataaatcagtagttctcaatcctagctgcacattagaattatctggggagtatttaaataatgctaatgcccataccccattataatatgaattaaatcataacctctgggaccagagccccgtgtctgtaattgtttcgtattaccgaagtgactctagtatgtagaaggagttgaaaccactgtaatagacttgtaactttgtgaatatttgttatattgattatgttcccttcaagacttgcagcagagtccaaatgaatgtctcagctggttcttgagttagataacaactttttagggggctttctagaatttttttgaaagaccagagattgattttttttttttttaattgaagtatagttgatttacagtgtcgtgccaatctctgctgtacagcaaagtgcctcaggtatacatatatata

SEQ ID NO: 54547 - DNA, 1849 bp, Bovine  19866880877318
  misc_feature (1)..(1): n is a, c, g, or t
ntgaaacccacccctcagacgtgatggtgtttggaggtggggcctggggcctctggtgacaattaggtcataagggtgcagccctcatgaatgggattagtgcccttgtaaaagggaccccagggagcctcctaaccctctttccatcatgtgaagacacaagatgatggcaatctgcaacttggaagaggaccctcctcagaaccgcctgggctgacactctggtcttgggctccagcttccaaaactgtgagatgtaaatgtctgtttcacccagtctatggtacttcgttacagcagctggaatggaccaagactgccacctacccttagcctctctaagcctcaatttcctcagcagccagctggaaaaacagtaccctctgataggtgtttggggaaggctgtcatttgtagtgttaatagctagattttaatggagtactgacccacatgctggactctgttctgaacacatggaccaattcatttaaccatgatcgcaaccttatgaggtaggtaccataattttttccactgtcagatgagaaaattgaggatcagaaaagtgaacaatcaccaggtggcccaaagccacctgagtggcagctagatggcagctagagggtcacctccgtgccccttactcttagccaatacgttctgtcaattagaggagataaagcataaaatatttcatagaaattctggcatatataaaaactcaaatactgttagctgtttttgcggttaattttgcacattagtgggatggagaggaaaagccaaataggagggtgatgtagaaattccactggagggatgctacaaccctgggtcccttgcttcccactctagcccacctctctgcagacagggttctatttcagaagcttctccctccatagacacttatataattttcccaaaacagaaggttgggtttggggagctgggaaagaactgagtgaccctctagcccaggctcctcatgttacaggtgagccagcgtcacagaggggagccagtagggagtctgggtcccctgacaattcctctactgcaggcttaatgtcctacagtcttctttgcatattgctttccataaatttgcatactgggctctagagactcagcatatgaaacaaaataaaagaatttatggacgctgaattccaacgtaataatcaactcaacatacttgaaatgcagaacagaacccccaggctgccaggaaggggctgagggcctggtgaggcaggacaggcatgcaggacatagcctcactctgcacacgatcaggagcatcgtcccattcccaggatgacccaggagctgccccaaggagccaagggacacctccttgacagcccaccagaactaggacacaatctccccatatagccttcacgagggcaagggagggtgaagcaacttctctacgatcgccagacagctcatgacagagccaagacagggactcccagccccactgagacatccaccttccaggtgaagccatcatgagacctctctgaagtgcaatctcttccttctctggctggggaggaggagcctctaatccccttggatcagagctgtacctctaaggaattgtccacttggaatacacagagactacgagcagatgagcccaaggattggtaagtgctgtgctgtatggacttaccctgggtggtccctggtggtacatccctgagccaggcgggcccccatgctggtaggcttcacctgggggcatggttgggaggtggggccaagggagagagagaaataaaaacactcaccagagcccacatgggaaaaaaagagaagccaacaaagcagt

SEQ ID NO: 54548 - DNA, 1761 bp, Bovine  19866880950943
  misc_feature (1)..(1): n is a, c, g, or t
nacagagtgacctcaaccttgaatgcgcgtgaaagtaccctgagaccccctctagacgctccaaaatgtctctgtttccctgtcttctcattgactctgtttctcatcaggaaaaataatttctctttttctgtgtaacaagaatgacagctatcattctctcttatttttattgccaaagcatcattttgtagttacataagagttaaatagatttttgcaggtcagccaaaggacctaatcacgatttacaacattttttctagcggtgtggtaaactgcagttcaagtgccaaataacttacttacaaatgaacttttggaacataacttgtttggtaacttggagacttcttgtaatgaagtaggtatgagtggatagtaaagaataattgaactatgactttggttttatttgaagtaactcacatgagctttctgagattcagtttctttaagcataaactgggaacaatcaaattgcctttataaataagttgcagattatgttaaaaatgatgaaaaagcaaaagctggcacaaaattgttctcagaaatgtttacagattaagttcaattagtgtatctgtgtaagaattcaggtgaccaggacaatggcaaaatttccacctaaagtcaagagttgactttaaggccacaaagagaaagaccttgtttctttagaacttcacccgaagtttcttcactgaaacaagtgaaaaaaaattcgatcagagtcagaaagaacagcgcaagagatgagctagaggaagattcaacatcataaaaaggaactattgtgacaaatgtaatgctatgtgattacaaatgcagtgacagttattatttaccgtggaagtttaaaataagtcttggatcaaatataatgaatgactttagaagagctatgttgaaatcacctgttttccccagggccataacacacagggaatgccaaaagaaagctattcttgaggcgctggcttgaggtgtggtgaggcccgatagcaagtattttagtgcctttcctgttgttcatgagtataacaagccaatatcaatatacccaaagccactaatctcacacctcctctttcaacctttctactagcatttttatgtcctgagtgctttaccggttctgaggcttatacggccttgggccaaggaccatcttttgattacattttaaaatttaagattttttttctttgggcctcagttcttcacaagtgtaaatcaggatacaaatcaatgtccacctcatatgactactctgagaatgtaaaaatatatttaaaaccataaaaggctatgtatttacaatgaaagaattattattattgcttaagtgaggagaatatttaaaaaacatgaaatgatgcttcctagtttcaaagccaaaactatgttttaaaatggcatcagtgatatctgtagcttagaagaaatggcctggatgagtctcaattttaaagctgactctactagttactgagtacctgggtcaaattatttacattcttagagtctcaaagtctttactctttttagagttaaattgtttgaaaagcaaactaatgtaaccttctgaaagagcaacatggcattactattcaaaatgtagaaataccctcatcctttgactcgcaattctcctagggtttacagtttggatatccttgagcagtgggtaaacgcaaatgtccagagaaagatgttgactgcaccactgcccgtgacagggcaaactggaaatga

SEQ ID NO: 54549 - DNA, 738 bp, Bovine  19866881223487
  misc_feature (1)..(1): n is a, c, g, or t
ncccacctagttgcctgaaccgctggccacatggggccagagcttcaaggctactagactcacaaagcacatcctgtggcctgaaacctacaccagctgctgccgtcctgcgctccctaaggaagggtgggcccagcagagaggagagaagccggaaggaggaaagggcagggctgagggctggtccccgggggagataagcctctaatggcggcagcatctgatccgcctctccttcctgctaatcctaaatcacaacactgtgaaatctgagcaagtgtgaacgccttgggctccagctgtttttcgtgtcaggcctccatcccagcctgtcacagcaagaagcctgaggatgcagtggtgagatggtgtggggcgggggcccaatacctgcagaggggaggggggacactccaggctgaggtgcactgtggggacccccgcctgatctctgctgcccggctgtccccgaggctctgggtcagccccctgttgctgtcccctgctctttccccactgacttctcctgctcccagggactccagttctgccttccttccccttgtgagtttcatggcctctgggatgcaaaccagggactgagggatggacaggggcagctgtctccctggccagtggggacccggagagacagccagccccagcaactgggagcttggagacagatcccgaccaggccaggtgacagaccagggaatcggtgcagaaggaggttca

SEQ ID NO: 54550 - DNA, 1724 bp, Bovine  19866881260156
  misc_feature (1)..(1): n is a, c, g, or t
nttaattgcttacaggaccagtcagatatagtcaagtactcccaataatatagaaccaatttacaggtaattatatttccatgcaaagcctacatctgtaggtgagaaaaggagatacacctcttcaaaatgttcttcgtctctttccattttgaaactgtgatgaaacacgtataatgttcggcttaggtgtactctataaattttacagactttattcagtgatgaatcgtttttcttttaaatcacggtttttaaacagaacacctgagattagttattttaaataatgaaaaaaaaattaatttctgcactatgcgatactaaaatcagacttacacccatgtagaatttctctctcaagatatatctagacccctgactatgaccattcttaccttcaataataaatgtctacactttgaatataaaaatgtatgttcttttgataactgacaggaacatgccagccaaaggcagaagaaatgtccatggattataggcaatcctacagctgaatttcctttgccatctttcacctccttctattgcttaagccatcagcggctattgattagctaagaaaaactcacctccaatttagctgttaaataattttcaattttctccctagagacattaggaatacctcagagatgtgataaaagattgctgtgaacaatgataaaaatgtgcatttccacatatttataaatctacatgctaactttactaaacttgctggcaaagacaactatctgatatttaaggaagttagtcaatgggaaaactgacaggcgaaactgcccactcactggatctctagacgtcacttcaattagtgattgagactggcagcccacaaaggcatttctgtgtgatgttccataagaaaaatatgctttgtacataatgtacaatattccctgtctgtcccactcagactcaaaaccctataaagctggaacaaatcagactttcatgtaacagcttgagttccaatttaagttaaaaagaaatttttctcttattagtagagcctggccctaataagcaagaaagaaatgatgttgttttttccccagttattgcaataaataagaaaagaactgtgttatatggatctgggtgagaacagggaggggggtaatttcctcttatataattaaataattatttcttcttaaaaagttggagttctaggcctggcagatcagtcgtcaaagggcagctattctgcccttcattcaaagaagagggaagcagagcatgggaaattcattttcagacacatttcgcccttgccactttcaaatacatctgtccctgtagtactggaggccagtatttcacatggttctggtcctatgcaatgcacaccccaagaggaatctaagaatgattttaaaagaaatagtttaaaacaatgagcattctgaaaaagacaactggttaattaaaaatattttttaagggttgaaaagtatctttgcttaaaagaaacattcttcctcagcccatgaacttaaatttgcatagtttagctggagttataaactgaacagctccatgtgttacattttaaagttatactaaattataaagcacttgcccttaaactcaagcctttccatgccagacttgctataagccccgaaacaaaacatgctaaatgagactatagtatatacttttcttaataagatgtgaataataatcactaa

SEQ ID NO: 54551 - DNA, 3116 bp, Bovine  19866881309977
  misc_feature (1)..(1): n is a, c, g, or t
ntttactttaattcctctgtaaatgccctgtctccaaacacagtcacattctgaagaactaagggttaggaattcaaccatgggtttgggggaaggggacacaattcattccacaaaattggtatcgctcaggaaacaccagttgctcattcagtcaatcttttgttcactcaagaaatatttatggagcatcctctctgtggcaggcactgtatttggtgctgaggatacaaagatgaatgaaacacaggcttggtcctcaagaaacttgtaataaggagacaagtgcacaactaactcagtacgatacagatctgccttcctgagtccagccaccagctgtctgctgaccttattttccaagccaccaaccaccgtggagcctcctaggcttagctctgcttcctgggtgggacatctgccatgtgatctcctttaatacaaactccttgcctgaaccagaaattgccagcatggatcatcatctgtgactcatcatccatttattcaagactcatctattaagcacttatgataagccctgttctgtatactcagagttacaatcaagcagacacatccccaacctcaaggagtgagtgagtgaaagtcgctcagtcatgtccgactctctgtgaccccatggactctatagtccacggaattctccaggccagaatattggagtgggtagcctttcccttctcaaggggatctttccaacccaaggactgaacccaggtctcctgcactgcaggtggattctttaccaactgatctatcagggaagcccgacctcaaggagtatataatctaaaatagggcaacatacagtgatcaattaaacaagaaagcatactcactgtgatgaaaataaactcttaaagcatatatatagatatagagtgattagaagggttattttgaataaggtggtgatgaggtgactgttgagcagacagacctggggaggtgagctctttgggtgagtgtctgggaagagcattgaatagggcagataaaacagcaagtgctcaggatgggagcatggactatttgggggagagcagagaggtcagagggccatcactgagtgggcaaatatgatctggcacagaacagaggaggcactttcctgcaggacctggtgagttctgggaggaagttgtgctcactctgtctgcagtggggctgtctgtgtgagagacgattccaggattttgagattgatcgctcacactggctgtgtggaggggacagcaaatatttggcagctctacaagcactctggggagagaagacgggggtcctagccctggggtggtaagaagcaatgagatcaaatgtagagccgaaaggtgatgaggtgaatgactcagacatgctctcgatttagtctagaaatggacagaagatgtaaaaccagggtcagtctctctcagctcaacttgctagtccaaaatcaacagccagcatcatgagtggggccagtggtgatgctctagaaaggcacaatgacgtgatgtctgactgttatcaaatatcgtgagcaaagtgatgaaatcacatggaaacaaaggtatgcgcaccatcacagtacaaacgaatttgctctgaattcagccaaggaccagtctgaagccctttttcggatctgatggccaaaatcactgtgaaagactcaagccaaggactgatgtgcccgtcctacaaatggggccagaggggcagagctgtgtttgagttcttcccggtgctgctggacagagtgctgggttttgagagtctccgaaatggtgactgtcacagaaagcaaaaccatttcaactcaaaatttctgatcacaaaactgaacatttaggcctgaggtcaagcaccagcccagcccggttctacccactcatgtctccggacagcctggcccaggggactgggcagtggtaggcagcgtagattctggccctagttctgctttgatttaatgctgtgacccagtttctccatttatacagtggtaacagtatcttccctttccttccttgctgagagatgaaggccctagctatatccaagacactaatgcagtctttggcaagacctaacaatgctgattggattgctctctcagtgcagggaagatgggattgcatggggtcgaatgcaattactttaccttacacaatagtgcttttatcatcaaagcactttctaccattattctggggaaaaagacaaggaaacccactgtcaccatctccatttaactttataccataaggcaaaagaaagaaaaatgaagaaactgttcagaaaagaagtaaaactacctctgttagcagctgtgattgtatacgtcaaaagttcagaacaatccacaattagaattagaattaattagaactagattaattagaattaatagaattaataagtggatttaactatatcactgcatagaaagtcaatataaaaaattaatcatatttctaaatatatgctagcaacaaagaattggaaaagaaaatttcttatagagagataattgatttacaatattatagtagtttcagatgtacaacatgattcaaaatttttatagattatacaccatttaaagttattatgaaatgttggttatatcccctttgttgtgcaatatatccttgtagcttaagtattttatacatagcagtttgtaatccttaatcccttaccccatcttgctattcctccctgataattactagtgttttctctatatctgtgagtctgtttctgttatgttcattctttttttttcatattccacatatgtgatatcatgctgtatttctttttctttgattcattttacttaacataattccctccaactatccatgttgctgcaaatggcaagatttcattctttttttatgactaagtcgtattccttatatatatatataccccccttttgttacccattcatctggtgatgactctgaagttgctcccatatcttgactactataaataatactgctatggacatgagtttttctggtcactcagatggtaaagcatcttcctgcaatgcgggagacctgggttcaatccctgggtcaggaagatcc

SEQ ID NO: 54552 - DNA, 589 bp, Bovine  19866881370729
  misc_feature (1)..(1): n is a, c, g, or t
natcggtgccccctatcccacccccaccccctcacccctgaagctgtgcagccctcccccaccctcagtgggaaatagacaagaaatcccattagggagggaggagggagagaaagacctaaagtgctagacatgtcataactgtcatttcatcctcacaactacttgtaattgatttatcccccactttactccagaaatgggttaagaagccttgtgagactacataaaaggccaactagcatgaattacaagcagaagcagaagaaaaaagtaacagggcacataaaccaagattaaagtgccaaatatgtccataaagtctgtgctctgcatgggccatagctttgcctcgaatacccactgcagccaggaggacctgagcaacagctgaggcaggcgccctgttcagttgagggtgaggaaactgaccagaaggttgagtgactcagccaaggtcacacaaccgggtgactggaaggtggccatgcgatttaaatctaggcctacccgaacagaagacccttccttaagtctgtaagaccctcccccgaactcccttctgaacaaaaagcatccatcagcctcc

SEQ ID NO: 54553 - DNA, 788 bp, Bovine  19866881404341
  misc_feature (1)..(1): n is a, c, g, or t
ngggttcttatgtgaaaccgtattttttggttttggcattgaggtttcctggtcctcatcagacgcattgtgtctttcttcagggacaccgtaatgtggtgactctgagatgaaaagcaggccagaacccctcctttggggctgctgaataatactgatctttaatttcatctgtctgcatgtctctgagcaagtcaacaccatgttctatccgatctggaaataagcaaaggtccagcctcctcatttgcttccttgagtggacacatttattggccttttgtgttgttacaacacaaccaaagtggaaaatgttacatgcggtataatgtttattgattttccctgagctgaaagcaaggttttggacgtagccttggaaacagctatgattttggcatggagggtgccagccagcttcctggaatcattactgccagacttggaaccagccagtacagtggcagttctgattattggaagccagcagcagtcctgaaggcagaggtttgcctggttccgtccgtggatagagcaatgcctgctctcttcctctagagctgctgcaacatcatgctgctggtcttaagatggtgatgcctttggacttgagacacagaatcaccagccggcgcaccacctccccatgctctgccaggccagctgagggccagagtctatattaagagcgacttctctctcctcatcaccgctgagctcagctacaaagcttcctcgaggtcttgggcagcgcttctcagactggactgtgtgtgtgaatcacgtgg

SEQ ID NO: 54554 - DNA, 1070 bp, Bovine  19866881630983
  misc_feature (1)..(1): n is a, c, g, or t
ngctgagtggacacagacagaggccagctaactgctgagatcatgagattcggtcaccaaggcaagtggaagaggctgcgatattttagtgagtcccatctccatcttgaagaaagaggaggcatctggcccatgtgtccccgttgaggatggggacctttgcaaatccaacaccattcacctctgaacgactgttgtcttctcttgaaagccattgagtttcagctcctctaaagggccctgcatgatgcaattgttttatctcgagagtgctgccctcagtttccctgggaatgtgaatgaggtccctctacttcctgatctgaaggcaggctttcctgaggtcaagcccgggacgggctctctcatctctgtggggatcaccgtgcgtctgtcagtaactcttctcctctggggtctccaggctcctactgcctgggtacgtcggcgcttgcaggagatgggagaacaagacagtgacaaaacatagaaatagtttcattccttgtttcctggaccaggcttaccagacgcttctaggaaaggaagaaggaaaatagggctagttcttggtgcctgtgacagaggctactaagcctggacattgagactgactgagtgagcactgctcccagctggctcttggatattttacttcttaccttgtgtctactgaacacctactatgtgcagcacattgagctgtggcttcaggaaggggcagagttggttatcagttgctgaaccaataacatttcccaatctcttccttcctttctggtccagtaggccacccccaaggcccaaccttgattaaggaccttgcaaggaaagtcacacacacaaaaggagtcttccagggaaagattttctctgtggaaaaaagagaaatggggaaagaggttgtcctcctattttgtgatgtgactgcctgaggctgtgtggttggccgccatcttgctactttgagggggaaaggcagacactaaggatggaagagggggaaagtggaaggcagtaagtccttgatgacttcatcacactgaattaaccgattacctggggatatt

SEQ ID NO: 54555 - DNA, 715 bp, Bovine  19866881798351
  misc_feature (1)..(1): n is a, c, g, or t
nagccctgatcctagaggccggccgctccgggggtgcccagccttcctcacctctcagctctctccacgagggtcctgggagctgagaggagctcaaggatcacaggctgacctgattttggtcctagctccagggcggcatctggatcccctaaggtctgctggctgcctccttcctcaggaatctcaggcttcctctggccccctgacctcagcacacccaccaccctgggccatcagagagctcagagcagctagtcagaggtgaggctgccggccgcctccccggctcctttaccacatcagggaacaattgtgcttgggccctggaatagcccaatatccagtttccaggaaggtggactgcattatttgaacctgaaacacaccaggggtaataagatcactctgagaaagctgagaagcctataatttattgagaagatcttggcggacagaaaccaccagcctccactgtgaccctggggagggggtggtgctgggatgaaagagtcatctcttcactgcaaagtgattccctctcactcgggaagcaggaacctgggggccctggagcacggacggatggttgccagacttcacgacggggcccagactgacacctccccctgggccgttgccaagacacagtggctgttgctgagggcctggggcttcagagagctgctgccaggttctgaggacagcctgtcat

SEQ ID NO: 54556 - DNA, 1908 bp, Bovine  19866882064660
  misc_feature (1)..(1): n is a, c, g, or t
nctgtttcttgtctcctttgagtttcctcctcccgagcatgtgcctggggaggtagcagctacaccagcggacaaacatttctttgcagagggctctcataattgaggacttcttctcagacctctcctcttcaaggtagaaaggatctttctcttttctcctcaccttcccccttgagcagctctgcgaataattaatgattgcattggtaaatttcagatagacccataccaagcaaataaaaaggatttgggttctcgcaggcagttggcctgttcaagtgagagtcttccagagcacattccagaccagcttgaggccactgtggctcttctaaacgaccttgggaccatgatgctgagagctgaggtccatcaactgccgcttgtttgagaaccagctcgctgagcaggcagctttcccaggatgcccctactctatgattggctggagcaaagcaggagacaaaagcaccgcttaaagcacatgttagtgtaacccgtgaaccgctgcccctgtaaggacagcccgccttgggatggctttcctcactttgagaaggaccagtaaagcccctggcaggatggtctagttggacctgcagccctggggccccggtggtacctgagagctttgccccacagcccttagagcaacctcatctggcctctcagtgcttccggagggcaaggtccctccatctagagggagatgagggtacagatgacacatgagcatgtgatgaccagctcccacagtagatagcaccatgtattaccagccagtccaagcaggtggttctcctgcaggaggcgggcaaggcaggccccagtgcaatggccgttgtttcctgtggctgcttccttcctgtcttctctcatcccttggccatggggctgtgcttttataaacaaggaaactaaagctgagaatcccccggcagtccagtggttaggacttggtgctttcactgctgcgggcccaggttcgattcctagttagggaactaagatccctcaagttgtgtagctccccaccccccagaaaaaagttattaaaaaagaaaagaaactaaagcccatagagtttaagtgacttacacaagtcacctggcaaataaaccaggattagaaccagcatcctgactcctggttcagggctctttccaccatcccggtggtgtgcaacccaggctgcaagtcagcatcacctggggaacttttagaaataacagtgtctggaatgttctccaagatattctattttggtggttctgggcaatgggagctcaaacatggttaaaagctcccagggtgatttcagctaccactgccatctgcccttctttgtctcaatcacctacattgtctgcttgtggctgaaggtcacagacagcacgagggtgctgtccccacacccacatgctgtgtccccatactgaacctttctctgccccagctccttgcagagggggggaatagatgaattcactaagcaaacattatttttaagtacttgctaaagtatttgactcgcatagatctgaccaggattgctatgagattaataatttgatgttaagaaggttctttgagtttcctgggtaaaaggtgcaatgtgagtttaagtagtattattacattatacatttttgattaaaaaattcaacttgacttatgagctaaagctggcagtaaagatgacagataactcctttattcagtgaaactgtagggtgcaggcatttttcaaaagcaagatagtcatacttcttttttacagttactcctatattaaggtaagttgtctcccagctccagaagcttcccccaaacagatggatgctttcaaaatgttttatttaggatccttttcttctcacgtacattttctatcatccaaaattt

SEQ ID NO: 54557 - DNA, 1485 bp, Bovine  19866880462655
  misc_feature (1)..(1): n is a, c, g, or t
natcatggcatccagtcccatcacttcatgggaatagatggagaaacagtggaaccagtgtcagactttattttggggggctccaaaatcactgcagatggtgactgcagccatgaaattaaaagacgcttactccttggaaggaaagttatgaccaaccctagatagcatattcaaaaacagagacattactttgccaacaaagtccatctagtcaaggctatggtttttcctgtggtcatgtatggatgtgagagttggattgtgaagaaggctgagtgtcaaagaaacgatgcttttgaactgtggtgttggagaagactcttgagagtcccttggactgcaaggagatccaaccagtccattttgaagaagatcagccctgggatttcttcggagggaatgatgctgaagctgaaactccagtactttggccacctcatgcgaaaagttgactcattggaaaagactctgatgctgggagggattgtgggcaggtggagaaggggacgacagaggatgagatggctgagtggcatcactgacttgatggacgtgagtctgagtgaactccgggagttggtgatggacagaggcctggcttgctgcgattcatagggtcgcaaagagtcggatacgactgagtgactgaactgaactgaactgagataagcattcagaagtcaatgacattgttattattggtatttattggttatttattggttttttataattatttgagtgcatcaatcattcactcaagaccataatgaaaaagagattgtattacagttaccaaaaaactgaatagtttataaatttttttcattaattaaaacaatgtcttcttcataccagaaactttcccataagtgtaataggaaaaaaaaaaaaggcaacattattattgaagaatgtgatacaatcaaatacatttatataataataactgacactacccactgcaaaaacattatcaaaataaacaataacttatcctttagtgagaggacctgagggcatcagttgtcacctagattctatcttaacttaacctaaaattgggtgcatatctgtgttagctaattggatttactcagagaaaaagctaaccttctcatgtcagtgtaataggaggtagttttaccaattgaggcaaggaacccacccttagttggaatccttcactcccacaggacccaggagatgaggtgcagtctcccttgatgtttacatttcaaagagatggctcccaggttcttgataaagatagtcccagtttaaaaaggttgacaaagtgcctatctagtcttcaaaaggatgtatatgcatttcaaagaaagggaaaaagtacttataatcacaacctttgctaagataagtgctctgagaaaaaaaagagagggagaaatcccttcctttattttaataagggaggactaagcctcttccttaattttaatttggatttgtccttacatt

SEQ ID NO: 54558 - DNA, 948 bp, Bovine  19866880827636
  misc_feature (1)..(1): n is a, c, g, or t
nattttcccatccttgctttcatgagattttataagataacttgaggtactgtgggatacagttataattcccatgcactggtgaaaaatcaaacaaataaacaaaaaaagagtctctaaattcagcatagacaagaaagaagtgtttaaaccatccccaccaggtgagaaaaaggcatgttttggctagtcagagagaaatagttacagcattaccattctaagtgacctagaacaatgggcatttgggcattaaaatgagttatacatgtcttcttctttaagttacatgttaggttttctttatgttatcatttttcaacaacactttgataattattatagttaatactctcctcactgaaatggccactgcccgtgctgcacttccaagtgggagagccctgcactggcagatcatttcactcacagcaaacagcatggggacacctctccaccactgcactggagtccaaggccccatttaaatgcttttctttttttttttaaagaggctttattctccctgttgtaaataagagtcttctcattcttctcttttattagaatatttactttagaaaacttgaagttctttcactttctctttaaaaagtaaaactaaataagcctcttgccagctttataacttagggatgcttttcttaagggtctgggagatatctctttgaaaagtaaacatcaattgaaatagtactcctattttgcagtttttgtggaacagtaagagcctaacttcagtgggtacctggctctaagttgaaaaaatacctcttgtccaaaagatatgagaaatttgcttttcctttgtataaaccaattaaataacatgggatggtcactccaattaccaggtaaatatacgctaagcatgtgtgtaataaaatggtgttattgtgttctcttatttgaggactgctgctgcta

SEQ ID NO: 54559 - DNA, 1535 bp, Bovine  19866881037610
  misc_feature (1)..(1): n is a, c, g, or t
ntccatgtggtcagggccacagttaaggtgatatagcctggaaagagtatccagcaatgggcagcagtgattaagactagagtggcagatgatcatttggttcatgttgctgatctgacttccttttcttaagaatcacagccagtgaaccttaaaactgcaaaataattgtagaattatttatgtgtcgattgtgttggaatctcatgctctctttgctcctactgcttttacttaggaatttacttgtctttccaagatattctttttttttttcctcttctttaaagtcctggtgtcactaatatatattttctttcataaattaagcaaaaccaaattaaatatttctggaaaaaatctaaagtgctttatgtagatagaacctcagatgaaacagttgtgaacctaaagcacataaattcttctatttgcccaattgaaaacaatggattccagaacatgtgatagaatggaatgatagataatgcagctgggagtaaggtcggctaatgtagccttacactaaccagctctctgaccttgaacaaatcactaaaattaataaaaatatagtacagcacattgtgcatgataggctctcatgaatatttaatattcagtggtgagaacttaacttctctgatcccagatgcccttctaaattaggcagcttatagtacatggatagaaaagtgtgataactgcatttgacctacttgccttggaaaatatgcctgcttgctctcagtggtgttaactaatgttctggatgaacaactacctggcttaattcaatattatttaatgttttaaagttttgaaaatatttttatctctctcatagctaggtattccttgcagtgagaatccttatttgcttgaagaagaagcacaagggcagagattattggattctccaaagtgacagtcaatcctcacaccatgagggctagtatttagagatttcatgtctggaactgcattctgtcttgcaccattactaacacaatttgtgcctgcttccttgcacaacttagagggtgatattatttgatgaaaaataaagacaaaaaatgttgccaagcaggattagcctataggtctggaggccatggacacctggaagttgaaattcaggtttgccacagtgcccctcacctcactgttgcttggctgcacttcttgtcacttaccataatgcttactgacccactgagcagtgaatgggttggggatagaaagaaattggcttgatccccagaagtatcatacatggtgtggtatgacccaattatatcacaagtagtaagtctcacagatggaaataacctggagcctggccaggataggggaggaaccacatggttggtaaatactgggatgttctcactgcagcaagaaatagcctcctagctgtgtaccatcttgggagctggcattattgccaaagctaagaataggcctgcttgcatacataaggaggtgactctctaaggtctattttaaaatttcccactaaatatatggcatcc

SEQ ID NO: 54560 - DNA, 1846 bp, Bovine  19866881078740
  misc_feature (1)..(1): n is a, c, g, or t
ntttccttgtttatttgaggtttttcttgtttcctgaagtcagctataatcttccctcttagaactaactgcctttactgtgtcccatcaatttgggattgttgtgtttgcattttcatttgtctcaaagtagtttttaatttcctcttggatttcttcattgactcaaaggttgttttgtaacatgttgtttagactccatgtgtttgtattttttccagtttttttcttgaagttgatttctagtttcataccactgtggtcagaaaagatgtttcacatgatttcagtcttcttaaatttgctgagacttgttttgtggcctaacatgtgattccaaaagatatatgcaccctatgttcattgaagcattatttataatagctaaagtatggaagcaaactagaggtctactgacaggtgaatgaataaagaagaatgaagaaagaagatgtgatatatatatatatatatataatggaatgttactcagccataaaaagaatgaaatcttaccacttgtgacaacatggatggacctagagagttgcaatagtcgaaataagtcagagagagaaagacaagtgccatataatctcacttatatgtgaagttaaagaaaacaaaacaaacaatacagaaacagatgtagataaagaaataccaaggtctaccttgaattaagttttgtgcatgatatatggtaagagaaaagattcatttattcacatgtgtgtatctaattgattcagcaccacttattggaaaggtcatgctttatccacatttccttctccaatgcatgaaagtgaaaagtgaaagtgaagtcgctcagtcgtgtctgactcttcgtgaccccatggtactgcagcccaccaggctagaggcaaatcctctaggggtatatcaggaagctctttttagcagcagttgagaaccaagttcttgaggctggtgggtgggacaactaactgcctggagcagcaaaggtgacaaggaacagggctagcggtgtggcagggaggtgagagagggacctggaaagaaaacctgtaggacttgaaggataaaattcatctcttaaaaatatttttaaagagctggtttgtaagatgctacattgcctaacaagttcttgggaaatctatatattagtgtattgaatcttgtcagctcctctgaagcatgattggcccattaagcctcacaagatcaccccagtggaagtccatcacgatgtttgggcacttagagagtacaacggcccagcttgccttaactgtgatttctattcatactgggccttaaaggattatttggaggtgttggtataacttacatttttatagaaatatgagcaaacagaatttaagaaactccacatgtaccttacaccttgttgcgaatccccagaacttcataaaactcctcactaactaaacattagattttttatgttatcaagagagaggaataagttgctatgaataggttaatcgtggtggaattttgtagtgctctacatttgccacaaggtctgactttgtattctagttttgtcagttgcagtccttaaatattttatttagtaagaactaaataagacaaggtctgcctcagctttcaccctcgattgtggtggtggtggtggtgggtggtttaggtgctaagtcgtgtctgactcttgtgaccccatggactgtagcctgccagggtcctctgttcatgggattcttccggaaagaatactggagtaggttgccatttccttctccacaccctccatgttggggctacttaatgcccacagatttcaggcttgaccttcctctattgtctgaaaaaa

SEQ ID NO: 54561 - DNA, 1414 bp, Bovine  19866881570606
  misc_feature (1)..(1): n is a, c, g, or t
naaaagaccctgatgcttggagggattggggacagggggagaaggggatgacggaggatgagatggctggatggcatcaccaactcgatggacatgagtttgagtgaactctgggagttggtgatggacagggaggcctggcatgctgtgattcatggggttgcaaagatttgggcacgactgaatgactgatctgaactggagacctctctgaaatatttcctaaggttgctggtccacagtagttcctcttcccccactgtttctcaaccacctatttcacacaggttatatattcctttgtagctttctattatttattttattaaaatttttttcctcaactaagctcacaccttttcattcaatgaaaactcctttcttatacctcttcatatccttagcacctaatgtacacatgataagagcttaagagctatctgtcttttgagttgaagttatgatgatgatgataatgatgaaaaaggtactgtcaaatgtgtttctaattaatttagtctttgcactctgctctctctgattattagccttgatcagatatcttaaaggacttttaaattctgtcaataatatctgtgtcccctcatagaaaattacattcagatctagagcttctcagatatagaatgatgttaacaaattgctgcaaattcaggggatagttgctggattgaattagggaatgcaggacttgatttatgaggaaacttttaaagaactaaatatgcatagctggtttccaaagagatttagaaccgggctgggggatctgacaactatatatcagtagctcgtggctgaaaataacattgcaagaagagcagcttaaattagggaaaacagcctttggagacagtcaccagggatgttaattactagtgaattaaacataccaatacatgaatccattgctttctcagtgctttgtatgcacagaaatcacctaggaaaagtgttacaatgcagattctgatacactgggtctgaagcaagccaggattctacatttctagcaagtttccaagtggtccagagactaaacatacttagccaacccccttctctttatgaattgtgcaattctgcttaattacaaagagtaataagcttcaaatatgggatatttaaatgaaataaagtatcctggagcctacagtgaggaaataggaaaaagctaatcaagcagggcatgaagatgagttctttcctccaaatgttcatctgccttttttggcatccatatagggcctgcacactgtgattagccacactgtgattagcctcattggttctctcatcttcttattcatcttttcactttgtaccagatgacattacaggaagaaagcagagatacctacaaatgatgatgggaggctgttgtgaagctcct

SEQ ID NO: 54562 - DNA, 969 bp, Bovine  19866880422159
  misc_feature (1)..(1): n is a, c, g, or t
nctttctggtgacaggaaatcttgggatggaatctgtgtgtattagtccgggaggccagttcggcagtgggtatgttatcccaatggctaccaggcacatggtccaaagctcactgtcagtgcgagatggagtttccttctttgtcaagatggagtcagctcggcctgttcctttcctccctcactagctttgaaggcacatgatgctgccatgtgttctcttaattttctaagaaactacaaggaaatttagaatacacagctcggaatctcaccggccaccccccctcccacccccccaccccgtccattacttctaatcaggctcctgcctattactccctctttgtccatttgcaaagaatgtttttcaattaagcggctttactctgtgaatgaaaagagaagcccttagtttggctgcaattgcgttacttcccagcttttctatttctctgaaaaacgatgggtccaatttctgattggttgtttgttgtccaattttcctttgagagcaacagcgagtcgaggctgtgtttaaacacaatgaagaaagtggaagattgacacagttttcccaatcgtttgagttaaaaggaaagcagtaattgagtggagagtaagcagtgtttcagcagacgtgacacaaatgggttagccttcttggtcaagctcatcctcctgatgattgtttttggtttttttgtttgtttgtttgtttgttttatggattctctctagtgggtttcgtagtcagagattttattgtgcatgacacgtgagtcagcttgatacccattcgctcatgcatagattctggtgaaatctctgccatgttttctctggagtaaaagagaatgtgtcttcatctggacagatccagctctaattccagctccactctttatgaaggatggcacaagggcaggtgtctgtccctcctcttcctgctccgtccaagagagagac

SEQ ID NO: 54563 - DNA, 1875 bp, Bovine  19866880748508
  misc_feature (1)..(1): n is a, c, g, or t
nctagaagtaggttatgctgagacagcacttccttttaacactccaaggtcattcccatatgccactttaatattcactaaaggtatctttctaccctgacagtctctgaggacagagaccgctggtgctggtcagccatgccctgctctactgcccgtggaaggtgaacactcccagcctgtgtcacaagtgtctgagccgagccatctagacaagcccacgcgtcaccaagcacttcccttggatgtggcgtgtcgtgcacatgactgccagcgtgctaagcattcaatcctttaaaacaggagggactgcattgttatccaggaaagaatgatggatgagtgaatgaatgaaaggatgaatacgtgaatgaaacaagagtctggattcacatcctcatcctgctagcttcgtgactgtcacttgactcctgtgaacattggtctgttctctgtatgcgtgcttgttgtagaaatctaaggaaatctttaaaaacaatgcttggcacaggtcctgggatgtgagaaagactccacataaggtagttactatggtgttaaaaggagcctaaccccacagggatatagtgtgactcaaatgagataatatgaagaatatctattattcagtgacaaatgctagtattagaattctagctctgagtagtgatgagcgtatggcaggaagaagatttattttcttggttaaggaggtacaatcttcaatgagtcagcctaagaacatcaagcaagaggatcgtgcagaaaacattcactgcacacatcacaagaagaaaccttgtaggggttttaatgggcttattatttgttccattccaaaaaaaatagataactcatttaaaaggatttggaaattgtatcaactcaggaagaagaaaataaaattactcacctaccagccagagacacactgttagcattgtaatatatttccttttatacttctattttcctctttacagatgttaacaacaaacttctgagaatttattttttaacccagcggtgaagatggaggatacaagatttagcattttatattttgttcacttttcttttttccatctttgcttaggtttgtgaatacaattgtgatggctggcaaaatatctcaaaagtatatgcctacttttctttttttagtcaattaatttattttaattagaggataattataatattgtgatggttttgctgtccatcagtgtgaatcggccataggtatacacgtgtcccctccatcctgaacccccttccctatgcccacttttcttaatccccactgttagatggtttccactttttattgcctcagtaaagattgaaggcaggaggggaaggggacaacagaggatgagatggttggaaggcatcaccgaagcgatggacctgagtctgagcacgctccgggagttggtaatggacagggaggcctggtgtgctgcagtccaaggggtcgcaaagagtcggacacaactgagcgactgaactgaactgaatgatgggtgaacagcttcacacataaaattttctttttaaactttagaaaaggctttgcgtctgatcagcattttacggtttgtgcaggtggctcgttttaccgcatcctctgggaaatagtttgtgagcatccgccacgcgccaggagctgttctcaggaccagggcattccacagacaacaagacggaggcagatcctcgggagactgcagacagcagcccaccgggcagcgcatgaacccatgtcgcaggcactcactgcaggtaccattttagctcggagattcagctggcgcaacctgcctgcggcagaatgatactaaaatggatcgttccggatgcaggtccagcgtg

SEQ ID NO: 54564 - DNA, 1233 bp, Bovine  19866880758674
  misc_feature (1)..(1): n is a, c, g, or t
ncctggccttcctggctccccgacggggcctgcccgacctggaagcccatcttttccaggaggccctgggggtccgggtctgccttgagagggcttcgtgtgtgcagagggcatctgggccaggaggtaggcgagtttggctgtggagtaagaaaaacagagagatgtttcatgaaggagggataaaggactgaagatgggccagcagcgcactgcaaagctcgaggcagtaagagctggggaatagcagcgagagagacacaccaagagcgcgctgcagggcgcgtgtccgtgtggacgctgctccggagccaggcagctgggctgtggtcccagtgccaccactgctggtggcatggccctgggcaagccacctgacctctcttagcctttgctgccttttctgcaaaacgggggcaatgaaataagtccaaccccactgggctggtggaagatggaaccaatgagacgaggcatcatgacagcccccggcacgagatccaagtggtgcgtggatgtcgctgttcccctcgaggcggcaatgacagcagcagcagaaactgttgcaactctcaggctggggaaactgaggccagtgggggagggtgagacttcagtggcttacacagagcaacttagggacttctcctaagtgtggaattcctcatctataaatgaagggctggacgcgatgtcattaatgattcttaggtgtgtgaaatgttaaagatcacaggctgattccaaacccagaggtccagccgctggcctccatgccttcctactgcacggggcatacacagcccaccccagggccaccaggggctcttcctgtgttttccagacgatcaggccatgcccttcacctggcaatggggagtgaccagcccagagaggcagtcctgatgccctcctgggtctcagtggtaaaaccaaagcagaatcaggtctctgacagcctggcgggggagcttccgagtagccccttccccaccctcccacatgaggaagcgggaggggcgtgcgccggagaccggggcacacagctgttcggctcacagccaggacactctcatcttgaacgtggagcagatgcttctgatgcttcctcctcccaagattgtttaaaagaaaggattcagctcagcagatgctccatctgaactcattcaaaacaggactcgtctctgcccaagggctggaaactcctcgtgtgcccgataaatctaacat

SEQ ID NO: 54565 - DNA, 1369 bp, Bovine  19866880762225
  misc_feature (1)..(1): n is a, c, g, or t
ntttttgtgcaaggtgtaagataagggtttggttttattcatttgcatgtgagtatccagttttcccaacaccatttatcaaagaggttatcctttcctcattgtgtattcacgacacccttgtcaaagattagtcgactgtatctgtgtgggtttatttttgccctttctatgtgtctgttttttaccatgaccatgctgttttaatgactatggctttgtgatgtaatttgaaaccagcaaatgtgatgcttccagcttcattcagcagtgagaggattttacaatgggaaatgacagacacagatgtgtattttggattctggctgcagtagagagagtgcatgtgaggggagcaagtcaggacgtgtagagatgtgattggaggtcatcgcaggaggtagtgatggtcctgaccatggttaaggtcacagagataaagaaaggagaataaacttcagaaatattaaggcagttgaacactgggaagtatggatgactcaatatacagtatctgaaagtgcagaattatcaaggatgactcctaattttctaatggattggccttgatgttgttcactggcctggggacacaggggaaggaagagattttcagggggaaatgatgacttctattttggataagtagatttttagatctctgtggaaacccatgtatgttttatgcaatttgagttatcagtcaagctcggaaaggagttcttgacttgaatctgagcttagaagatcatcagcacatagatgttaattgagagcatggggggagcagtgatcaccccagggagtatatagaatgaggaaataaaagtgttcttttagactcacaaggtcgataacaccgcctattcaacccattcaaaaaaagaagaaaaaatacaaaacacacattctagaatttcctcttcccttaagggctttttactctgtctccatactgccggctaggaagtcagccttgatgtttccagggctctttcccctcatccagtcttttctttatagaggtctccctgcaccaccctagtcaaatagcccctcagagcttgcttcatttttctccacatcactcatcactgtataactgttttaatattattacatatgtatttgcttgtttaattgattatctccattgaagatggtaagctccgtggtgcagggagtttgtcatgtttatagctgcaccaagttcctagaagagatttcctggcactcagtgagcatagagcccatattcattaaagtgcatgtagaggaattaataccaggaatctccagtaatagaataacactcttccaattaacacaaatacccacagtcctatttaagtgccgttccgagctcctg

SEQ ID NO: 54566 - DNA, 1208 bp, Bovine  19866880952068
  misc_feature (1)..(1): n is a, c, g, or t
natgtggcagaaaccccatggagtcagggaaagtggggaagccaggaaattgtctctgtaacaggctagactggataaacctggactcaatcagaaggaagcagccaccacaagtctaatagtggtcccaggcttccaacattctggaggaagcctgccatcttccctctgcaccgtgggctctctggcactccttgtccactgcgatgtgcagaagtgtgcagagcagcacgccagtctccagtccttacctaagaatccctcgtcccttcagcatctgcctttgcatttccattttccttcccagcttcctgtcccttgcaccctggggtgaacccagcctccactccacttgggctctgggcctgccatggtcataacacgccacttcccaactcactgtgggtttgagtgtgaactcagggacctgcagactccttcacaccttcagaggctttgtaattactcctgatttctgaactcccctcctgaagttagagacttccaactcataaagacgaatgaggcttaaaatgctagttcacctgggggagctgaaggaattgctttaggttcatactagatgtgaatgacagcggcagctattacccacctggagtaaaggacaacccgcccccttcgtcttccacagtacccataggacctgctggtggtgatggaagggggaggaggggccagcaggagagagagagggccaggaaggcggggaccagaaagtctgatgttagttaggacagctcagaagagtctgcctgtggttcccaagcgtggggcgtagaccaggctctttgtgtcctgtgtagacatgtcacctgttacagtcacattttgaaggctgctcgctgcagaagcatggaatatgcagtgtgcacttgtgtgtatgtatttatttatttttactttgacagggcccctcttcagtactgtctccaggggacgtaaatctcttggtgaaggtaaaaacaaaaatgtgcatgccttttgagagttgtgacggggaggctggcgatgtcaatgatatggtcttttttttttggtctgagcagagtataaacaactataacaacatttgttgagaacatgccgtgccagcagtgcgctaaaatccactgtccagcacagaagccactggccacatgtgtgaatttaaacttgtttaacttaataaaaaaaaaaaagattccggt

SEQ ID NO: 54567 - DNA, 1220 bp, Bovine  19866880996870
  misc_feature (1)..(1): n is a, c, g, or t
nctttcatagggtggctatgagaactgaagaaggatctccgaagcagtcggaacaagcttgggctcctactgactgtgtgtgagtgtgggtacaacgtgtgcttgggggcagggctcagcttcaacctcgggaagggaactcaccaccacggagcaagtcccctctcagcgagccgcccatgagtggctgctgtgctcctgtggcttgagcatgcttttgttttgtttcaaccccaaatgaaaatacatgtgtctcccggatgaagatgagtcatgtctcgatacagctcatacgtcgtcaagaggggacaagggtgaaggacagacacagttggtccatgggctctgagaacaaggggtttggtagctgcacctcagatgaacacatcatgctgctttgatggtcaaatcagagagaggcaggccctcactcggctgcctgctctgctgcactgtcccagcttcacagggatgagaaccacaatgcacctgatgtgggcaaagacaggctgcagcgctccattcaaggtcaaaccaaggacgaccataaaaactctattatacatcaggcagcatcttagatgctttacagacatcactctgtacgatgcctccaccaaccattgacaggaggtgctctgtgtcccgactaagaacatcaggactcggaaagccaatgtggccctgagcccacaccaagaaaggaccagacacaaggtctgagcccagtcgtgccaactctgagccggtttcctccactgcatcacaaacacgctgctaacacaatacgtgcattaggacagcagtgctggccgccacctccccggctgggctgagggtccctgaggcagcagctaggcctccagcccaccagggtgctgggggcttggccattagtgagaagtgaggctgcagtccccccgggggcctcccggtcccccaggggtctcccagtccctgcaggtgccctgggcctggatacactggactctccattttcagagcccaagacaggacccatggagaaaacacagcaggtgctgccctgcccatgaggaggagacagaagcccacactgggacatggcgtgcagctcgcacctgcgggatgccgtactggtcgatgacctgccagatataccagtcttctctccgggatggtttcctgagccggaaggtggtacaaaggcgtactcatcgggcaaaccttcgggaacacgt

SEQ ID NO: 54568 - DNA, 1256 bp, Bovine  19866881185309
  misc_feature (1)..(1): n is a, c, g, or t
naatgagctatatcggttatggtgcaaagtatagcacctcaggcgttcatgcagtgcagcaaagttatcaaagcaagccaaccccccccgaaagaaacgcttccccgccctcctccttcacctccttccacaggaaaacgcaagctgcaacgttcggtctagagagcactgctgttgaaaactactgagagtaatgcaaacacggtttgtttttcaggacagacatttttgccgagtacgtcatccagaccttgagtgcagcgctcatctcctcgcccctcgggtctctgccccccgagcctcacctgtcgctgagggtctgtgggtcagggatttgcccaccgctcaacctgaacctcagagcctggggtggggcctggcgtggagcgggtttaccgtgaagagatggatggaagacttagaaggaaaggcaggggcacgtggagagaggacaggagaaggaaaggggggaaggggtggcggaagcaaagcacaagcagaggagtcggtttaaacgcagaaaggctgctgtagctctggctgggcggtgataggggacagtgttcagacccgcaggaagagcaccacatcgtcacagggaccatttttacaaggcgtttggagaagtgatccagcagggatggataggctctcacaggggagagtcatatggcagaagcagagggcgggcaggaggaaagaacacagcattgtgcattggcagagaatgactaccatttcagtgagcgagaagcactaaaggtaagtgagcacaaaattttaaaatatatattaaagaaaaaaaaaaggaaaaaggtaggctcctcagatgattgggaaaggggagtgtgacaatgaaccaaggtggaaactatgaaatcctgattaaaaaaaaaaaaaaatcccaccgaagacaatgaagagacaagaaaagatttccaaaatggtggagtgaaaattacttaggaaaacatagtgctgcttcttcagggtgagcagtttattataaactgaattcttacctggtcacctttctgtccaacctcaccgtctgcaccatgttctcctttatttcccttaggagaaaaaaaaaagaaaattacagaaaatcttgccagagctcctttgcaaaagaaaactttcgtgttgcattcattcactcattcttcatcagtttcttatcaggtttgtgctgggggcccaagtagctacatgaccttgagcaggtcatttaaagcccaagttgtggggcattt

SEQ ID NO: 54569 - DNA, 1274 bp, Bovine  19866881259238
  misc_feature (1)..(1): n is a, c, g, or t
ncacgaattaggagtttacccttgactgttctttctttttctctgtgcacaagagcccttttgtttggagagcttctgccaattctccctaacacacacacacacacacacacacacacgcgccagggacacacacatagtaagcactcaataactgtttataagcctcttgactggcctgtgaacaatataaatatctgtgaaagacagagctcatccaggaaaaccaagcctagcttcccagagctctactttctgtgaagatccacctaagccaggcggtgctcaaaagtgaggaggtgagttcactttcccctaaaatgtgtcacccagaggtgacacttcttgtccatcagccacattcatcacccagctcctgagaaaggaaatgcaattggtcatgacttctgaagggaaaaacactgcgttcactagaaagactggcctccttagactttccaggtcccagcgctgtgtcagctgggttaaaaggccatttttctttctttttgctgaaggctgggaaaatagatgtgaagatgtctctgggaccaacatttggctcagagcctgggctggtaaacagatgggtcccttgcaagtgtgtggctatcactcagggaagaagggtggtgtgagtaccatagggctcccgtgtgctcgctcctgattttatagttatttctcttctgtctggagctggaggtgggaattcagaggaagcagccaaggctctgaaagtgtccgtgatgtgctcgggttgcagagctggtaaatgagaatttccttatctttaatgggaattcgatcatattatttaatagcttttctcaagaagtggactgtagtctattagtccaggtgataacctacaaaataggattatcacaatcaaggaaggtagagagataccctgtgctagatttgcttggattgtcacagaggaaattgtcttattaaaggctctgagatcagtcctgggtgttctttggaaggaatgatgctaaagctgaaactccagtactttggccacctcatgcgaagagttgacttattggaaaagaccctgatgctgggagtgtttaggggcaggaggagaaggggacgacagaggatgagatggttggatggcatcactgacttgatggacatgagtctgaatgaactccgggagatggtgatgaacagggaggcctggcgtgttgcgattcatggggttgcaaagagttgggtacgactgagcgactgaactaactagaagtcctgcagtctga

SEQ ID NO: 54570 - DNA, 902 bp, Bovine  19866881310644
  misc_feature (1)..(1): n is a, c, g, or t
ncagccagagtttaagccattgcattggcccaagtttctcctcaaaggtcaattctcctggccgagaaatggggctgagctagagggaaagtggattactggaacacagccatgtttcactgtcccaatttttccctcatccatcaaatggaaaataactgccttccacgcctcccttgtatgatggtttttgagggatttattgtgttagttcccttggcaggaatgacaaaatggtggtcagattctagtgtcttcccctagaagggaccaggaagtttatctacctgaaccacctcattaaacagaggaagaaactgaagtcaaacatattataaaattgtctcaatattatcaagcaaatagggcagaaccagggcaagtgctaaggtctgactctgcacgctttcttcctctgtcactcaacatgtacaaacaaaaaggaaatgatccttttgttcagaattaagttctgaaattaagttcactggagaaggctcactgggatgctgttgtaagagcatcactgaacctggaattagcaagggtgagaacaactcattgctgtggacctaatgtgtgcccagtgctctactacaggtcctatacagagcctgtattccccacaagactgtagtctctacaaatacaagaccttcatccaccctttctgacctttgtattattagccgtcacccagaaagcttggcatgaagtagacattcaatgaacatgttgagtcaatgaatgatctcacttaaatctaagaagccagggacttccctggtggtccagtggctaatacttcaccttccagttcaggggatatggattctatctctggtatgggagctaagatgctacatgcctcacagtcaaaagataaaacataaacagaagcg

SEQ ID NO: 54571 - DNA, 1535 bp, Bovine  19866881627968
  misc_feature (1)..(1): n is a, c, g, or t
ntttatttctctgcctttagttcctttgtaaaatggagaaaaagagaaagatagcactcatttaatttgagtaaggtataaatacaaagagttaacctgctccaggtacatattaagagactcctagagggctttccgttatcgcaggtctgatgacaacagtcttcttctgtgcctgtctggtggccaacccaagccaggagcactgcagggagtgactaaacacgggatacaagcaagcaagctcacaggactttatttatgcctttcagccgtctttattcagtcgtttcatacatttattgggtgcctacattggcccaggtgcgggcaaagtttcaggaatacagaagcggccacatcatgattcattcatgaaccgggagctttttatggcagcagttgcctctccaatgtcccttctcccttcaggccaacgccttttcccatgatctatactattgctatcttgatcagtttttctttttgctgatcgtcggatgtcaccaaatccagtaacacaggcacacacagtgtaaagaaatttcctacatgaaattatacattttgaaacaaccagattttcatgaaactaaatgatagcaacccaatcaattccctacaaggttgttcacaaatgtggccacccgcagtgcacaccaatggcaaggccagaagaggaaggcattccaaataattacttactggtggtccagggtcccctggggggcccatgaaaccgggaactccgggatgaccctaggaaaacacaagacaattattttaaatgattccccaaaggctttttactttgtgcaactatagatttcagataactagccagaagccatctcctaactcaggtaacaattctggatatacatgtgtgtttgtgtgtgtatacataaatctacatatttatatttatatcaaaaggtggccgagggagtgtctagcaatctaccctggaactggatttgcttcaaaataatatgaggaagaagtatacagatgaaaacaagagtggctatagagctggaagatgctgtgaccaggtgagaagtccaaggggtgctttttattatactctcttattttcttaatgaggtttccccaatggctcagtgagaaaagaatccacctgaaaaagaatctgcctgcaatacaggagacacaggagatgcgggtttaatccctgggccagggaagatcccctggaggaagcaatggcaatccactccaaaattctcacctgaaaaaatcccaaggacagaggaacctggcaggctacttgtagtctacagggtcacaaaaagtcagagatgactgagagactaagcacgtttttaaaaaatatgtatttatttccatggctgctctgtgtctcagttatggcacgtgggaccctcagctgcggtgtgtggggtccagctccccaaccagggatggaacccaggtccccacatcgggagcgcagagtcccagccagttggccaccggggaagtctctacactcttattttgatgtgtttgaa

SEQ ID NO: 54572 - DNA, 3335 bp, Bovine  19866880392182
  misc_feature (1)..(1): n is a, c, g, or t
nagctatgaagaaggacaggctgatgatcaatgaatgaaatgtcgaagtcaccctcggaggatgaaaaagatcatttagaccctgaaagggaaagtgaaacctctttgtggaaggcaccagatgctgatgacaatgtgaaagatgagggtgatggatgctcggagagtgaattggaagatgataaacaaggcaagttgtttagcttatcatgcggcataggctgtttagcaagtgtcgctactttcccttatatttaatgagataagcctcctttaagactgtttagaacgtggtacccttaccagaaggtgctggtcaccccatcttccatagatacccattatggaatcctttctctttaatttgctgggattttccagcaaggcgtcaggtaaaacttgtagtgacacatctcctgtttacttagaaagttacctcattaaaaaattttttttcagtgttctcttatgtgcacacacatatagaccatctcttttggctttggaaaatgaaaagtggttcctattcaattaaaggaaagttgaaaatttctcccttatttatgctcatttttttttaatttactttgaacacaagatgctggtatatcagtttatggaaagattgataaaatttcccctgtacaatattcaagcctaaaatgattctgaatttcatagggaaaatacataatatttcaggtagataaaaaaaccctcattatatgtggcatatcttgaatttttaagatttttaaaaacatgtcaagttactaagataatatccaaagaaggaatccatttctggctttgtcccttgaaaatgtttggccaaggctatgtaggtcttagtaaataaatgatatatcttccctggtacattctgggcattttatcagtgataataatagcctcttatatttaagtgtgtgtatgtctatgcagtttgctttaaactagagaaatgaggtcacattatgatgagtttttgaattgctgtccattttctccatttttcacttctcaaattttttcctgtataaaaatatcaaaagtttgaattcaagggatatatttgaattatacaaaataagagtaaattaagtaatgaagtaatcacaagaacaaatagtttgtcactttgtcctcttcaagaaagaatttaagaaaacctatcctaaaatttcatgcagacatacacagggcaataaaataaagaacagaaattatttagagtaagagagaagataatttttgctaggagctgcataggggatcatgactacccttgagttaaaataatcctgaacttcctgatagtcaaagcaaagagtgaagcgatgtgaaaagcacaatgtgacaacacattgtaaaaaacacaatgtgaaaaactagaatgactttaactttcaatacatttgaaaagatttgctgccatttcaattacagttgaaagagctactgtatattaatagtcaggcactgaaaatttttagtaaagtcttaaattaagccttttaaatttctcagtacttaacattttatatttctaggcatgcctaatatatgtttcttttctcatcttgaatgtaaatgttgaatttaattcatattcctatatgatatagaaaaagttaaaagaattgtatggaaaagtgatgtcacctgaatcctattttaaagaaactatacttgaaccgggaaaacagtttgaaaatgtgtttgtgtataaatataatctagtcaaaacaaagaggaactcaattttttatctcttcaatgatggtagggaattgtcatctattgattttgtcaagagtcagtacattatttcaatatatggtcatctgaggattatttttgtgctgtgttatcaacttccttcctgggatcaaatgaatttcttccaagatcgaataattttttaatgttcaagcagacaaagatatatgcagtacttgaattttacttggagggaaagctttaatcatttagacctgtgattattgaatagctgacaatgatggtaagctttaacactgaatactgcttgcagttaaataactggaatcccatgtttaggaaagaatcctataggtattgtttataagactcgattttgtgccgagctcatattaactatttcacatgaattatctgatttacctcaaacaacttttaaaaaagcaggtactttttgcctccattttacaagtaaagaaacttggaaataatgagattaagtaactcacacagctggaaagtggtggagccaagacgcaaaattcagagcctggattttggagaaaaacaatgtaacgtttctccaaatcagtcaacatctacttgtctaaaattaatgcaaatgcctctaataaaaggattttgtttccttaagaacgtatattttaaagaggcatttatcttgagctcttcatcttattctattttttaacttctgttttgtgattttgttttgcttttaaacagaagaaaataaaatggaaaaattttaattttacctaaatttacctttctcttccattgatccactccctggcctgttgctcatttccagttcattgccctcctcttccatgagactctcctacttccacagccttcactgagctcttgattttatgaaactttatcatgccataattcattttccacttacagttccatgtgtgttaaattttgcctttaaaattaatcacccaaattaataacacacagatttattatactacaaaagctaagacagtgttgtttttgttatttctcacagagggcaatttcctaaaggatattttgtgaatattaagaattacttgattaacaccaagagtcccaaaatacttttggcagtgccatgctatctagttaccatttacactatgtgattattattagaattttattcaaaacattgtgtagagttagctgcataaggtaggtatagaatacataatattttaaatagttatgtaacgaaaactatcagaacatgtagaatctagtccacaatgttgggacatttaaaagccccaagttaaactggttaactatttttctttcagtaatgacattttttaacaatcctttttaagagctcctttgcattcctgagatttacatttaatctttgccattattctgaagtaaaaatctcattgcttattaccatttctttcttccacctacaggctcttttattttccatcccattattttgataacctgacccctgtgtttattcaaaaatattctttttagcatgcagagtatcagaattagagatttcatccagcaaacaagaaatgtgtattaaa

SEQ ID NO: 54573 - DNA, 2204 bp, Bovine  19866880458269
  misc_feature (1)..(1): n is a, c, g, or t
ngtgagggctcctcttggcaccttgtcgatttcctaagcagctaacctttcataatattaatgccgccttgtggttatctatttctcagttcatcattttcaacctttgtttgctgggattcatttatgaggttgtgttcttaagatcctggagtttaatagagaccaacctgattcagggcccacaaccagaatttctagctaacaaatgaggaacaaaataggtggatatttatttttctattgattgaatttccaatagctctaccttgaatttgatctagaaaaaagagatgcagaaaatcataaatgttcttgccttgtttaatattttctatctcaaaatcctccttgtcagccttgtgagaaagtaacttttccagtaatattagtcttcttttgagcttgcagcatggacagttctggcaatctgtattgctgtgagttaccaccctattagaaggctataggatggagtaattgagatttcaggccacaaaaccatcctgtgcaggttcaagtaccaactttgttacatcttacccgtgtccttctgcaatttgtttaaataacagttttccagtttgcaggatggcaataataatacctatcttactggttttaatgagaaaacacattagatattattgtcattatttttcttatttattttttctgaaggaatattttcactacttaatattcttgaatgcccaaatttctttacttaattaaatgtttctaaagaccaggctcccttttttattatagtgccacaaattttgttaatgatatctcagatgccttttttcttcttgtcataaagatgtaagagctaactggattgtttgactgtagatctctttatgtatggagaagaaaatggcaacccaatccagtattcttgcctgggaaatccatggacagaggagcttagcaggctacagtacatggagtcacaaaggagttggacatgacttagctactaaataacaactatttatatatataaagacggggccagggaagtctcatcccatattacttccttcattgagacctctctatcccttcatggttcaaacttgcagcagggattcagtctgtcacatgggttgatgcagatgtagaacagaatttggataaaaacatagctaagggttgacagggttatttgattatccgacacccttctcagtgatttttcttcctagggctcattcacacaacttaaacatatgaaaaatgtgtatatcattatcataatttatattgtaactgactgttgtaaactatattttctaaaaaaatgggcagttaggataactgaatatgtgacctttagtctgtggaacatgttattgggaatgggtaattttcacttttcaagaagaacatttgctattttaattaaacataataaaataaaatgatattaaataatgttaaaaaaaaaaaacatacagtttaaacacctgccattcagtcattcaacaatcactgcttgggagcacaatgtcagagacggggaaggcacatcccagagttcatgcaggtaaaaaggtcaagtaggaaaaaccctgattttgcagaggatgtatggggtggggcgtctaggtaggtaggcatcttcccttccttgcacccagtgagctcacccagccacccagctaagacactgtccttctcactctaaggagaaggggagaatgttttcaaagttaacattgagaaggttgcctctgctcttccttcagtagtaaaagaaaaggaaaaaattcatcctatcacaccctcttgattcccagaagaccatcatttttctcctttctatttctgttctcatcgtgtcacccttgttatgtcatttgacttccttctgcctcaggttcctcatttgcaaatgaagataatgatgtctgtgtcgacctgttcacagagatatctttgcagttaataggggtgtcaggacaaaggtacatggagcacttcagagaaatactgtacaagaaaaatcagtataacatttttattaatcatatggtactgggttgccagaacgtctcaaaggaagactcattttgcatccaactgctggatctctactatttgtagagtagtctgaattatcttcctcccaccgaaggtgaaagctgctgtggttaataaatggtatgggagacaacatactccttttctgaaag

SEQ ID NO: 54574 - DNA, 2712 bp, Bovine  19866880543164
  misc_feature (1)..(1): n is a, c, g, or t
nagagaagagaaacaaatgttatttcagaaccaagaaaattcagaacaaaatacaatcctatctgctatatggaattgaacatgaaacttgatgttaacaaattaaaaatcagttaaaagaggctgtgcctttagagttccatttctggtgatagcacctcaaacttcattctgataggatctatgctgtttagtgtctccgttttggccaactctttgcaaccctatggactatagccagccagactcagactcctctgtccataggatgtcccaggcaagattatttggatggattgccatttccttctccagggaatcttcctgacccagaggttgaatcagtgtctactgcttggcaggcagattctttaccactgagccaccagggaagcctgagaggagtgctacaaagcatttaaaaaaatctatttgaagacataaaatggttaaaaatcagtgtagaattaaggggataagataaggaggagaaggaaacacagagttgtgacactagaattgaagggtcaatttcctgctttgagaatttccctgttgtattcccaaataaatactcaacagaagtacatgcatatgaccatcaaaagccatgtaaagaatgttcagcacagcatattcttatgctatggaaatagcccagatacccatcaacacaaaaatggaaaaataagtatatttgtagaatagaatactaatgttttaaatggatgaattcataaaaagactggaacaaaggaagccagatattttcagagtgtctataatctaatatcccatgctaagaaccaggcaagattaatttatggtgttacatatcgggagcagggaaggagtgacacttagccattcaagcttggatctgatactccattgtttaagacttcagagtatatcttagaatgggggaaatgagttttccatatggttcacagcagaaacaagtttttcagtaggtttttggagccaaattctgagctaacaattccttactattccttcctttgtcacaattctctgtactaaaacttcctcagggacttctaaaggaagagcagtataatcaccattaaggcaggctgtaggcttactggattgcccactgaaatttcatcttaatactgctccattcctttacttccaagagtcacacaaattactgtcaagagttgatataaaaagtctggtcacttgatccagtgctattttgatttatatacatttggataactatgatggaataaaagttagttattaaaatacaaagaaataaactaaaaatgtgaaggatgcagctactcagattattccattgtgagtttatcatccagggttcaatatataccaatataaattttgtatcatctttatgaatatcatttaggatggcaataatagggatagatccaaaattgcattctttcctcttaaataatgagctcccctcaaaatgcaaatagtaatggatgatccaaagtccaaatgtactagaaaaccattgcttgaagagtttaatattgaaaaataaaataagcaaagttttaaaataattacacagccatcttattgtttgaatttatatggcaaagacagatctgattatatttgacatcttatttcttttgttatctccttctgtgtttagctgttattatctctcttaactccctattgggagaattatatttgagcaattgcctctccagcaacatttatgaaaatgagtgtagtactctgaaaatacctccctccatagctcattaaatgctcttttctaacttgttcacatggagtgtggattatttagctttcccataactgagcagtagaatttaccaaacaatatcaagctatttatatatttttcctttttgttacaaaatgcacacaggtacatacattttcattgatagtgttattaaagattcaatacaacttgtgaattacaaagggctggattatatagttaagtattaaaactgataaaaaagtttttagaaaatctttttcctactgtgaatgcattaaaaaaatctttagctcatcacaaaaaaaatgtacaaagtaccagaattgctatgacctgaaaaaaatcaacaaatatgggcatttagtgtatcctatatatgtgtgcaatggatttgaatatgttatagaaggaaacatatgtttgtctctcacatagctatatctgcatggaagtaaaaaaaccctttgctggttcagaacagctacttaaaaacttacttttagtacaaggctcataatcaaccttgaaaagaaagtgaatcttgaatttaagactttaaaacttttcaatattcccgacatcctatctctaagtgctactgaggtcagctctatcttagattgtaaaaatcacacaaaacttttctgatattttcttatttcctcataagatgagaattgaaatggttcagtactctgctcccaaagacattgctgcaataatcggaatttcttcctattcctctatttctcaccaagaggcgctggtaaactctttttatttctccctttttaaattgacttctctattgcttaacggggcttccctcgtggctcaggggtaaaagaatctgcctgcaatgcaggagacatagttagagccatgggttcaattcctgggttgggaagatccccggaggaggaaatggcaatccactccagtgt

SEQ ID NO: 54575 - DNA, 1330 bp, Bovine  19866880592843
  misc_feature (1)..(1): n is a, c, g, or t
ntctgctttcccttatacaattatttaataaacattttatttagcacagactgtgagctatgtaccgggggaggcagacaagtttacaaagcaatgataaaaatgtgataaagtatgtgacaaagagggcagctaaccaagtgttggcgagggaagcccaggcttgaaagctgtgttgcattatccaatggaagaggagaaggcaagaatgctagagactgaagtggtcatgagaatgaagatggtatgtatcagggattcttctacctcctttcacatatagcaccatataatccacacaatgaccctatgactatgatagttactatatcattatgctccattgcacagaagaaaagtgagacataggaagatgaagctacttgctgaaggacgagagctaggaagaggaggcactgggactggaaacctgactctgactcagacctgaggctgctgaccactcagcccacctgcacagatcactgggactgagagatggagccgcaggagttcagttctaccaaattcactttttaaatacatgttgagagcatactctgtgccaggtcccaaatgccaggacttcagagataaataacaaagcatggctcctgtactgaaggggtgtgcagtctgctgtgtcacacatcaaggcttaataaataacaatataaaaatggccatgcagatctggctgtgcagatggccaccgagcctttcttacagaatccatagttgcgtttctgccaacacagaaggcaggagcagtggttggcccagcaggaaatgtcaaaccccgggcggccctaggattcaaagaagcatcacagcacatcacaccagagtaggggaagagcccccacattactggcaagagaagagcttttcaatgagaacaaggcaccctagcagcctaacactattttgttattcagggtctgacagcacaggatacacagaggaggaaaggaaagctttggtgttgtgtgatgaggcaaaaggtcccagaggtttggtgtacattcacttaaaacaaaacaaaacagaaaaaaaaattgcttgtaattttgtaacctccttagggtatttcaaatggtttgtgaagatcaatgttgtgcatgttcaaagagtttagggagttttaaaatctttccattcagactggcctgtcataaagaacaaagggacatggaatttcttgcagggattctgagttcgtaggatgaagcctagagatgtaaaatcaacaaagctggcctttgaactttcctcagtccagaaggggaaaagaatatgtactgctctgtaggcgcttgtgtagttgctc

SEQ ID NO: 54576 - DNA, 1120 bp, Bovine  19866880703822
  misc_feature (1)..(1): n is a, c, g, or t
nttactcagcttcagacaactcaaaatgaagttcggagatttctacgaaatctttaaattttcatttaactttaaattcctactgcacagatgcaataggaaatgttcagaaactggagccactctccctaaattcacattctaggaatgtttcttattatctgtgtgatccttgacatcttacttaacctctccaaaccacaattttgtcatctgttaaaaaaagagacaatgacaagagaacctaactcgtggggatttggagcattgtgaggattaggcaagtttctctgtctaagtacttagcactattacatagaaatcatctatcagtgttagctatatatacaggtgactgcatatttagaaaagaacaaatagcattgctaatattaaataacctctaagaagccacgcatacccttgccttcagacatgtattttatttgatttttgagatagaactgccataggaaggaattacagaaaatagaagacaagttatataagaattatcaagtaattttttaaatgcagtagaaggaaaacagcaagctgaaaatacatgtatggttatgtgacatagagagaaataggaaaaaattgaatccttccggcattatcacaacagtatttcccaagctttggcagaatgcagtgatcaagatcaggttccatgcacagggacaatggcaggtcaactcaaaggccgtacttaccacctttatccaccctacggggacctgcctttttgtccttcaccttagcagtgctttcttcccaaagcttactcttcctcttttccttttcttccttggaaacatgttccctggacttctcaaataagctctctgcaatcattccagttcctttctctgcttcttgttcaagaacattctccaaattttcctctatcagcagaggcttggtctccacatctgtttttattatttcttgttcttcaatttctggagaatcctcagttggaaggtgggtttttcctggcttatcattttcactcaactcttgagaagatggacttctgacactttcatctggactgttttcagcgttggtctcctggtcccccactgcagattcatcttcactagaactagaa

SEQ ID NO: 54577 - DNA, 1879 bp, Bovine  19866880748532
  misc_feature (1)..(1): n is a, c, g, or t
nctttgatttatttgatatctggtgaattaatggcccctaattatgatttgactccctattttgatttacaatagtgataaaaatgggcttgtcatgtcttagtttagttagcttgagactatatctcaggacctgacgattcctggacactagcttgaaatgggaaatctctggacatttaaagtggagatcagatcctagaaagtgtcaaccgaattggcttatgacccaataacttctgcccagctctaagtagtattccctagacaaaatgccaccactttttaatttatccttctttccaagaatgtactattaaattaactaaagtaaggtttgtgaaaagtgcttcaccagctaaaaaacatattagttggattaaaatattatttatcatttgggggttatatttatacttttaatgtgaaagataatttatttcagttaatttcttagtgacaaggtcatctgtcagctttaagtaaaaacatcttaatttcatatgtcttatgtttcctaataataaatggaactaaattcacccatttgagcataattacaattgtactcataacacaggttctttcttaagctggcaaatgtttcttcttggtcttagaaatacaaacaataccttttctaattactaaatgtcccaattgtccttccctgttagagtaacctcatgttttatgacttccctgcatccttcctgtgctctgtttaaaataagtgaaaattacctgagacataaccttgaaaaagaagcatagtcaagcttccgagtgtgattaattcggacttttttaagacagacattcttttccttctatatccaaccttctccagagtcaaacttgaagcaatttcatacactgatggtaaagtaagtcagcatgcaaatgccaacctattcttggaaattttcattttctaggtttcatgcattttaaaatttggaagcagtcaacactgtgtctattctgttagaagtcatatctagccataaaaagatcctctttgtttttatactacctttcaagtttgtgagagatcatcttatattattacaagtctattccttactctttttcccaataacacagaaattataggtcttccaattaaagtaaaatataattaaacagaagtacagagcaagtgtttaataagtacacaatataaatttcattgatcagattaattgaatctagcatcttaaaaactgagaagaaaaagcatttaccccaatgggaaatgaagtttcagtttccagcaatgaggtttttgatctggatcccaaagttatctttggaacagttcgtactgcagaattactgggaagaggttgtaatcgaaatggaggctgcatatttccaggagcagtgtatggtcgaggggctgtctagacaattaggggaaaaaattccatttaaattagtatcttgacatgtttccagaaccaattaataactcaacaaattgcctagagtaattaatggtgcctttttactgaacagattaaactttaattatgtccttccattatacatacccttatgacccaatgtatttgttaaaacatatggtgtggaagtcttctacatacctaaatgccacaattgtagagtattttagataaagatgttctctgttaggttcctgtattttattcatactgtaaactcactgacaatgcctagttgatgctgtacatagaatgaaagttttagtcgctcagtcatgtccaaccctttatgaccccatggactgtagcccaccaggctcctctgccaatggaattctccaggcaagaatactggagtgtgttgccatgcccttctccagggatcttcccaacgcagggatcaaacccag

SEQ ID NO: 54578 - DNA, 1000 bp, Bovine  19866880758242
  misc_feature (1)..(1): n is a, c, g, or t
ntgtaaaaagaacaagaaaagactttaaaaaataaatatagtcatatagttttcacaaataccatttggggaagaaatgatttggaaaaaatttcataccaatctacttaaaaaattgagaatttttatcaatgtaaaatggtactaagactgataaaatatctgatatgaccttaagcttgactttaatgatgaaaaatggttttaacttagggccaagcatttgattgccaagagagactctcagtatttttctttttgtcttctacaatgataggtcatgttccaacagtggttggagcattaacttctcaagagtaaggacaatatgcacatatagtattgggactgttactgcatcatagtctgtcctgactgatactacaagaatgtggcagaggccagagttgcagtgaagatgaagagttttgttttgaataagccaagttttatatttacatataaaggactggtaaaatcacaattctttaatagaagtggcaccaattgtaaatgtaatgggattcatccctttttttcaagttttagagacatagactaaaccagggttaccagaaaggatcagatctgaagtccatgtaaatataaggggggaagactctgagaaaccgtttgatattgataatgactatctcaggtttacatttcagctgcatgtctcaattgtataatttcactatgcccatgaattcaatcacttgtgtacagacacactacctgctcagaaaatttccaaggaatccttcagtgccttcaggcaataggcttttggaaattgttttcaagttccattctttaatattctcttcacaagtaattttttggttgatccttatctgttttgttggatgacagagcatgaaggaaccttttattgagctcaatggcagtttgatcaaagtaatatctaatttggatgcattggctctgaacattttctaggaagggagaggtgccagacatccctagggctgctcag

SEQ ID NO: 54579 - DNA, 1116 bp, Bovine  19866880761508
  misc_feature (1)..(1): n is a, c, g, or t
nacctgtatctcataaaaatatcctaccctcagtgtgtatgacagtcaacatctccagttgttttaatttgcttccatatatgttacaactatatgtttcatgtacatgcacttatgtatttacatgaaagtaagaaaaaccctgactgtgtactagagtgaacttcagatattaacatgcaattttttccaaaagtaaagctctaactaaagttacataaacaggtaatgagagacctaggctcataagcacgggttcctgtttaccaatccagtgttatctctacaaaccactctgaaattagactctacttctctataagcattgcctaccctggatggaaataaagattattttcattgccatgttgcctgagggatttcaagaggaagtcagagtcccttgcatcttccaatttattgtactcaagcttggtaacaattggaaattatgctctggcgcaatgccatttcctgagcagggggatgctgagtcccactctggtgcagtttgcattttagtgtattttgtaaataaattcttaacagatggacagagcagcaggaagccaacaccagggagtcagcaggtggacaggaaagccagaaatggactggcactgatcagattaacaaaactaaaatatcttgggattcacacatgcttcccacagaataagctggcactgaccagataggcaaactcaaatcaaccctgagcatggaaaatttccattactctgttcctatggggtaccaaggtccctcccagatggggatgccaaagctataaatccttcagagtggcagtctgtcttcttttcttcccttggaattgtcatacagcaagaaggtgagatacaaattgcaattattaggaggattaaactgctcttaattgcactagccacaaaactaagcagggaagaagaaagatacaatcattggtaccctataaatcattggtatagtctcccaaaagacttagaagatttcattgctactgtaagaacatccccttctactctctaacccatggcattgttccccataatgtataagtctaatagcttcattttaaggtctgctgccctgctcaaagatgttactcttgca

SEQ ID NO: 54580 - DNA, 2724 bp, Bovine  19866880825118
  misc_feature (1)..(1): n is a, c, g, or t
ncagtcctgtggccacagtaccagtaatcttccagcttgtgattcatccagccctgcattttgcatgaggtactctgcatataagttaaataagcagaaagcagagcccaagcctaaacctcaggtagtactgtttctttaggaaatgcaattccatggaagcaagagtgaggaagggaagctgggaggaagagccaattctacagtgcagttgagctgacactgtctgcaatcaagggcacctgatggttagtctcattgaattgtcctctgagacgctaagactggcggtgcctcaggacgtttgtgatgtggtggagaaaggagaacttattccttggcactgatccctattaatcagaagtttactccatacgtccccaagtgttgactgccaaggtgacctgcaaagacttcaagaacttggaccatctctcctttggataacaggagtgtgccatggcagtgatctgaggggtacaaggcaaggtgtggtcaagttgtgcccacagaaagttggccatggtgatggatgacacagtagccaatggcataggtgggaccaaaatttgaggtaacacaaaagaggagcctaatacatgttccttggagacattagtaattaattgtttacatttaacttaactgcactttataattttattcatgttgtgctttttatattattttcatattcattttgttatatagccttgattataggatgctaatttaggatttacttctctcacagacacttaaattctctcaaaccataatcctttaattagcatccaggaagtaaatgattcccccttggtgcttggttgatttctctctcagtcatgttataataagcatggtcagttgctatggaacacttattatgtgcctggcactgtgatgtgtgactttcctgcattattttacttaatcctctctttgaggtaataatcatcgtctccacgttatagatggggaatctgaagatcaaagggacagagtaacctgcctatggaaggtcacacacacagtgagggactgaactagactttcacctatgcttgactcaaaagctcataccctttaccacaatgccaatgcttctcaaagcatcatcctggcaccagcagcatcaagtttccagggaacttcttagaaatgcatgtttcggggtcccactccaagacttctgattctaaagctctgggttggggcccaggaatctgcatttgaatgaactctccaccgattctgacaaacaccacagtttgagaatgctctgtgctattcaggttcctgtaatttcatacctggtacagggtaaacatacatcatccagtgtcccatttatgtttattctgctcatctcaaattatcctcagttctgacactgattcttttccctttgactaatttgagtttaaggaaggcaaaaaaaaaaaaaaaaatttcctctgaaagaagaacctgacactctgcttcactgtggattaatttctgaagtgttgttaagcagaccatggattattatgagtaaaaactgaagggcaaaccaaaattcaaattatttttattgcatttcgtggtcttgctggaatcaccctttcctgattagttgagataaaagaagagatggaagtttgtgaaattagtgagcttcaaaaccttctttaaagatggcgaagataccttttcctgcatatgagtccattgcttaaaagatagatatttgagatggtattctttttatctcactaattaaacataaagttagactgagtgtgctttggagacctgtcctcgtcagcggggcctggcacccgtggcagcgttttaattcaagaggcctaatttaattagcaccctgccactgggtcggctgcttgctgccttggatctcgggcctgaggagaaatgtaaaacccctgctttttttatatctagttagccttctaaaaggtaggatgtccaaggagggagaggaactttgcttctccatcatgttttgcatatggtgctaattgagctgacagtcttggaccactgtcggttacagcagcagctgagccttcaactgatcccctgtgaagggattgcaaatgtcaaatggctcatctttgcccttgtggctcttgaaatatggaagggaattgatcagggggagcttttcagtctgcatgcttgagtaactacaagcaacacaaaactaggaaggaataaagtattcaaatcttactggtaatggccataccatctcgcctcactttccctatccagtgtgctaatgaggagaggaaaatgtgaaactccttggtttccctaattgctgtgctttgccctcataacttttttgttcctgcttatcgtggtgagagtcttgcttctgtcaatcatttctggttctttctgcctagaaaataacaatgtatgttttttgaaccttgagattattccagccctcttttttccataattaaaacagagaaaacgatgataatttttttttctttttttggcttgactttgcaatcataagctatagtaatcaagaaaggtttgcttttttatttttctgggtccatgcaacttctcctgggtaattcccaaattttcctcaggcctgcagaactgcagatttgtttgtttttaccacaattttggattgggaatgttggtatttttattcctttttctccatcacagtggaggcagtactatgta

SEQ ID NO: 54581 - DNA, 552 bp, Bovine  19866880864902
  misc_feature (1)..(1): n is a, c, g, or t
nccaataaacgcagaggactgcagaaccttgacttttcttaaaacaagctccagtctgtcagtagaagtatatttgaaggcttacttctaaagctactggatttgtcccattgccagtgggattgaagaggtggattataagatttgtattgtagttaaacccatttattgagggtaatgtgaaaaaaaactccatacttttcactcactgtttgctcagcaccatgaaaaacaagtggagcagtgagaatgactgaataaatctaaccacacggacacacacacacacacacacacacacacacacacacacacacacacacagacccacacacacactcacacatacatacacacacactattgatgtgacgtttctgcaagctagtgccctagaataacaatgaagtatgatttacatttctatgtatggctaaccatactgcttatcagcttcttaacagggcataatcttatgaggaatctgaagtatgcaaacggaaaatggaacctttttaaatgagaaaggacaatcaatatcacaggcatcaa

SEQ ID NO: 54582 - DNA, 1070 bp, Bovine  19866880886468
  misc_feature (1)..(1): n is a, c, g, or t
ntgtttaaagttgcatgtgagaaagctaggaaaaaattttcagacataaaggcagcatatgcaaaagcactaaattaatagagtgcatttcatgctcctaggaaagtgaacagtccttgtaatatgagtttagctctcacaaaggttttcagtcaggaaataataagagataaagttgaattagtacttgtaatactaggagaaattcagtacctcctgaagagaagtaattttgcatgaatcaaattcaggatccttatcttgattcaaagctcatctttaatttccactcaggtttgaatcctttggcatatctaattttaataattaaaggactctttggaccacatagcatctagtgttcttttataattcatgaacttggaaaagttttaatattgtatggatatgaatgagattactaaaataggctaacaagccatctgcttcatgacacacacttccgtaaatgtcatgaaactttatgttaccataaaattggcaacaaggaagcacctttctgtggaagagaagttctctaacagtcagttgcaagatactctggtctttgcttcatctggcacattacagctataacaataaatgcccctaatagaaacagaagaaaaattggctgtaaactttcaaaggagaaggcctaatgctttgaccatggtttctacattcccgttccaacaaaaaaaaaaggctattaccatcaaagtacctacgatatttagaagatcccacaggtcttaaatcttcttgtttagaagactcagataccaagccagagaatatactattttcttggtaatgtatagacagtggatgtttttactgctccctgttcaggacaaaagaaacttgctaatatctttccaaaaaccctactgctatacttaaactgcctcctaaaggagttagtccaggttccaaggaagaagtattttatctcttcctcatagtaaagagtatgcaaaagaactctttgtataaaatatctatatattcatcatgaagtgaggctagagtctgctttggttcttggtatcagccacatcttcaaa

SEQ ID NO: 54583 - DNA, 1884 bp, Bovine  19866880905618
  misc_feature (1)..(1): n is a, c, g, or t
naatctggggcaaaagcatatggcagcagaaatgagaagctatcacaaggaaaccaggcaggaacacacacatggtctgttggggatacagaaagaaagccacttttgttagcacacaatgagcaaaaggagggtggtgcacaatgtgtcagagaagtaaggcaggagtcagattaaatgggacaatacaggtcatagaataactggatggaatacttggatattattctgagattcagagccatttaagtaggtgagtgatatgatgtgtgattttaccatgaagaaaatggatctgaatgtggaccacgagaaggtaaaggaaggaaacttgtttacaaggctcctgtaaaggcccaaataagatttgatggcaagtagtgctagagtgaaagcaatgaagttgcacagaagaggaaagatttaggatatgttttaaaagcaaggccaatacggcttgacaataaatcagatcatagaggagagggggaaaagtaattaaggataaatgctagcatttgggcttaggggccagatagacagtgatgccatgtattgagaggaaatacaggaggaaaatcagatttggtgaactagattaaatatgcttatacatattattctttctaaagttcacagctttcatactcaaacacaagctaacacttcctgaataaggtcacatttaacttctttaatttaaaacatcatttttgctatacaatgtcatttaagattttattctaaaaataagaaaaaaaaatttgaactcacattatttgtttctatttacatgattactaataatactcagataaaaattgaggaaaattacacctttttatactttttatttaataatactagggaattttgaggtacagctataatgtccagaaactgaattattcaaaaaagggtgatacaatttctttagctatagtttatcatatgaataataactatttgctaaaaggaaattatccttatatttgtactttatatgaatttttctattaaagaacaaaacaactagaccacattataactcatttattttcaattgtctccatagatagttttactgtcacatgaacctttcataggaacatagaagccagtaccatttgcagtcaacagagcttatctggtccttctaaatggattatagatttatgagctatctgtgaagaaacacatggtctaagactatttaaaatcagtgtagctatgatctgaatggtcaaaaatgggtctgaagcagctgctcttttcaacaaaagtgtctgatgtctcagcacaagtggatggctttcatggtaaacaagctttgaggcagctttgagttcaggtgaagcaaagaataggagggagagggaaacagaaagtaaatgtaaaggaaaaagcagtgacattgacttctgtcatgcactgagtttttcctgatttgttaggcatataaatgtcactgaaattacagtggccatcagttttcttggtaagaatacaaaagtgtctgagggcatcccctaccctatcctattacacattcacacatagacagcctatgtatgattcacgatcgccataataatgaatgttaccaaaaatcgtacatctcaaatgaaacagaggtatactgaaaactgattacaataagatagagaaattatttctccacttaataccatgactatatttctgaaaattaaacattctatgtggaaatgctatccaagaacctgtatctgtatattctacatggaagaaattgtaatgcattacgagttaaatacaaaaccttataatcccctccaaatcctttaaacatgatagcagcaaaaaaaacatatttacaagcaccttacatactaataagtaaaa

SEQ ID NO: 54584 - DNA, 1314 bp, Bovine  19866881166619
  misc_feature (1)..(1): n is a, c, g, or t
ntgcttagctttaactttcatcatgataatagaggtatccaaatcaataatcatacattttgatccaccaatgcaggcatttcattcaggaatagctagaaacaaatccttataatattgaggggatgtgggaaagctttttagggaatacttcagcatatctgtcaaaaagagttgggagtctcatcctattcttatatttcacagatgtagataaatatgggttggaaaaagtcatcttggctaaatctgttagagctgtattttaagtaatgtgtaaaaatcagattttagcttagttgattagaattaatatagatcaagcactgctgatagctcaaaatgtcaattagaacaatttgaatatgtagcctggctgggggccacacaaactagaattttactcactcttcaccttgtacttcaagagttataaagaaaatgttaaaaggctacatggaggcaatccagtaggtcatcataaattacattctgtccccaactcctgagaataggagggtgaatcttagggacaagcatataaaaacactacatctatacattttcctttcagtctctttttctgtttcatcatttatggagagaatagatgggtaaacaagttgaagtttcctcatttttattcctccttttcgaaaggtatgatatactaacgtataccactagtttgagtggtagcctttaactctggcagctcaattttcacctgggtaaagacaaagcaagcctttgaaggctgctctctgtaatccatttgtaggcatacaggctcactcagtcacgtccaactctgtgacccatggactgcagcacttcaagcttctctgtccatgggattttccaggcaagaatactagatgggttgccatgtcctcctccagggatcttcctggtctgggaatcaaacccacatctcctgcatccataggcagattctttaccagggagccacctaggaagctcttgttggcaggaaatcaggaagcttatggtatctagaggcttatgatatcctgtacctgccattccccttcttgatcttcgtatcttaaacctagtatataatgcagccttcctttcatatcctcactgtgaacaccagtcagttggacttagttttctgagtatgttctccacctggaaaagctatctgttttttattcagttgatctgattatagtagatattttatccatctcttcaccaccccattggcgaagggtaattctcatcctgaggctatggagatgaccaaatgcacaatatctaatcctaaaaggaaacttcaacaga

SEQ ID NO: 54585 - DNA, 2343 bp, Bovine  19866881310653
  misc_feature (1)..(1): n is a, c, g, or t
ntaccaaaaggtaaagcagtgaaaattttcccccaaagcactcgcacttggaaggcgttgactgtagccacctatatagaattaaacaaaatcactgttttaaaatgtttataagattgtaagtaagatttaaaattgtaggagcatcagttacaactcaaaatatctctaaagatatttaaaatatatgcattactataccccaggaaagaagaataaatttcaaattcaaagagcaattctcctgtaaagatttgatataatgcaattctagactaggaaagaattctaaatatgctttacaggctatgacacatttttgaatcaactgtagaacaagtgaaaaggaaaatgagcaaaaatatgatcttgtgtctacattttaaacagtaaatttcaaccatgtgtaaactaccatattaaaaatccacttcatgggggaaaaatgtaaccaaaaaaccagtatacataattatctattaaagactaatttccagttgcaacatttttcatcaaattattacctacatttaaaagcagtaaaggtgcatttatataaaagcattttacaatatatacttgtttttaatttaaaaaggcttctccctcagtgatgagccatatgacttaattccttgagaaatgtgttctcttaaatacattaaatacactataaattgttacatcattttatgtaactatgtaactaatagtgagagacatagtagaaagagtcacataaaaatgggtttaaattctggtataccattttttaactgtttatctttggatttactctaagacagcagatgtggaataatactttatcataattattattatataattattattttaagattaataatagatgtaaaatactcacctcagagtacattgttcaaccaacaagagttaatactttctttttcattttccaaatactaaccaacagtaaaatttcacgttacaagaattacctatttttaattatacttgaccctggaagagtaagggtttgaattataccaatccctttatatgaggatttttttcaataaatactgtaagactgtatgaccccaggttggctgaatccgtgatgagaaactgtggatatacagagtggaactacctctatacaggttcaactacgaagttacatgcaggtttcagactgtgtaagggttagcacccctaaaccctgtgttattcaaggatcaactgtatacattttctggtgtccaacttaatttttactaaattggtaataataacaatgttctggaatacaactctaagccttttttttttaaccttttaaattaaacttaaattagaacttggacgctttacttggtatcatctttaaaaagaattgttctgtgtgtgaatcataagaaatgaaaagtcccttggtaaccatgtggacaaatggttctaaaatatctgtaactgaacagtgcaggtccatgacaaagtttcaccagccctcagttcacagagggaaagtaacaggtttctatcatacaaccaaaattttaatacaaccaaacttgtccaatttgaaaactatcctttattctgagattatttctttcttatatttctaccgccttatttgtatgggaattcccctcttttatactttgtcaactctatgttctgtcattaccttttctttggtttttaaactctttaaggattatagactttggtcaccagtaattagataaaaatgtgtaacagaaggttttgcctaaagtctggtaatcatagtactaatgcagcctctcccctaaagcaagaatcctttctaaaacattatcaagaaatgctcatgttttgatgagttctatcttaggaaaatggaacaatatccatgaaaagttgataatgtacatgatccatgattttaaagttaaattttgtgaaagatattatgttactaacaacctaacaatatcaagaaatacatgaaatatttgcttccaaagcagaattaacttcaaaacaaaagaacaaaatgaaagaaagaagtattagtaagggagaaaaatgtccctgagatatcaagggtaaaatactaaaagaaaatgtaaattagtaaagtataacattaccagagtgaattaataggatggtaaaagaattccatttatctccataaagcttttccaaacatcgaagggcacaaagggttgatcctccatttccttaaagttaaaaagcagggtttattttattacagtaaatttaggtgttataactttgaggataagatcctttggctaaaattaggcagagagcaaaggtacaggcaaaagaatcaaattaaataca

SEQ ID NO: 54586 - DNA, 1144 bp, Bovine  19866881380776
  misc_feature (1)..(1): n is a, c, g, or t
nccagcatatatggatgatttattatggtctggaaaaggtcacattgggaataaattactatttttttttttttttaatttctgagcatgcaccatttaagcagtttcaactattgttcagataaccatttgagaatctaattttggaaaccttttaaagagaacttatttagaagagaaaatgctttcatttctgtttatttgcatacaaacttgaaatttaaaacttctgattttgtttctgtttttaattccattttctttcaattcaccaatactttttttttttaaactggacttgaactttttacagcaagttccatgcttctgctagctactctgattttattttacatccaccctcccattttgttctgccagacacttccaaaaccagggatggtcattcatagaatttctctgacagagaaattctctgaattctctgatagactggttcccattttccttcaagaggagatactattttgaataaatccttttgtttattgctgtccccatttgagagactattactaatatgaataacttgcagagatgtaacagttccctctcaattcccagttactatttccgtagctgatacagttgtacttcctccttcaagttgacttgaactattccctttattaactagtttttaccttccttttgcaatgctgtaatagccataacacaaattaaatttatcctgagactccttcttttaaatatcattttgattaaacatgcatcattataaattacacaaggcacaagcacagaactcttaataattttaagggaaaacgtgtagtcaatagtaagttaatactctctttgcctttgttttatctaaaaatctatgtgtatactcaaatgtcagaattttatgatcttgaaatagcatttttgaagttgactttacttttatggggttaaagaattacacattctagatgttaaaagtacttttgagccctgtacattaggtagttgttcaaatgatttgtcttactcctcagatttagacttcagaaccagggatagtagaggtcatctctcacttgtattagactcatccaactgttactgttttgatttttgatcacaaatcatcattcttggcagtgtctatttggtg

SEQ ID NO: 54587 - DNA, 1414 bp, Bovine  19866881396822
  misc_feature (1)..(1): n is a, c, g, or t
ntgatttgcagaggtagtttaatggattgctgtcaccagattaatggcctctctttgaaactatgtcaatctcttgactggacatgcttttgataggtgtcctagcatatagttataagaaacaacctattagcttctaacaaagttgtagttttctgaagcattcaaaatgtgtactttgtttgcagtaatacaccaaattatcatatgtgtgcttctttattttacaaaaaaaaattatgcaagctttttctttgttttcagtcttggaaggtgaatgtacttcgtgcaaagtactacacagagctatgcatgattccagttttgcaaggtggaggataaaatcctttaaagtatagtatttttctctccctgtaaaaaaaaaagtttacatttttctttctgagtggcacatatttatgtctgtgtgaattaaacttgatttgcaaaacaaaagagctctattttatgaacaaaagctttacttctctagtctttttttcaatatctccaaatacctattttctttaaaaatctcttgcatgttaagctcttctgtattttgaagcaaagcactggaggatttcttgtgctggaacggcttaccctgtaggagagacatgttttagccatgcatcttggcatgcaaactgttcaagtctggccaccttaaaacaaagtggtttgcggaacataaaattctttggggaaatgaagtccttttcatcataggggactggaatgcaaaaataggaagtcaagagatacctggagtaacaggcaaatctggccttggagtacaaaatgaagcagggcaaagactaacagagttttgccaagagcaatcagtggtcctagcaaacaccctcttccaacaacacaagagaagactctacacatggacatcacacagacggtctataccaaaaccagattgattatatcccttgtagccaaagatggagaagctctatacagtcagcaaaaacaggactgggagctgactgtggctcagatcatgaactccttattgccaaactcagacttaaattgaagaaagtagggaaaaccactagaccattcaggtatgacctaaatcagattgcttatgataacacagtggaagtgacaaacagattcaagagattagatctgatagacagagtgctagaaaactatggacagagattcatgacattgtacagaaggcagtgttcaagaccacccccaaaaaaaagaaatgcaaaaggcaaaatagttgtctgaggaagccttataaatatatatgaaaagaagagatgtgaaagacaaaggagaaaaggaaagatacacccatttgaatgtagaattccaaagaatagcaaagagagataagaaacccttcctcagtgatcagtgcaaagaaatagaggaa

SEQ ID NO: 54588 - DNA, 1752 bp, Bovine  19866880404706
  misc_feature (1)..(1): n is a, c, g, or t
naaactcctttcctgggattcgctcgcatctctgtgtcggccgccatagctttgaactgtctgtgggcatctgtgctttatctctatttatttttgtatgctgttaacaagatgtgccctagggtaattgcttttttactttactctatttctgctaaccaaagttttcacagaaacattctacttttaaacagtgaaagaaaatagcaatagaagttggaatagaaaattatttcaagtgtgctcattcattaacatcacactgcaagcaaaaagattacatcataaatgatactgtagaaaacttttataattgatcccttaaaactgatgattaatattaccttcctcctggtcaacttttcccaaagtatattcattcgaataaaaatcttgacaagaaatcaacaaaatacatatactggggtgaaggaactgtttatactccttcaatccatatttccttttgagaaattcagcagacacattagaatagaagtcctgagccatggggtcgcaaagagtcagacacgactgagcgactgaactgaacctgagccgtctcaaacaagcagataaacaaaaatgtttatctgtgtttaatcagttatttctacaatatatttgaccataataatgtttttctttggaagagtggttgggaaacagttctagatggtttacttttccaggattctttctttacatcctgctgcttctccatttaggaaagtaaacacagccccacagtaacagataagttaaattccatttgctatttcacagcacttcctgcaagaaaactgtctgtaaaccacagcttgagattctcagagggaaagaagaatgatcagtgagctcagtttagacactgtgcatttaattttgtcttctgggctctgtctcttgtagcaaagctcagctttaaattagaagtaccattatcatattatgggctttagaaagatacttgacattcaccctggacttaaacgtccttggagagagatttcaagaagagaattttagtgattgatttgagacctctccttgtctataaaccttacagtttacataggcaataaatgttttttgaaatcagtacaaatggaagcaagagactaacaagtgagaaaagtacaatacaaaacaagtagttagtacatggaaatggctcctttttagtatagcataatttttctgctgttcttttaaatgttttgtctaccaagagtacagaaatcttctgactagaagatgccatctggtgactttatacaatatcagtactaaaaaaaactctattttccccaattgtaataggtctaaaaactcattcttttgagatttcagtgatagggtccagaaaaacacatttttctttaattcttttttagcattaaacaaaataagctaaaagtttattttcattatttaaaatacctatatgattcataatataaagtaaggaatggaaataaaaactcatcagatcaagaaacataaattcataaaactgctgggaatccaaaataacttgagaagtataacaaaagttatattaatacattccctctggaaatcatagctatcaaaaagctatataaaaggccatgttacaaatgtgtggatttttaatccatagaacagatggcaggttttcattttattcaattgctttaccaatggatgaatcaaacatccagtagaatttttatttttatttcatttgaacttataactataattata

SEQ ID NO: 54589 - DNA, 1377 bp, Bovine  19866880407844
  misc_feature (1)..(1): n is a, c, g, or t
nggacattagggaggtaagtgattcataacactttcagtctctgcttcctaaatgctgcctctgagatatttttccataatttccactgatggcatgtgctcatatattttcccaaaagatcataaattggaatacattactgttagttatgaaacttattcactaaggcaaaaatagtttatttcatcacttctctaaatatgtacagaaagaaaatgttggtagcaagtctcagaattaatgaaaactatagtttttttaatgaatttttaaaagtttaagctgttaattttaaataaccctagatttgggtatgaataatgaattgctgtactcttagcagatgggaatacccacagacattactttaaaaatgtctctcttattttggttttgtatctatgaatgtgaatgtacatgtgtgacagtgggaacctttctttttctatatattcagttcttcctacatgtaacatcacttcatctatttgaaaaagagtactttatgacaaaagttacgaggagatgtcttatttgtgacattgcgggatcgtcttaccaactaaagtgcaaagtttagaatcgtcattttatcacttcatttaattaaaaagaaaaattatctacattcatgaactttttatgattttcacattttccattttacatgttcttttaaatcacatttttaatttttttatcttttgtgtttcattaattagctattattggagttgactctgtgtatccaattcttttcttcccattctcctttgagccccttttatctctcatacttttgcttccacagtcccgtcaaaacagttcttatttagtttaacttccatgttgctaaatccaggagccacttctcagtcctttgaagcacttgatctgattcctgatatactttttcatcctgctactagcacactacactcttcctgattttcctgcatttttgcttgctacccctgtctcaggctgctttacgttctctgcttctcatccctaactgtggaaagccttccctcttcaatcagccttaacgcccctggtaaatccatgctgtttcatagctccaaaaactacccatggccttatgattcccaatttatatctgcagcttatctgtctctcctgatttccagatgcctgaatctagatctctaatgggggtctcaaaattaacatcctcaagactggtttattgctattccccctaagaagtcagatttctttgcagccttacttatcgcagctgatggcaatactacttattggtgttcagaccaaaaaccttggaactgtccttggtacctctctttcactcacactgtatttgatacatccacaaagcgtattacttccaactt

SEQ ID NO: 54590 - DNA, 1898 bp, Bovine  19866880464904
  misc_feature (1)..(1): n is a, c, g, or t
nttgcacactggagcttaaaatgagaatcccagcccagagcaagaaatcaatcagacggtggtggtctgaggcagcggtagtagacgacgagaccaacttggagtgacactcagcattaaaaggccttgctgatggtctggatacagagacaggaaaagagggagaaatttaggacaagctccagggttttggtttacagatgaaagacaacatagaaagaagagcagatgtgagtgagggctaagaggaagaacgttatgcaggtttagatctataaataagagctcctgctatatctggaagttgccactgtgctcccactgaggctctagaaacacacattaaaacaatatggattttagaagttggtggcccatgcagagagttaaagtcctggaaataaatcaattcagtggcccagggcccttgagtcatattaatcacagcatcatgatgggcacagaagcaatctgtaaagaaaccattctctacacctctaaatctatactgtgagctataaataacttgaatggtggtagcagaaagaaagcagaaacagtgagatgtacttgcagtgaaagaaaatcaatttaatcttttgtgttcatgagataggacgatcatagtttaaaatacttaattcaaagcagtctaacttttggtactgggagtagatcattaattcaagctgtgagacactggtcttatcctactctcttaccagcaagctgcctctcaccttagagactttcataaataacctgcagctgaattagataagaaatgctgaattaatgaaggcataagataaaacatacaaagaaagggctctaatcaacacagaacaatgaggctctggtcctaatcttaactagttgactctaagaaattaaattctctatgattaatattttcttttatgaattaagctcttatgttctaagttttcttgggtctgaactacctacagaccagaatactaaaagatggcctttatattcatgaaaggttattattcatagaaatgaaaggaaaagaaaaacattcattgagtgttagtaaaagccagaacttgctgcattgttcatacatatttcacttcatttcaagatttctacaaacctttgagcaaacagacgtgccctagagattaaggacttgccagtggctacacaataagtggctaaaccaggatttaaagtcttactgggattcagtgtcactttttactacccgtgttgcttgttaaagagaatagccactttttgtttcctaattagaactgacaacaaaagaggaatcgggaactactacttcatggggccaatgggcccacagtgcagagaattacatgcaggaggggaaaatcaaatttccagacaataaggtttatcaagggagggtttcagaactcttttccttataaagatctacaaaatcattacatattttcacccttctagaatggattaaatgtgattcttgccaagggtaggacaattaaaatagatgatatttctaagaccaaatcaattttacattcttaatttctcagtgtttagtcactaagggacttccctggcagtctagtggctaagactttgaataaggggattatgggtttgattccctgtagggagttaatatcccacatgcttcatggccaaaattaaaaaacaaacaaacaaacaaaaaaacacagaagcaatagtgtaacaaattcaccaaagactttaaaaatgatgcaaaaagattatcactgatataataatgggcataaatagagattctaaaaagcaagtatacatatctgaacagcttcatgtatagtaatcatacctgaaaaaataacacatgggagttcttcccacattataatgctatcgagatgaaaatg

SEQ ID NO: 54591 - DNA, 1945 bp, Bovine  19866880490053
  misc_feature (1)..(1): n is a, c, g, or t
natagtataaaagacaaggagtagtacaagatggcataatatttgtgtcaaagtttgccttaatatctctgagcatttcaatacagaaaatcagccagctgaaaatgcaggaataatcatgcttttaaatgttgactgggactaggagattgccacaaagattaagaacagtctctgattctttcagaatcattgacttgcagaatgctaagattttaaagaactttgacataatctaataccattatccacacgtcacataaaattctctttttcatattcctctcttgatgttgaaagactttaagtgaaggagagccttctatttcagaagctgcctattctaccaatgaacagttaaattttctctgatttcgcccaaaagataggtctctggaattccacattactacattactatgtggccactctttaaatgtcaaaaggttcttaacaaatatgcacactaaatatattactattatcagactaaaccattcacaattccttcattgctttcttgtatgacattttcactctatttcctttcatccaaatgctttctaataagttaatgatttttttcttctcctcattaaactgaacataagtttccaaatgtaagaagggaaaataagatactattgcatatggtgactattttttaaagtcatcctatcaaccactgatgtttgaactacagacaattataatcacagggatttaaccacataaattgtaaccaactcaaatttccctgactttatttttgcaattatattttaatataattataaaaggatttccatattctcccatcttgtgtgttttatcccaaaagtccaagattattttgtgtactgatttagcaaactaccattttactgttcctctcaacttccgatatcctacaaatctgatggacatgtgttttaagtatttatacaaggcacttactaaaattaaatagaataggcataagagcagaattttctagtatacacacaaaaatattattcctggttaacattaatccatgcaactgaatcttaaagctacgaagattcaatctgatcagtctagaagcatatatacctccaacaattatacatacatacaacatcatcagaaattatacatacatcatctattatacatacagaaattatgtatacatcatctattatacatacaacaatcatcagaaactaccaaaaatatctgctaaaatcaagaaaccatacagttgaaatccattaattctctaaaaacacaaaaaggtgaatctctgttttgtgatgactgttttctaaggttctaaatcaggatcagtccaatgatattttctagaaagggacagacataaagttttttagtgtatatttttcagaatacggcttttgttgttttatggctttgttcaacacaatttaaatagtgtatttttttctgtgtatttctctgtcttatgaaatcatatttttaaactggaagaagacataaaaatgttccctgtccccattcaatttttttttgttcctacttagactacttctcagaaacttttcagtgaaattaacactatgtatatgtggtatgaattttattacctcatataaaactgtagtatttccatgtagaagaggtccgtaacagatataggaatgtccgacaacccagcctaagtcagaagctgcccaccacacctaaacaataagaagaaaataaaacgcatatatcttaatcagataaatgtcatataatatgaacttaaaaccatgattacctctccaggtttaagtccatatatggaagacatcgaccagttaagcattacagcgtatcctccagtgggcctcaccacaccctaaaggaaagaagagatgaagttaaaatcaatagacaatgtgttaaaagatcctctttcttcatactatccacttaa

SEQ ID NO: 54592 - DNA, 720 bp, Bovine  19866880551346
  misc_feature (1)..(1): n is a, c, g, or t
naaatccaaagcaaaggagacagataaattattcaggagacagaaaaatcaatcccagaaggtgcatccattcctgaattttgatttctggttacaatatgcttcctctagggaagggttatattgtgccaaatatatgcatatatagcactttccagttttcagtatcattcaatactcgcggaactgaggcccagtgcccgcggcatagtgagccccagcttctaagtggtggaatcagaaagagggccagttctgacagatttcaaaacattcctctttccactattttaagctgccttttaaaagcaaaaaaagaaaaaagtaaaaagtaaatcatgtatccttttattatatttttaaaggtcagacgtttgaatataattcacatattaacatctgtaatatgtacaaaaataactctagataacactccctacaattagaattctgaataaatgaaagttacacatcaaattaaaaacatgtatagaatatatcaaaagttgaataagttaataaaggcaaaattagattcttcctctagaaaatcattcttttgcatttctattaacagccttttattgcaggttttattccatctcaatcagaatacatttttcccatcttcatctattaaaataaaactcttctcaagctatttagttgaaaatcatgacatcaaaatcattcctggtttcaaatattaactattttcaa

SEQ ID NO: 54593 - DNA, 1674 bp, Bovine  19866880576213
  misc_feature (1)..(1): n is a, c, g, or t
nataatgaagatttatcttatggagtaagcgacttaactcaaaaatgtaactagtttctacattgtctgaccattgagtccaaggacattgttttcagcctattcattttaaaaaatgaaatcatattgagcgtagcctataattatcactgcttggggtagaagaagaagatattacgtttccatctggtttttcaggcactgactctagtggccaaaaccagagatgactgtcatcccaaaggcaatttatagttggaaagagtcttccagagctctgggaaagaaaggaaagggaagggaaaaggaaagggtataacaaaataaaacaatttcaataggaggaaaaattatctgctacagctgtgcttcacttccttcataagaaatggtcttagccttgacatagccttatgctttccatgataacaaatgttcatcaagcagctaatgtaaggttatatgcttcacacgcatgggatcagttaatcgaattgtccccaaaattccataaggcaaccattgttatcttaagagaaatcgaaacctagtattacctaggcacacagaaacagaaattaacttagctaggacttgaagggacttcttcggaacttaggggccttgcacttcatccttctcttatacctccccaaccaccatacctatgtgcactgaaccacaggcaagctgcaggtaaacacactcttccttggtttgcgtcttcgctgctacctttctcagctgaatcctaagaaacaacttatctggcatcaaagggtgccaagaaagagaataaaaagccgtgagcacacagtgtagaataggagccttaacagaggaaccttagagtgccacactgaatcctggaatatcaaatagctatgagtcttatttccactaaaactattattcaagagacattattacattcattgcatccccatcctcagtcccacccctcaccttataggtactactggtccaccatggaggggtatggaattcggatcttacgttgccaccctccagaaaaagatagccaaggaaggaatctgagcaccctctagccaccccttccagctcccaaactgtcatacaaccttagtaaaagagaggaaagagatttacctgctgctatggaggctgaagcctgaaagtcatgtataaccttggaaggactgtaatggttttatcacaggaatagcatctttttgagaggcaggagagagaaaagacctgaaccactctgcaaatattaaacaagctattttggagcaatggctattgcctttgaaatctttcatcatgggtctatacttagaattcagatgagcctgggggaggggaacagtgcagtgttaatccccagttgttttgaacttgtcctgtaagcaggttagcctctaaagtgtcccaaattgaagtgttcgatgctttgtttaaatttaggagtccatatattttgttttaacctgtcctgcatataggttgtcacatcattctaaaggtgacacttctcagttttctttcaaactagatgttctagagagcactgggtgtaatcacattgagagactgatgctccatgacagctaaaagttggattgagtttcaggagctactatatataaagctggggcgacttatgtcaccgcactaattaaatgccat

SEQ ID NO: 54594 - DNA, 1916 bp, Bovine  19866880595175
  misc_feature (1)..(1): n is a, c, g, or t
nttgacaatagaagatggagagcagctgtgtaatggcgcaccctttgaaggggcactgcagagccatggtgcccactcaggatgtgtgccctggcagagagaacattccatgcattcgctgcaggggcagtagggcctgcaaagatgaatgtggtagaggtacccgagtcctttcagcaccctgcatgctgacttctagtgttgccttatgggagcaggccaaaaatgccagcagggaaagagtatcatagtaactttttttcttccattgcttcatgcattatgcttttctttcccaaggggaaacatgcatttctaaatctctataactgcatgccctgagggtgcaataagaggggcataaaaattcatcatctccatgtaatcatgaggaaatatcagataaacccaagtcgaaggtcattctacaatatatgtggccagtccttttcataaatgtcaagatcatggaagacacagaaagactgagaaattgtcacagattagaggaggctaagaagacccgatgactaaatacagcatggtgtctcaggattggatctggaatagactaacattattagtggagaaacgtgggaaacctgaagagtttagttgacaattttgtaccagcgttaatttcttagctttggtaaatattccatgcttatataagatgttaacagtaggtgagcttgggtacaggatatatgggaattctctgtgccatatttgtaactcttctataaatttagaattagttcacactccatttgtggtgttggagaagactcttgagagtcccttggactgcaaggagatccaatcagtccattctaaaggagatcagtcctgggtgttcattggaaggaatgatgatgaggctgaaacaccaatactttggccacctcatgcgaagagttgactcattggaaaagactgtgctgggagggtttgggggcaggaggagaaggggacgacagaggagatggctggatggcatcactgactcgatggatataagtctgagcgaactctgggagttggtgatagacagggagacctggtgtgctgcaattcatggggtaacaaagagttggaccccactgagcgactaaactgaactgaacatttgaaggaaaaaaaaagtcctctatggcgtataccacagtatgccctcaccagccaagccaactttatgtaaatttgtgagagaaacatctattagggttttctgtttataagtatttgtaatactgtgtccccttcctccaaatcagttttattgaagagcctgggaaaagcaaaattatggaaaaaagaaattgagcatgacccatgaaatgtgaaagaaacgctttaaatctagaacttaagcttgtgcttaagaggatcaaaaaggacactaactgtgagttgtggggccttattgagacacaagatcatcatgactgctatgagggcagagaggaggccttttataattcattcctattacgttttcttacgtaacccatatgccagaaacacatagggaaacctgtgttctagtaaaaagattgatttacaaataatctcagtaagaaaagatctcaagtcaccagtctcatcttaggaattcaaagacatctcatttttttaatccttaattttcaatattgttgaaccaaatataatcatgaaatgacctgaaaatgtggcctcagcacaatagtttctgttttcattgctattaatcacaaagaacaatctgtaagaggattatttctgtagtcacaactgtcattggtgaataaagcatttgggttgtctctagggaagtggggctgctgccaaacagctcatatgcatgagaaactaagcatgggttagaatgtatattttgacctttatgatttttggagtattcattatga

SEQ ID NO: 54595 - DNA, 1169 bp, Bovine  19866880660080
  misc_feature (1)..(1): n is a, c, g, or t
ngggtgccttgccttctctgttttttttggttctagaacttattaattcttaatctgtttgttccttcttttattcttcctttctttctattgttcactcattaatgtttactgaatggtcatctaggccaggcactattccaggtgctgaataagagtccaagtagagtataacgttgaggagtgatttcatacatcaaagggaaaaagtgtttttgcttgtaataagatagctttcattttcctatttaataaaaggagagtaatcatgagtgatatggactatcgagttattttctgaaaatacgggtaataaaatttgctttattttgcaatcaagtctactctgaattacctttgaccattgaggtgtgagtaactagaatatacaggctcacatcatggtgatccgtggccattttctaactaagaaatcctttgatacataaaataatcaaccaattttaattttatccctttgtgtagcttcttattttctgccagaagtgctaacacccaggaaagtgaggaaaagacaagtaacacaaaaagaataaagagaaataatgggcttggttagcatcagctagataatgaactcttggataattgagcaggctgcactgcattcaagtttcaaattaacgaaatgtgaatggaaaatgtttaatctatgatattatatgtagacagtgaggaaatgggcaaggatagagcaaagacagtttgtgaccttgttagattattttgaggttaaaactaggggaaaagacaataacaattttgtctacttttcttaatgttttaatttatactcaatggtatctggttggttaagttggctttagtttccggctgtgtgttaaggttgttttggcaagagtgaaggtgggaaattggaagagatttagtggggtttaattaaaagagcagagattttatcatccaaaagccttggtttgagacatagattttgaataacttttcattgacatttcttattcaaaagtaattctgactgaaatttaggtttatgcttttttttccccagaaagatgcagtgttactttaaattttaattgtgtaaactcaggaaagccagaatagatggaatatcaattatagttcaatatctagtctcatatatatcttggtatagttggtatatt

SEQ ID NO: 54596 - DNA, 3818 bp, Bovine  19866880786079
  misc_feature (1)..(1): n is a, c, g, or t
ntacttcagttgtagcccttaccaaggcctgctacgggtgagcaattagcatactggtgcacctgtgcactcaactagctcctagaaaatatgacttgctttcttcatacagaagtctataatgtctggaaatatgtgaatcagaccatgctgttctcttactctcatctctttagtacgtttctatcacacttcagaggaaatccaaagtcctttccaagcctacaaagccatcaatatttgatcctggccctgcctgtccactgcactccaccatgcccttgcacactatccagaggccacacagtctccttctctgccccagaatataatatcaatgatacagtggagatctactgatcagaagctatgagtcagatgccattctaggcatctggggaacattggtgaatacaataaacaaatacccatctttgtagagctttcactccagtgggaagaagcgtggagatcagcaatataagtaaattatattgtctttcaaaagggataagtacaatagaaagaggcggagcagggtagaggaaagggagaagagccagggaagaagggattagctgtgatttcaaatccatgctaagcatgttctcccctagcactggcaactgctaatccttttgcctggctctccccttgccagcccacccaatattcacatagttccttatatcaattatttaagtgtctccctaaatgtcaacatttctgaaaatcattatctgaagagggtaaaatgtatgctcccgctcccacactgcagctctctactcccctaattagctttattttcttcactacattatatatttattcattttacaatgaatatatatatatatataaactattttatttctagtgcttaggacagtatttgccatagttataatagatatctattaaataaataaatgcaggtaataattagcttcagctcatggttattaaatgtaaaaggtaaagccaagaaaactgaaatttattcaataatatattattccttaataattggggaaataatttctattttaaaattctgccttttttatgcccatggtactttttatagaaaacaaggacctgccaaacttctttaaatgagatccctcttcattaattcaatagttgttgagtgctcataacattctaaactttgtactaagcacagaatatacacacattcagaagatggatataattatttttaaaatggcatctttaattattaacagccttttatacatatatatatataattatttatatatataattataaaaatcaaaacacaaagattgtgaacatcatcacactacttctttggagttaagtccccattcaaaaatgatgggttgagaagaaaagcatggagggaggtagtcagagtggaacaaggaaaacaggctagaaggctgttcaggtgaacactgatggtggctcagaccaaggtggtagagggaagctggtgagacttacctacgctctaaaatattctgaaggtaggtttggatatgaggaaaacaggagtacaaaaaaaaaaaaaaaaaaaactgaagaattttacctacataaaagggtagaataaccataaacggagatgggaagactatggttggatcaggtttggaaggatgatccagagtgcagctttcaacaagctgtgttttagataactatgagacattcacggcgagatgtcaagtaggcagttagatgtatgaacttggatttcagtagagagtactggcaagaactatacatttggaaggcttcagtgtataggagtaaatttaaggagagaagaggagagttcaacaacagaatcttccaccccgacatcacagaatccagtgaaatgaggaagggctgaaaaagtagctaaaggggcctaaaagggggtgtcagcaatcacagtgctgggactggggttccatgggcagagcagtcttctcctgaagaaagagcctcctgtgtagagcagacagcctttttgtccaagctgagaatttggacagatagctaggtggactgaaaaaggaggttgcctctttccagccaaccaggtctgccaaatccatagtagtgaccaatgaagtcacaaattatcacgtgattattatcctattctgactttaatggcaggcaggatggaaatacatcagtaaacaacatgtgcttgcaatctgatatacagagtgtgagtgctaagtagcttcagtcgtgttcaactccttgcgaccctatgaaccgtagcccagcaggttccgtctgtccaagggattccccaggcaagaatacttggaggtgggttgccatgtccccttcccaggggatcttcccaccccagggatcaaaccctgcatctcttatatctcctgcatcaggagacaggttctttccaacttgcacctcctgggaagcccacagaactaaataccaacatcaaaataatcttggagggcccagatggtcagtgctattggggtacattatagattctttgatgaaaatgttgatatagttccagtaactagtaatttagactctttcctaaacagaaaaatggtatgttaaataaaattaaacgtggaaacccatgatatagacatattaaaagtgaaatatctttgtttgaagcagaggtagcagaatcagagacatgcttgttcagagctcctactggactgttcttgggcatcttgacatagtcttagagccctggtaaacatggcttaggaacactggcagagacttaaacataaagcaggttagacatgaaaaaaattggcatttgaagctctcaggaaaggtctgggaaaacaggacccagatagacagattgagcccaggttgtcaatgttttggattttcctgcctccagaattgtgatatctcagttgtaaaacttccaaactaaagaaaacatcttggagatgaccagaatcatctagcaatagtgttaaattaactataattttaaggaagagataaaatgtatagtccagaataaaactaaacttgatgtgagtaagaatatacatattcagtgagtttcatccatttcatgaatacattgattctaaggtaaaggggttaaaaaaaagcatttaaaagtttttaaaagagaaaggaaaacaagacagtgaaaatgctcttccacaaccaccttgggaaagacagaagttgtgacggagcacactcgataatgaacctacaattgcatccaatattaatctattttaatcaaatggggaattagccttcctgccagcactaagtggaagtgtgaataagaatgcaatcttgcagagtccctcaagaggaatattccaacttatttagagatgtgagactgttaggaagtattcaaaatagggaaaatagagacaatcagaaaggcatggactattttaaaagagcagataagatagaataagagtcatgagaaatacaaactagtatttgtaaatgctcacttaagtgatgaggaactttggcaactttaatagcctaaatgatacattaacttcgtgcgtctactccatcgaattgggacattatttcttctaaggctgaaagatgtaccactagtttacaaaggtgagcagtgaaatgacctgccaaagatgtcatagactttagcccaccaggctcctctgtccatggcattctctgggcaagaatactggagtggggagtcattcccttctctaggggatcttcccgacccagggcttgaaactggccttgcagacagattctttaccatccgagtcaccagggaagccctaaagatg

SEQ ID NO: 54597 - DNA, 895 bp, Bovine  19866880792830
  misc_feature (1)..(1): n is a, c, g, or t
ngtctatacaagatagtatttgcacatgtgaatagaagtgtaaatgtatgtgactaattaaaatgcaatgaaaaatataggcttgtaattagaatatccttcagcttcttatttgtcatctttttacctttaaacagttcaggtcaactatgttctaaatcttacttttaaaatttgatattatacaatttcagcaaaaatgacaggatagtttaaacatctgatgagaagatggaactgaaactcaatattattcatgctaagctatcttaaatgtttttgcatatgttaactcttgtgctagaattaatttaagaaggtaagcattaaaatctcagttccttgatgcagaatcatttcagaaatgcatttatgccattccataatgagaaccactttcaaaaatctaactaatcatttccacaagatatacttctgacaaatggtctgttattttacagcatctcatttctcatgacagtaccacaatcaaaactacatcaccttaaaataggctaatgtatatataaataagaaagataatcctgcataattcagtcccttgaagacaaaagcaaagagttaacttttataagccagttttcatgctttaaaaaccatccttctcttccaccaaaagcaaaaacaaacaatagcaacaaaaaggtaaacacacaacgcctgtcaccacaaatgtcaggatcaaatacctttctgtgattttaaaaatgtagcaaaatagatctcatatttgtcaacatttctattttatctgaaatcttactgctttttacatgaattgttataacatcagcaaaaaaaaaaaaaaaaaagagtggttaaaaatcattccagtgtgttttcaaagaaaatcacctgtcaggaaatgtgtcag

SEQ ID NO: 54598 - DNA, 1929 bp, Bovine  19866880798189
  misc_feature (1)..(1): n is a, c, g, or t
naaaaatgagtaaactttttgagtcactgcattatctattttctactgttttatttttcaatttaggaaattaacaaaaatacttaaaatcagattgacctaagggttaataattttttttttttttttggaaaataaaataggatagtccatcagaacagtttttcaggtttggataagacattgttccaaaaatattaaggaagaatcttttaataagcacattcaattctgaaatctgcttagagataaaacactttgaaaattttaattggaaaatatcatcagactagttttcaataaacatgaaaataaagtacattgtaattgaagtgcactaaaggtttctccaagtatattactttatatatggactttatataaaattaagtttgcagctatagtaatgatgataataacaaatgcaacatgctgtcatataaatgatccatcatcaataggaaatactcttaaagctgttttctcttgaacctggggcttctgttgatctactctgctcttactctcagttctctttgcagacaaaaacaaacatctccaaatacttggcaagactataaaaggttaggtgagttctgggtttttgaagaagtagaagacactgacttaattgatggcaggttcttgtttagcccaattggatgttaaaacagacgaactaaggaatcatcctccaaatagatgacagctattgtttttatagcagcaaacttgaggcttaatcaggcaaaatggctttattgtgaattagttatatattacaaactagccaatcaggccatagccattaaatggcacaactgtcagtctttatttatagcagaggatataaatttcatcaagacaaagatcagattttagtcaccactgtgtgttcaaggagatattcctagaatataataagaacttgataaatatctggtaagacaagaaatgaatgcaattgattatattaatattatagtccagactgtccaggtcagcatattccctgtttaaggacctttattagtctgtggctgcttagggtaatgtctctttgggcactagagtttctaaaattataactcatcatgctaggagtattgttttcatgttgttttatctctcaattccaggtcatcaataaaaacactaaacaaacacagatctggtcccattgatgccctcctcaaaactcttcattgttcttacaaagccctctacctgggcttctacttcccagtttcatttccatttactctcaaagtcaaactttcttttgcttcaagcctttgaacatgctattctttctgtctcttcacacatttatatgattactatttcttgtttctatttaagctgaggcttaaaagtctcaacgtcatatactactctagctcctggtgaatgtattcacattccctgtatgaatgtgaattccctgtgtgaatgtgaatgtgttagtcgctcagttgtgtccaactcacagagagtccatggactgtagcctgccaggttcctctgttcatgacattttccaggtaagaatactggagtgggtagccattcccttctccaagggatcttcctgaccaggtctcctgcattgcaggcagactctttattgtctgagccaacagggaagccctggcttcctgaggattacaggaagccctgtaatcctcaaattcgtatttgtgcattttccatctggaacatgtattcttcactaccatcacctatctccaatgttacaacatctcacaagtagaaagcacttaagttatcttgaaagaacaaaagacctgaagcaacactaattgtaggaaagcattgctattattttattggaagcagttactcctcacctctctccttttattcaactcgatctgtcagaggcagtatttccctatatttcaattt

SEQ ID NO: 54599 - DNA, 2115 bp, Bovine  19866880855038
  misc_feature (1)..(1): n is a, c, g, or t
ncagtatctttaattcacaatcaattcctccacctgggtacctgagtcaaattctcaggtttatcataactccttttacttcccctacaccccacctggtgattggtgtgtctaatctcacctgggacagcagctactcagttccagccaagcgttgccatgtgaaaatgctgaccaagcgctgacagttaatctgctttttttcaaaagaagaccccccagcctgaatcattaaaggaaatttaaattttagatgaaatcctccaatgtttaaatactgacaactacttcaaaaacacacaaacaaaaaacccagcacctaggtcacacaaaacctatctgcagacttacagacaggttgtgacgtacagccttaaaagcgaatgcaaatgtcttagcttgctattccaagccttccaaaaccatcctgaaaccaccttatggagtaactgtaactccacaataaccactacaagccaactgatatcctatccattctgacctacaagcatatttggttctttctctcctctatgcctacgtcatgtttggtttggacacaaaagtttttcttttgcacacaaaaagtggttttcttcctctaaatcctactttaagattgagtccatatgctaccatttctctgaaaactttctggtccacactagcttctgggaatctcgcttccaaatttcaaaaacatcagtaacgaggtctgtgtgccaggtacagtcctaggcactttatgctcccacccacctctataatcctaagaaattgatcctatcgttactcttattttaccagtacggatattgaggcctatccaaaggaagcggcagagccggggttgaacccaaacatttcttgttccagtgcagaaagaagagtaggaagttcaagttttggtcatccactatgggacctgtttgtgctaggaaaaaaaattttaatccttaatatgactcaccagatcattcacaatatggctttctccttctgtttcttaattattacctgccaagtcagccttctttcagttcctagaacttattgagctacttcatacctcacgaccttttcatctgctgttctctttgtctggaatgttccctcctccatctgagtctaatccctacacattgtgatctcagtttaaccatcatttcttcaagactcctaccacaatccttccagaaaagattatggcaaatccccttattatttcatagcatttactacaactctaaagaaatagttttgtaataatttactgtatgtctcccatctctttcatcattttctttatactatacacacaatgagtgaataattgatatctttaacacttataagcccttttaagacttggagacttaaacaacctttatctcatagtcagtgagaaactgagatcctgcatgttaaaaaaaagtacctacacgatttccattgtagatatgttaaccaagcagaaatcattttctaatcatctgcatttagacttttctttgttagcttatggtcactgttaatacatttaaattaaataatcaaaaaaaaaataaatcaaacagtatgtgagagtctgattattgaatgttgtttaaatataaacaaactaaaataggactgcaatgtttccagacaaagggataattaatgacccagaccgcaaaaattaaccacaatgcataatgcaaaagtgaattgcctaattcctctgagaggggtagctggatttcactttcaggaaaggcagtaggatgtctaattcatcaggagaaaacaaccaaaacatcctttctgtggtcccaggactacagaaattactaggggttctaattgcttcaccatatagtcagttctccactgaagtctaatagagactctattctccccaaagctaggtgtcaacaatgtgaatgaaccaacaaactatgaggaaaggtaattcttcacatgttcctaaagcacctacatggaatttgtttttcaaagatctcagagattacagagaatacagaaatctattctacagggctattcactacaatggaagggccctaaagtatcaccctcaaagacttcgattccatgctcatactactgcat

SEQ ID NO: 54600 - DNA, 1526 bp, Bovine  19866880927882
  misc_feature (1)..(1): n is a, c, g, or t
nctaaacacccccaactagattcttaacttaattacatcttttgccaactaagataatattaataggttccaaggattaggacaaatgtatccttttagggttcattaagtatcccactcagggcttccccaggggctcagcagtaaagaatctgcctgccaatgcaggagacgtggcaggagcctcgggttcaatccctgggtcccctggagaaggaaatggctacccactccaatattcttgcctagagaatcccatggacagaggagcctggtgggctgcagtcattggggtctcaaagtgtcagacacgactgaagtgacttaggacacatgcaagtattccactacaatgttcctctttatctctattgaactaagcgtgaattcatactaatgtctctaaccctaattcagtttcatattgatcattctggtcttcttcccttgcttctctataacctatcaatccaagagagaaacctagctgcccccattggccaaacattacttaattgttcaattccattatgtgtctacagtggtttcaaaactgttaagtttagagcctggacaggtcaattccggagcaagtcaactcaagaaaaagtgcttttttgtcagaagcctgatcatagttatcctaaatattcaagaaaataccatcctttcgtttactgatcactttaaagacataatcaatctgattaatattttaaaaaaaggagctattttgttgagcaataacatttttttcataagtctgtttcatttcccacaaaataaagccttttttcaaattgtcattgatactgtaaacatcatgtggagaaccaccaaaacaaattcactgtgttgtatattccttcttgaagattatggttttcctttggcccttgatttcccaccacagaagacaacttttttcatggaaacttcttacagaaacattaatttatacataaaattatcttacattcgtatggacagctgttgaggtggggcttatggtcaggattgtcagatttgactgtgccatggaaagtttcctacagctgagtccatttgaattgcactcattaaaaagagaaaacacttgccaatgagctgtttgcaattcgagaagaaaaaacagtaagaaatgacctgatttctttatgaaagaataaactgttttgttcttgtagtagaagactgtttcgcaatgaaaataaatggatgacagctacatgtatccatagtgataaatttcaaaaatgtaatgttaagtaaaaaaactaagttatttatgcaaattttggacacaatacttatatatacatgtataattgtataatatgcaagaatcattgtgggaataatatgctccatcttcaggatagtggatatccctggaaaaagagataaaggcggttgagctgagggggtacaggctttaattgtatgtctgacatgtaatctttttcctaaggagagatctatagttaatatggaaatatgaagcatttctaaagtcttgatatgta

SEQ ID NO: 54601 - DNA, 1854 bp, Bovine  19866880984081
  misc_feature (1)..(1): n is a, c, g, or t
ngaaataatcgtgatgaaattatgttttgttactagatatatctttaaatggtgtaggaaacacgcttcaggttagtcaggagaggtcctcagaattacaccgtgcatgtttccctgaattgaaactgtatgttattggttaaccaggatatttagcataatcactctgctagactgtggtggagggaggtgattatcactgagaacagatgggcaggtccacagcactgccagattctgcacaagctccatttactgttggttcttgcttttttccttcggtgttttaatttttttttctttttaaacactgtatgttctaaagaactagctgcacaaaaggtcagtagctgatgacctttcagcttagatttcaaacgtagaagaaagattcaaaatgctatcactgtgtatctaagaaggatggagcaggtttcattttacactctagcctccctcaatgcatgcacagatttatctgtgtgctaagctctctgctctgcatctgtagctccttgtggattatattgtctctctgatcagaaatgatcttctcggatatgaacaccgtttctggctcccctaaagtgcatcctcctaatgggacccggttttatacttttcaagtaagtgtgctttaaatggcttcactacctagggagttaatccatagtccaacttttaataaagagaaaaataagggaaggaaaactgcaaaatggaaagtattaaagaggatgtaagatgtagaaaatgtgcatgtccttttaatccaggttttttgatatggaaattagatagcattatgattctctgtgaattcaagccaaataatagtgaactaattttcacaaggatttttaaatctgctgtattatcatatttacaaggtttatgagatagtctcctgaaattgttctttatggatataatatggtgaaaattattaagttccttccctgatatattacagagaagataaaattaaaagacattttatggaactttgcaaactatgttctgtaggcttagaaaaattttgtatttcttatacatagcttaacatgactcttgttatttacttttatgagtgcaatataaaattaaccaataatacagtagcttaagtgtcatgtttagtatgctctttctatttgaggtaaagtagaaactcattaagatggaagatttcctgtgttatcaaaaagtcaaaatgatttacaatataaatgtaaatgtgtgttacaaagctgttactgactttcagttgcctttgaataaatcagtcatcagtctagaaaatggttaccgtctaaagtaaatcatattctacctcatttttatcctcaaattgcatttttcagtgctaaggtttacatttgtagttcaatcatatcatcattagattaaaagggggaatgaaactcttctctgtatattttacactctgggactatgaacagcctagcatttaattattttagctataaagttataatgtactaaaaaataagtgcaaaaacctagagaattaatgtagtagaggtaatatttcttgtaaaaagaagctctgaataaatgcacatatgatttattaaaatctcctgcctttgcacactctagcagtagatataattactctctctctctcctccttcttatacttctatttttaatcctgttgcctctcctgctttacactgatgtctactgatagtgcaagtctgtgctgttacagaatatttttgcttcccagtggcgatcagcttattggtggaagtgattcaaaatgcaactgccctggggctcttgtacagaattattacttttttcttctccgtacactgagatata

SEQ ID NO: 54602 - DNA, 1189 bp, Bovine  19866881008048
  misc_feature (1)..(1): n is a, c, g, or t
natcaccaaatatatcactccaaatgaaagtgaaccagcattttaatcctcttttctggttttaacatacaaagtgaaatcgagtattattgtcagctttcatcctataaaatacaatagattctgattacttggctttcaaaagtgagctataaaggtcatgctccaagtcaaagcctggagacattaattatcttttcattagctgtgtcatcttatgaacatttcttagccttttatttcctaaggggcaaagcctatccctgcctatcttacttttcaaggacaactgtaaaagtataaaattttgaagaaagttgttatggaaagctaaagtactttccagataccctgagaaagtttctgatgggaaacagaaaactcttgtatgggcttcttgaagggacagtgggatggggcttatggtcctcggaatcttttgggtccccagacgtttggcaaactttacctacactatttctaagcatattctattggatatgatacatttaactcctagtgaaaagtcaaataatttataaaaactcttcccacagggttttattttacattttaatcaataattccctaaccttgagtaaatcccacaaattcaacaagcattttgtgtatttagaacctattctgccgtgctgtgctcagtcatgagcacagctgcttagttgctcagtcgtgtctgactctgtgcaaccccatggactgtagcccaccaggctcctctgtccatgggattctccaggccagaatattgggagtgggttgccatgccctcctccaggggatcttcccaacccagggattgaacccaagtctcccgcattgcaggcagagtcatcaggaaagcccagaatctattctaacatactgaaaatcgacaaatacagattaattcaataaaagcattggaagtgtagtgagttggttcaaaaagattcattcattaattcattcagctaatattcacttatgggctattctactcagtatgttaggcatatgggccaaaatatgaaaaaaaaaaatactggctgcttctaaaactttgagctaatattagtgtttaccaaagaggggctactttaaaatattttaagtgaaaagtttaaattttactttttctttatatttaaaagcagatagtctactttttcggagagaaaaaatgtct

SEQ ID NO: 54603 - DNA, 1735 bp, Bovine  19866881047486
  misc_feature (1)..(1): n is a, c, g, or t
nccccttggagtttgctgtgaggaactcacacttgctctagcagttaactagagtttaccatctcatggttccttcttcacagctgataggagaaatgaaatccctaatgccatggaaatcataaaaggctctctgcacatatttatgtaagcttgtttttctaaaataccacacaaatatgctgctcaaggaatccaaaaccatagttagatgccactgaggtaggtactaatttactcataactgacacatagctcttactaagttctgtgctcaggacactcatagactctatcactgaatcccttcaacaactctctttagtaggttccattttatcgacaagaaaactgaagcacaggtttgtgacctgtccaaggtcacacagcagatggaactgggatttgaacccacacagtgtaacacgagagctcatatgtcttcgcattttctgtggcttgggggataccattacattaaaataaatgtgtcactgtatataaaaagtactttgaaattgtagtatacaaagagattagtgaagtgtgatcagcaaaccacagcagtggcagaaacagagtgggaactcaatcttatgttgcagcttactctcatgaagaatatatcaagccagggaaatggataaacatacagattcagacagtttctgacatgcgataaatattgcaatgacttttcagaattatttgttgttagccactgtgtctatttggtgctacaaaaaaacctgaaagaaacaaaatcccttgctataagggcttatcataattacacagtgtggagatgagtcaaggatgtttcagatttatggggaaagattgggcgatagtaatactattttctcaccattgcatgtgattgtgtctttctaattgttttcattatttttctgaaagagctgcaaaattgtgcagtggttcaacctgaccaaagtggtattatgctgctgggaagtaaaagtactagataccagattggaagtactgtcttcattatcaaatttaaattcctttaaagcatgaatatagagggatttttaaatgctccagacccctgattatttggatgttaagtttttcatgtttctcctttacagaccacactgtgagatcatgctactgaggggttaggttctaaaaccaatgtgaaaggcagaaattgagattgggctaacattattaccacaatcaagtagatcagtgtccatacttctagaggtgagcaagaactgatgcctttgggaagagtaaattcacagctcccatctcagtcatcaaacaagaggaatcatattcattatttaaatttgttctctctctggcccctcacagttaaatgagcatgtaatgcaacttaaatgctggttcctatttgtggaagcaaggagtcttcttatgaagattttttattatctcctcattctttcttattaccaactaattactcctttaaatgattaaaattttggaaagtttaacttcacatgtaatacagcactaaggaaactcataagtcttttgtctaaagccatactttatttctacttctctcgacacctttatttttactggagatactcctattctctgtacagatttactgatcttccttatttgtcattcatggtcggttcttagattctttagatttttgctttggggaaagtctccaactgtcttctcttacacattttttaatattcctacctatgaa

SEQ ID NO: 54604 - DNA, 1354 bp, Bovine  19866881060649
  misc_feature (1)..(1): n is a, c, g, or t
nttgtagattctttttaagtgctaataccagataggaattcttttttgttatccctcttcattattcgttttaaacttttcctaaggtttctggaccagtgaaattactctgccaggtgaaatttagaagtcctgttctaaatgttagtgttatctttaaggtcttcattatctctcctcctcccatcctgaacctccattccatccatcctgtatctactgcagctaacctgttcgtggttcaactacaaatgcactaaatgataacattgagggcatgaatctgccataccttctttaaattcccagttgttagaggttgtactataatactcattttgcatttcgctccagagaaaagaacatggaagctctccccttatgagatatcattgtcgtttcagagtgtggaaggagaacaccatgaaaaagccgtagaactgcttaaggctgccaaggacagtgtcaagctggtggtgcgatacaccccgaaagtcctagaagaaatggaggctcgctttgaaaagctacggacagcccggcgtcggcaacagcaacagttgctaattcagcagcagcaacagcagcagcagcaacaaacacagcaaaaccacatgtcataggtaagaggtgccctctacacaaggaagccccatatgcacagaatttggtttttttaaaagtatagtttcttagacagctggaatgtaatcattagatttaataatccaaaaaaattaatcaaacaaaaaacagtgacctcagaaaatgttaatgagacagttgcttatattatgtttcatttagccatattccctggaaatgtacgctattttgaaaaaaatatatacttgaggagggccaggtacagacgatatgatgcctttgtgcagattacagaactgcggcatctgtgcagacgcacatcctctggcacacggcttcatgacaagagtgtgggccacattccagccccgcttgcctccctggctagttgcctttgcacagtgtacaaactaatcaaccatatagtgctagccctggggagatcccctttaccatactgaaaccgtttactagaagactgctccagtgaagaggacgaagtagaaacctgccagtgtttaattacgctctgagattttggaattctctttgggtcttcattaaaatgtgtctcaggtatacctgtctttctaaattccactttgtgacaagggtaagtcaggttttgcttcatgtttttagaaaaattcaaaaaaaaaagagagaaaattcaggaaaaattgttaaagagtcatcatctctgaagtgcctgctgtgtgctagacccttctcatgtgttatccctaat

SEQ ID NO: 54605 - DNA, 997 bp, Bovine  19866881105411
  misc_feature (1)..(1): n is a, c, g, or t
nataataagtgcttctgggagctgggaatactctgttttctgatctggtgacatgagtgtgttctgtttgtgaaaaatctaacaagtttatacttatgacctgtacactattctaaatgtatatcacatttcaatagaagtttaaaaagctgcatgctagaaaaatacatgaactgctttaaattcaatctcataatagcctcgttcacaatttaccaaccatggaaaacataagctgtcttacagagatataatttttagtggtgcagactgtaacacaactgaagtatttattgtttatttaggaagtttaagaaaagaaaactaagtatacccactgctatatatcttctcctcaataaggcaacctctggcagggctggacttctgcgtgttccggttttggtgatttaggggtttgcttctggaaatactgatgatgtggcaagcaaagaaatatgagatgatcttaccctgacatgtttctgagaagacaaaattcacattttgaagagagcttcctaaagggggcagaggttggaaggaggccttctcatgggatatagcccttgatttcagagtaattttctcctctaaattattcagcctttataactacagctcctgccgtaattatatttcaaaagctacctttagtaaagataatagacactttcagtttgaattaaatcaggaaaatgtagtacacactgggcttcattttccctgcatacatatatttatgaaaatttctcaaatgccctttagggggtcatatttttgtttagtgaatacacacataaaaatttacaactgtatgaataccaaaaaaacacaaacttaacacatgtagaagtaaatttaaaatgtaattagatgcagagaagataaactcatagtaggaatttctaaaaagaataactacatataatatacacatacacatgcaacataaactcacacacacttttatttcaatgagctttgctataactag

SEQ ID NO: 54606 - DNA, 1347 bp, Bovine  19866881123488
  misc_feature (1)..(1): n is a, c, g, or t
nacttattcatattttggaatttctaaaatgcttatttgaattttacaggttattgcctggtatgatagtggttcaactcacataaatcatttctttttgcacttctcaggacactggcttgagtagcttttaacaactgttcaattgtgtatgtatatataatttttttttctgtagaatatatttttaaaggaaatctatggttcatgataaaaatagctgtactgatttcatatctaatttagtttaaaatgttcctggattgtgacagtctgatgttaagtacatcgtctaatcttatatataagaagaatataatgcctttaaatacacaatgattttcaggtaaacaatatgtttttctcagccactgctttcagacttttatggcatttgaactggcattctgttattgaaatgtcagataaaaatagtaacgctacctctatccaagcttaataaaccaacacaatttcctccttttgcttcatttatatgcagtaataagtgttgacattgagatgcgtgtaggagaaaaggattcctaagagagacatgtttatctttttcctttcccattaaagatatccttgataaatgtcccgaaagtaagtttgtttaaagcattataagaatgtgatgatgttcttgcacctgagttaaggtattcagtgtatatataattaaagataaaataaaactactcaggaaattatggcaggtgtggcttgtgttaatgacacttgaaaaataatgcctttaaaattaaactttttaatgtaagagtagcttgttttgcattaaaacatgtgaattcatactcagatttaagtattgggatattatcttattcaaaagataaaacaaagctaagcttatttaattttctctgaaatagaacaaaacccggctatttcctataaattcaagaccttgttgagcaagtcatttcaagtttattgcatttgcctgtttgttttgaggtcaattagatcctaatgactcatgaactagaaaaggtacaggtataattttaagggcatctaatggtctaatggtctatggagaaggaaatggcaccccactccagtgttcttgcctggagaatcccagggacggggcagcctggtgggctgtcgtctatggggtcgcacagagttggacatgactgaagtgacttagcaatggtctgtgggattaattttttttcatctgacaagaaagtattgttattttagtctaatatgaagttgcagcatctgtttttatccaattaaatgttttatttgtgaattttttaactcctcatgcttagagtctgcatcccaacctctaaattccatctc

SEQ ID NO: 54607 - DNA, 823 bp, Bovine  19866881160667
  misc_feature (1)..(1): n is a, c, g, or t
naatatgatcttaatgtttcctccaaaccctcatttctacagagagaatggctacgcaatctgctccttaacattaaaaaaaagagaagtactattatgtattttttaggaatataattcatgattgagaaccatttaaagagttttgttgacaccaaagacatgggggagaacatttcagaaccaagcactaaacggccttgataatttaccttatatggcttgccattgacaagggcagacagcgttgagcggggaattttgccagatctggttttgggtaactgtttgacaaacaccgctttccgaaaagcagccacagggccaatggtctgtctaacgtgtttcacaatttcttctaaaacgtgttcctctgttgtatttatatctagggagaaagttcagatggtaagctctgcattaaccttaatcattcagggcccaaacagggaagacaaagacagcttaccttttttcaacacgcagagggctaatgggatatgacctttcaaagaatcttccttcccaacaacagcacagtcagccacaatgccaagggaaaggatagactgtaatttaaaaaagcgttcatttagatgtttatacacgtatatatgcagtatatataatttcaactcggaaaaacagtacgtgacagagaacttaaaaacccagagctgcctctgtgaaaatgactatcaattcactattcatatctttatgactgaggtgaatgggttaagatcccaaagtcactaaagactggcagtaattaagacaaattgcttagcttaccggaaagtaagggaagacttcttcatct

SEQ ID NO: 54608 - DNA, 1280 bp, Bovine  19866881182219
  misc_feature (1)..(1): n is a, c, g, or t
ntcttatcctctgacaccctcttttccttctgccctcaatctttcccagcatcagggacttttccaatgagttggctgtacgcatcaagtgaccaaaatactggagcttcagcttcagcatcagtccttacaatgaatattcagggttgatctcccttaagattgactggtcttatcttcttgatgtccatccaaggagtggaataggcaaatcaaagcatttttccagttcctcttctgtctctgacctgcatatcttgggtcataatttagctttctctggtagttcagacagtaaagaacctgcctgcaatgcaggagacctagtttcgatctctgggtcaggaagatcccttggagaagggaatagcaacccacttcagtattcttgcctagagaatcccacggacagaggagcctgttgggctacagtccacagggtcacaaagagtcggcacactgagtgacgaacacttttgcttttgctttagcataaagtcctctgtgagttttctcaggatacagtcatgtgtctgttgtcactgccatagcattcaaaaaactaagatcatggcatccgatcccatcccatcatggcaaatagatggggaaacaatgagaacagtgacagactttattttcttcggctctaaaaatcactgcagatggtgacttcagccatgaaattaaaagactcttgctcctaggaagaaaatctatgacaaacttagacagcatatttaaaagcagagacatcactttgctgacaaatgtccatatagtccaagctatgaatttgagcaagctccaggagttggtgatggccagggaagcctggcatgtggcagtccatggggtagcagatcggacacaactgagtgactgaactgaacccgatttattctgcacacttaaacattatatcctgttgggtacagttttccttcctgattcacgttattggcctcttatcacagcagataccattttcacattgaccctggggctatctgaaacttaatgcttttacttgaagcttctggaccattccacctatcagtctcttttcttagcagcccaggaagatccatttctcctttcttcaaggtaattaataaagtataatggggagtataacccttcaggaaactacactaccacacacacagaggtacatgcacacgtatttaacaaaatttcaatttcctgtgattttatagataaattccatataatttaagtggcttaaaaggcactaatattaggttgctgcaaaagta

SEQ ID NO: 54609 - DNA, 1124 bp, Bovine  19866881207837
  misc_feature (1)..(1): n is a, c, g, or t
ntctttactattcgttcgattagctgaaatgactcatatgacaatgacagtatatacctaattgatccaaaaatgtacagttcattttcctgataaatgcataatttaaaaagtagaagttgattttacaaatctggcagacttgtaagtaccctggtaaatttcaagtctacttagccaatatcctagaattttgggatcctttatgagatttcacattgtcttaattcaatcagaaaaaaagattttaagcccgaaactttatttgaattttacccaaaataagcacatagagattatccagtgcctttgaatggtgctatactaatcggaaatgacatcttcccaaaattttgttcaggcgtttcctgtcacaggggactctggttgtgtaacaaggacaggatgggaacagctgccttaagggatttcttttttagacaacagtaaggaaggatatttctccctggtggcttggccacctgtcatgtggaccctgtggaaattctccattgtgatttcattttttccttaaagttactaaataatttgtacaaaatatttattttgttcaaccttatgaaagttctgtgtgttaagaaaccactaggaaatataaaccaattataaaaataaatagaaacgttaatagttaacggcatagtttttaaaattataatcatctttcacttttatagtttcacaactaatgcttctgctttttataacagaataattataattagttttgaaactataaaactgaacaaaatattgtctgttccttttggaaaatttaagtatattcagaatcattttaattcacttacaacaaatgatgtaactaacatggtaattttaaaaatgatggagattctgaagactgtgatatgtaacttaaaccaatagttctatgcctccctactgagttcctccagaattaaaacaagaaaaaaaaatacaatatgccatcccattaccatcagggatcagaaggcatttaatcctctgtaggaaagtgatccagcattaccctccttgagggtcctcgcatccttgccacatcatttgggaagtagagtgctagagaactttcttaatgtgtacttctcattagaatagcc

SEQ ID NO: 54610 - DNA, 1013 bp, Bovine  19866881259787
  misc_feature (1)..(1): n is a, c, g, or t
ntcatatgcacatagattctatacgtaactaaacacaccttaaacattcattaggtctggatgtgcctgaacatttacatattaaaatatgtgctatatattactgcatttattttcttttacatttctggagaaagaaatggcaactcactccagtattcttgcctggaaaatccaatggacagaggaacctggtgggctacagtccaagggatcgcaagagttggacatgacttagcaaataaaccaccacaacatttcttttatacttcagttagagtgttacattgactttttaaaaatttagatgaattatattttgtaagagtttcacttaaggagataaaaaagagcatcacaatggaaagcactggatttattataagtcaggattggttcacgactggttcaggagcttctggtcttcttttttcctgcagtatagagacagcaggctgtgactcctcagtgtctcatcatgccctaagcctggcagtgataagtgtggcagatgctgggggtgggtgttctggaagggaaaagaaaataatattttccagtatctagattttggtgttggcagtaaaattatttgtccatgacaatctgcatttatcttctgtggaaactgtgttcaatttatggaactatgctcactttaactacaaacctaagttatattgtataagtttcactggcatttcattttattaccaaaaaatgtattgatcaataatatattttgaatgatttaaaatccaggtatcaagagtctacttctgagtctcagtctaaaacaaagttacacactcttcactttatggtaactgttaactggctgactaagaaatggatgtaatgtatttaatgaaagagacaacaaaattatagaaagaatgaagagaatagcaaatttgagctatatttcaccataatttgttctggaacaaatttaaaattctttgacaaatgatgtaaattccatgtgactaatattttaataggaaaacagg

SEQ ID NO: 54611 - DNA, 1026 bp, Bovine  19866881310718
  misc_feature (1)..(1): n is a, c, g, or t
ncagcaaagcttcctgtgacatttgccaagagaccaggtgtgctgctggtagatagaaagtattccacagcttgatacctatgttttattagtggtacctgaggaaagtagcaattttagtaacaaacaggaagtcagcttctttttcattctcctgatgcatgcatgtgtgttatagttacagagctgtgccaaaatagttcaaccagtagcacgaacattaattacagccatgtgtggcctttcaggtaaaataattattttcttcactgagtgattatagttgctctactaagagatgtttgaaaatacttgtgagtgaactataacatatttcttagcaagcattcactttctcgttctgaatattcacatcattaagtcattgtgagccaataatgactaatgtttataatgaagcaataaatgaaattagttattaaatttgctgtcagttcttgtctgtgatgactcttgcacttagttttcaaatattaatcttgtattaacattgaatacattcactctcaagaatatctgctcacaaactgattcatgaacgctatggtgctatgctgtaaccatcaaatctgtcagccttagatctaactcatcagaagtgagatctaaagaactgctcggctctactactgtgatagcatggtccttcaggttagcattttaataagactctagttagaatatgactgtttcctctaggcatcctattattatttaatactattaaggaataaatatccttatggtggtctgtgtcgtaggcacacagctatctttgatctttctgtggacttaattttgaaggttttcatttttgttctggaaatatgtgttaaaatgcagtgttgataattgatgttacccctggaaatttttctttttattgcatgtgattctgtgaaatcatattttctttagaaagtccagaatggtctgtgagaatgaattctacaaatggactggtatgaacaaattattctgtgtttgttattggaggtgtcaaag

SEQ ID NO: 54612 - DNA, 1060 bp, Bovine  19866881321014
  misc_feature (1)..(1): n is a, c, g, or t
nctttattcatagagacttacttcttttaacatcaggggtaaattagtgtcacagactccaataattatcttaaaagatgcctggccttccctgctctatggaaagtggtccagtaatctcacagctctagcctggaatgtatattttcaatgttttatttaggaatggagcaaaatgttttctttttatttgacaaaagattcttggctttccagaagataagtgttaatatgcttggttgcacttgggtcagaaatttcaatgtttatttttctaagtaaaggattgctatatcttagcaaagtgtgacagaagacgctcattcatggctggattttcttgtagcaatattagggcataagaaggaggctgtggtccctagattccaggtttgctgatcttattgtggttactgttggaaacagctgccattttggcgggagagatttagagctgaaaattcgtgatgtttccagtgctaaaagggtgtctgtgaggggaagggagttgaaaaggagaaagccttgtcagtgtatccacagggaagacctgcaacaactggaaagcctgcaaaactcttttaaaggttacttctacttagatttaaatgaaaaaaggattcaaatgtcattctttgcggacagaagcctccttgctgatgccagcctttccaaaactaacatcacttgacctgaggataaaggctttgctagaacctgattcaacctgaagtgtcttagagaaagctcaggtgtcagaagtcctactctgccctgatgaagagtttaacccactgctgttgaaactgatctgaactgaagctttgagcacttgctgctatgagaacagacactaatggattggaaattaaaaatgacctaaatatttgtaaaagatgagtccaaattttccctttttctaaacaaataaagcagtcttcttattgaagcatactttaagtagacacaaagttttcctattttatatgaattgtttaatttggaattattatattttccaggaaagattaattaaaaaaaaaaaagtcatagtatcgtt

SEQ ID NO: 54613 - DNA, 2704 bp, Bovine  19866881353746
  misc_feature (1)..(1): n is a, c, g, or t
nctggattaggggtacctggccttgggacaggactaacctgaaagggaaagcttatgttgatgaaactgttggtcaaaacctcattgtaatactttgcctacctgcttacttctaaactcatccaagaacaagatcaggaggtttgggagggcagcaggaacctgtttctccctccatccgactcctccacccctcaagttagtagctttctgccctcccacccccatcttagagggtatccggcttctttactttatgctggttatttaactactccacctgccatgtatgacttaccaaatgcagatttgaaaaatttgaaccagcttttacctgttgaaagtgtttaattcagggcactcttggtgggtggctttctccagggcttatacatttcctcttgctgcaaatccctttcctcttttgcgctcctctcttcctggattatttagttgtctcttcatttgtcttttcccactcccctttccatcccttatcttccaatttattttacatccggagcgaactgtgatgctacctcaattgttaaaacgatcagtcaaataaagtgctctgtgcagcaaaaatggaaaacaaaggaagaagaaatgaatacgtaaaagaggaccctgaatttaagatcagatcccagactctgccagcaatttgactgcaaccttgtgagcccttgccctgggtagagcacccatataaatcatgcctagactttgtactatggaacatgagataattagtgggtgtcattttaattccccaaatttttggtaatttgttatgcagtaatagaaacccaaactaaaatttctaaatcacacccaaattaatctatacatttaacaaaattccaataataatcctagcagctttttaaaaaattaaaattaacaagctaattctaaaactttattaagaaaatgcaaaaaaatgagtcaagtaaatcttgaaaaagaataaagctggattacttatattcttagacatcaatacataaatctacagaaatattggtgcaaggatagacatgcaaattaaaaacacacaacagagagttctcagattcacatgtgtgtgctcattgaaatcccaggtggctcagcggtaaaggacacacctaccaatgcaggagactcaagagacatgggttccatccctaggtcaggaagatcctctggagaagaaaatggcaacccagtccagtatctttgcctggaaaataccatggagagaggagcctggtgggttgcaatgcatggggtcacaaagagttgcacgactcaatgttcatgtttggtgataagaacgtcactgaagtttgttgtacaaaaatagtcttttcaataaatggtgctgggtcaactgaatattcgcaaataacatggataaacctttacccataaaaatttaatttgagatggatcatagatataattataaaatgatcataataaacctttcaagacaaaatataggcagtcttcaagtgcttgaggtactcaaagatccctgaaacagttcacaaaaaccaaatgatgaaagaaaaaaaaaatgataagttggttttgatgaaattaagaatacctgttacacaaaggacatcgttttgagggtggagagctaacccactggtggaacaagataactgcctcacatacatccatcagaaaacttgtcttcagaatatgtatacctcttattcagtagaaatcaatcaataagattaagaaaatcaatcaataagaaaaccacagatcacgattttataaatggggaaaaggtaaaggcttacaaagagaggagatccaagtgaccaaaaacatgaaatatgttcattatcattagtcatcagcaaaatgcaaattaaaaatatagtgaggtatcactgcacagaaattggaattgttaaaattagaagattaataatatcaaatgttgccttctttaaaaaaacttggatatgagatgaacttcagattcttgatttgagattcagtttaaattgctaattcaggctcttttagggtcttattaaaatttatttatttttaattggaggataactgctttataatattatgttggtttctgccgtacatcaacatcaatcagccatagatatatgtatgtcctctctctcttgaaacttcctcccacctgccacctagggttgtcacagagcaccaggtttgagctccctgcatcatacagtaaatttccactgggtatctaattttatacatgttagagtgtatatttcaatgctactttctcaatttgtccccccctctgcttccccagctgtgttcgtaagtctgtgttctatgtctaatgcagggttttattctttcttttactgcacacgttaatattcccagggaacattacagttactaactagtacgctttttggaagaaagtctgtggttcttcatgttaacaaagaaaactatggtattcttcagtacagtggggagaaagcacaaacaagacaagaagagaggggttcatagaaagttgcgaacagaactcagttatagcatatattactctctatgaaatgatgtgaagaagcttctagagacatcatgtccagggaactgattattgcacttctgtgttttgtttgcctttatagtctttcctcaattcttttcttgtagaaataactaaaaaataataagtata

SEQ ID NO: 54614 - DNA, 1086 bp, Bovine  19866881360285
  misc_feature (1)..(1): n is a, c, g, or t
ntgtatcctttgtaatttaatttttatctgaatcattatttttgcaatatcttcctacttagaaagtacgtcccatttcattccagcaatgagcataatgacagtttacatagcaggtttgtattaatatttgttgagtgaatcagtaaatagaaagtacttgtcattgtgttttagtggaacagaaaacagctttcttttcctcctctttttgcatttattcttttcttcccttttaaaaaataactttatttatttacttatttttgtctgctaggtctgcattgctgctcaggcttttccccagttgtggcaagtgagggctgttctctggtttcagggtgggcttctcactgccgtggcttctcactgcagtggcttctcgtgtggagtatgggccgtagggcacatgggctttggtagttacaccctggggctctagagcacacgctcaatatttgtggcaaatggcatacgggatcttctcagatcagggatcaaacccatgtctcatcaccacagtaagcctaacatccatccgcatacatggttgcaatcattttttcctagtgatgagaacttttaagatctattctcttggcacggcattcttaaagtgcttattttttccacttaaaaaaaatccaagttggaagcagcatgttatattaagagattctgcatgtaatatgggcatcttaaatttaccatgaaactgaattttttgccttagagatgcagaagctagaataatggatattataattcatgctcagtgatgcttcagacaacaaatgtgacctgttgtttgtctgagtatctaaaatctatacattactttttggaaaagcacagcttactaagaaataaatgtgagtggaatttgactcatccatagttcttataataagttttgggatttttatagaacataaccacaatgcctgtgggtatgagtcatgaaatgcctgaattgaatatgctcacattcaatcaaagaattttgacaactctgttgacacttcaatgcttccactcgatgtttttagattataatatgtattcgggtgactagcatccacattc

SEQ ID NO: 54615 - DNA, 4014 bp, Bovine  19866881411330
  misc_feature (1)..(1): n is a, c, g, or t
ntggtaaagacgtggtttcagttcctgggttgggaagctcccctgcaggaggaaatagcaactcactgggctattcttgcctggagaatcccatgggcagaggaacctggcagccacagtccatagcatcacaaagagtcagacacacacacaaaaaccgacttaacaggcatgagataagtcaattttaatgtatcataccttctgaacataaagacacatagagttacatcaaatgtcgcctttattgtgttttatgtataggatccacagtagagagtcaatgcatatttcttggatgaagttaaatgtatacctaggagaatacatgtccattttggagggaggtgtaggcagtggaatcaaaggaaaaatataacctgcaatagattattttgagtcagtgaaatagctagctttaaatatcttgaataatggatgcttgcagcccagttcacattgcttatatattcaagtctacagatttaatattttccaaaagtcatgatggatcaaatatctgaaagaagctatatttttggtgttttccttaatgcatgacaattattcgcttagagaaatgtattctctgattatgtttggttggaatgagaaccactgaaaaaatcaattcttgctgttttctttacatattgataacaacctatagtgtaaattttatgttacaaagtcaagcagtcctggatataatttatcttcttcagaagataaaaaattgataaatatataaaatgtgaagttttaacaacatctattaacattaaaatttttttcatttggatgtctcatcactacttaaaatacttcagttaataaaatagccatattgagtgcttactgatacatatattgctcttgcagaagcttgcaatatattgcttctgttccaagaattcatgattagtaaagattaaaataaacctccattcactcaattagatgattaatatctcaaattaccactcaccagagttactgcattaagcagtatttaataaggactgttatctagggtgtgcagaagtctcaaaactcactttgatcttttgttaatgatcattaagccacattttccttcatgtgactccttaaatttgtaagggtcaacaatacattgttttccattaactaatcatttagttatactctagcaatccatctatgaatatttagcaccatccttatttaaaaaatatatatactatagattttggatttatgtcattctctaacattaaacacaaagtagggcattatataataaaaagaagttttctgctattatcttttatatgatgcttaggtaatttgacactaacccatctgggctccctcctgaaaggcactgtgagccctgctcggtcgccttagtcctgcctgactctctgtggccccatgaatggtagcctgccaggtttttctgttcatgggattttccaggcaagaatcctggagtgggttgccatgtcctcctccaagggatcttcctgacccagggattgaactcgcagctcctgcatctgtctcctacactgcaggggattcttttaccactcagccactgctacagggggaagacccaaaagcactataccggcttctcattgtgcacacaacagaatgcagattcccgctctgggccaccagacactgcatggtgtgaatgctgaccacctactatccccgtcctttcatacactcactgtcatcccttctgtcccaaaacactaactcttagaatatgctttgcttttcccaccaaagaaataggaaagcatgctgaccccctttcttacagctattctcttaattgactgcttcttatctttcagatctcagacacttttttctgtcttgctatgtgttatcctgccaaacttgtcaaagtacctggcacgtagcaggtaaccaaaaaatattcgtggaaggaaggaaagaaagaaatcagaaaggaaaaggggaagaaagcagcagttgccttttgtactgtgagaggttacaaaatacacaaaatcagataattccattctttaaataacccatcataaatgttattatgataatctctaaatagcattttgttgtgatatgcttctacagctaaagactgtgtagcttttaggaacatgttaattacaaaaagacttgaaacatttttttttttaatagactacctcatgcaatttgacatactatagatctctggaaggttcactagagtaatgaaagcaacatcactgtcagcaatcaaagttaggtgcatgtaagtgtacaaatataggctctccttttgcatccttatgtaatatgagcctctataattaggtaatcagtttaagtagtttcctctaatttaattttcttcttcatttcctattaacagattgtcatggttgacttacctgatgtaattaatagcttgggaactacattatgactgctgaaaggcatcattaaaatgaatctttaaatattttcaagctatttaatttcctttcttaaagacaaattgaagagagtagaatcaatttgaaaagaataagagtttcagtacaacattaatatatctatagttattttaattgaccaatctgagaattcattcatttagttatctcacatatttttaatctttagacattatattgttactttgtgtgcttagtcactcagttgtgcccaactctttgtgaccccatggactgtagcccaccaggcttctcagtccatagggattctccaggcaagaatgctgaagtgggttgctatgccttcctccaggggatcttcccaatccagggattgaatccaggtctcctgcattgcaggcagattctttaccatctgagccaccagggaagcccatgaatactggaatgggtagcctatcccttttccagtggatcttcccaacccaggaatcaaaccagggtcttctgtattacaggtgtattctttaccagctgagctacgaggcaagcccattgttactttatttgaagtaattatcatcaaaaaggtggcaaattttataagggaaaataaaagaggaaaatttttaaattttatattttgaaaattttaattttatatgaaattttaaatttcataaaatataaataaaacatcaagataactttgtatttcttaagtattattgactttacaaaatggccttttccacttacctttaatggatataccaaatacaattgtaagggcttacttcatcttagaattgcggttctttatgacttatttattcaaaaaagtatttgagcacctaccatctgacagccactgttctagttaaattaaagaatcattataagataactatgtcatttatttactcagaaaatattatttgagttcttattacatcccagacattactgtacaatctggagcagcagcagtgaataaaacagtctttggcctcatggcaattgcagtcaagtgaaaaaagaaaaaaaagatagatggctacacaggtgttagggaaaattatacatcaggaaaagtggtttagaaagtgcttgagaagacaaggagatgcttggaaaggtgtagatgtctgcacaattttaattatgaattacagtatctaagatggatgttacggatgtaaggacttgagatagaatgaagagatgatatgtagtagattcaggcccttctcactttggagaattactgattcttgggtatttaagggaatagttagaaatctagaggatggtatatagaaatgaggtatttataatttagattatgatattagggtatagctattgatgttagcagtgggcttccctgatagctcagttgttaaagaatatgcctgcaatgtgggagacctagtttcaatctctgggtgggaagatcccctggagaagggaaaggctacccactccagtattctggcttggagaattctaaggacagtccatgggggtcacaaagagtcggacatgccctgagtgactttca

SEQ ID NO: 54616 - DNA, 1232 bp, Bovine  19866881621083
  misc_feature (1)..(1): n is a, c, g, or t
nctatggaatagcaattcattatagtccttaaatgtattaaattatttttaaaatgtacggctgttaaagaagttttagttgaccctaagatcctagaatggtcaatatttctttctaacttaaaatactctaatatcttaactgaaagaaaaaccaaatccaatctgtatactgttctaggctggaagcattctcagcaggaattgtacctctgactttcaccctatcattagagctttacttaatttgcctgatctgtgatcatgattttggcttgcaattagacagatggcattcaattgcacatttaatgttacatcttctaatactgcaatacaaaaatagttatcatgggctgcatatccattttctgtagacacccaggaaaaataactttcacatttcctcttttatcatctacttctgtgcagccagaaggttgcatgtcacgccttaccatctgttgatgtattgcttattaatatatttttgttttaaatcagggaattaatggaaaattctagataataagattctatttaatagcaatttattatcttttttaagaaattaaaatatatctaagactaaaacttcacgaagtattattgacttttttttggtgtttcagaaggatcatcagtattttaagattacttgtattaaaaaaatcttagataaatcccactaagtagaaaatggtaagaattagaggaggatgattcttatttttatgccactgtgttcagcttcccagacataaatgtttacatccttctattgaatgcaatgataataatttgcaattatcaacttaccaattacctttttagtaatatgagccttagaatagccttcaactttccagttcccatgaacaaaatacagattcatttctacctgtgtagttaccatgacacctccatagatgttgttgttcttgtgggaaaaaacctctattcccctgagaaggcttacattcatgtccagttacagaaacaaagtcctaatttaatttattcttttgtgcttcacactgctcttacatttgcaaagcttaaattgctttggtaaggctttgtgttcctgaggttagatgacaggatacccagtttcttttgatattttctcctgttttcatggaactgtatcaaaactaatttgaatgctaaacaaactaaaaccaaactgtgggggtcttgggttctgaaaactgacagaattctcttga

SEQ ID NO: 54617 - DNA, 899 bp, Bovine  19866881787779
  misc_feature (1)..(1): n is a, c, g, or t
ntatttgtggtcccatagactgtaaccttccggctcgtctgtccatggaattttccaggcaaggatactggagcaggctgtcatttccccctcctccaggggaattttagtgacccagggatcaagtccacatctcctctgtctcctgcattggcaggagtgttccttatcactagcgccacccaagaagcccccataaaaccttatggatggaaaaacctgaatgaactttttggccaatccaatgttaatatttttcttgtgttgggatagtaattgtgatcttttccttattatgactggaaagaatctgtgatgacccagattctttatgttactgattatcactgtttttgtcactattaaacaacggtatcttttgaagagcacatagaagttagaatacagatctattccatggaaaaagtcagctcagtgtattaatgagcaagccatacatttttcaaaaaggactgctgacattttctctgaatacctttgtttgtattatggccatactttccatgaagttgagcaaatcttatttttgaagcttgcctgcacaaaattagagaggagcaaatattaattacatacagctattagttggccccaagataatcccctactcattatctcttaggacaaaagtgggcaagatgcatggaactgcaccaaaaatagcagagggagagtttccagtctggggtctttccgtaaactaacgctgtccattacacattttagatgtcgtcttttcagtctactctacctaaagtgcactaccatccaagaagacaagcagtgaaaacctttgtgaagactggattccaaggaaataaccacaagtaatgcttcactaactgaaaatgtgattctggggggagtcagatattaag

SEQ ID NO: 54618 - DNA, 1537 bp, Bovine  19866881034566
  misc_feature (1)..(1): n is a, c, g, or t
ntaaagcaaataatctcctgctcacatatgcctcaagtccaaaacacacttaggtttccattttaaaccagctcacatgaatttgccccatgttccataccaaggggaactttacttagtggctgtttgacaaatgaatgagtgagtgaatgaatggttgaacaatgccaggtataaggaagagatagatggctttcttatggctccagcttcatgtgatgttcttaaattcctccgtacaattagtttcgtgaaccatcaggcagcataaatcttgattggtactaagagaatctgaattactgaaaaatcatctcttcctacaaagttttattagaagtgtgacacttctaataaaggtgtttctgttaattgagcactgagtgagggaaatgcacacagatgcagagaactcaccaggcgagcaggcaagacctggcttctgcacccagtctcatcgctgtcctgggtctctgtccccacccagcgccctgagctctgccggctgtaaggaagaccctgccagcttctcctgtgatcaggctgctgtctcttttctccacccacggtaagccccacccttcaatgtctgggctgcagtctcttctcaccccattcaaaaactgcacagtagcatcgttaagtaagtagtgctgcatgaagacagacacatgtcagtgtcctcagatgtcacgcgctggggcaccacatggttcattccatgtgatctatttctctgacataagcccatctttactatattgacagtatataacttcagtttgctaattgattaagctgtactttctatatgaaaatgtataaaggggggaatatggtggtgtgaatgagctctcttggacacctgaagatgtagcttccaaatttgaactgattaaatggcatctgtatacaaaaaaaaacaaaaacaaaaacaaaaaaccacacacacagtagatggtcctgcttactctgccagcaataaaggaagccacagccgtctgatttcctgggtgcctggcattgtgcttgtcttcccttatgactctctttctggtcaccctttacattccacaaaaacatcccctcctgctgagtcccctgctcagtccgacaccttgtgtatgacacccctgtgttacaggatgctgttctcaactgcattttctggcccttccctaacactgttcaaaaaagtaatgggttggagatttgtgtccagtcctcaaagaacttcccttaaaaagctgcagtaggagaaagcctcattcagtggtgaaaatgatgactagcttggatgatgaccaattcagataattggccatagacctctaatcttgctggcatccctctgtcactcagcagggaaccggccgatcattccatcaatacatttattttgtcagctgtctctgtgtggcgcccacacgtctcagctgggtaacttaggctgagaagtggaaacctgccaatatcagcatcatttcatccctatcacgtgcctttcttgtcatatggatttttcaatgcatttctg

SEQ ID NO: 54619 - DNA, 1307 bp, Bovine  19866881578369
  misc_feature (1)..(1): n is a, c, g, or t
ncaaatggttcctgcacacaggacgtataattatgtcaggaataagcttcactgcccagcccacgggcctactctctcttctcctgcgcctgccccagcacagcgtttctggctttacgattgccctccagagtctgacaactgttgcagcattgtcaactatggatgacccccagcatctcttgactctgaaaatgtgtattagctattgtttacagcccctggacttctttcctttgtattgtcctgttcctctttgtctattatttatcttttttaattcacttccatgactctgatatttggctgatctttatgaaactgacttttatatctgcaacagtttatttctatgatcattatggtataatgatcattaccatataccataatgatcatacattaccttctactacagttcttgctatcctcagagtcgttgtgcttcttcaaaatcctgcgggatttagctctgtataccctacaggtttgttgcatggaattatattttgttgttgctaattttttatgtctagagctttaaagatgttaggaagatagcactgtataagttaagaacaaaagttcaaataagccaagcagcatattttaatttaatgctgggttactcaagatgccaagatattatctctagctaagatgtctgtctcaaagctcctgattcacatagacaactacctactatacacccctaattaaatgtctaagaattatctgaaaattaatatgcccataaactaaagaaacccctgatttctctcttcatctgtttctcttttaaacaccatttattcaaaatagaagtcatcttgatttttctcctctcatctcctccccatacccaattcatgaaggtctatttaattccaatataagttttcaaattaatccacttaactctaactccatttcccctataatgtgctacatgtagtccagagaatccccttaaatgctctccttagattaactcttgcttctcaacaacctgcaactccccaccctcatagtctcattttatctaaatggggctgtccctgccacactactttgtttctgagaatcctgcttgtttttagtacttatcaagaaaatgacttgaagtaacacagcattaatatcataactgatagaacctcataaattgttacaaaaattgttagcttgacttaaaaaaaatctgccacactgcttgcttttaagtccactgaaggcaggagccatttgtatccttggatcacctttttactccagctttactgggatataattgacagataacattg

SEQ ID NO: 54620 - DNA, 789 bp, Bovine  19866880388738
  misc_feature (1)..(1): n is a, c, g, or t
naccctccaaagagaccttctagaagtagccttcaaggtgttcaataatagagaggaggaggctgagagagaaaaagaacgtgacagaaaagctaaatatgcctttttggcagcagcaattaaaggaagagatcagcctggcccaagtcatcccagaacagggcttaagacctgccctccctacccgggccctgcttcctatgcaaccagtcaggacactgggcaaaggcatgcccaaacccacagccccccacaaaaccatgcccaacctgtggccagtggggacactggaagatggactgtccccacctcccagacctggagagtggaatgtccacagggacaccctggtgcctctggggaaattcccacttctccacagaaccccagcccaaccctacaagagttgttccaatgatggggcccgggttccagccccctggccctgtcccaaacacgagctcagaacttagggtagatggggtagtggccagaaaaaagacctcttttatagtagacactggagccactttctcttaatttcctactctggcccaactcaagactcagaactcacaatcaagggggtctctggagttcccgtaaggccaaaaatcagccctccattattctgtcaatttggaaaatcgacccttatacacttattcctcataatgcctcagtgcccgatggcactcctagggagacatttgttatccaaattgggggtctttattaccataccccctgccctcgatacagtctctatattctgcattcagatgacac

SEQ ID NO: 54621 - DNA, 808 bp, Bovine  19866880460865
  misc_feature (1)..(1): n is a, c, g, or t
ntggttctggtgggtgcctgggtacctagtgggcgctaactggatagtggctattttctccctcctgccggctgtgttcctctctaccaagggacagcagtactgccagactggccaggatgtgccccgggcatcaccgatgcagagacaggggtgattggcaggtggatgctttaccactgagccaccctccctcaaaagatgagggctggaacgagagaccaggatcaagataaggaaagagagtggcctataggaaaagtgtgagaaaaatacaggagagatgatctcctgtgtgctggggggggaacagacagcccttggctctgggtcagtgaactcagaggaaaagccctcactgctacccctttaaatacgctaaccccataaactgtgtttactatcagaaccccgtgtgctttcttatagtttagagcctgtgttcaattctttggcctttagatggaagggaccctccgctttcgattgttttttgcttcttggccttgaactgaagaaccagtaataagatgcagtcatatttttctagcccctttactgtcaggcagccaagctctggtgtcgggcctctggttaacgtcccggagatgacggcccacttcacccaggccatatcccgcaccatttatctttgggtttatctgacctctcagaagctactaagctacctgcctatttttaacctgtgcctggagccagctccagaatgaagtggccacatgagccacgatgaggtggtgaccacacagccttccaaatcttcactccactttctcgggcttttctt

SEQ ID NO: 54622 - DNA, 975 bp, Bovine  19866880491909
  misc_feature (1)..(1): n is a, c, g, or t
nctgagagttttctcttcccttgttggccatgctacacagcttgagggatcttagttccctgactaggacttgaaccacagcccccagcagtagaagaccggagtcctaaccacggaccaccacgggatttcctctgagagtgttttaaaatcacacactgacacaatgacgcttaacccacggcaattattattatttaaaaatgtctcccccaaattaatctatttttgcagatctgcagataatttaaaccaccataactttgtctctaccatacagcactctgtatagacctgcttggttcattattgcagcttaaaacaaaaaaacctaaatgaataaaaaaaaattagtgcccaagactccaccttttcacgttgtcagtttcttctttttgctagaggagcccaatgattaaacgtgtacctcactgaattcgcttgctgtttcacaaataaaaggcatggtcttaacagaagccaaaaaactgtttgctatcatgtcacatgagaaaggattaaaacttccaacttcctcgtcatgaggctgttaaaggcaaccgcgggtttaactgagatgaaagttgtgctctaggtcagggggagctggcagggggtaggttgagtttacctgtcagatttttgcctccagactttgagggttgatgtatgggtcaggttttctggtgtctggaagcttgaggccccttcacagagtttctggaccactggtacccttcactctcctggaaaggccctagaaagacagcttgcccacaaggcccccttgtctgtggtgaccctcgcatatccgaggtgcccctttcttcggaggacagagcatctctccttggttggcatgccctccagcctggtgttcggggccatggactggaccagggcccctgggacagagtctctctccctaacacactctgctgggcgtgtgtcccaaggcgggctcggccagcatcg

SEQ ID NO: 54623 - DNA, 1878 bp, Bovine  19866880550519
  misc_feature (1)..(1): n is a, c, g, or t
nctggaataaattgagacaaataaataaactcaaaggcaccacatgcgtttggaatgctctttgccacggtttcctaacatgcttgcagacagctaactctcaaggcaaacagaaagtggcagtgtttacccagcttctatttggagcgtgctaggagcccctgacgcgtagatcgctagctgatggcggaatttgcacacaaattcggaattaatcatcacagtccaccttcccttcccttctctgtattcctcgtttttagtcatccaagctgaacgcagacttgtttggggtacgttggtcctagcttccacctgtctccagaatgcagtacagaggtcatggtgtcctgagagtagggagatgggaagtgagagtgagcccaggttcagggtgcacgcgtgctcagtggtgtcatgaccccatggactgtaggcctccaggtgaccccatggactgtaagccgccaggctcctctgtccatgggattctccaggcaagaatgctggagcgggttgccgtttactactccagtgagcccagcccctttgatgaaaagagcagaccagcaccagccgggcagtctcagtttgctcagctccaggggtgagctgtctggggacactttcttctcctgtgctctagtgaaagaggcagatgtccccgggcccttgtaaggctctaaaatgaatctcttatcttttgaaactttcctctgtagaacttgctcccatgggcagccacatggctctggattcaccagcacctggagccctcccctctcctccaagggaacatcttgtcctcttctacctttgggagaatccacgtgggctctgctcctgcctggtcaggcacagctgtgacagcctcaagaccaccgctcccagcgtgaatatgacgcttcagtggtgctgagatgaaagcccctgacaagaaggggcctcatagctaaagattgaatcttatccatgtctgaagattgacagaaagactcctaattttaaatatatacatttagagggactctcctggtggttcagtggttaagaatccaccttgcaatgcaggggacacaggtttgatcgctggtgggggaattaatatcccacatgcctgggggcaactaagccagcgtgctgcaactattgaaccaactcaaatagagtccgcgcaccgcaacaaagatcccacgtgccacagctaagacccaatgcagccaaataaataaataatttctaaatatatatgcggatgtatatctacagatttatagtatgtatttaaaaaaaccagccaggaaatcaagtcaatcctaaaggaaatcaactctgaatattcattggaaggactgatgctgaagttgaagctctaatactttggctacctgatgagaagaggcgactcattggaaaagaccctgatgctgggaaagattgagggtgggagaagagagcaacagaggatgagatggttggatgcaatcattggctcagtggacatgagtttgagcgcactccaaagtgtgctgagcacactctccctgcctgtaacagctccctagttccccaggagatggtgaaggacagagaaacctggcatgctgcagtccatggcatcttaaacagctggacacaacttaccagctgaacaacaacaaatacacatttataaatatttataaatagcacctcatactttctgtgattccaatagcttcatacaataaactgcaagctggctgcacccccaacagggctcccacatctaatactccacgggcatctgtctgtgtcttcgctctctttagaccttccttgtcggccgagcacactctcccggcctctacagcaccctagtttcccagtgaggaatca

SEQ ID NO: 54624 - DNA, 1334 bp, Bovine  19866880574563
  misc_feature (1)..(1): n is a, c, g, or t
ncttgcatgctaacccaaagtagaagattagcctgcttgcatgcagccggatactgccctacgagacaagcatgtgtgggaggttgacgcggctcagccctcccttggctgaattcctcccatcctgtctgtggcctcattcactgtggtacgtgcgtaataccatcgtcagtttcactaaccccagtgctcattctgcggtttagccatctgctgaaagacgcattcaccgagtcacctaaacctgttgtctttctgatttctttagatattaggttgaaaaagcttgttgatgaacgggaatgcttattggaacaggtaacaatcttttttattacttttcaagttctggaatgggaaacctgaaactgggaccctccccactccagcttcttgcttcatcaggaaacccctaatgcatcatgcctgaagatatcatcaagccaaccagtgttcttaatgtttttatccaagtgagacatcagaagtcatactggacttaggatgtcccagagattcaaggccatgttctgaatttggcacactctacatgaattgctgcttaaataaaagatttgggtaaaagaccttgaataaacattgagaggcaagggtgttcctgagacattccaacacccttcctcatctgcctgcccataaaggtcagttttggggcttccctggtggtccagtcgttaagaatccaccttccaatgcaaggggtgcactatgaatcccgggtcggggaattaaggtcccacatgcaaaaaaaaaaaatttttttttaagtcggttttgtaatctctcagtgatcagcacccctgtccggcagatatttcttgcttatagctgatccaagttattttcagtgctgtttacctaccttgatctcttctgcctcaggaaatccgacacagttgtacgctttggtctttttcatagtgggatagtgaaagctgctcagtcgtgtccaactctttgtggccccatggactatacagtccatgggattctccaggccagaatactagagtgggtagccttcctttctccaggggatcttcccaaccctggggaagacctgggtcaagcccaggtctcccacattccagacagattctttgtcaactgagctaccagggaaaccctttttcatatgcaaggtagtattattaagaaattattccacaatcactttcttaggaaactcgattctcctcattttccctcgtaagcctaatcaaaggtatctgcctcacttttttcaagttttgaagatttctctcaaaattgggtaaaccactaaatgtggtgagaggattctcttgaagtgt

SEQ ID NO: 54625 - DNA, 2235 bp, Bovine  19866880580794
  misc_feature (1)..(1): n is a, c, g, or t
natttttaaactgctgaagtcttgcctattccaaagatgctaacacctctctggctcaccagcccagactttggagagatacctggcaccttgcacaattaagtggctgcacaacttccttctgagaaattagactcttttcctttctaactaaagaccaaaccacagagcccacttgaagcacaactgcactgaaatgtcagattacaaaagccacccatcaccacaatggcccccatacagcatggaccccctcctgctgtgggctgctcacaacacagtgctccagccgctcccacactgcccacccctgggacctgcacagtgtccatggtgggggctgtgcattccgatccagccctgggaccccagcccctgggtctgagctcggcacacacagagtgcttgggagacgcttgacaagcaagcacacttccagcagagcggcagtggttgcagtgtggacaccctgagacatgagaagcctggctcttcacacagctggtgaccaagcagttccaaaggtgtagtggactgaactgagtcccctgcccacgttcatacggtgaagccttaaactcacgtgatggtattagggttaaatgaggtcatgtggggtggggccctcatgataagattagtgcccttatgggaaaagacccaggtgcttacaagccaggaagccctccctaggaactgaatctgccactgccttggccttggccttccccgtgtccaggcccccagccccggctgtggtgttctatcatggcagcctgagctgactaagaccaagcccaatcacagatgcaatggttctgggcagaagccagttccgagccctgtcaggaaacccaggcaggacagctgtgccctctgacccaggcagagctggcagctgctgcccagaagacttgattacctcttcttacctcaatcacccctacttcttaggtttctcaatctaggactttatctcttagcttcctgtctgtctttacgccttgagtgcctcttctgcattgccagcatccacgaacagtgcccttatgggcagacacctgccccaagggcatcatcccacccccagagatggcactgctacagctgaggccaagcgcccaccgagccactcccactcagtctaagggccctccagcagcacagtgcagaaagcaggcccacaggagaggagtcaggctgcgccacactctggggcagcaatgatgaaaccccgaaaaccagcacggagtctgcagcagagactgctctggatgggggtggagccccacaccgtgcgaccacccactctcaacatgagcagacaaagctgactggaaccttcattcctcttgcacagatcctccccacccccactggccccgcctcccccagatctggggctatatggggctatttggcaagcctgagggggctgccacattcccaggcggtttcactggtgtttaaaaccctgtaagaaagtgttaaaggggagccgtgggccaccacctcactccgccttagtagggctcctcctctctgggccactgccctagttttttttttttaacacattttgtaacacacagcccacaacttcacacgctgctaaatgctctggacactctgccagcatggccagccaaccccgagaccacctccagagtcctgggcagggctggcaaggacaagaaagctctggagaacaacaaatgcttctctctcgcccattcttccagggagcgccctggaccagagccctccctacaccaccacagcactggactactcgggtgggcacagacgtgctcaaccagggaggctacacgtggcccctgtggggacgcctgcaccttgggtgtgggaagcccacgcaggtgggcagccaggccccttggttcagcagaccaggccaggagcacagagagccgccacagccacggcaacaacaacaccacggccacgtggggcacagggctgaggggacaaaggctgcagaatcagtccctgtagttcctgactccagacctggccctgaactcagccaactcaactccaaatctccacagttagcaaatgcttccgaccagcctgcctggagcccctagaggtattcagggggtcactaacaagaggctgggacacaccgggcactaagataaatctttgtcaagtgaataagtcagaggacagggagacataccgacatgttcccatcatgtgaaaagtaag

SEQ ID NO: 54626 - DNA, 2213 bp, Bovine  19866880599773
  misc_feature (1)..(1): n is a, c, g, or t
ngcagtgccgaagaatgctcagactaccgcacagttgcactcatttcgtatactagcaaggtaatgttcaaaataccgcaagcgaggcttcagaagtatgtgaactgatgacttatagatgttcaagctggatttagaaaaggcagagaaaccagagatcaaattgccagcatctctggaacatctgctttactgactacactaacacctttgactatgtggatcacaacaaactgtagaaaattcttcaagagaagggaattccagccaccttacccgcctcagagaaacgtgtatgcaggtcaagaagtgaccgaaccagacgtggaacaatggacgggctccgaatcgggaaaggagtccgtcaaggctggatattgtcaccctgcttatttaacttctatgcagagtacatcttgtgaaatgccagacgggatgaagcacaagctggaattaagattgctggagaaatagcaatcacctcagatatgcagatgacaccacccttatggcagaaagtgaagaggaactaaagagcctcttgatgaaggtgaaagaggagagtgaaaagcctggcttaaaactcaacattcagaaaactaagatcatgcatctggtcccatcctttcatggcaaatagatggggaaacaatggaaacagtgacagacttattttcctgagctccagtatcacttcagatggtgacagcagccatgaaatcaaaagacacttgctccttggaataaaagctgtgacacacctagacagtgtaataaaaagcagagtcatcgcttcgccaacaaaggtccatatagtcaaagctacggttttccagtaatcatgcacagatgtgagagttggaccataaagaaagctgagcaccaaagaattgatgtttttgtaatgctgtagaagactcttgagagtcccttggactgcatggagatcaaaccagtcaatcctaaaggaaatcagtcctgaatattctttggaaggactgatgctgaagctccaatactttggccacctgaggtgaagaactgactcattggaaaagaccctgatgctgggaaggattgaaggtgggaggagaaggggactacagaggatgagatgtttggatggcatcactgactcaatggatgtgagtttgagcaagctttgggagatggtgatggacagggaagcctggtgtgctgcagttcatggggttgcaactggacttagcacctcaagaacagcagtcccccaaaaaatgcttgggttgagatacttgggtgtttatttgtaaacacactgcccacgagcgggtacacctcccaaagctagatctgtcattagctggtctgcttgtggccgtgctcgtagcatggcatggttccgtgagtgcttgcccgtgaactggacctcacctcagtcaggactgctcggtggcaggtaaacctgctttgcaccctgactttcagttctcctgctccagcctcatccgtgggaaataaaagcacgttccggggtcagccacgtgatgggtggagtaacgggactttctctttcagactcttttactcaagaatgcatggaggagaagtctttcttctgccgagtcaggtgagcccagctcctgaaggtggggaaggtgcgggagtgccctcgccctgccgcctgcccaggccccattctctggggtggaggctcagcaggggcacctctgccgcatggcacgcatgtcctgaaaagtccgcgtgaagacacgtttccataggccaagccgttctgttttgtttcatttttggtcgtgctgctcagcttgcgcgacctcagttccccgcccagggatcgagcctgggctcgggcagtgcgagcactaagtcctaatcactggcctgccagggaagtcccgagccacattttaaatgtgcctggggagttaggagagatgggtcaacagtggggtgactgacctgctcctcgtgaagaacgtcagcctgggcagcccagacttacagtccgtcacctgggaaattggccagctcccccgcttcggaaagacatgaaccccaggttctgtgaggactccagaagcttgcgtagcctttggtctgagtgtgttttctcagggagagcccatagctttccccacaggtctgtgaggaccccagaagctcatgtagcctttggtctgagtgtgttttctcagggagagcccacaggt

SEQ ID NO: 54627 - DNA, 1598 bp, Bovine  19866880661345
  misc_feature (1)..(1): n is a, c, g, or t
nctatgattccttggcattagaaaaaagagctaatgataaagaaatcagcaatattgccaaaatagatttattggagccgtcttttaccatgagtccagatactaaccatagagagtgctcactctccagtcaagtgaatttgaagataatatcgactctgctttcctgaatgaaacctaccactatacattattcagagtcaaaactaaagagtgaaagtcttattcatttaaattcagagttagattctgaaatgcagaaaagagaagaggtgttttttgatattttggaacatcaaggtgataagactactgacttggaaagaatctacaagatttcatatgatgattataaaaaaactgctgaagatgtgcaaaagcctgatatagatgaagactcacagcaggaatatcacagtgcagaagaacaagagtgtataaataaccatttatcatttgaccaggcaaaaacattagacatacctaatctggaagttttgggattaagaaattcaggctgtgaagttaaatgtgttagcaatctagaagacagtcatgttaaattggaaagtaattccagcatctctttagattcagttgatgtttatggacaagaagattcacctagtgtctccaaacttcagaattctgttacgttaagagcatttcatgaacctaaatatgaaaagtgtaaggaacaagggactagtttaatgcttcacactgtattggatgaaattatactcaggagagtcatcttgaacacaaggaatctgaatctaagggtttcctaaaccctcaaaaagcattaaaaactaaaatttatactcacaaagtgaaccctcaattaactgaaagtaaagattctattggaaatgtaattgttgaggacaaaatgttacagcaccttgataatccaggcacattgcctcaggacaaacatttagagacattactccagccttgtaaagattgtcagacttcctctgtttttgatgattcagtaatttctgcctctgggtattcacattatgaaagcctacaaagcacccctaacccagccttagatgtttctattactctaccaaggtctgcaatcagaggtaatcaggcagtagaagaaagtggctccctaaaagtcgctaatggcaataccatcagtaaagcacactttcacaatatggaaggaccgtgtcccaaatcagagacagatgcagcaggttgtacagtcacagttgatcagacggtggatgttagcactgacttcagggcttgtttcacagcaagcagggcaacaagtgcaagatcgtctgtagtatccacatcaagcaacacagagataacaatgatgaataaaaaacggcctagtgaatggcaaagtgagaaacaaagaagtgtggcttgtaacacagattggtcatacattcaagatactgaagacccacagatggctatgacaaaagggcccacagggaaatctctctctgttgacaatttaaaacctaatggaaatgtcctaaataaggtaaaaccaatatgattaataataaaaaatgtatatatagacttcataaagctactgtatgctaatgtaaaca

SEQ ID NO: 54628 - DNA, 853 bp, Bovine  19866880682668
  misc_feature (1)..(1): n is a, c, g, or t
ngagcgcctctgcctccgtggtctcagtgccccaagccggtcagcagctgtgatcagagcccctcggacagcgcccggtgggccgatcctgccctcagcccccgaccagcccctcgacggcctgagccggccctctcctcaccttggagctggggtccccggatggagaagttacaggtgttggggagccgctcggcgcctggaaactggctgttcagatggattctctcaccaaattcagcctgaaaaacgcacaaaatgtgtcatgtcttcgaagcccccctcctcacaactgtttgaacttcagactttctggaaaacaaagcctcgccctcaacacacagagtgattgttctttcttgttgtttagtagctcagtcctctccgactctgtgggaccccatggactgtagcccgccaggctcctctctccctgggattctccaggcaaggatactggaatgggttgccatttccttctccagggggtcctcccgacccggggatggaaccccatcccctgtactggcaggcgggttcttttaccatggagccccagggaagccccacagaattattattttatctgtaagcatctccttataatactcagggagactgagtgtgaaaggcaaggtaaattggaagagaaagattctgagcacacttgggtcttccagaagcatcaggtgtcttgtccctggtgtttcggtcccgcgtccaccccccgggctccgggcacttaccgccagcctctcctccaggtagtcgcgcacgccccgcatgtgggcctcgtaggcctcgccgttctccgccaccagctcggccgcctgcggacacaggagggtgtggg

SEQ ID NO: 54629 - DNA, 993 bp, Bovine  19866880695966
  misc_feature (1)..(1): n is a, c, g, or t
ngccctcccggttccccctaggttcctcagcgtcagccttcctcccggggcttcatggatgtctccagctcttgctgtgtccagggccctcccgttccccctaggcttcctcagcatcagccttcctcctgggggcttcatggatgtctccagctcttgctgtgtccagggccctcccggagaaggcgctggaggggaaacagaggcattggttgtgcctcccgaccccagcccccactttgtttgcaggcagagcacgaagggttaatgcacccctgacttgggccgcaggagacaggacaggcgatgctgatgacaggccagggtcacgggcagctccccgccccccatcttgtgtacagcacagggcgccaagaatggacgccctacggggacccagcgcctcagatgacaggtcagtttgggaaactcgaaaccaggggctcaacagatcctcatcgtcggattgctccccagtggggcagtttttaaaaatacactgcctgtttctttttaggatggtaaaaataacatatgttcatggtgggagatttggaaaacacagaaagacacgaagcagaaaactggcaacagacaatccccacgagcacacgggtgtcaggaccgtggcgaggcctgtgttctgtttcatcacagtactctgtggcaagcatttctgatgtgatgaggcatttctgatgtgatgagtctttggacctgtgatttttaattccaccataatggggacacatcatgctttaagaaggtggaagtgacacccgatcacttctagtaatggacgtgcaggttgggagccatgcggactgtggtgacacaggcgtcacctctgtgccttgccccggaacagatggggagtgtgagatgaccgcggtaaagcacacaatcatctttacagcctgatgcgtggacagagggtcgtccagctcgggtgaccgaggcacttacctgcaggaggtaagactgccccctacg

SEQ ID NO: 54630 - DNA, 1374 bp, Bovine  19866880708188
  misc_feature (1)..(1): n is a, c, g, or t
natctgcagaaagtctgtaaccccaaattaataaccgtttcctcagtgtactattaccccagaagaagctatagagaccatttagggaagagtatttttagtagcatatttggggttcttccagaagacccagcctccccttcatttaaggagttgtaggtctctactctgacacaagtctgggaattgattgagaagtcatgactatctgtatgattcaggtaagagttttgttcacttgacctagaacttttctgcttttggtagcctaatacattttccaaatgttccttggaaatcctaaaagaatatgtcttatctgtttaaataatgggcttgcaagttggcttcgtggtagagaatccacctgccaatgcaggaggtgcaggagacatgcatttgatccctgggtcgggaagatctcctaggggaggaaatggcaacccactccagtattcttgcttgggaaatccaatggacagaggagcctggcgggctacagtccatgggggtcacagagttagaaacgactgagtgactgatcatgcatgcacgcgtgatatttaaatgatataatcttttattgtagttctctgttcatatctttaaaaaaattattcaaatgtcttactgttttattagcccctgatgttagaatctttgactatgattactactctgtcaaattcttgtttttctaatagtttttaaaatatgtgctgagtatcatagttcaatatttatacctcttctaggatatacatccttgagtgatgcaagccactgcagtggttgagacagcttctaataaaggctacaacaataatggaagaaacattcagaaaggtaagaggcgttacctttggttggctttattaatagttccctcctcagtgttgctatatgttaagccttcctacaagtaagatgagattcagcatgtttttaacttgacggatcactcaggtgatttctggcaaatgtgagcaacctaaacaggatctctcaggtagatggaaaatttaagaaatagaagtgagctagaagagaggatttatgtccagccaggctttcaggaactactgacaggtacagttaccttcagggtaataagtggaaagtggacccaaggaaagattttttctttatatcgatctaaaatttctttttctgtcgtaaaggtagaagagaaaataacaagggcatataaagcaagttgattaagctttaagtgtttatgaatacatgtagttttaactgttaagaggacttatgataaaaattctttttcaagtcagaagggaaagagtggatttttcagcaaatagtaacccttagtcattctacttagtcagcctgagttcttatagcaca

SEQ ID NO: 54631 - DNA, 1199 bp, Bovine  19866880815237
  misc_feature (1)..(1): n is a, c, g, or t
nccctagcgccatccccggagccccacctgtcccggggaccccctttccctcagtggcttccatgtcccccacccgaggacagagggcttgcacagggtacaaggcagcttggggcccaggctctcagagcccgaggtgggttccaggtgggtgcccacccacgctggtgtgcgtcaccatcacacccaggcggtccagggctgggacactgcgtgcgtgctaagtcgctcggtcgtgtccgactctgcgaccccaaggactgcagcccgccaggttcctctgttcatggaactctccaagcaagaatgctggagtgggttgccatgccctcctccaggggatcttcccagcccagggatggagcccccgtctctctgcattggcaggcgggttcttttccactagcgccatatgggaggggcggggtgaggggctgcctagaagtccccccgagaatgactttctccatcccaggaagggcctccgccgtgtgaagggcctggagatggcagcctcccgggacccccacaggcacctctccagtcaccctgggctctgaagggctcagagcagctgggcctcaccgggaggccccatcacccactccgaagtcaggcatccctggtccaggagcccactcccatgccacttcttggcgagtggccttggacagacactctcccttctctgagctctgctgccctctctgtaaaatggggcacatccctgcctctcaggcttcccaggtggctcggtgggcagagcatctgcctgcaaggcaggagatgctggtttgaaccctgggtcagaaacatcccctggaggagggcatgacaactcgcttgagtattcttgcctggaaaaccgcataaacagggaagcctggtgtgctgcagtctgtggggtctcaaagagtcgggcacaactgaagccacggaccacacacgcatgcccgcatgtacctgcctctccgagctgtgcccacctccccctgcccttgtccccctgggcgcccagggcagcccctgcagcctctgcagagcctcagaccctgtgttttcaggaaccttccttcgtcctaggcccctgcagccctaacgctacccttggccccgcaggcaccactctggatgtggtggaggtggagagctttgaccccttcacggacacctggacgcccatccgcccagccctcaag

SEQ ID NO: 54632 - DNA, 2119 bp, Bovine  19866880821582
  misc_feature (1)..(1): n is a, c, g, or t
ngacaggacccagaggcagggcctgaggatgagatcacagcaagggagcacacagcacgctggagacatgccccacatggagcagccgggctccccgggtcacacggccaccagggttgggcgaggacgccagcaccagagccctgcaagctgacctcactgccctgccagagaatgtgcgggacacaagacaagacacagcccacaggctaaactgatttgaaaaccacctcccacccccaccctacacaacctctctggttctctacattagtgaccagcaagctctagaagcaggaaatggctggttcccagccatctgcccctggaagggcagggccccgggcaccacggataaaaggctccaggcacgcgctcctgcgcacatcgttttggtaaagaggatgctgagggaactgcctggcagtccagtggttaggactccacactttcactgccagggcctgggactgatcctggccagggaactaagatcccataagccacgtgcatgcagccaaaaacagtagaaaagaaaaaccacaagaaaggacacttaaatgtaagtgggcggtcttctgaagcctgccatccgcattatcctcccactgtgaattccattaatcatagtttccccttttatctaaaatcagccacgtggcaggagtgtgcctcattaaaataagaggggatggggtaaaggtccttagaggggccgtcctaggtggattgcagaggccaggctgggatgggggagccgagagaccgctccaaggcctcccaactccaggcccagcctcagagtgtcctctcaggggaagtaacgggtgggaagcccagcctcagagtgtcctctcgggggaggtgacccctgggaagcccagcttcaggcagcactcagagcacaggagatggaagcggacagaactcacctgagacatatctcaccagtctcggtgatgttggggtgccagatcctggtcaagcatttcactttgggaggctgcaacacagaaggaagagatcacaggcgctccagaccttctgtgtcccccatccagcgccgttttaccgcgcactcccggatcatcaggcagcggccccagaccctatagcagtgtctgcacactgcatgcagtgctggtctcgctgggggcggctgctgtccctgcacaggacccctccgcaccctggggctgacagcagatggtgctggccgccaggctcctgccccctgcccctccctaggctccggctgtcagggagcagccgcagaggcctggggaaggagctctgtacccccagaccctgctgtgaaccaggagcccctagactccttcgcacttcgtggctgagcggctgaagctctgctccccacagcagcgctggcaccctctgtggggtgtttctgaagacactactgtcattttccatgtctagatgcaagtccttgtccactaatacttagggagagagaacgaaaaggatcacgtgggaataagacacatcaacatcacttagcatggagcgtgtttgggtaacgttcttttaatcttactctattttaaaaccgatcacactcatctaaaaaaaatagcaaaaacaaaaaggaaagatactaatatgtgtgtagacagagatatagcactctacctggaataatttctattaatatctgatgcgtattctggagcctctttttgaggccatgcacacaggtgtgtgtggtgcacagtcgtttttctttctagaagtagggagacgtgctgtacattttccacatttattcttgtctccgatgcctttgggcgtccatgcattccatggcacaaacactagcatttagcaagcccagaagcttaggttcttcccacttctactacaaaaccgctaaatcaatgctatcttcactcacaccggaatgaaatacttcactgggataagaccaggaactgggcagggggttctggccagagcgctgctgcggagccagtgccaagcgccctcgcctccagggaggtcgcacgcccacccctgactccagtgggtagccccttccccaggcccagtccactgcaaggtcacccttggtttgaggagcatgacagttgtctctcag

SEQ ID NO: 54633 - DNA, 2838 bp, Bovine  19866880897927
  misc_feature (1)..(1): n is a, c, g, or t
nctgctgcggctgtggagaaggacagctttggggccagcctgcccgaggccacccctcccgaggagctggcctgcagggacccgccgggccggctcctaccagcagatcagctgcctggacagcgtgcatcaggtgcggcccttctggcctccctccccgccagcggcacccacagtcgggctctcggttacatgaagccctttccgacctgcccgcaggtacctggagagctgcagcgaggcagccaccctgaagaggaagtgtgagttccctgcgagcctccccacgccccaggccagcgacaaacgccaggccctcgcgggccctgggccacacgccacaggtactgcgtctgcttgagctgtgaccgcctggccgcttacccctctctcaggaccaggccttacctgggagcccggggcctcttctccctcccactgtggttctgagcgggatcagggacacgtgtagggggtcagctgttgattaaataaccaaagtggctcagaaccttctcaccagcgggaggtagaggtgattctggacttagaggacaggatgccccggggctgccggaagccagggtgttatcgggcgggcccgtttccgagacgtctcagaggaggactggcctctgggtgtcagcggcccaggagtcagaggagattggatgtgcagttatctccagtggccctcaccaggaccacaggcagggtctccaccgctgatggaagcccgggcgacgggtggagcttaccctagcccacggggggagcccagctgctcgcctgccctcagcagaggggccctggccgcagggggcagctccccacaggccccgccagaggccccgaagcccaggcgcctggctcctcccagaggacgcggggtaccagggtgccatggtccccattcagagtctcatcttttctgccgtcccctgaggacacggcatcccctggcagggcgagtgtggacttgagcccccgggtcctggagtgcccctcagccggcctccgtgcttcttctcccagcagctcagctttatcgcggttttgtgtctgcttccttttttctcctgtaaagaggcagcatcgccctcgccagtgaagagccgcacggacgcgagcgcacgcctgctgtcgcccccgctgcccggcagggcgcagagcgtggcgtccctcggcagccagtgcagctacagcagcaccatcgtccacgtgggcgacaagaagctgccgccggagctcggtacgcgcgccgcgtccggggcctcggcgggagcggtctgactctgacagtagagactcggagtgttgccgcctgtccccggatgctctctaagtgtatctgagtgcagaacacccacgtagcccagtaaggggctgtccaggaagtccaggcacgtgccgtgtagggtggaggtggtgacacttgcccccgcccccgccacactccggctccccctgggacaggcgtccactcaggtgtcaacacggaggggcttcctgggaccgagcagggatgccaggactcccccttgcctggtgccgagagaaccccagggacgaggccccccggcctctcgacgcccatgggtggggtggcgagcctggccctcccctgttggaggacaggagccaaaacaggacagccaagggcgacacgctgagctgtccttcaggcccctagaggagaaccagcctgaacttgttctttgcttggaagaagggcgtgatgagggggagagtccacgtcagagggtcagtggccggcccctctcaggatggcccgcagacccacagccccgtcccgcctgtccccgcggttctgctgaccacactgttgggcccatggtcctaggccaggacagggccgggcacgtcctgtgctctgaaagcccaagacatcctggaggggcttcagcgtcagaggctgaaaccccaggtgcccccaggttggaggacggatcagttagagggcgggttccggagcccccacgtgacgcggctgcgtgtccccgcctgttgcctttcttggtagccttctcagaaagctgagcagacgcgtctcgaacgtcagcccctgctgtgggcgtcgtgcgggagtcttctgtgggagactctgtcctttgtgggagcggtgcgcgttttttcagctgtcctcgggcagcagggcccctgtggatgagagctccgcgtctgctgttccagagccgctgggagatgctgctgcaagcaggcccgagtctctggagtgcccggcgggccccgcgctgccctgcggcctcagccagggaccaggaggccttccggaagctgggcctcaccaaggaggtgctggccgcccacacccagaaggaggaacagagcttcctgctgcggttccgggaaatcaggaaactccacgttttccagtctcgctgccatcattatctgcaagaaaggtccaaggggcacttgagcaacagaagtaagtggtgacgtctgaacgaaaagtgggttttgtcgttgttgtttttaacttagttcttaacgctgctgcatcccatgctgctttcagatggggagcacccctggtcaggacacatgcgtttgtaagatgctgttggagcttgagcagtgacactctcggggatgtcacctgcgttcccaagggaaccgtgctataaacagtggtgacaggcccagttcacccctgtggagcacagggccaggtgactgccctcctgccttgccaggcgttctctgcctgggtgaccccagcccccttccctccctcagagaaccaggtgggcgaattcaccacccagggaaggagcatctgacgtcaggctc

SEQ ID NO: 54634 - DNA, 1538 bp, Bovine  19866880922537
  misc_feature (1)..(1): n is a, c, g, or t
ntgaagtagtttgaagaaagatacctcttgtccacctgtttctgagctacttgagaataaggccctgtgcctggtgggagaaggacggggcccatggggtccaggggcatgcgtcgagggtgtgggcactgaggtggcagcgagggcccaggaggccagtgctgctgggggcgcctttccacaccctccgtgcctgcctcagagcacgtttccacccgctcctccagctccccagctgacgcctcaggagagtcttgttgccacatgagagcaggccccgtgttgtccctgctgtgcagcagagcagagcccccctccggggtctttcacctccgcggaaggggctggcgggccctcacaggccccaggcacaaaccacgtacctgcaaatgctcgctgagtgagtgcccagtcagaggaggaaaaccaggatgcgggtgttaaaacggggaaagagacgagcaggagaactggaactgtcccaccctctccatccctgtcagagagactccccttgggaagtctggggggactttgaaagggatggaggcctcttctccagcagtgaaagtgggtggctgtcctcccttcacgtaggcagtgagcacttgacgttcctgaagtccaagcatccgtccagtttggggaacggattgaggcctgcggtgcctgacacttaccgtgtatttatcgtaccacctgatagatctcctcggtgatcttcctggagtttgtctgagaagctgggattgggttcatccgtagcttaggtgaacagtgcagtctcagctctgatgtgtaccgtctcactcaagatatttttaagtagctttaaccttgatcttgtagacgttaaattggttttaaaatgtttaggttttgactacgttggctaaatatattttacctccattgccaggctattttgtaaagtttgctgctaaaacccatttatgtttttctccatgttgtaggtttattttgctggcctgtgatggcctcttcaaggtctttaccccagaagaagccgtgaacttcatcttgtcctgcctggaggtgagcactctcagaaggagtgggtgcctgttgttccggctgcccttgggcttcagagaagtcctgggcccccttcccgccttgtccctgtgcagccccggggcccccttccccccgtgtccccgtgcagccccgggccccttccccaccgtgtccccgtgcagccccgggccccttcgccccgtgtccccgtgcagccccgggccccttccccccgtgtccccgtgcagttccaggccccctacctcccatgtccccagaggggagtgggacctccatccagggcactcaccgctcagtttctcccatgcccccgccacggggactgggagcagtcgtccctcgtgggggggcatctcaggagtggtggggcgcggggtccctgttcaccagcacccctttcccaccctgtaggacgagaagatccaaaggcgggaagggaagcccactgtggatgcccgctacgaagccgcctgcaacag

SEQ ID NO: 54635 - DNA, 1236 bp, Bovine  19866880948445
  misc_feature (1)..(1): n is a, c, g, or t
ngtgatgcaaccccttccctgtccttagggcttgagtcacatgccccgagctgggacagtgacaggcccagaaacgccccccgcccccagcaggctgcgtgctgaccagtcctgacgtggtggagctccaggaggcaacttccagggagaggcctccggccctgtgggcggcaggccccggacagtctgggctccgggcaaggctgccagctgggaaggaaactggctcaagagggcttggatgaggtcatgggcactgactcgggcagctgatggaaggaccctgggatcttggagccggccaggctcacgggtctcgcggccactctgcagggacccagggccttctttcaggagccggtgtggtgtgatggggatggggcttctgtgacggagggacgtgggtcggagggagaggcctcagagtgcccagggcatccccacacctccctgggtgctggaccctgcaaggcctcccccagtggttcctctccacgagtactggtgaccccagttcaccgtcccacgcagccttcgtgggaacacccggcaggaggactctgtccagggtggactgtgtgctgggccagccctcccactggcccaggagtctgtggagggactcagaccccagtttggcttgaaacagaaacaggtggaaccacattgatctgggggcctgggagatgggctgcggcagtgtgggtgggcgtcgggccactgccctggctgatggaggtctccagcctccagcagctctcaaaaagagccctgcctccaaggccagaacccatccctggaagcgcctgaagcccctctgtttcctgaccatcacagcccagcctctggaaaccctgccccctggcgtccccccggaggctgaggtaataggctttgccttcagcccacgggaaatggcagggggcaacgggaacaagggctctggggaggcccctcctggggagtgatcggggctggctgccactgtgacttgtcttcagtgggggcatccccaagcggggcgtcgtggttcccaaagtgatgctgagagcagaggtgcaggcctgagcctccaggcaccgcccacaggcatcttcagagaaaagaaactccaagcaccctccccagagccctcccctccctgcctggaggccccacccacactgagggcagctctgaaggccccaaccccctggtaacccccaactggaccacccgcttctgcagccagaaagg

SEQ ID NO: 54636 - DNA, 1027 bp, Bovine  19866880952197
  misc_feature (1)..(1): n is a, c, g, or t
ngtgttgagggggatggagcagggcctgggtgcgggcactcactccaccctaaaaactgtcaggtccaagaatggacaacgttccaaacagaggttaaaggtgaatcctccaatctaaaaaagtggtacaaacgaccttatgtacaaagcagaagcagactcacagatgtggaatacaagcctttggttactggcggggaaagctgggcagagggataaactgcgagtttgggcctggcatatacacaccactacccatgacacagataactgacaaggacctcctgtggagcacagggactccactcgacaccgcgtaatgaccttatgggaagaatctaacaaagagcagatacatgtatacgcgtaactggttcactttgctgtgcagcagaaacggacaccacatcgtaaaccaactgtactctaataaaagttaaaaaaaaagttaactgggacaaataaaaaaaaataaaagagtgaatccttcccatttttaaatcgtaaaaaacaacacatccatgcacccggctgcctttcttccccaccacacaaagctccccttcccgggaaggcctgtcagtggcttccgagacggtccttcagaagcctgagcagggcaattccgatctcactgagccgtccttttctaaatttggaagcgtcttccccaatcctatgttttaaactgagacctggactaagtcatggaatgccttctggcttgctcctgggttcaggcatctggaggctggggtgggggggtcttcttgggggtcagaagatcagggtctgagggcaggaggcagggaaggaagggaggggacaggggccagagagagagagacccactcaccactgggctggcccgcgcagagctggctctggaggaggcgcgggagctggacttgaagtggccgctgagctccgaagcctgcccacccagctggccgcgggacacagagacagaaacagaggaacaggtcagtgaggaggaggggggccacatgacagacgccccggttag

SEQ ID NO: 54637 - DNA, 2134 bp, Bovine  19866880962716
  misc_feature (1)..(1): n is a, c, g, or t
ncgcggagggacagatggagcccagcagtgctggaggctttcagtggaagcatggagtagctttgaatgagcagtagttgttcctgagagtcatcttttccctaaattgtaaaccttaaagtaagtgtagcaaggatgcagtagttgagattcttcgctgagacattaaacttagatggtacgtgtcaatctttggcattgataaatgagttagtgaacgtttttgtgccagaaacttctgtctttcgggccatctctgtgggacaggttcccagctgtgattcctggcacgagggctggtatggacgtcctgaggtttcagctgctgtgggcactgtcccagtcttctcccttatactttcttccgggatttgttttgagcctttgctgattttcatagacagaaagcactcagagtctgagtgctcttaattcgcgtgaactcctttaacattagggacatctgccagtttttttggcttccctggtagctcagttggtaaagaatctgcctgcaatgttggagagcccagttcaattcctgtgtcgggaagatcccctggagaagggataagctacccactccagtattatggcctggagaattccatgaactgtatagttgccagtttttaaataagtatctgtttcttgtatcttttcaggtttttaattctgattatgtttggtttctgacttgcctaggtgttaaatttttatgcactgggatttttatgccgtaccagtctgtttgtgtggtctgcccagagttttgagatatgaagatctttgtccccatggtcgctctccgggtgccccagggtcgcccctgactggcggtgccttcttgcctgctctgtactctccccgcaggccttttggggtctggagtctgctgtttctgtttccgttttactcttctgtttcactgtcagtgccctgtcatttttcttttcaaaaaaaaatacaaagccattttatttgcttattattgcagagacattttccagtcatttgagttccatgagtcagagattcccacctcccatgaagcagacttgtcaggaggtgcctgcacttgggtgaagcctaggctttgttcctgggacgcctggatcctgctgctttcaagtcagacggggggtttcctctccagagacctgtgtgcggtgcttgggtgtgtccaccagtcagggatcgctcagttgttttgttttcagatttctggaaatggtatcttcttcacctcattaattttttggtgatcattgttggaatacatagaagctttactgatttatgtggctgtgtcttcaatctagcctgtatcaaatcttaatagagagttgttgcattggttcttttcattttctaagctgacggtcatgtcatctgcttttctcgtctaataactcagggtgtttgcatctgggttgactggtgagcttgtaccataaatttccttttatgtggtctttaagagatttggttatcagagatttgctggctttacaacattaagctctactgagctactgacaaataggtgaactttttttcttccctgcccactcaccaagcgcagacctaataaccccaggtcctcaaccggcacagctggcactgccccctcttgtaacgggtagcgtttgggcaagtgtctggcgcccaggaagtgtgcgagacacaggtgctctgtgttcctgctgagaagagaagccttgagtttactagaagggtgggggtggggggagtgtcacgtttgttgaacatactcagaatctgaaagccattccagaatctctagaggatcgaaaaagcattctgcctaagaatatgagttttttttttttttttttttttttgcttattcttaactagtgaattgtagcaaagtgaagcactttcagctagggaatgcattttaatttcatttgttcaataatatgcagcattaccaattaatacatattttcattgtgcaatttcatgtcaggaagaagggactctagaaccagtgaaaatagtctctcccctgaaaaagaatgtaactcttcctacagtaaagctaagaaggagcatgccgtgaaacagttcggtaagagtgagccccaggggaggctgagagtgctca

SEQ ID NO: 54638 - DNA, 1123 bp, Bovine  19866880988000
  misc_feature (1)..(1): n is a, c, g, or t
ncgaaagggaacatcagcggtactgggacctatgaaaccacgcacagcttgatcagatgcaccgagaacagagcctggcttctgagcgagtccgccctgccctggagctaacactggaaggcagcactgcgcacggccccccaccgccctcccagcccccagacgcctcaaggacgctgtcggcagagtctgtctcatacgagggcaagagggatgacgatggggtccaccgttcaggggtccagggtggagagaagagcagcgttgtcagggcttggtaaacacgcaggccaacactcacagctggcaatcctgtctcatcacccgtctcttccccagaacagacaccgtggtgtctcagcagcacggagctgaggaagacaatggtggcacgcagacccaggggctcaaaggacaccccgcttcccctctgacgccatggagcaccatcagccactacagatgcacatgtcacctgttctacaaactgtcctaggaacaaccttctgacacacaaaccaaaccaggcagaaactgctatttcatttcatacaaccaattaagagactcagatttcaagcactgaaatctgtttcctccttattcttaggaagatgttttccagaatgtttgtcattttgggcaacacgacaatctggtattagctgagctgtgggaaagacagccttcatccgctcataaaaacgtactggctgggagccagttaattttaatcctgagtattttccaaaattcccgtactgcttttaatatcgctggccaggaaccatggaacaactgcataaatcaacataacttttgcacacacagaaataccactccttacctttataaaacaaaacaccaagggcaatgaaaagtaacaaaacggaggctacttgcagagggacatcagaccataatagtgacagagagtgccctgcccgtgagggacagggacacagggaaggcaggagttgagtttggactacatgtaggttgtgttatttgttcagtaacttaactccattcttcagaagtcaattatcgggtcgtttagaacataggaaactttacaatagtatatgctcttgggacctcaccgcacaagtgacatcctgcg

SEQ ID NO: 54639 - DNA, 1051 bp, Bovine  19866881088520
  misc_feature (1)..(1): n is a, c, g, or t
ntggagaattccgtggactgtatagtccatggggttgcaaggagttggacacaactgagtggctttcactttctttcactttcaagccaccagggttacaaacagctgggatagagggatattttgcatttcactctaattagatttggaaaatacctgaaagtgactatcctctgattcagaagcaagtgttctttaccttgggtatgaacatgctttaatgacttaaatacaaacaggagaactctggacagaattacacctttgctcattctgcttccaggagagggaaaggtgactgcagggcctaggacagctggtcctgtcagcagggagagcagccccatgcctgccgctcccaaggacaatcctggtggccgcttgctctgccactcgggcagctacaacgccctaacacccaggctctcaggagtgagaccagaggagacgacacacttgacaaggggcgccagagagctcagccaactgcagagctgtgcgcagaggtgccgcatcaccacgggctcccaacggggacgcgccctggaagctgagccaccggcgcaggggccggaaccacccacctgggccggggccgctctcagagtcaggatcccgcctggctcccggcccttcgctggccctcagggtcaccctcctggtggtcacagacaaatcaccagcagctaagacttgtgctggtatctgtgagcagctgagcaatcttctcaggtacgaacagcagaacaaaaggcaagagggagcaaagggcgccagcgctgagctgagggtgaagaagtgcatgggggaccctcagccctcagcgtgccagaggcggcagctcggagcccgcggtccagagtgcgtctttgggaccaagggccagggtacccacgcggcctcctcccgtcacagacccagctatgtttcaacaagactgtgcgcagaggcggggcccgaagacccaggtaccaccaggacaacagagtccactcacgcttcggaagccaacccagcgggctgctgctctgcctgcactcagcacaacagg

SEQ ID NO: 54640 - DNA, 1019 bp, Bovine  19866881145564
  misc_feature (1)..(1): n is a, c, g, or t
nagccacatcttttgtccccagagttggctcctaacaggttcttctgagcaaagccctgagccagctgcctgggagcagacagacttcagctccttgcctcagtcacaccctggcctgtcaattaagaacttgccctctcaccaggcccaccgccagcccagataggaaattgcatcccataaacgcttgagcagcttccgaaggtcaggtggtggccggctgccacgcctgtccgtgctcctcgcctctgtacaagctgtgcgctcttcctggcttacttaaccctgccgggctcctatctttcctctaaagcccagctcagatgctgcctcctccaggcagctttccctgactgcctgcctgtgaggacacccaaagtccagcatggcctttctcatgtgccttgggtgtgtttccagggggttttcccgccaagctgtgggctagggatgaccacttctgggtcccctgtcctcgcgggcaggaagtggcacacacaggggcgcagtctgtacttgggaagtgaaccgaccccagggaggcggggttgcacactccatcccgtctgtccccgtgcgggtggggtttcggggctcctctccctgctccccacctgtcactcaccccctcgtggccctgggccaaggcctcccgacaggcctccgactcccggatcagcggctccgaggccagcagctgctgcacgtggggcctgggcacggcgtccaggtgcaccaggccgagcagctcgggcaggtgggcggcccggatctgggggtcgtggcgtacccagcgcagcagcgcctccagccggctctgctccggctgcacctgcagcaggtcgctggccagataggtggccagccgctcctgggacagctgcaggaactcgtcctcccgggccacggccctcgaagttctcccgcaggaaggcccaggccttggcggccacgcccagcagcccctgctgttccccaaactcgcagatgcccagacagttggaggcgtcgagctgctg

SEQ ID NO: 54641 - DNA, 1926 bp, Bovine  19866881190250
  misc_feature (1)..(1): n is a, c, g, or t
natctttactttcttccataatacaaggacgacctctacttaaatactgtatcatctgatttttagctttatcctgttgtttttttgctcacaaattgtttttaaaggtttttaatttttaaaattttatagatttccttttttgaatttgttttttattttatactagggttgatttacagtgttgtgtagtttcaggtgtacagcaaagggactcagttatgtatataaatgcgtccattctttttcagattcttttcctatataggttattgtagaatattggctagagttccctgtgcgatacagtaagtcattgtcgactatctactttatacagggtattgtgcatatgttggagaaggcaatggcactccactccagtactcttgcctggagaatcccatggccggaggagcctggtgcgctgtggtccatggggtcgctgggagtcggacatgactgagcaactttactttcacttttcactttcatgcattggagaaggaaatggcaagccactccagtgttcttgcctggagaatcccagggacgggggcgcctggtgggctgccgtctacggggtcgcacagagtcggacacgactgaagcgacttagcagcagcagcagtatggctgagtaacattccattgtataggtgcatcacatcttctttgtccattattctgttgatggacagttaggttaactacctgtcctgaccactgtaaacagtgctgcggtgaacatcagggtgcgtgcatccttcctgaccgtgttttcctctggatatacgcccaggagtgagattgcagggtcatgtggtagctctatttttagtttcttaaggaacctcccacactgttttccatcctggctgcaccagtttacctccctaccaatagagtaagagggctcccttctctccacactctctccagcatttatttatagacttttgatgatggctgttctgaccagggtgaggtggcacctcgttgtagttttacacattaaggattttgttgttgtttaggcagccaaggtttgtcaacattcgttcacaaatttatcaatatctgctcatcatttcttctggcatcttagaccttccatctggaaccacctccttctttctgtaagtgtcctttttcaaaactggtccttcaaaatttcctttaaggaacccgtgatgcagcaggcagaactgggtagaaagagccctgccatctcactaaagcttggcgagtcagtgggaagcacgctgccctccgtcactttgcctgccttccgtgggggctggaccgctcggccagcgtacccggcatccccgcccatgacatcgccacctctagggctgctggccaccttctcaggacccctgtctttgcaaaaagttgtgctcaaagtgggacttaaactaaacagacttcctctaggaaacacacacaatcacactgctgcgaacgttgcttttatggacatttccccgagaaatatttctctctggaaaaataaattcacaggatgtaattaaaaccattatatgtgtatgttggcctgggcacgtcttaagtgcttcaccaaatgggccaccaaataaagaaatgaaggccggctttgttcacgtctaggaacaatgacctttattaactgtaacccagggcgttcttctgttcctttgcggattcagaagcagcctttcaccgggaccgtgttcaaggcactcgcctttggtcctgaccgcagtgtgaccgacccctgctgggaacagcagagcagcctgcgcggtgtcacttggacgaaggtgaccgtttcagggcccatggacggtcgaatggcctgtgttttctgacttgccacctttgaaaaaataaaatacattccccttatcttccaaacatcttaaattctaaaggagaaag

SEQ ID NO: 54642 - DNA, 1126 bp, Bovine  19866881296038
  misc_feature (1)..(1): n is a, c, g, or t
ncccctgacggtgccgcaggcctgcagcccctccggctctgacttggcaggccttgtctgcatctcagacacgtacctggaatgttcctgacctgtttatttaggtgtttgtgacaaacacgtccttaattccatattgacagatgctttcccatcaccactggggcaaaattcagacctcagtctcgggcctgggggcgctatgccatcacccctgaggccccatcctatcactctctggatcctctgtctaaacagcctgtctccctctgccagtgcccacgtccctgtatccttggatttgaagatcctccatatacacttggtctcctcacctctcctgtctgctcattgctcacatctttgtccaggacgccaccatgctgtcccctggggtctccatcactcactccttctctgtctgagaccggaaggaagacagagctcagcagtggggcgggttggtcaggtggtgggtagggccttgctggtagagaagagccagcaggaaggacgctctccagcattgacctggttagagaactgcttctcccggcacggttcctcttcctacgagggacgcaaggcacgtctgcaggcagctttggtttcatagctggcgggggcacccctgcatcctgcgtgcccaccaagaacacgtagactgcagcgtcctcgcaccccagtgggggaagtagggccagaggcacagtgaaggcggcacctagggtgatcacgtccttcttcaactccacagcagcgagcagtccaccaaagccgatgcccacaaagagctcatcaaaacgctgaaggagctgaaggtccacctccccgcggacaggaaggccaaggggaaggccagcaccttggcgaccctcaagtacgccctgaggagcgtgaagcaggtgaaaggtaggtgtttgttccaacctgtagcagtaagtctcagatctccccagatcagagcttagactgggttgactttctgaaactcagtcctgaaatagcagaaggaaatcatagaagtctgatgaaattgcagctggttgaaaacctgagttcatcttaagttttctattgtatgtacttttagaggaaaggaaaaaaaagcaggtagaaaaccagc

SEQ ID NO: 54643 - DNA, 1624 bp, Bovine  19866881312362
  misc_feature (1)..(1): n is a, c, g, or t
ngttgaaactgattaccttgtaggttaagtgcattttcttctccagtaagcttcattgctttcgctaattgtaaaccccaggattgttgtcgttgttttgtgttttttgatagatgagggttactaccagggtagaaaatttgtttgaaattgaagttcctgatgtgtataacatggtgcctcccacagtgagatgcttcatcaggttacagcaagttatagcaccccaacatcacagagacaggtaaaatatgtctaggtttattgagagagtgtttgattgacagcactggctgggctctcaggaggacattgaggaatgttgtttggagattcaactcattgttaactgatcttttgcattttgattatccaccaaatattgaagctgcagaacctcatttgcaggacaaggatggcttccagaataaagttgaagacagcatgaagttttgtgccagaggatatgagaagactacagcattctgtactgtgtgttataagtttgtctccacctgaaacaaaaaggaagcctcttccccagtcctcaggctcccctcagtcccactgggtcctccagagtcctgtgagtatgttgttttgaggaagaacctcttcacacagcctgtggtagatagagagttccacataaatacagcaagataatgtgtttggggttatcaagagttatccacttaccttaacatgtttaccttttttgaagctgtgctgtataggttgctgatgagattcttgagaagtcgtcatgaactcagaattgaggctaaagcatgctgctttctcttttcccagagtcagtcccaaagtcagtctcatgcacaggtgatgctactagatgtgctcaatgtagcttgcagatgggtgattagaaactcattacaaactgtgaatggatgcaaaaatcttagctcctttctggaatgcctagatgttatgaaactgcccagtcaccataaatctctttctgaagtgcatattttctttaatataagtatattttggaatagatttggaatttatattatttaataatttaacaatttttttctattcttatttaatttgtattttcattgtgtagagcagacagaaagatgctgagtcaaacaactattgaagagaaatacaaagaaaatatcgaggaaaaaatgactggcaaaagcactgctgataatttctataccttcacatttccaaaggcaagatcaagcaaatgggctgtgagaaatggtaagaatgaaaggataagatgagaagttgatgctgttttggttgtcagcatgagaattgctaagacttagatgccaatgtctgagggaagaaaaatacagaaatatgctgagtatccaaggcaaatgatgtgcattcaggtccaggtaccttcttggactttcctgatggaaagcatgcatatttggaaaatatcagcagaggaaagagtgtttacctggagcagagtgaacaaggaaaagtgcaaaatgatataagccataaagtggaattggggaccaaatcatttaggtttttataggcaattataaagacactggattttactttgatataagaggatttttaagggttttaagtaatgaaaaatatt

SEQ ID NO: 54644 - DNA, 1270 bp, Bovine  19866881332593
  misc_feature (1)..(1): n is a, c, g, or t
ntgaactggatattatactacctcgtgagataaaggcatagcatgttagttttcactataatggattaacatgatggggaccataaactatgatctgccagagacagtcaagttttatatcaattgtcatggtgaattattaaatcactacctttcatcctcaaagtctcctgatttgatgacaaattgtgtggtcatcttactcaacatatgctactgacatccatttggtcaggacactatgttccttctaatcagtcacagtcctcaaatggcagtatgattctttactatctgagccaccagtgaagccccaaagccagctgagtgaaaagaaggatgggagagctcctaaaaatgagtttactttgtgcaagccataaaattaaagacttatacttgacgaactacttaaaaaaaatctcacttgagagagtgtcttctttaggctagaagaaccaacatcacgtgtactttgattatctagttcagaatctgctcctgaaaagctaaacagattaatatttcattaaagcatttatcaatattctgaatacagaataaaacagaaaacagagttaactgaattaaccaatgtttaaaatttaataaatttcaaactagatgaatacataacttacatatgtgactcttctttcatcagctgcaaagagagagaagggaagaaaaagcttttaaagtgtttcctgtccaaacgaagtaaaaattttatttgtaaaacataaatacataccctggaagcaaaagtagagaaggcagataataatcttgattctattgacaagggaggcagttcttccagtggtatacccttgtttatcttctctttcaaattcatgtatctaactttcaagtctcctaaaaccgacagcagtgctgatcctaattccttcctagtagaattacttgataaattcctgttcaaaagttaagttcacaaaactatttaggcccaagccactcatttaaaactaatatcaaattacacatctatatacatttacttctaactctaatagatctctaaaaatttttttaaaatgtttaataacagaaaatgaatcacagaagatatgtttttctgggggcagtaaaagcaaacctcagtatacaaataaccccagaaagaatgggggtagaatgtcataaaaaacactccaactgacttcatccatatttggactttataaacactggaatctgtctttttactgggattcattatcccaacatggcactggttgcctgt

SEQ ID NO: 54645 - DNA, 740 bp, Bovine  19866880467461
  misc_feature (1)..(1): n is a, c, g, or t
natatcaaaccacgccgagcagcttggaggcaaacatcgggcgtgtgtgatctcgctggaagagagacaaatggggctgcgggcagctccatccaggggccgctgacaggggaacggcatccgccaaccggcacatctgtcaggacgcggggtattggcacctgtcacgcaatttcagccatgacttttaataaagccgccttcccttaggtaaaattggaacttgactgtaatattagctgcaagcccatcttgttttccccttcagagcgcttttgtacgtgaggcgcttcaaatggatctcaaagctgaagtatggtgtttaccagcacctcccctgcgccccagaactcagggtttgaaaacgatgttgcatcgagttttttccttcctttctttcttttgcaaaatgtctgctttggccaagggatgctggtttccctatttattttcatatcactctccctcctcccgcctccatctccttcgccaaccctctctgggctgttgtttgagtgaatttagcccggggacgtatgtatatcataaaaaccgggttgggatttgttggctgtcagtcaataaatcagtcagagtttaattaccaagcaagtgatgggctgcggtgacaggcaccagcactggtggagagcctttctttgggagcaatcgctatgaaaaaccctaaaaatgaggttactctgtgagtgtgtgtgtgtgtatgtggagagagacagaca

SEQ ID NO: 54646 - DNA, 1034 bp, Bovine  19866880473370
  misc_feature (1)..(1): n is a, c, g, or t
ntgcatcctcccatgcagactccttgtgaaatttattagtgtaatcctgtccacaaagcaaggctttccatttggaatcagggaagccccgttccaccatctgcaccttcctcatcacccccaactcttctttcttctgctttcttccacaccccggggtctccctgaagtgtatcccacccacagggcccccctctgatgctggctccttctccaccaggctccgctctgcctgactccccactgggcaggggccccacagggtctaaagcagaggctggacccaaggtaaagccccaggaggggagcccccagaagagaagggtcaggtgtcacggacattgtgagggtcagatcttgagggagagggtggggcaggacatcagagtaaaggaggaaggcatagctcaggagcaggatgaggggtgctcggagggtcccagaaaggcagtccagtgccctgagccagcctggagaagggcacagctgggcctagggctgagggggcaggcagatgctggctgcttgggaaaaatgggagtccgtggatttttttttaacccatctgaaaagctaattagaaagtcaatagttatcaatcagggtgtgtagattgcaaaacagcctttgcgctctgcttcctgagtgctgcataactgacttctgctccaacttgacattccttcccttccttttaaaatgtagcatatatctatttaaaacaatattagtcttggcattgtttagctcttgtgtacactcctgtcaaatctgtgagagtgcgagagagtctttggctccggctgcagctgatttatgtgacaaaaatctgtatctgccaatgtttgccaaaggagcgctacaagctggaatcatttcatgcgatttataaacacatttaaatgaaaagaaaatgttttacttgtattcggcatcgtgaatgtattttgtgtctgaatttagaagacaggaagtaacccactcttgggaatagcactcagaaagcacgcatgaaactcttctttccagggtta

SEQ ID NO: 54647 - DNA, 1882 bp, Bovine  19866880527858
  misc_feature (1)..(1): n is a, c, g, or t
naagagaggcttatgatacagaactgtccctaaaagccaaaagcatgtaaccatgagacctgactgcttcacccagagttgtttgtttccgtctgggctcatgaaaatagtgaaatccacttatttgctctcaaccagcatttttttaatgggatgggatgcaaataggatagggtagaatagattaggatagactgttgggatatggatagaatagaatagaataggatggactacatcctataccttatatatttcctcatgaactcaggtacatggtgggcagtattgcacagcatctttctaactataagctgaaggaaagtatttgcctattgcaccactggtctctgactctccacatatttcaagtcatcatgaaaccctttgtatctttttaagattcaaatctatttcatgcaatcagcaataagagaagaaaaaagtgtggtcactttctatgagatgctataaaaaagcacaaatgaacttcttggccagcccaatacttaattatatgtatatactatatcattataaaaagattcaatatggctgtttagagataacgtaactagattgaaaacatatgaaactaagtgtagtataaggtggtatgagaccaaattttggtcagacatttggtcagatacattatttgtatttctacctctttattcatactttgggtggtcaaatagtttgatggatttgctctattttatttgcatgaatcatatttgccacacccatataactcaaaatataagctccaggatccagaacttatatttaggagaaataaaatattttcatctagggttatctaaccattcccttccagtacctgtgagttgatgattagttttctgcaagtcacaaaggaaagaccttcctctttcttttgttccatgtgtgtgtacacacccgtgtgtgtgtggccacacgtggcagtgagagatttttaaagagagaaaaagaatgacagtcatggcaagagaagggtctcaaccactgtggataaatcaatccatcaaaaaaaaaaagaaaacaattctgccatgaaacttaatcactaaaggtcatgtcggagagtaaggaacagattaaattagcatagtattagatatggaaaatgatttctgtcaaaatcatctttaccacaattataatatgttaattacatatttcattaaggaagttgattatggttcacggatgaaatcacgcctgcaagacacctggaaggggcggcggagcctgactcgtcctcccgttcctcctgggcttcccctccgtcctccccactcccctcctccctctcactccagccccccagccctccttttccccttttcccatcctcctccttatcaccccacccctgtctgatgccatcagcagtggccagatgtttccctctttaagctgatctcacgtcgggactcaaggctacagtgtggaagtgagcaaatagtggccgcttaaaggccattgtggggatcttcatttttctcctttttggttttgccttttttaatttaaatgttattgcatattaaagtatagttgattttcattgtgatgttcatttcagttgtacagaccgtggttcagttatacatatacacatatccatcccttttcagactcttttcccatataggttatgacaaaatattgagttgagttccctgtgctatatagcaatggtccccaacctttctgacaccagggaccagtacctgtgtctttgttgatgacctatttatatatagtagtgtgtatgtgttaattccaaactacttatttatccctcctcccaccttttagtagccatcagttgttttcaagggctcccaggtagcactagggtaaagaa

SEQ ID NO: 54648 - DNA, 2293 bp, Bovine  19866880714539
  misc_feature (1)..(1): n is a, c, g, or t
ntgggaaaggctggatataatgcttatctatgtctaaactgacctgccctggtggctcagtgataaagaatttgcctgccattgcaggagacccaggtttgatccttgggttaggaaatcccctggagaaagaaatgataacccactccagtattcttgcctggaaaattccatggacaaaggagcctggcaggctacaatccttgaggtcacaaaagagttggacacaacaacaaatgtctaaaatatcactataaggctaggggaattttcttttcctgccactgctgttagaggaggaaaaatggatatcaattattttgctaagtcatggaaaactaatgggtctctctcctcatgacttggggtagaaagcttgcatcttagtatatgaattcttctggatgctacaaaatctttataaataaatgagtacagtatatataatacagtatatagaaatatatatacacatacatatacaatatatatataagtataatatagtgtatatatattatatacatacacacacaatctttataaatagatgggtatagatgaatatagtacatattgatgcttttgaattgtgatgctgggagaagactcttgagagtcctttggaccgtaaggagataaaccagccaatcctaaaggaaattaaccctgaatattcattggaaggactgatgctgaagctgaagctccaatactttggccaccctattctaagagctgactcattggaaatgaccctgattctgggaaagactgaggtccagaataggggtggcagaggatgagatagttaggtaacatcattgactcaatggaatgaatctgagcaaactccaggagacaatgaaagacaggggagcctggagggctgcagttcatggggtcgcaaaaagtattgaacatagcaagtgaacagcaaatgactgcttatttaatctacatttggaagcaccctgaaggcagagagagttggggcagaggtaaggagagggaagatgtctattttggacatctaatttgtctaatctggtatgtccaaggacattaagagacgggaccaaggggacacacaaaacttgtttcctgaacatgagaaacatttttttcctacacagattaggttcaaaggatgagatcagctcaccacaccgtggatgagtgtgaatacacaattattgtgttcattatggtttaaagcaatacccagaaaaggcaatgtgttttctggccagggcaggaatgtgtcagaagcatatagctcgtgatgtcaggaaaatataaactgacaatatttggaagccatcagggcagtgatcacagtattaggcaagttaaatcttaaggggtgttaatttttttcctattggcaaagggctcaaaatcttcagaacctaattcccagtaggaaatatagattcagcaagaatttgcatgtgtttccccagaccaatttctaacatagcaaggcttccaaaaacacccactctgctttataaacacatgcctcctggctgaaagcttcactagctttgaaggttttaaaggcatacaaattcagggaaacaaattatgaccaataaaagttgaacaggatctgtaagatggcctcacaatgctggctgactctcctgctggaggatggttttagggcaatgtctgatcagggttcttaaagtgaaggaagctgagtcattggatcaaaacatcagtggctcagtttggggcagcacaggtatttgcaagctcagatcaaatctttattatcatgataaagtagattaagcaaaggatcacacagctggttaccgatttgatcagtttcatagcttttagaaaaagtaatcatcaaagaatttaggaagtaacaaacacagaggcatatggtgggaagacttaaaagagtaagcttaatatttaatgacaaacctagacagtgtgttgaaagcaaagacgttactctgccgacaaaggtccgtatcgtcatcccatggtcttcccactggtcacatacagttgtgagagctggaccgtaaagaaggcagaacactaaagaattgatgactttgaactgtggtgattgagaagactcctgaaagtcccttggacagcaaggagatcaaaccagtcaattttaaggaagatcaaccctgcatattcactggaaggactgatgctgaagctgaagctccaggattttggtcatctgattaaaacagacaactcatggaaaagtccctgatgcgggaaagagtgagggcagaaggagaagagg

SEQ ID NO: 54649 - DNA, 1621 bp, Bovine  19866880742253
  misc_feature (1)..(1): n is a, c, g, or t
ngatgtctctaagttgatccccatttcttcctggaaaatctggcatatttgttgtaaagatcagggcttcccaggtgatgctagtggtaaagaatctctctttccaggagacaaaagagaagcagattagatccttgggtcaggaagattccctggaggaggaagtggtaccctactgcagtattcttgcctggaaaattccaccggcagaggagccctggtgagctactgtccacagggctgcaaagactcagacacgactgagcgactgagcacacagcgcggttgtaaagatcagtctcatcacttaaggtcacgtattttataaccttattcattcaaaacaaaacaaaacaatacacattgttctagtggtgtgcctggtatccagtagagctagatttatgcatccatcttctctgaagtttatagactgcttgattttcatcaacaatcagcaaattagtggattccatgttgacttacatttgaacctaaaggtttatttatttaccatccacattaaggaaacattatagagagcttttaaaagaaaaacaaacggctttggggtcaaaggagtagaaagaatcccaatttatcattaggccaggttcagcaaacgttgcattatgaaccaagagcccctaaggaggacagttccaatactctaaacaaatacaccattacacttaattgacttagatagaaatctaatttcttgattgtttatggccttgagcccactggtggatgacaaagttgtgtatatgtgtgtttgtgacaagcatgaagggatatctcaggtatcagtgaagaaacgaatacattttcccgtgtgcacccacacagactgatgatcgctgggtgttgctttgcactcattctcattcagaccagaattatatactcttaatataattaagaattatacttttgcatatatgcagcctgtatgaatttaggggtttttataaatgttgaatacccccaagaatacaacaatgtgaataaaaacttcttagctatagccaagagggaaacagaagtgagggaacagaagagtaaccacaggatttactgagctagacacttccaaacaaaccgaaggtaaagctgtcatgctgctgctgctgctaagtcacttcagtcgtgtccgactctgtgcgaccccatagacggcagcccaccaggctcccccatccctgggattctccaggcaagaacactggagtgggttgccatttcctccctcccaatgcatgaaagtgaaaagtgaaagtgaagtcgctcagtcatgtccgactcttagcaacgccatggactgcagcctaccaggctcctccgtccatgggactttcccaaggcaagagtactggagtgggatgccataagctgtcatagtggtgatgaaaatcaaaatcaagcacctgatacacgacttaggaacaacatcttcatgatcttctgcactagtgaccacttgagtgcaaatgactttgaaagatgagaaggcacattttgaaatcccagcaaaccaataaccttatttggcattctgaataaatgccttctctttggttggcatgagttacgacaccagagaccagtgataataaaa

SEQ ID NO: 54650 - DNA, 924 bp, Bovine  19866880855974
  misc_feature (1)..(1): n is a, c, g, or t
naactgacaaattgctggaggctcaatatggactactttgaaagttaaaaactgcaggagagttcagtcttaagtgagcccccacacttttcatgattctttgaacatcataaaaaattagttcctttgtgcctccggctgagagagggaaatacagcctttttaagatatgccctggatgtacagttcttgttaataatgctcaccctcaatagaaacttaggtcacagaaacctaatagaaacctaacctacttgagttttaccagggccttaacaatggtggggaggaaaatacccaactccagaaccttctagtcttcctgtcacttctcagggggcaaaggcaaacaaaagtgagatgcacttgtgaaagtcacaggccagggacaaagattcattaaaagactgagacctaatcattggactatagaatacttcacctcctccacacttcaccagcacaccagtagagatcctatataataacagaggaatacaactgaaaaaaacctgtgcatctcggacaatattagaaatctctagagaaacccccaggtaacaaggggagacaaaaacaaaagacaccagtggaaattttagactctaatacctgttgaaatccttggtgtttatacaaagatcctgaagagatatctgtacaactatgttgatgttcactgaaagataactagataaacagaaagtgatatatacatatgacacactattattcacccttaaaactaaaaattctgacacgttttatattatggacaaatctttaaggacattatgctaagtgaactaagccaaccacaaaaagacaaatactatatgattccacttatatgaattacctagagtagtcaaattcatagaaatagaaagtataaaggtgtgccagggttggaggcaggggaat

SEQ ID NO: 54651 - DNA, 1363 bp, Bovine  19866880866691
  misc_feature (1)..(1): n is a, c, g, or t
nataaagggcagggagaaaagaagaaggaaggagggaagggaagaaaggaaaataaaaacagggttaagtggtgatgagtcatttaaacactatatgatctggcgacttcaaatagtaagagagaagccataactcttgcttctctggtccaaagcatgctctcttctctacctggtgaacaggcttctctagatccaatttacttcaggcttgtcgctttctatcctggagaataactaagtttataaagatcctcttgcctcctgggcgtcttaatcatgataactggtgccttcacctctccccactcctccccacctccaccaaagtccatttctttcgtgccccccaggatagaataacttttacaaggcaatctgttgtcatcccgtcaattttcctttgtgaatggaggccagagtagtgcatcttcaagggtcactctgaacgatttattcctgcagagcaaggctttcatgcgctcctgtaatgcagactgcaaaccagagggctgatactgtgtacagcccagttcagaaggcatcaccaataacacgcacaggacacaaacagcccctcaggtgccttcattcctttctctgaattctttcttgactcgttttgcgtttgaaaaactgatcagagtaacagccgaaataccagaagttttagctaactgctgcatcctccttgtttgaggcttactgacagtgagaagacccagagttctcagtctgcttcaaagggtgctcagatccttctaaatctaaaaaaaaaaaaaaaaaagattctggttttccattctttaccacaatgtgaacacgtgcaacgttactgtttatcatgtatttcagcattctgaagagtttaaggcagagagcagcagatttctcccagtcctgtaaaacacctgcttctgagtccaacctactcatgagcagtccgttttgtggaaacgggaccttcgattctcagaactgggagtatcttaaaactctgctcattcctgtcatccgtgtctgtctctacatctctggcatcagagagcccattccttccttcccatccctgccttctttcctttattagaaaacatctcctcatgctggactcatatccaccccccagtagtctccacattctgtgtctggaatccgacagtctctgtaatttggtcccagtattcctcagtgcttgtctgaactcactttttcttcccacccattagctccaggtgaactgcttccaacctggagtccacgatagcgctcctggcctgcaatccccaagctttactccatcgtatttgctgtctgtggctggctggtcccctgcaaacaccactgcatcttcatccttgaa

SEQ ID NO: 54652 - DNA, 969 bp, Bovine  19866881037745
  misc_feature (1)..(1): n is a, c, g, or t
nctgagatgacgaggttgacatccgtctgttagtgtgcgtccccatcgacatatgaatcttacagagtcgtctgctaacattccagcaaaatcattacagttctttctaggttgtctttttcctcttatatttcaagatggaagttttccatactaatgctgcaaagtgggtattatgttgagtcatgctaatcggttgcatggatgctgtcacatcacatcgttcagcaatgacactggagacacagtctcgggtcttctgctgtctttcaaacggcccggtgctgccagcgcctcacatccggggaccctcctctgccgcgggatgacgtctgtctggagaggttcgctaggaatcgtgggaagggaggcggagagagctatgtctgtgttgctgcgtgtcctcttaaagaggaaactgtataaaagggctgaggcattttgcgcacgagcgtatgtgaatttatagcggcttcatcgccaagtattattttcatggcagcacttcggtaaatggtgtgtcaggccctccttgaggagcttctggttttaggattttaccactagctcataaaccaggaaacactcctgttaaagcgaaggcttccagaagcagttttcaaagataagtttatttgaaaagggagacttgagtttggcggttttcaatgctgcttttgcaaaagggctgcgctcccaccattcccacccctgccctgaacaactgtagccactttatagggagctaggcaattgttgggcagaagtggtcttcccagtagtaaagacactgatgacggctggtgtgcaggaagggggtgagcagcgaggcgggtcgttacagccctcctgacggtgagcaaactggcttcacggtcagcatctccatgaaacgcacagtgtcccagcgtccctgggtcccctttgcactttgccatcccaccaactcggcagggcattctgccccta

SEQ ID NO: 54653 - DNA, 1786 bp, Bovine  19866881099668
  misc_feature (1)..(1): n is a, c, g, or t
ngaaaccctgatgtgcctagtccgtgggatcgcagagtcgcacatgacttatcgactgaacaacaaatgctttcaaagttcatgctgctgtagcatctgtcaatacaccattccatctaatcaccaaataacattccattgtgtggaaataccatattttattcacccagtcatcagctgatggacgtctgactaatgagaaaatgatccatggatgaaacatttggcagtgttttactccttctggattcttgtgttgagcaatctcctctggttctcaaactggccaggtctgcagggaacgtccattatgaagacgcaaggctcttggctgcaagcaaggtccttggtccctctgcgagtgacaagaacagatgagttgagttgacagatgctcttatcagcatctatggaagttgatggcacctgaagcaaacctccaccttttgaaatttcagagccccagtttagcaattctggaacattaatgatctgttgtgagggccatgcagccactgcctgtttctgaaacactgactcctcttagcttggtagcaacccaaacaaaaacagactgctaaccaggcagtcctaaatattttatttcatttatcaattcttacattttttttcccaagcactcctttcatgcctgcagtcattgagttgtacaggagaagaatactgcacaccaaatcctgttgacataactgaattttccatgtcttattcacacctctgctaggctgggtctattgttaacgtgatgcctggttttgttgttgttgttgttctgggatgcaggttacaatctatcaagagaaaacaatcataatgagatttctctcagttttaaacctaagtttcctaaaagaatctgggaattttaactatttgtcaatacacgcttcacttccctctttgctttgtcttttcgttttggggtcccctctcaagcctgtgggattcgcctgcctctggggccaggatctgccattcctctggaacagatcatcatctgggtatggcatgtaccttttatggcactttatacagaccagcctgagtgaaataaatacacaggatgcaaagctcaaagtgacacatcccagatctctgacattcttaccatggctttgagcttcaggcactgacaaatctcccacgcgtaccagctctcccagaggacgggctgtaatgatgtttatgttatacaatatgtaaaatatttatacccgggcttcagcacaaactgactatcacttaaatcaggagctagtatttacattcggggcaaggggggctctctgtgtcactctttgcaggcagaaagggagcccgatagaataaatgatcagtttatgtacagaatcagattccagcagtgtctctgctttaaaaataacagttatgggaaaggtttttaatgtgcatgcttcttttagaattgttaaattaccaagaagggcaaaatttatgcctttctgactattgcccttatctttagaatggaaaaagtcttttcttttgacaaaccgttctttcatgaataacctcttcaagagcatttagttatcattattaataaattgttaccgtaataaattatattttaaacattttattaaatgcagttctcatgtacttaaaataaattgcaaagccggcttttttcaaggtatttaatatatatggtgtgacacaatgtgcttttaatatatttaatgttatatactttaaaatgtaagtgtgttgtacttttatggaacttactttatattccttt

SEQ ID NO: 54654 - DNA, 1500 bp, Bovine  19866881152045
  misc_feature (1)..(1): n is a, c, g, or t
ntcattgggatgcatgggtttagttgctcctcagcatgtgggatcttcctggaccagggattgaactagtgtctcctgaattgcaaggtagagttttcaccactggatcaccagggaagcctgaggtggaatctttgccttcctctctgagtcccggacctttcttgctgtggactgcatctctcagaatcacgaattgtttgcatccctgccataggtgactcagtggtaaagaacccacctgccagtgctagaggcataagagacgtaggtttgattcctgggtcaggaagatctcttggatgaggtcaggcacccgttccagtatttttgcctggaaaatccccatggacagaggagcctggtgggttatggtccatagggttgcaaaaagtcagacacgacagaagcgacttagcatgcacgcatgcatcttctccttgtctcctccatcctcttgtctaggtacttggctgtgtccaaatttcctcctctcacaaagacccgagtcctatagcattggggctgacacgaatggccccctttttacttaattatctctttagagatctatctccaaatgcagtccctttctgagatcccagggttagggttccgacctatggattgttagtgggggacacaatacaacctattacattgataatgcaatttctttcgtcattgaaatcccacagttctaacatttttgttcgcttgcttgcttgcttttaactctgcagactcatatcttggtctgactcttggagatatttaattacgtaccttttcatgactcttgtcattgccctggatggagccacagcctggacctaataagtattcttcctttcaaattgttcgcttctccttcctatttcaaaattggatctgaagttcccccacatggcacgagagctgtttgtgcgttgcgagctccaggtccttaaatttatgaattattgtctccttgaaagcgaggctaaccagacctgatttccaggcatccccaatgcacatgaagccagacctgcaataaaaaatgtccggtgagttcagacccttctatgggagagttctgaaaggcaatcgcttagatttgctttttaaattttttttccccctcatactgagaaggatcgtgcagaatcaacccactaaaaaagaattgtcataaaatctcacaccattgacttgtaaatggaattgaatctgtagcgtctacataatgatactatcaaaaaggaaaaaactatcacatccatataacagatgagatatgaaatgactaccatggcagatgaacaccccagaggtattttgctttattctgctcactgcgtttataaccccagtttctctaattttagttatttttttcctcaggtctcaagacaagagcagaaagactcttcccccaccccctcaacaaatcacctcatacagaagtcaataatataaatacttacgtttctggggtcagggctggggctttattaa

SEQ ID NO: 54655 - DNA, 972 bp, Bovine  19866881240499
  misc_feature (1)..(1): n is a, c, g, or t
ncagacaagaatactggagtgggttgccatgcccttctctaggggatcttcctgacctagggattgaacccacatctcttatatctcctgcactggcaagcaggttccttaccaccagcaccatcaaggaagcctaaaggtctttcatagcaagacatattcacaaatgacctaaagcactgacccagtggtaggatcatggggtacagaggagccagaataagcagggaggaagagctgcctttggacaaaggtgtctcgtggtgtatgagacaaggaaacactgttaaaatgcactgtggttttttagaagctatttaaggctagaaatcaaaggccttgcagacccatgtggtcattttagccacaagcatagagatactacacactggcacacgtgtgtgcagacacacacacacacacacacacacggaacactgagagtcaggagatacggattccaatgccagctccttccttctctcaccacataattttgaactgcattaacatctttgtgcttatatgtctcgtcctaaaaacaggcactgctgaatcagacattttccaagaatccttaaaattcaggtaagcctttggagatggcttcattgaagtcgattgttttcattcctaaaatagatagttgagaagaacagggaatatttcacttgataacaaatacaaatagcatggtcatgtctccaaacagccctttaacagacagagagatgatatctaatgacaggtttctaacttaatgccattttatacagaaaaataaagtgtttttgcctttataaaaccaagttaaaaaaataatgcatatgattctcattaataagtccaaacacatcttcttgtgtgaactcatcttacggtgctatctcattgaaagaataggaaaatgttgccaatttactgcaataaggtaattactgtaataagataaatgttaactttttaataaaa

SEQ ID NO: 54656 - DNA, 1468 bp, Bovine  19866881273558
  misc_feature (1)..(1): n is a, c, g, or t
nccatatagctgactcactggaaaagaccctgatgctggaaaagattgaaagcaaaaggagaagagggtagcagaggatgatatggttggatagcatcaccaattcaatgaacacgaacttgggcaaactctgggagatatagagggacagggagccctggtgtgctttgtccatggggtcacagaatcagacatgatttagcaactgaacaacaaatatataaatacatttaaaaggaatacattctttttaataaaaaagaataaaaatttgatatatattaaataaagaatagatattaaatgtatttaagaagaatcaggtcttttatcccaatttctggagaaaaaaagaaagacaaagagaaagagagcaaggattaaaaggtgcttccaggaaggatgaagagtttcagagctcatcatgaacgttcatgaagtacgtcaagaggaaaagtctcagtgtcagaattactgatctgctgaccctctggtggtacagtgacccctgaaataacaccttctggcgattcttctgggactgatgactactggttccaaatcaagatgcttctcacccagatgcttctcccccacagtcaacagttcaattgttcttatgttaattagaactggaactcattagagagatgcaaagacctctctgaatgggaggcatttaaggcagtagtttaaaaaatggaataagacttaaaatcccaaatggcaagacccacacccagatatccatgacagacagaaatagattgtacaaacacaacccagatttcaagcgatgattgcaaatcaatggtgtggtagctccagaatataaccataactcaaccattagtaaagtatattagaattgctaccaaaatagcaaaatttatcaaaatgaggatgcagcagcattaagaaaagtaaaccagttaaaatgtgttttataatttagttttctggacgataagatacttgaaatataaaataaaataatggccaaagtttagacattgggggtattattgaccgtagcatttcagcagaaaccagataatgagtccaaaagagaatcaaatacaagcggctattggcggaagcaatactctgatgatgacttggcctttcctgggcgtaaaagggcaggacagaacagaccatatggtgtcctcctgacctttcatgtttctgtgtaactctgtattaacaaggcaacagccagtctgaggagagaatgccatctggtgctatagagatatggagcaggataatctattagatggataataaaggcaaggctgttggaatgatacccacctgcccaggaactataaaaagccaggtgcaggaccttgggttgatgttggcccagttgtgagcagggaaagcacatcgatccaatttgctaggactctgtttctataaaagcaaaacgatcaatgttttccattggatcattttcataacg

SEQ ID NO: 54657 - DNA, 2572 bp, Bovine  19866881312724
  misc_feature (1)..(1): n is a, c, g, or t
nggggttatgcagcggagagacaggaggaagagtaagggaagagtgtatggtgatgcgcatggacctttcctcacctgggagtatcgctcactgagctaattgagtacagtctctgccttttaggagtttgcaactaaacataattatatcaacataattataacaaaaagctcatacatattcattacttaattcaactaatcttagaaaccacttgctatactcatgctctactgggtgtctgagatgtgaggaaaggtatgctccaatatttgcccccaaggaagttaaagtcatggtggagagaccaacacgccacaaatcatgagaattcatttcagtatgtagtggtaacgtgggcagcatgaggaatttcagtaatacaggtgtggagtttagagcatccaagcaggtgatggtgtgagaaacactcaccaaatgaattagtcaagcaaaaacagtgtgtgtgtctgtgtgtatggcagtttgtgaatagccaaactgtaaggggtcataaatgtgcagacacaaagttgtagcactttttggagtctctttaaggagatttatgcttttatttgagtatcaaatatcagacagtgatagaaaaggtcagccacatggaacaaatatgacttcttttgtaccacattaaagcacttatatttgattttatgctacagaggataaaggaaagcaagaatgaaaaagtgtgtgagcaagaaagtgactataaatctgattagaaggtttaggagacactatatggaaaaaataacatatgagaaatgggttagggcattcctggtggaaaaactgagcaagggtggagacagcaaagcatggagcatcgtataggaagatggagaatcttgctggcctggggcacagagaagagaaagctcctggtccgcaggtgatcatccagtgcccagacatgcaagctggacagcgaagcagaagtcatcaaagcaggaagatcttcattaatgagtcggtcacttataaattagtcgccattgtttaatgcaatggtttgttcatttccattgagtcaatgatgactcattaatagattcagataatacaatacaaagaaaacacaactgaattgtaaagaaaaattgcaaaaatcgaaaaatatgtgcaactactagaaatcaataaatgtgatattggagaattacttaaatcttacacaaagacatttataaagagaatttagcagttgacaatttattgttaatttcaaaattatgtaacaattaacttccaattaatgtagcaattaattgttggcctcaccatagaaaaactccacaaggatgataacatggtaggctcattgaaagaaaatcctgcagagatcacataattacctgagagagatccttgggggaaatgatgaagactgaaagtacttgcttgcagacgtgatgattgttaagattatgcagcaaaaacaaccatgaagagaaggacgcagatgacgaaactgaggcccagagattcagataactcatgcaaagtctagtgtaggatgcagctaagatgagttgaaggcattatcctcctcgttccataacctataacaggatttgcctagagcctccaaaggttttatcatctgcaaaatggggataataacagtccagtccttccaaggaggctgtgagttttaaccgagataatgtgtgtccacgctcagcacaaggtcaagcccaggagagacagatgagtgctgtgactcttactatttacagcatcacgatttgacatgaagaggctgcataaatgattcaggcttaccaaacataaatacatacttggtgcttcctttgattattttcatgtgagaaggaagtgagcctttctttgccaaataaataatttataatgaggcttagagaaagtgtgtgcagcgcagaatgaaaaccaaacccgcagtgagcagatctgggtgaagtccccaagaatggtcatttctagtctcctaatgagtgtccacgaggaggggcggctgagtccagcatctccccatcccacccatttcagagcagagcagcctccagctgcttctctcaagaggaagatggtgaggcgatgagggactctccgtaagttactttcctataacagagacatcattctgcatgccagcacttggaaaatttctagcattttccctcaaccatcacacacttcctttctgctgaaagaaagactggggaaccaactatagccttcttttaagactccagctcctcatggacgtccgctcctcaacaatgtaatgcctcgctcctgcaggaccctggagggtctcatgtggttttcgctgcttgcttttgcagtgctagctgtttcctttttcatgtccacctcttcttataatggtgttttcaggttcccttctcaccaatggctgcacactagtcaatgaaaatacaccctcctcccttccaacttgttgtttttcagatactggggatgagaaaaccaaattccatcttattagaactgtgtgttctaaaacaagagtaaatcggccccaaaagagcaaggaagggt

SEQ ID NO: 54658 - DNA, 892 bp, Bovine  19866881412059
  misc_feature (1)..(1): n is a, c, g, or t
ntaaattccttgaacaagttgcaaagtggaagcacacaaaaagaaaagtaaagtgagctgaattcccctgcaaactttaatatatgcacacagaagcaatttctaggtctaactgaaaagctttctttgtttttaaccatctcagatgcccaaaataaagaccctagccagacaacgccacccaccatgcagggaagatacagaagataactgctcacgtgaaggcagaacaaaagaaaaacaccagcccctggatcccaggtgtctcaggaaacagggatgcggtatcattggctgcctggactggatttagaatgtgggtacatacaccccatgggctcagatcagggctgaaaaacagcagagagaacactgctcctgagtcttctaaataaaccagtctaaaatggatgtatcccctaagagctcacaggcctaattaagattttttgaacctgatcaaaacgttaattactctgcgcaaactgagcaaacatatagatgtcacatcctatgaatgtttctttcaattgctgtcctgggaagacagatagaaatgaaaatagcacctcgttaagtagaccacacgactccccggccctggctctcctgggtgctccatctttgctgaccgtcgtgtttccctttacagtcaaccaggtaggatattataattccagggactaaaatttattgaacacttactcttgtcaggccctttgcctttggtcctctgttggatctgtcaataaaattacaagacggatttcagcatttgcattttatgggcacttgtacccagagaggccgagcctgtgtcctgagtgacacagctcatcagtggaggggctccaacaaaactcaagtctgtctgaccgtaaaggtcacatgg

SEQ ID NO: 54659 - DNA, 581 bp, Bovine  19866881751362
  misc_feature (1)..(1): n is a, c, g, or t
ntatgatcatcttagcactcattttcataagaaattgaaatagctcttttaacttgattaaaaacggtcaagtttacttttttaaaacatctaatttataactttctgtgatattcattaaccttgaaaaaggctttcagattgaattatatttgtggaaggtcctcaaacgtatgttcccgggagaataagggctttcagcatctctcttccatttgaacgatggcctcgaactctgtctttgtgtcttgaatggtgtttagagcaggaacagccttttgtctacaccgcctccaatgtcctcctcacctcagggaaatttctcattttctgttgctgttaagcaaacataagaaacaaatgaaaaaaggaaaaatccactcgtatgccaaaaataaagtcatattaacgaggtggcttgaacctctaaatcccagggcattcattgactgaaaactgagacttcatcctttacccgccaggacgaacctggacatttcccaggatggagctctctcctctgagggtgattcgccttcagtaggaaaccagatagggctggtgcgcctgagcggggtgct

SEQ ID NO: 54660 - DNA, 1665 bp, Bovine  19866880572797
  misc_feature (1)..(1): n is a, c, g, or t
nttggtgtggtagccattaaaaaaactgcactgtttaaaaacctttgtcattcagtacttgagtgagacttagaggacagctggatgaggttgacaacctgaggatgagaggttagttgagtagagtaccgaaacaagctgataggatattgtgggggaaagataaagttaaaagtagcacattaaactcttttccccaacatcatctcttgtaatcacattgaaggaggtcccttagaagatcagatttaaaccccatttccaaaatcctcatagcatacccagaaacgatagtttgtccttcacattgatcttgtcaactagccccacagttcagacacaatttccctgttttccctgagacacagatggctaatgttaattttgtttaacctttaggtggaacccttgcctttttgacaatgataaagaaaccaatgtgattttaagatacccttgtatatggacacttgtttttttctttttttccaaaacctttacaaaagttcccctcactcctcaaccattcattttactttttataactaatgggtatactaaaatattataaataattgaatactttaaattctttgaattttgttagagatatatctgtgtaaattgtggatgaaataaagttgtagaatgagaaaaagatatatatcccttatatatttgacttctacagatattattgaatcacttttttttttttttttttgactagttaaccaggggtaatattaaacaattgaattccaggtcagcaaatacatacaaatctcaatgttgcttttatctacagcttttcatgttgaaaatcactttttagtctgccctatgggatagctatgtgttctagtggatttgctattatataatcatatttctggtaatttaaaagcaagagggtcattgaggaatgcttaatttggcctacagtggtcagccatcatcacagttactttgttgttaccaaatttagaaatgagttttaaaatgtgtttttcaagttcatctatacagaaggaattaatttaaaatatattttatttatgtgacttatatccttcatgattcatatttgggcttgtcttcaggcaaaagcaatgttagctttcttgggggaaactcctttaatttgatagtggtaatgttttgacagctggtaatttgcttatttgcatcttactgattattaatagatcttctagtgcagcagttagttatataaactagcaacctgcagttaaagaatccttatttcctattaattaccccactaagagaaaacagattagttttttcttgagtattatcattaacatcatgagatatttctcatctcaatgtaatagtgattattatttcatgcgtaggataatagatatctaccttgaacattgcaagattcttttccagttcaccagctattactatagatttgcactttataaacaatttcagtagagatggtgctttagctactgttgttttgttgggatgagataacctagaaaagtttaagtaacttgtttagcttctccacattatgcaaaagatctttccttgttttcagtgaatagggcattttgagggaagaagttcctttaaatatgttcatagggatatattatattcaaatggtgagatgtatataaa

SEQ ID NO: 54661 - DNA, 2257 bp, Bovine  19866880604263
  misc_feature (1)..(1): n is a, c, g, or t
ngatgtataatgttatttagtcctgcactgatttactcattaataaaacagtgcagtgatccacagtgtagtaatccaggtcacatgactgaggtcctgccaccacttgtgttactcagagacctttgctgctgtatacacacgccagttgtggaagatggcaccaaaatgacctcttaaagaaggaatttgtatttgtgaggtagcatggtatagtcactagtctaacgtatactccgatcaaattccagcttttgccaccagttgtgtgacttcaaaacttattgtttaaattccctggtcttttgctttcttaattataaaacaactagtatactcttctcataggacaactgtgaattaaatgcagaccggtacataaaacattaatgtaatccctggccccaaagcaaacacttaatggctggcagcttttattatttcaaaatgcagaatagtacgaagacaatgtatttcattgatgaaagtcataggactctttactggtatgaaatcttaaaagatctttaagctgtagtatctttcataccattttgttgactgtcaacaaagcatgtccattttccaggtcatgagtttgcctgtacacttggagctttgcataatttgaataactgcttaactattcagaccttgagaagtcaaaatttcctatgatttggtaattatttatagcaaatacttttaagactgtaatgcttaccagtgtgccttaccaataaatattaaatgatggattaatgtatatttcaatgagggcaataaagtacctcaatcaaagtcaagtttatgagctattaccataaagttagtaaaataataaaatacacatttgttgtgtgcaaaacacatgaattatctcatttgatcctcaacaacatatgagatagaccatactattattcctattgaacaaatgcatagcttagaatgagagaaaataaattattttgctaatatcatgtactgctgttattgttggttagttgctaagtcatttctgactctcatattatcccatggtctgcagcctaccagactcctctgccataggatttaccaggtaagaatacctggagtgagttgccatttccatctccaggggatcttactgatccagagagcaaacctgcatcttctgcattgcaggcagattctttaccactgagccaccaagtcgttactaatataggaaaattagaatgtaaatgcaagtgaccagtctctggaattaaagattttaaccattgtagtttatttctgattttatagaagagtcagatactcataaactgtacttttaaattaatttttattagagtatagttgattacaattttatgtttcaggtgcacagcaaagtgaattggggatagatattggggatagatatataatattatatatatatatataagaatgaatatatatatccattcttttttagattcttttcaaattaggtcattatggagtattgagtatagccccctgtgctatacagtagcacagtatacaccctattatttatctattttatgtttagtagtgtatatatatcaaaccccaacctcccaatttatccttttcatgccccctgataactgtaagtttgttttctacatctctgactctatttttgttttttaaataagttcatttgtatcattgttttagatccacataataagcaataacatgacatttgatagactgcattttaatacaaagaggatccttgtttcagtgaattctgggatttaaagatgttttaaatttctttagggtcaaaacagtgtctgtcacatatagtgagaataatgaaaaaagtcaaataagaaactatagtttgaattttgtactttcataccatgtgtagcttttacaagaagatagctaatgcatgaagtgaagccaacatgtaacttaatgttggtcttttaggaattttccttgtatgcttttcactgacactataatcattggcttgaatttcttgaatttcttactcatattgtttactaacaggtattgaagttaggcagtgtctcttcaatttcttgattaaaagtaaagtctgtttaggtaatttagatggaaccaaagtctcatatagaatattgcttttgaacaaaatataactgctccgtctaattataaaatgggtagttgattagaaataggagccttctcaatgcctgcccatttaatatgatggaaggtaacataagagtag

SEQ ID NO: 54662 - DNA, 1396 bp, Bovine  19866880687264
  misc_feature (1)..(1): n is a, c, g, or t
ntgaatcagatcattgcctgcttgctacttgctcacctgcacagcctgcttcccttatcaccagcatgactttcaatcttgttgcagatctagctgattaaaaacgctggtcttgagaaaattctctttcttgaaagtcagtgctgcaggagattaggactattcatattgtaaggcactcccttcaaagcctctggtggctttactctcttgactgatgcaacccttaactaattctctttatccagataatccacttgcttccagtattcatcaaacagcaaaatgaaaagcttttaagaaagagaataaatgtgcaggcttaaaatcacatagcgttttagtcttaataaaactgtgaaaaaaaattattaggaaatcagatgtctgaatcttaggtccagtgaaataacttaaaagcagagaaaattcaagagaccataccaaatgtgttttgtactttttgaattgctttagcaggtgtgtggatcacaaactttcgatgagggaaaagaactgtgttttttctctcagataaattgaacataaggcaacccgcccaccctccacgtgagcccagcttcttctctttatttgtgtataattctcaattgcacgtgatatttgatgtttaaattgaattgattaggtatttaatgcacagtgatcatgcacaaggtactaacaaatatacgtatctaccatgaatgggaagaaccttgtcctgagggagctctggtattacagtaaggaccgacagagctgttctgagttagggccagaaaatcaaaacattcaaagtcaggttttcccttgattcaatcactcctatggcactgggaaaaagaaatgtgatgaggaaagggatgttttcaaagcagtgacgtccagaattccagttccaaatgtatagaattgacaactgaacagatttccataactacctataagatatgtgattcggaagtggtgtaactcaagcttcttcatgcgacactttgttttagggctggcatgtggactgaccctgcaagattcttactgtcgcttccaggataccacccaggaataccaagtatctgccaaatagatttagaaactacttggagtggttcagtggtaaagaattcgcctgccgatgcaggagacgcaggagatgtgggtccgacccctgggccaggaagatcccatggaggagaaaatggccactcactccagtattcttgcctgggaaattccatgttcagaggagcctggtaggctacagtctatggggttacaaagaatcagatacaactgagcgcacacatatgcacgcacagcaattctttcatactttgaaaaatcctgtccaagagacaacaaagcttcagtgttctttctaaatgacagtgtg

SEQ ID NO: 54663 - DNA, 1059 bp, Bovine  19866880738016
  misc_feature (1)..(1): n is a, c, g, or t
natttctggaattttccacataagatttttggattgtggttgacctcagggaactgaaacccatggaaagcaaaatctcagataagggagaactgttgggtgcccactgataattcccttttgttagctaccacttatccagtgtttactatatattaggcactgagataaatgccttttgtgtgttattttaactctttttttttaaatttaattttatttttaaatggcggattcatttcgatatttggcatcaaatgccatttaatccatctatttatttgtgatttgtatttccttattatattttaaatctctttcatcctacagctttgcacaatcttacctctcttactggttatcccacaatgtagctaacattcaaagtagcacaagtactcaacatgaaagtaaaatgtaatccccactctgtggaaacaggtacttagtttcccattaacacagttggaaattaacatgtaactccacattcattcgaatgagggtatatatgcaccgtgccagtaatccactcttaaatcagataccatgatttttgagcctttagaattgactgctttttagattatatcttttgactagaaagaaactactgctgtgaaatatatcagtttattatgtttatatttgtggtgattacattataaaacattttgagcctttagaattgactgctttttagattatatcttttgactagaaagaaactactgctgtgaaatatatcagtttattatgtttatatttgtggtgattgcattataaaacataaattttacctgaaaaggatataaccaaacatttatttccttccttttatgatacaggtaattgtgtgaatttaaataatttgcaagttggttgttcttatagtcataacaaatacatacagggactcatctataataaatgatcacaattagtggtttttttttttttattactggtggtcttatctattgcttaatccctgagttgctcaggtatttctagaattgaaatttataaccccctcctccttagctaattttttatgag

SEQ ID NO: 54664 - DNA, 4012 bp, Bovine  19866880869273
  misc_feature (1)..(1): n is a, c, g, or t
ncagaaagaacattgtgcttcactgtaaggcactgaaaatataagtgtttttattacattaattaaatatattccagattcaattaagtggaaaaatcagctttgatcattctttctattattagactatatttttggctctgtgacgtatatttattttgaaatatctattctaattcaatcaaatagtggttcccaaaagttgttgttgggcaaattttcctagtcctatcccaagagtccttccctgggaaaatgggccccagaatgttaggctttaatagcaaggcaataattcagatttgaaggaaaaataaaaagtttcacaggcaaacaaaggttaagagttcaaaaccatgaaatcagctttacaacaattgttaaagggaattctcaaagtagaagaggttacaactagaaatatgaaaaatatgaaaggaaaagtctcattgttaaaggaaaatataaagtaaaagtagtaaaaaaaaaaaaaaggctaatttgaaaagacttgttcattgcagtgttatttacagtagccaagttatagaagcaactaataataaattaatggataaagaaggtatagtatatatatacaatggaatattaaccattcataaaaggaaacgctgctgttagcatgcagcatggatggatagagagggtattatgctaagtaaaatgagacaggaaaggatggattttaagaattatttcacttatatgtggaatatgaaaaaaaggaatgaacacaacaaaacagaaactgagttattaatagagagagtatatccttggtttccatagagggacagggtaaaagaagaagagtaacaggtgagggagattaagaggtcaaaattccagttgcaaaacaaatgtcatgggttttaaatatacagtatagtgaatataatcaataagtatataacattttgtatggtgacagatggtatctagacttattgtgatcattttgaaatatatagaaacatcaaattactgtattatataacagtagagtattgtaggtcagttttacttaacttcatagaaattagatttgtgattaactggtgggctgtgggagaaggaggaaatctatgaatgtagtcagaaggtgcaaaccctcggttataaagtactagggatgtagtgcacaacatgataaatacaatcaacactactttatgttacatgtgaaagttgttaagagtagatcttaaaagttctcatcacaacaaagtttattgctttatatctatatgagataatggatgttcactaaactttgatcatttcatgacatatgtaagtcaaatcatttttgctgtacaccttgaactaacacagtgctgtatgtcaattttataccaataaaactggagaaaaaagaactacctcttcatatcacttatacaaatacatgctaaatgtaatcattattattgaatttactgctttgggaactaaatataaaattatttctcactgaggttcacctgattggaataaaacaatttgtgttgtaattttttttaattgaagaatgactgatttacattgtttagtttcaggtgtacagcaaagtgattcaattacatattatttaaaaataacatatacatatatttgttttaagtactagcaattctagcagtttctgaaaaccggaactgtataatcttggaattaatgtatgaatgatacagaaatgagctcttatattcatattcgaatttccaaagcactatatttaaatgtgaattagatactttgcagtctcagctttgaaacatcccaatctttcaaataagaaaatttatttatcctttcatagattacagaagataaaggctttttatcattttaagtggaaaaatagttgagatgaaaaattaccttgacaggattgattgaaataaaatatctttgtaagattgagaagctattatgagacatataactgtcaaatgcatgcaagtcttagcagtattcgttgtttccctgataccatatttatcttgaaaaatttgaaagggaagtattattttaaaaatattgttgtcaacaggaataaataggttattttttattcaaaagcaagagatgtatttagatgttcttgtgacagattttgcatatctttaatcaatttttctacttgagtaaactcacttttgcttctgtgtgctgttatttattctgaaagttattgacagactctctggatttctagaaagatcagcagaaataagtgtttttcacatattcattttgtttttaatcaaaatgtctttaagtttgtactgaaattcaattgaattggcagatcaagtcctcacaattatgatacttcctttcctcacttcttttgcctgtattctgttcattataagaatggagattccagaacattcatctagtttgcactggcctacattgagtgtctactacataaaagtttcagatttaaaatttgctgatgtcatactgtgatgttgtcaattcattcctctgaaaattattacttaaatatagaggactgatggatataattattatttttcagtaagattagttcttaactggtatatacttccatcagattgcacatggtctctatttttatgccttttacagtttgtttcttatttgggtagtgtgtgtgtgtgtgtgtgtgtattcagaagtttatatatatatatccacacacacagactctttgtcttttatagtattaatgtatctgcacattacaagattcctaaatcaagtgtccccctttgtgtatagcaaaatgtttgtgcttataaatgtgtgtgtagtggcagagtaaagaggatagagggaaaggagggatgagagagaaagagacaatgaggaatgcttgcattttgatttttgttttaattcattttttcattaaggaatcagttttcccctttgtttatttctccttttcaccactgaattaatacatctcttccttttgcctgtatgtctcagtgtaagcattgaagtttctctactaatattatgtattctttaatttgcttgctggaaattccctggtggtccagtggttagggcttgtgctttcactgcaggggtctgggcactccttggaagaaaagctatgacaaacctagacagcatattaaaaagcagagacattaatttgctgacaaaggtatgtatagtcaaagctatggtttttccagtagttatctttggatgtgagaattgcaccataaagaaggctgagcacacaagaattgatgctttcaaactgtggcattggataagactcttgagagtcccctggactgcaagatcaaatcagtcaatcctacaagaaatcaatactgaatattcattggaaggactgatgctgaagctgaagatccaatactttggccacctgatctgaagacaacccattggaaaagaccctgatgctgggaaagactgaaggcaggaggacaaggagacaacagagaataagataattggatatcatcaccgattcaatggacatgagtttgaacaagttcctggagatgatgaaggactgggaagcctggagtgctgcaattcatggggttgcaaagagtcagacatgtctgagcaaatgaataacaattttgtttgctagtatcagtactcctctatcaggaactctgtgtgtgtgtgtgtgtgtgtgtgtgtgtgtggtattttcacatagggtaacattctgtttctgtctagaaatgttttttctttatatatatatatatatatatatatatatatttgttttaaaattggagactgtattgttatgctgagagcacttatgttgtgggagtttggggggttattttcctacttattgttgtgtaatttttttagaagacatatggagtgatgtgaacctgaataaccaccatggttggcaaatcatgcctctagcagtttcccattaactatgatatttgccgtatttttattagatatcttatct

SEQ ID NO: 54665 - DNA, 722 bp, Bovine  19866880874249
  misc_feature (1)..(1): n is a, c, g, or t
nataaattttctgttcaataacctctgtgatgtcacatagcacatttgtttttcaactcaaatttgggtgtaatcttagctttgttcttttttactttgtgaccttggtcaaagtatttaatatctttaagcttttatttctttacatctcaagtaggggagagaggaaaaatatccacctttaagactgttatgaggattaaattagagaacatttgtaaagtagttaagcacatcgtgtggcacatgatggaccttaacaaatgatagattttcttattatattttagttgcaagtttgccttttacaagtagttatataatcactaataccaatgtgattttggaccccaggagactaacatacatctataaaactgaaagacacagttttaggagaaataatagaattttcccttaaaacaattttctgcacctgttttagaaatggatgtcgtataactctattgagaattcacctcctattatttaaaacaatgtttgattggattcaaaccaccttccaacattttctcaaaggacaatccaaactcttcaattacctttttcacatacatctcagaaagtattttgactgcctgaaaggccataattctttattcctaaagttttgaattccatctgatgaagatatcacactttgtgaagtagcaccatgtcacagaaacaatagtttaaattaacctcttactgccttcagt

SEQ ID NO: 54666 - DNA, 1079 bp, Bovine  19866880889163
  misc_feature (1)..(1): n is a, c, g, or t
ntgtgctgcagtccatgggttcgcaaagtgtcagacatgactgagtgactgaactgaactgaatcatataattatgcaagtgtatgcatgcaatgatgttcagtgtaaggatatttatattactggaaattggaaacaaccaaatatctatcaatgggaggttgaccaaatgaagtatacacctctgcatgcattatgatgacatgcgacataaccactaagattataatgcagctcactatttatgacatgaaaaaatacttatgacatattaatgaaaaaattataccatattgcattgattttatctatgtatttgtacatcaaaatacccttccaaatatgcacatagctttgtgacacatgtaactaatatttggcagtgatttttttctcagtgattttattgttttgctatttcttcactgttttatgcctttctaagactgacatttgataatacaaatgaccgtccatgtttgaaaaaggaataacttcctcaccttattgtcatatatcagaaaactgccatatttagtgaacaattgtctatttataaatattgcctaaggttgtcccatgcataatctccaaagccatacacaatggcccagcatttacatactacctttaaaaagtacttttatttaataataacactttcattcttaaaaaaattccttaagtggtagataattatattttccttgtcaatgtgtttatatcagttttatagaggttacaaaaagataataaaatgggaataatgttatagcaaccataaaaatgcaataatttcctctacccttcttttaggaatcaggagaatgagtctaagactgggtaagccataaaatatttctgaacatgagtagctaaaccttgaattgcttgaaatgtcattgtgtgcatcacctgtagtactaccaatttcaaatgccacaaaaatgttttcatattctttgttctggacaaaagataatctgagctcaggaatacaacccatgtctctagtttaacaatataccacttgggatttaatgtcctttttaatacagattttgtcacatcattttata

SEQ ID NO: 54667 - DNA, 856 bp, Bovine  19866880896710
  misc_feature (1)..(1): n is a, c, g, or t
ntgtcttgctccagggcatgttttatagcattagcctgggtaaatatgcttcagtttcaattaataaaattgtaaatttaggatctgtgttttagcaaagttacagtttgggtttatgcaatgttaaactaaagcaaaataaagccataaattaccataccctctgaaatactttaatatggttggttcaaaattgaatttttatcccattactctagggagatagttgctataaaaaggcattttcactcattttcatcattgtcatgatctaagtttttttcttctaatactgaaatagtttttaatgtagcttttgaaaattgtattgatgtttgttctttggcttttctctttcttgagataattcttaatttgctaatatattgctagcgctacagctttgcatattttttgcttgtttaatctgtttgttctaaaaaaaaatctagcaaatttccatctaattttgctattcttttcaaaatgcattcaaaaatgcattcttaggttaactttggtttgaaatacaaagtgctaatgtaaaatttacctttgcattttatttagaggagtggaatatattgagaagattgaataactaaagcaggatttcaaggagaatgttcacacacttaagaagatttttaaaacatattattctctgaaaattgccactgcaaagaaaggaccaatcatttttcacacgatttccttgatttggggttgggacagcagaaaccagacattttattgtctctaactctgaagtagatgtcttagaacatcaggcttaaataaacactgagctttggtaccattcaagaaataaataaactgaatgaacagtaggaag

SEQ ID NO: 54668 - DNA, 1003 bp, Bovine  19866880898655
  misc_feature (1)..(1): n is a, c, g, or t
ncaaacactgaagaatctttggctctgcagatattgcttctgaaaattgcaatgtaaaatgcctgggttaactcataagatcagactaaaaatagaagactcttacaaggggtgtaacttctcagaggcccttttaaagactttttttccccacttccactgctctcaatttggatcccagctcatctgacttgttcacaagtccttccatatgagaaaaaacctcaatgctgattgtgaatcacgtgggctgctgctatccttgtgtgatttttgttttctgccacttctcgctgggggctgctctagcaggatgtagcttcatcacgtggagctgcctctttgaaaaagtgtgatgtacatcacctacaggcaggtacctcagttggttcagtgaaaaggcgagccatttcatttcccagcctgaggtctcagctgcacagacagcccaacaagttcccctttaaaatgctccaagataacttcccaaggaccagatggttctggtaagtctgggatgattagcaggcttcctgttccagagcagctacctggcaaggggatttggcattgcctggagaatgctcatgataacagaaagcagggaatagtggctatgacacagtatctggctactatgtgttaggaagcctcttatctgtctttgttttaatggttactggaaaataaccaaatacttctggagataatcctatttcattacctagatcaactgtgggacttgttctattttcctataaaatggcagggatttgggaggaggtcaaaggggatactgggaaagaagtgggttaactgtccaaattcaagtcagagaatgggggtattattttcaagagttaatgtaagcaaaactgggcaaatctttcataatcagtcatttgaagcattctcagaaaaatatagcatcaattatataaaattccctgaagcatcaaaatattttgcatgcttgaaatcctgcagatggtactcacaagta

SEQ ID NO: 54669 - DNA, 968 bp, Bovine  19866881153222
  misc_feature (1)..(1): n is a, c, g, or t
natttaggctctattcctgagctttcctcatttatgtcagtcatcatttagtatctgtctgtatttatgcttgagaccacagacagagagatgccaagagaagatgccaaaacctgacaatccacagtgtataaacctagtagacagaggttaggaatccttcaagaggttttataatacaggttatttcaatataataatagccacaatgcaaatgagaataattacccacttagcacttgaacaactatgacattatgcagccattaaacatgatgttttgaaaaaatgtcatatgcaaatataaaaatgatttggttaaacgacaaaattacagatagatcacacagttgcaggtaaatgagtactgagttatattacagagatcattgaaactagatgtgcactatcaaggcaccactctcatcagtgaatggataatcacttagaattgtcctgctaaattgggccagggaaaccaattctatgaccaaaccttatatctacatattaatttcaactaattatattttcttttttttaattttattttatttaactttacaatattgtattggttttgccatatatcaaaatgaatctgccacaggtatacatgtgttgagatttttaaggaataaattagtgagctactatgctcctttgaatagagagaagtaaaaaaaaatattgtgtaagtattagctgaagtttaaggtctggagggactaaagatcatgcttatctttgagattaatgagtctagcactagttggagaaggcaatggcaacctactccagtactcttgcctagaaaatcccagggacagaggagcctggtaggctgcagtccatggggtcactacacaactgagcggcttcactttcacttttcactttcatacatggagaagtaaatggcaacccactccagtgttctgccggagaatcccagggatggggaagcc

SEQ ID NO: 54670 - DNA, 1168 bp, Bovine  19866881217702
  misc_feature (1)..(1): n is a, c, g, or t
nttttctgtaagagtttttgcctagctggtttcagtgcaacccctgattatgcagggggcatttaattcccatatcttttcataacagactcttctccatttgggtctcaactaatatgttactgtaagcactctggctcaagtaaactcatcctctctcctccctattattttatcacatcaccctattttcttttattcagagtatttacttaaaattatcttgcatattaatttgttttgcattatttctcctcactcttgaacctaacctccatgaaagtaattgtcttccttgattcgatattatttgaatctagaacatcacttgtcacaagaaagcactcagtaaatatttgctgagtgactgaatgacttactcttatggcatctgtgatgccagtctggttacaatgtttctaaagacgaaaaaaaccctcaagattatgcatttccatatatattcaattgcagttgattttttaaaacaaaatcttttaaaatctttctttagagcatttgtttgggaaatgaaaatgattctgtaactactcatcgatacacatgaatcaatatcaatttagaagtgcatcaatatttttattcctgtctgcctgcattaattcatacatcactatgcattccacttcttggcatctgctgattccagattttctagtttgcagcatagcatcattgagtttcatgccatatggctgccctttggtccaagctttgatcaatcaagtgatagcagactgactcgtgccattttagagaagatagagatttgatgtggagccaattcactagaacatttttttttttttgcagaaaaatgttctaagcatcaataggagagcataaactatactaaataaatatatatacaaaaatacactttgtacctaatggttgtctcagagacaaattgccagaaacttgttttatccctaaaggagaatgttccttccaaaattctaactggtgctgtacccatgtgtgtgaccaaaattattctttatcagcagcagtaaggggttttacactctgaagtagggtagtctattctttcactgatagcagtctgaaaacccagtgttgtgatttagtgatttgaaacgcaacaaacaaatgtgaagaaatgctctgaaggatgctctggtta

SEQ ID NO: 54671 - DNA, 1539 bp, Bovine  19866881230879
  misc_feature (1)..(1): n is a, c, g, or t
ngaacccttcccaaactccgtgatgccatctgcagagcactctctgattcgtaccctggctgaccaaagcctgtcatgttagcagcaacagactccagtatctgtcttctcaacttggtggcattgctgtgttctggggctctacatctctccaccactgccaggaaaacattccctggaagaaatttgaggacatgtaaaatacctattttgttcttcctcaaaaatcatgatcctgaactgtgtattatccagtgcctgaaatatttccttcatatgagttgagcacttttattgttgtttatagcagcagggcaagtccagtatcactttctctattatggctggaagaggaggttacactttaattttagatggttgtatttaatcttttatttcttttcataaaatagctccttttagtagctgtttgaaaaatatcggtaataggaaacaattgaaaaaaggagaaaaactgagtttttgacagatttgttaaggccaactcaaagagtaattttgtgaactttttttttaaaaaaaagctgcacacagaagaattaatattcaagtgacaggacaagaattgttattaatatacagttctttcctaaatgtttattgctacagtatcacttctgtttgatatggatcacatttcattgcagtttattagcaatcagcagttattatttggctctagtgtttgcaaactataattcattaccctcttattttttatttatgacatagtgtcaaatgaaggaagtaaattgtgtattttttttgttgttggagagttctgtacactagagtatattaacagtgttagtgttattgtttttgtttaaatgtattttttcaggactttagaaagaagaaggtcctatattctgaaaaacgcaatgctatttttctgagtgcctgctatatgcattgtttctccacattccagtctgatttattgatacttaaagcaatatttaagagtagcatttaaaacaagccaatgtcactccaaaaatcatgtcttaattttagatgtttgacaatgaatggctttttaaatatataccaatacaactcaaaactgtgtaatattgttatgtcaagatttgagtaacaacaatagatttccattaaatgaaatatgatttaactgatgcattttaaagtttttgtctaatagcagaaaatatagtgtgatgtaataaaaagtatataaaaccagaagtcagaattcatgctctcccattgctgcttacaaggtacacaaattttgagcagattcttcaattcttagaagtgtttcttcatccactaagaagggaatactatcatatgtcttgattacatcacagtggttttgtcagcatgatgagaactatgtgaagtactgtaatagctgaatgccatggttatcatagaatagaaacaataagatttttcttctagtgtgtacctattattgatttgctaagttgccttgagaaagaatttagctctgtcttctcaacatcttaaataataactgaaata

SEQ ID NO: 54672 - DNA, 781 bp, Bovine  19866881313953
  misc_feature (1)..(1): n is a, c, g, or t
nagaaatcctgtttaatatattagggtgttagttatcttccatttatagcaagatggattcagtttttattgactagtatgacagaactccttgaagaatatgggaatggatcctggttccactcctgacagaggggaatgctactatacttgcattttgggccaagaaaaaaattaaaaaaaacatgtttttccacacacactttcgctttttgccttcttatttagaagttatttcaaaatttaaagaagacttcagttcacagggagaagccttgagtggtgatcataatgagttcactcaattttccacattgttagtctctaaatgacaggagtgggctgttgatccaactactcttaggcattagagaaaatttagagctggtaaaaagtaccaaatttatagtcctgtagacagaagctctctatggagcttctaaacaacaagaacaaaatagcttgaaagcagtgaggcaaaactctctatattattatggatttgccagacaatcaagattctagtaaggccctaagtgaggggtgatgtgatacatcacaggctgggaaaactgatgaccataataataaagttctagataagcaggaagcctattttccaactaatttattctgaagcccattagggcacaagcctgttcaaaatccaaaattattcacaaactcatattaagaggttgctctatattacagatgggtcattgttaatagcaggtgtcttctgccatttgaatctttcagatgcaggtcttttccacat

SEQ ID NO: 54673 - DNA, 1304 bp, Bovine  19866881401350
  misc_feature (1)..(1): n is a, c, g, or t
nactttaatttttagaaagctgtatataccatatttgggcttcccaggggacactagtgctaaaagaacctgtctgtcaacgcaggagacatagaagagtgggctcgattcctgtgttgggaagatcctctggaggagggcatggcaactcaccccagtattctaacctggagaactccatgcacagaggagcctggcaggccacagtccatagggccacaaagagctggacatgaccacagtgactttgcatacacgcatatattatattcaggatgttatatctcatgatctgaaactgacaaaatcgtcaaagtaaaaggaaaaattgtacagtttttaagatgcaatcatatttgctgaattcttacaatgtacatatttctgaaccataattgaatacatttgagcataaaatacaatatcaggagtgttattctatctacacatagataaatttacagttagtttgcaacttcagattttagagtttcattgttacctttaaatattgtgaactgtaattagaatgaagaatagcattaaataatactaagaattaggttttggaaataaaaaaaattgtgttgattcagactcatcagaaatatgacatttcttatttttacatgtggttgtatatatggttatacaaaaggatctcatgaatgaatattaaacaacagtgttactttatttattgtacacagctatctgcaactgtccccaaataaaactatacctataataaaccatgaaaaatgatgggtggtaatgaaagtttcccatctggaaaagaccctggtccagatggatttgctaattaattttataagatgtttaaccaacctttgaagaatatctcagacatgtttgattactttaaattaccaacatttttggaactactgctgtgggttctcaaactaatctttataaactgccaagaaacgctaaaatccagaatgcatttcttaagaacatacttctttcacaaaaatgctgaaaaaaaaaaaaattcagcccagtgatacaatgttttctctttgaaaggatacttttttaggtcaaaagataggcagaatatcttagtatgggttaaataatttattcacagaacatgatatcttatttgaaattaaccaatacactatttttataaaggcttcccaggtggcctggtggtaaagactccacctgccattgcaggagacatgggtttgtaccctgggtcggaagattccctagaaaaggaaacaggaacccactctagtattcttgcctgggaactcccatggacggga

SEQ ID NO: 54674 - DNA, 2177 bp, Bovine  19866881404549
  misc_feature (1)..(1): n is a, c, g, or t
ntattgaagtatagccgattaacaaacaatgctgtgatggtttcaggtaaacagcaaaggtacccagacatacatatacatgtatccattctcccctagacaccccttcccattcaggctgccacataacattgaacttccttccccccaggaaccataatctatgtgtgtgtttttagacgagtggcgtttgaatgggtagattcagtaaagcagattgccctcactaatgagggtgagccccatccagtcagttgaaggcttgaatagaataagaagactgaccctttcatgagtgagaaggaacgtcctcctacctgactgcagtgggctgcagtcaggtagaaatcaattttctccttgcctttggttccaccccagtttcaagcctatcagactttggactggaacactactggctcttctgggtctccagcttgctgactatagatcttggaagttattatgctctataattgtgtgagccaatctgttatccttagaataaatatttctctctcttttaccttttctcacataccccgacttatacattaaatgaatcacaaattctgtgactcttcctacaaatgcctcttgtcatgagccaccttgtttcaagtcattttgtcaccaatgtaatcctgtcttctacttacactagtgttgtggcatctttgaccttcattaacactgatttccatccaatctgttctctgtagctagaatgaattcttcaaaatacatatctgttatgatatcccctcaccacccacactattctccccaccaaaaataaaattttcaaaggctttcagttgtttactaggataaagatcaaaaatcctgtatatgacttatgaggctatacatcatctcatatacatatttctttacaagctgctttcatattactctctcctccgtttttcatattactgctctcattgaatgttttgcacttacttgaaaatgtgttctcagacaagaccctggcacatgcttttcagttcagttccttttgttatttatatgctctcattgtatctatggtgtaccaaggacaggatggtagtcttccagggtgcaagcaataaaggggtgtattgtctgcagagaatttaataacagtaataaaacacattaaatgtaagtctgctttttcttagaaacttgtgccagcaaatctaaacaatgtctttcctaaataaagcttttgttgatctaagttctcaacaattgatgtgactactactgagttctaatatttatgtacacttcaaattagtatttgaaaattatctttcaataaggattatgttctgcatggaatttaatttggaaaactccaagttccatgtaagtcctcaacatggactcagctacgcatgtgtgttgaaagaataagtttacaatggttcacaatcattttatctcacttcaggtttaactcctatcatacctattttttagtttaaagagtaaattctaacaaacaatgatagtccagtaattataaatacaataaacaatttgagttacttctgttttacaatcctgtgtgaccacttggagttttgttttgtttctgtttcaaaacaatgacaaggacatccttgatggtcctgtgattaagactctatgctttcatagcagaggcagcacattcaattcctagtggggaaactagggtctctcatgaggcacgtcacagccaaagaataaaaactgtggcaaaactaagaacaaatgacatagtataatgtttttgtctagaaagaacagattttagtccacacatgaaatagtgtgctgaatttgagtaatatctgaaaaattggaatatattcttctttcttgcttattttaaaattaaagaatgactaaaacataaatcctttataattactagtatccatacttacttgaaaaagtttcctcactatgagagaggtgttaaaaaatgatctactccagatgtgaaatctctaggaatgccactacgtgaatcatgttcctttccttcagagcgcttactgttagttatagtccacattcattcacagtctgattgtattattaacattttaatccctggttaaaccaactgctacctggagagtaacattacatttctttttacttacagcactgatgggaacctagcacaatgctga

SEQ ID NO: 54675 - DNA, 811 bp, Bovine  19866881611613
  misc_feature (1)..(1): n is a, c, g, or t
naacttgtcgcccctttctcttgtcttagcttctcatcacctcagctccctagacagatgggtccagagggctctccatcattagataattcaccaactccccacttgtaattgcaggactgatcttgtctggagaaggggattttaatgattccttgtactattctaccttaccaccctcattgtcctccatttctggtcatccagcagggcttggcatgaatcagccacccacatgtgatgagatataggatggaacatatatttcttataacttttctcagcttaaaaaaaaatgagggtacttagcattcatgtaatttcaaaatgctgaataacctaaattggcctaagaagccatcctttgtgatatgttacagttgccatttgcttatactgttgatggcaatgaacatgaacaccataactggtcaggatgcatgaataacgttccctaagtactttaagaagtcctgggggttcaggtaacaaagctaaaacaactattctttctcagtcgtctatgagtattcatattctcccaggtttctgcgcttgtctaactcttttgtagacaatctttcctctgggtaatttcatttccctggctctgattactccctacgcagtaacatagtccaagtctttacctccagtgtggagttttgtccttgagactcaaacagatacatacaactacttgatggtactcgctctacttaaaagggtgctcttatcagtaggatggggtagacgtgaaggaggagattgggggaaggtacattttgctctctaaaatttcttacgttaa

SEQ ID NO: 54676 - DNA, 1097 bp, Bovine  19866881657311
  misc_feature (1)..(1): n is a, c, g, or t
natcttaattattttattattaaaataagagtactcccaaataaataatactattttcactgataggagggaacattttccatatgtcaactcaacagacaaatgatagaagacatcttcaaagaaaggtagaagtattatctaatttattaacatgtaatcaccattttatgcttcattaccctgatcctaaaacatgtgcatgcacacacacatactctaatttactcatactgcaatgatcattatgtggaataatggaagcttaaggggtctgattgcttgagtttcatatccttttcattatggcacagaatttgtctgggatccagttttattatctgccaaatggatataacaatctctccttgttttagtgtgtttaaaaaaagacaaagtatgaacaacttagcataggacagagcacacagccagctcccaataaatgttgcttttatattgtggtagcaataaacttcattcaaagagtggcagcatgatggagcagaacaattaaacaggcaccaccttggctctgtcagatattaaccttgtctctcattcagcacctccacatatctgggtctcagttttctcatgtaaaaactgagcaggttaatttagatgatttcacaagtcttttcagtaccattttggatttctacagaataaagaacatctcctattaacctgagataatagtttgctttgcacattggaagatatccatgtttttactggagtccatgaaaaagccaagaaaaagttaaattactaattagtcttctagctccttccttaaagcagtggttatctttgttcagtttttgcagtggtacagttctaggatatcaaattaaaaataaaagtaggttattgcggtagtgttccacaggaagagaagtaattttattgcttaagagtcctcctatattatgcaatcttgtaagtcaagtatgaattttgacagaaatgatgtattacacaaatacaaatttcacggatagagatgtgacttccaaagatccagaaagataaaaagtaaatccgtgctgtaatttaaatccaggttataaacttggactccacctgggatt

SEQ ID NO: 54677 - DNA, 680 bp, Bovine  19866881860514
  misc_feature (1)..(1): n is a, c, g, or t
ntgctaatttaagtgctatttccttatttaactataaacattatatagttagacatgcttatttcttttgaaatttaacttgttattctgtaattaagatttaagagttttaactgactgactcactaataaagattatccccattctgccatacaaagaaaatcccagttcactaatcataaattctcattggcctctggctagagttgccctcattatttgcaagttttctagaaattaaaaaatgcttggcagttagtatggggattcccagagcttttctaaattgtgggggatatcaggaatgctctgctaggtacagtaagacttgagactgcttacacaaagcaattaagcaagtgaagacactgaggtgaaaggaaaatgtatagtttttaaaacaaagtgagtcttttttttttttagccaagagggaaacaaggtgagccaggactactaaacgtaaaatggagtcttgcttggaatcctggatgagaaaaaggccattatataaaaaactaaggaagtctgaataaagtatgcacttttacggatgcattattactaatgcatcagtattagtccattaattgtagtgtaattaaatgtgccattctagcgttagatggtaataataagagagacagtgtgaggtacaaggaacaccttgtcagggagg

SEQ ID NO: 54678 - DNA, 1755 bp, Bovine  19866881897108
  misc_feature (1)..(1): n is a, c, g, or t
nttattgatatttctcccagcatgagaaaccatattaagggcaattcttttcaaaaatggctttatcattcaaatttcctgtcactgtctgtatttcatagaaaatttactccattctttccttcattcagtatgtaatcaatatttactgagcttgtgtaatatatctagtactctgcaaataaatagggcataaactttgttctcagtttgtacagtctgataagaaaacagaaatggtatgttatgataatagctattttagagttatgttctgtataaagtagcttgtagaaagactctctgagtctgtttgagagagttgggggagacttctcagaagttagaaaatgtgagctagattttaaaggaatgctaagaattcacaaggatttgaggtaaggacaagaacattgaaaggggaggatagaggaaaaccctaagcataatgtagtcctatcccgtccaatatatcaacagtgatatctggatttaaaatttagaggcctaataagtgtactctgtggaggacattttcaccacattggaatcctcagatttggagccttggcattcttcatggagagctggatcatacccagaaatgagacctttagtgatctcatcccattaaaaccctcgtaaaaaaatcactattctggcatcttttttgattagaaaatcaaacctcttctcattataagatgtatgcaagcaagcacaaaagagagctggtgtttttaaaaaatcatactaaacaaaaggagcactcacttgctaggctggccttgtatgctttagcctgaagggcatttttccagccaagcaagaagcccacaaaacataatggaaacactgacagatacttaactatatcagctctggtgggtacaaaccataattcacttcataatacaaattgatatgttgtcttgaggggtccctgccttggtgttattgagtgtcttttgaaaagctctggttctgggctatgaagctacaaaataaaactggatgtttctctctggaatagattctgaactgggcccctcaattacagtaccggtatccttagggcaggcaaaatggaaatgtcctctaaagatggacaaatataataatacaaagtgaaaacagcaaacaatgaaacaaagtttattattaaaggtctgatatttcttcagacaaggtctacttaaaagctgagtacaccagaggtgaatgagggcagctacttgcatttaagtggggttaattgttaagcaggttataaggacactctgtattttcaaaatcatgtggtggggcaaagttcaaccaccccagtgatcttgatgaccaagcatcctgtgtgttttctaatgaaatgcaaatgacttcaatcataggtagccacatttccaaataccatttagagctttaatgacttgtcctagaaaggtcctgtcaagccatatttaatgggtattccaaacaatgtaaaacagatttctgtaaatgtgttctacagtttgtaattttattgtaaaaatcattgtcctctatccctactactttgcacttcaccagatgcaatttttgaggcttctttactgaacatgttacagtgtcactttcttctctctgaatctgaatcttcccaattgtgattttaagttcccacgtgcagagcctggagttctgacaattagaaaagctccataaaatgtggaaaagaattctgaaaggcacaattttcaatagaaaattaggaaa

SEQ ID NO: 54679 - DNA, 1230 bp, Bovine  19866880825521
  misc_feature (1)..(1): n is a, c, g, or t
ntgagacaaggggatggtttgtttattgagtggaattgtgaggaggagaaggaaaagagatgttgagggcaggaaatgatgcagacttagatttctgtcacagttattccccaatagatttctaccccaaattcccacagattaaacccttactgtatatagatttctatggaaccagtgaagaggctgagctcggcctgcagggtgaatgggacaaagagggctggtttcctgggcccagtgcggcatggagacaggggaaaggtgaagacgtaagaagcatgaagagacccaggagaaggatacatgatatcgaagaccttgcaattggggttgtggctacatttaacaatagcattaaaaaaatcatctgaaatttgaagtacaatggttatcaacaaaactttgccatttggaggactgagagaaaatgatatgaaatctatctgtgcagatgcttttttttctacatgcaaagttctttaaccatccaccttgatatggtgtgacccaggctgctctctgtctctaattagtgctacacccatgggggctaaggtgtgaggaaagaccacagctggagagccgggtgtcactccgggctactgaccagtatgtcatattcagagtgaggtagcgtggaacacgaagcatcactgctgcaattcttactgagacttctgaatcaaacactacttttttttttttttttttaatatcctaaaaagaacatctgctaggatcaaaatcctaagcttacaacctttccaagtttcatgaaaaagtaaatttcattaatgctacatttttctttctggaaaaggaaatacatttatgggatatatttgccctagtaggagcaggccttttctccaaagagattatagacattataggaatcaaaactaagtaggagattagacctacttgctagaaaaaccctttaaaccctgtttctgacatttgagatgtttgattaagcggctttcagtggagacttagagaaagagttctgaatagggcaaaagcagaagctatgtccctaaggtagagacagattttgggtagcattacttaactccagcagcaagagaaatatactgtgtttaaagcttgatccaagggtatcgggtccagaaagatcaaagttcagtccctaagaaaaacatttgaaaaagtacctaaagactttttcagatgctgtcatcatataaaacaatcagcaattag

SEQ ID NO: 54680 - DNA, 1919 bp, Bovine  19866880398873
  misc_feature (1)..(1): n is a, c, g, or t
ngattaaaataagtgcgtatttagtatttcaatcagacataaagaaagaaaatgatgttgaaataaagtttgatttttttcccttctttctttatatttggtgactgtatgcaagtaattcaatctccacttagataataaatacctaaggtaactatgtggatcagccactatcaacgatgcttatagaaaataaactaaagaggcaaagcagttgttcttaactgtaaagttttgttgtttttgtttagtggctaggtcatgtccgactcttttgtgaccccatggactgtagcctgccgagatcctctatccatgggattttccaggaaagaattctggagtaggttgccattttcttctccaggggatcgaagtaaaacttatcaacatgctaacggaaccttgttttctgaagacagggggctttgtaaccatttccctctcttcaaatggcagtctacttctctcctgaggtggtccctgtggccctgcctcttctgtttatcccagtccttattgctttctccacatccatcattctctcaacaaagaaaataagactcactgcctattctgaaattattgtaactccttatcagtcaaaaggaaaaggacactttcctttccctgggagtttgctgtagtgactgtttttataggtcagtccaagagggaaacattttcttttagattgaatccttcattgttcagaggagagctcaaaacacagataaagttatcattctgagaaagagcacccaagacatacgtctcccctccctttctctcttctccaaagaaaataatttgcatacatgtatccttctgagctttgtccaagtctgctcttgacagatgctatctgaaaaaagtgactatcgagggaagacaggtacactaatcaggcatttccagtattggttggggcaaagcagaactcttcactgccagtgggaagatgaccctggggagatggccgcccctttctatcttcagagaacttctctggatgtctttagaaagcaactgctgctgctgctgctaagtcacttaagtcgtgtctgaccctgtacgaccccatagatggcagcccaaaaggctcccccatccctgggattctacagccaagaacactggagtaggttgccatttacttctccaatgcatgaaattgaaaagtgaaagtgaagttgctcagtcatgtccgactcttcacaaccccttggactgcagcctaccaggctcctcttcccatgggattttccaggcaaaagtactggagtgggttgccattgccttctctgttagaaagcaatgtgctctgtaaactctggtaaactctgtatgttttctatagtagcacttgcttatccaaaattgacttaattataaaaattctacatattgcagggcttttctgaggcaaacacaataatacatgtggaattattttgagatatcattgtgaatccatgaatataagggattgctgtctttaggaaatcaaccaaacttctccccaaagtaactaacctaagcttctgatttgatttttaacttcaaaatatgcatatattttcatattgcatatgtatgtatatagtatttatttaaataatctttcaattcacatttgattaacctggactgtgtaataacataaaggtagatgttctgcaattttttatttaaattatacagagaaattccagtactttggccacctcatgcgaagagttgactcattggaaatgactctgatgctgggagggactggaggcaggaggagaaggggacgacagaggatgggatggctggatggcatcaccgactcgatggccatgaatctgagtgaactgtgggaattggtgatggacagggaggcctggtgtgctgtgattcatggggtcgcaaag

SEQ ID NO: 54681 - DNA, 1799 bp, Bovine  19866880408060
  misc_feature (1)..(1): n is a, c, g, or t
nattgagcagagttgcactcattatctacccaaagaaaagaactttggaagaaaaaaaaattcacaaatggcaagactttgaagaatctacttgttatcttttccactccgggtgattttagacttccgcaccaaattgaaacaccattttctgacacaataatgtaatacatttttgacatcacaaaagaatgcttttaaggcataaaaatgcatttcccttatgtaatcaaaaacaaaaaccctataaattacaatgcaatgaacagtccaattcctctattgaatgtatttaaaagatatatgctgattaagctcttactcatttgtgataactgtctagtgaaagctttacgaatctggctttacccatattaaatgccctagtggtggccctcaaataaaaagagaaggggaaaattaatcttagcctttgttcctttatatattttaataaatgttgctgcacatttttaatgcatttatgtcccacacagaatgccaaatggtttgatgttttcaatggaaaagccaagaacaaatttacacattaaaatgtaaagcagttcaacagtacaagctttgttttccagaatataatgtgctttctctgtttcttaataactttttatagtcatttcagctgtatatggaagtaggttttgctaaaattttgcagagtatctcttttgttcctttgttcccttctgccttgttgagaatatctttggactgtcttgcacatcatatagtaataaattctacttttttactagggcttccctggtggctcagatggtaaagaacctgccctgcaactggggagacccaggtttgatctctgaatcgggaagatcccctggagaaggacatggtagcccactccagtattcttgcctggagaatctcactgacagaatagtcttgagggttacagttcatagggtcacaaagagtcggacatgactgacgtgagttagcaggcacttctttaatataatgatttatttataagctgatagggatatttgctagattttgtcatgaaacctctttacagagagaaaaatcctgaaacaaaactcaattaaattaaaacaatagccgcacaatattatttgcagtgatgcacttaagtaaaaataacagaggacattgcagtggacaatgaggagcccatttctgggatatctttaaattgagaaaaggtaaagggggtagcactcttgcctggaaaatacatggacagaggagcctggcaggctgcagtccatggggtcgcacagagtcggacacgactgagtgacttcactttcacttttcactttcatgctttggagaaggaaatggcaacccactccagtgctcttgcctggagaatcccagggttgggggagtctggtgggctgccatctatggggtcacacagagtcagacatgactgatgcaacttagcagcagcaaagggggtagacaataaaaaattaataaataaaataaagaaagctgcctgtcaatgatacagcctctggttttctaggtgacagcattctggtttaagaaaaggaaacaggcacaacgacaatgcagattcacatctccgacacagattgcaattggctttgggaaacagatatgctgttagcccagttgattatggtttaagttttctgacagaaaattaagcaagaggcactcttcaatggtagatgtctgctacctagtaaagtggtaaaagtgaaaatgagacatacaataaacgtaaatatgtaggaggaaaaacaagtggggaccacgtt

SEQ ID NO: 54682 - DNA, 3648 bp, Bovine  19866880518985
  misc_feature (1)..(1): n is a, c, g, or t
ntgattagacttctgattattaggtctagcccttattgtctttgttttatagaagggtagctaattcagattcagtgacttttcccaatctccctcagtaggtgaagggcagaaccataatctctaagacatagagtctgctttgttctgcaagaacagccctgggttccgagtacgcttggatccaggcttcagattttatccttccttggttgatgaagtggctgagcagtatatttttcctcctactgctgacttccgtcagaatgtcccccatcggacatcagcacagttagttaccctgacactggtcagtatgtttctgtcagtcagaaattggctgatcccaaacagaattaaagacaaatcatacaagacaaaaatgcaaaggggtcccaaagaagaatgtgaaggaagatgagctggggtgattttaatacactatgggcctatgatcgtgggagttgcacagatgaacatgttgatggagcagtgagcagtgagtagtactcaccccaaaacagtgttgctccttaggtaagagtggtgatacaggggtggcaaacatttggatcagcagttaaaagcttttattgattgactcaaaatatatttcataagcacccatggtacatgtcattcttggctactaattcattaaatacatatatttcttgctcttgaggagcttaaaactcataaggggaaatataatgcagcaaacaaggagaaaaaagtgaaatttacttctgatattgactgctgtgctaaaagtcagctaacacttggacaaactttaggtcatgaaattcctgagaggttgctttaaattttccaactgtgtattttcatcagcagaatgaaaacaataatattagctatgtgaactctattatggtcctgataaggtaggtgtgaaagcatatttaaagaaagtaataattttattaatgaaagtgataattattagtggtattattttccagataagcaaagataaatatgcctgagcatttcaaattgttacttgaaagccatgtagtgatagcattttctttttttttttaatatagggaataaactaattactattaacaatatagtatcactatggaatcattacaagatcatcatatgaataaagaaaccattgttgagcaaactatatatatttagcaaatattaaaaaaattaaatgctttcatcatgatcctttaggaatttttgtaattattgttcttatttcttttgctttaaaatttggccatttgagaagtaaaattaaattgttctatgaagagaaaatcagagaagggctagaggataagggtagaatttagactaattgccagttaatgtgtccatgtagttcagaaagaattgaaaacagttttaagaaacccttattcatgtcagctcgctctaattggtagtaaaacaatccacatatggaaatgaaattagaaacccaggggaaaaaagtcaaagctaaaatgaaagcaaattgcatagcaaacattacttacattatgatatcaaataagggaaacagtacaataaatgaaataacatgagcaaaaaaagaaatttgacttctatttgcatgcccaaacttcttttcagttcagttcagttcagtccctcagtcatgtctgactctttgccaccccatgaatcgcagcacgccaggcctccctgtccctcaccaactcccggagttcactcagactcatgtccatggagtcagtgatgccatccagccatctcatcctctgtcatccccttctcctcctgcctccaatccttcccagcatcagagtcttttccaatgagccaactcttcgcatgaggtggccaaactggagtttcagctttagcatcattccctccaaagaaatcccagggctgaccctccttcagaatggactggttggatctccttgcagtcaaagggactcttacttagatttaaatctgaaggtctaacttttgacccttctgaattgttcatttccctttcccattagtttaattgactatatcttaaaagcaaatatcatttttttaaatagtttgatgaaaataattgtctccttatagtcttctaataatatcttaatagcatcctcagatgaaagacagaatattataatgagaccgtaggacagaaaaaaagatgtcatgtttgctctcttaacaaatatttaggataaatatttgggcaaattttaagccataaaattctagaatttaaagaaactattaaattgttccctcaaaggagactattttttttttttttttgcttcacatgatataacaagccttatctgataacaaggcaggggatggacacttctgttctcttagctcctgaggataaggacatatgcttaaaattatcattgtataaataataatttattatatgataataagatctcaaatctacatattattttatatattaacaacacacagtactttatcagggccttcccttgtgactcagtggtaaagaatgtgcctgccaatgcaggagatatggattcagtccctgatctgggaagatctgatatgtcatgaagcaactaagcctgtgcaccacaattaagcaactaagcctgtgcacctgtaatctagagaccaagagctgcaacttctgaagcccccaagccctagaaccagtaagggaagccactgcaatgagaagttcattcacctcaactagagaaaaaagcccatgcaactatgaagacccagcatggctaaatgtaaataaataaataaaagagaaggcaatggcaccccactccagtactcttgcctggaaaatcccatggatggaagagcctggttggctgcagtccatggggtcgctaagagtcggacacaactgagcgacttcactttcacttttcactttcatgcattggagaaggaaatggcaacccactgcagtgttcttacctggagaatcccagggacagaagagcctggtgggctgccctctctggggttgcacagtcagacacgactgtagtgacttagcagcagcagcaacaatattatatattattattttgttactgatagttactgctaagtaaaaagtcataagggggaaggagtgtcttaagttagttagggtagtgagccaagacttcttcaaggaaggtcatttaaattgagactgaatgaatgaaaaagatcaaacaagagaattctagactaaaggaaatactaagcaaagcttttagagtttgggatgtttatttctctatctcgctctccaggaattgttcgaggctccctgaatgcctctactgaagttctcaggtccctttcttactctctcctgcacccctccaccttggtaatgccttcccatgctgacactaggtttggtcatgtgactcgctttggtcattgggacattaacaaatatagagcaagtggaggctggaaaaggatttgtacatttccactttcactctgggtcctctgcattcactgacaacatacccatgcccgtatgctagaggatgagagatacagggagcagagttgggttgtatataaccgaggtgataaccaagtataacatgtgacaaggtccaaccaagatcatcagaaacatccagagta

SEQ ID NO: 54683 - DNA, 2607 bp, Bovine  19866880641798
  misc_feature (1)..(1): n is a, c, g, or t
ncttgcgaaatgcaaaagtatctgagattgggccagctttgtgtttaccccagaacattattttctttttaacatttctatatttcttttctttagtttcttgtttcttgacattttgtggataaacaacaccaagcagaaaatggcagtcatttcagaaatctgattacagtggttgcatttttgctaatcgggtggttgtgtgtgtattcataaacctttcatctattgtctgctctcttacatagctctattctactttattagtccagtgtcagccactaaagtgtatgttcttcaaggaatgatgaactagtatagaatttagtgtaatattcatgctaaatggacctggacaacactacagattagtaataaattcttatgaatgaatatatgagattatagagaaatgtattatgtaagcctcagttcttgcatattttaactctaggaattataataaaaataatagaataagtttttataatatggaattttggggaagaaaaagtatgtatataaactagaaaaaagctaaataatgcctagaaaatacctgatgtgtacagtggaatatataccctgagtagttattgctatatttaaaatatagaaatggccaatatgagtgttaaatgatcttgaaaatttaaatataagtaggttccttcttacttctttctcattatttcatctctcacaatatactacatttattcatactgatcagttcaatatcttcacaggtattgtattgctactatatgtagatatgtattttctaaaaaggttgtaaattatattcattcctttaatactaacctagaagcaaaaagggcctctattattgcaagttattattccggccccagagatgacaagagaggcagaaactatttggagctctgtctgaattgcagttttaagcacatctgatgtagtacatgtctagaggtggcatttctaacctttttatcaactgggttccatggatcagaataaatgataacaatagctcaccgccttctgctggacagattttgctacttgaaaaatgatcgaggccctattaagagaagccacaccaacctaatggggagcagatcacaggccaggtctctctggggctgtatctctctgtatgaggggacgtgaccttgcctgtctttttccctgggatcagttgaatgatagacttcttttctttccctgaattgttacagcaagaggagaggaaagattgcagctttttttttttttttttttctccttttctttcagaaaagagacatggcccattttaacatccccattatctatgtgtctgtccacaaaagctctatttgaaaaggccctatggtttcacaatgaggacaaggcctttcaaatgccactccactggccacagtgtacctggggctccattttcatacttggaatggcaatgcatttactaagtgcccccagaccttctttacactgacccacccctcagattttgctctgctctttcctttcatgaatcagatcctgtccctccttttatgtacacatattgcagttctccttcaagacataattcaaattctgcattccttctaaagtaatccttacccattcagactcacaatactacctgcttcttttgaattcctgtatattcttctaaggactcagtatagatactgaaacattatgctgcagtcattcatttatgatacaagaatgaaagaactcatcttgttctattttatttttcttcccttcatcctctatcccttccttcattttccccattactaccctctttttatgtcttttatccataagcataaaaatgtatgtatccactaaatttttagtgttaatttgtggatatatatatatatatattgtactatgcactatttctcattatctttcttacatattactctacattaaaacagtagaaattagatatctagatgatagttatatagatacatgaatgaatagatagggagagcaagagagagagagagcacacaagttagaaaaagagagaaatagatatatgaatgggtaggtagtagataacaaacaagcagtagataaatagatggaggaaaacttcacactcgtttcaaagtgcctggggaactaatgtgggagtagaaaacaaagccaaactgtcttattcctcactagtcctcattttaaattttaggcccacaaaaatggtggacaatccttggccagggaaggtccagtgtttctaggaatgttacatgacccaaggaaaaataaatgagttttgcttttaggaccatgtttacttagagataagaaccattggaccatcacagatagaactcctcttaccaacatttttagaaagcttagtgtgtgtttcatccagatgtgaatgtggaatgtccacctctgactcttcctccatcctatgatgaaataaatgcacacatttctgagttcagaactgagatagcttcaaatacgtagataactttatatagagtgaagacagttgcattatgacttttgtgtgccctaatcacttttgtctttgttcgcctcttgttttataaaagacaaccaaccaga

SEQ ID NO: 54684 - DNA, 1137 bp, Bovine  19866880779460
  misc_feature (1)..(1): n is a, c, g, or t
naaaaaaaaaaaaaaaaacagactaataagaagtaagaaaaattcaatgggccatatttcatataggaaaatgataccactgattgtcaataagacatactctttgaacttctatgggaaagaaagttttcactaaattacccacagttactcatttggtttctgtttttgaataaagacactcttgatctggcaacaatgttttctctatgaaaactaattcatttagcttcactgactctactctctaatccattgattttccaagattcattaaatgtcccaccttctccatgttacctttcatgtatagaaaacccactaaaacctcacagttacattattatctcttatgactcttacaatatactgcttgctgttaagcatcttgtgttaagctctcttaaaaatatgtggaaaagatctcaatttattgaattttccatgaatgctcagaggcaccaaagggactcaagataaacagagcccaaatacttgaaggaaagcagcatggtttgtttctacctggttgtcccaaaccattgaaaaatcccttagcaagtcaatttgcagtgaaagcaggtgtgagctgggaaggctttgtcccccgcacccccctcccttaggagtagtggcctggaacccagtaggctgaatgattatgttctcctgagccccactgtgagtcccttggcctaattattcaaagtaactattcatatactagttactcaaagtggatggagtcagactctgttgctacactgtcttcaaggaagtgggaaactttgcaagaaaaaccttccttatagaaatgtatgatccctctcctttcttcttcctttcttgtatcatcataaaatcggagcatattacctacagatgttcccaaaagatattccatcttttcctgtagcctatttactttatctcaaagcattcatcaaaacctaaaatacatttctgctttactcttctgttgactaggatccttaagagtagggactgctgctgctgctgctaagtcgcttcagtcgtgtccgactctgtgcgaccccatagacggcagcccatcaggctcccccgtccctgggactctccaggcaagaacactggagtgggttgccatttccttct

SEQ ID NO: 54685 - DNA, 1454 bp, Bovine  19866880865705
  misc_feature (1)..(1): n is a, c, g, or t
ntgagttattgaccaacataaaagctataaaaaattctgagaaggcaaaaacaattttataaatagggaaatcagggaaagcttcaaaagaaggtaggatgaagatgaccctggtcgtaaggtagggtttggtgatatagaggaaaagaaagagcttatctaaggaatgacaaagccacggtgttaagaaaatgccatattagtccaagtaccacaataaaacttcagaaatggatgagaactttctcaaggaaagagaagcaacatttccacatacaatgagataataataaataatgcaggaacagaaaatcagtttagtgaaagacaatccttctttcattttatccccaagatgactgaaaatggtagagatagacattcttttgccctgaaatgactccatggggatcaacagaaaccttttaatttggagcagcagccccagctcattgtgaagaatagtttccattttctaactaagtttaataatgcacttgaaagtctgggacaaatagccagaaaataaatgttttctgtaactgactgtcaaggaattgaatctgcttcacgctgccaggaaaattgtattagtatctgaagcaactattatcagtaggtaaaggagataagtaacgaggcagaaaaagaacaagaagaagactggatgtacaaagcaatccatggcgaagcaagatattgattggaaattacagctgattacactggtaacgggcaaagaaggtagtgttttctcaaatgtgaacaagtgacatttcaaagcactttctatgtgtttgaactcagacctctcattgggctttgtgttggcacagagaggagagagagataattgcaggaggtcagttctctttgtttagaaaaatgcattttctggttagaatttctacttaaggcttgataacgacagatgaaaatatattatcataacaccataacactttcctttgactttgactgcaaattttcctataactttggttgcttatttttacattgcatttaccaattagaaattatgtcctcagtatatacttgtaaaaacaaagcaccagatcaggcagattactaaggccacctctagagaagcaagcacagaatacagtattataagtcaaaacaaatggtacagcaacaagtactatggaccttaaacagtcactgtggacagatgggatcaaagaaaggtgttatgaaccaggtcgaccttgatgaatcttgaaaggttagaacattctatcaggcaggggcagggatgtgagcaaagaaagatgaggaagataacaaagagggcttttgaggaccacagttctttcagagaaatcctggttggaagagcagaatgaagttccatggaatgagcactgactctcaggttacaaagagagtatggctttatcatatgtaagtatacgtggccccagtgagtattt

SEQ ID NO: 54686 - DNA, 1277 bp, Bovine  19866880971266
  misc_feature (1)..(1): n is a, c, g, or t
natcagtaagatcctctaaagagtaattcctgaactgttcctcaatgtttacagctatctgcaaatctcctgcctgcagagaaatcaataaaaagaaatacttttctaagacagttccagtagaattccatcaccaatataaccttccaaagagcatctttttcaaaaggaaatggatattttctgataggacatccatggtggtgactaaagcatgtgaatagaagccatatgagctcacgatcatttaatactattacaagatgaaggcaaatagcatatttgacaatttctccatgatttgcttaaaaattgaacgaaataacatgttctgtggagtggaagatatcatctgacaaaagccctgcctacattgccttgctctgcttcaagccacagagcagtttgataattttcaagctccatattttccccaagattgttccaattttgcatagctccttttcttgtcagtaagattaacaatacaaaataatgcccaataaagtttcctttgtttggcttagggtaaattcaagtttgtgtaaataaagattttaaaatcatgtttgatccctcaccccatgtacacacaatcacactcatactcagttcagtgcatggtgaaaatggacagaagcacatttgctagctacaggtacccccatgttatggatattatgacacaagaagcaatgttgatctaggatcccatgtgaagcaatgatgaaaacattatatcaactagatgatttatgaatatcagcaggcacaccttttctgacattttataactttagttgggctatatgtaaactgaggttcacatctaaaatcatattgtttcccccttctcagtaactcttcctgccattgtgctttggtggtgatgaccagcatacttaacattctagcctttgaatattagaaactatacattaataacacaacttaaacataatttgcttgagttatttttcctatttcagttttctaaaaaggtgtacaagaaaaatttggttcgcgtgtgtgtgtgtgggtatgtgtttgttagatttttatttcattttcttcatcatctaagtatattaatgtccctgatccttggttccttgccttggaaacagagtccttgattgtatagcatgatactgctcagacttattgctatgaagaacacaaatgacaaaatgttctcttctttttttctcctaatctttctgtattatatacatgtgtttatatattaatatatgtatgtatgcatacatgctctg

SEQ ID NO: 54687 - DNA, 1022 bp, Bovine  19866881053055
  misc_feature (1)..(1): n is a, c, g, or t
ncccttcctacatagcagcagagacctgatcctggagatgcaaatttaaattctgaatgcattaccccataggaatattgctatgctttgtatttagtttccatactgttattaggacattactgtagttcagctacattatgacttaaataggcttttgtgagtagcttaggaagtaaaacaccatatctaaaacacatttctctgggaaaaatgcctcccaacttcaaaaatggacttgtaaatcaaacttcttttcaatatgtggaaaggaaactattggtagtgtgtgtttcatttttatttgaatgagtcttatattacaaactcaacctaaaatactaaaaggcagatttcactagagattccttataacagtgtacctacacatatcatccaaaatttatacacatgttcagcatagtatttcttacatagatattcaattaatactagttaaaactgacttcttaggccctccagagctggcttttctgagcaaatactccgagtcatcaaagcaaatttgttgttgttggccagttgctaagttgtgtctgactcttttgcgaccccgtggactatatcctgcaagctcctctgtccgtgacactttcccaggcagatatacttgttgccatttcctcctccaggggatcttcctgacctagggatgaacccgcatctcctgcattggcaggtggattctttaccgctgagccaccagcaaagcccaaagtatcagttcagttcagttcagttcagtcactcagtcatttccgactctttgcgaccccatgaatcgcagcacgccaggcctccctgtccatcaccaactcccagagttcacccatactcacgtccattgagtcagtgatgccatccagccatctcatcctctgtcgtccccttctcctcctgcccccaatccctcccagcatcagagtcttttccaatgagtcaaagtataactgttaactaatatgttttgactgaagtttgtttttcccaaaagttatgct

SEQ ID NO: 54688 - DNA, 1034 bp, Bovine  19866881251410
  misc_feature (1)..(1): n is a, c, g, or t
naattttgtagtatagcaaagaattgagttgttagttgatcaaacggaaagtatcacatgataaacgttacatatcacttccctacttgtcaacagaaaccagaaatgagtctctgtgtctcagtaagagatgtgcatttggagtgaattgtgggcagaagtagtagagggaagtaggaacctaaaaaaatacaccatatgggattgtcttggaaagtacagattaaatgttttaactgaaaatgtctcttttacaaaaaaagacaaatagaacacaattagtgaaataaattatttttgcaggtaaaaatgttaaaatcattatatttgaataagaattgcatctctctgtaaattgatcttttcccatcataaagacctgatgcatattgttgcaggattgtgaatcaagcgtgaggacagtattgatgctactaaaaaaaggggggcttaatagggcaacacattggatattaaagacctaaaagcaagagatgctgaatcaaatttccaataaccagtcccctgagacatccaattctgccactgagccagtttaaaacaaaaaagtgaaggatgtcaacagcagtaatattgaaatgcattaactgtaaaattgtgctagtgcatataatgacagtcataggactaataacactttgcaattaaatagcacttaacttcctaggagttcaaagtgcttcccaatacaatattgaacaaccttatgatacaaagaggaaaaaagcttccacagatcccatcgactaaagacaatgttttaaacgtacaccactaggatacagcttcttataaaatatgacaagaaatgccaaaataccttgggttcactgcccagtcagaaaagaatttgactctcagagacagttggagacacaatgaaaggaactgtgattgtcccttcttattcatcttcaaagctccagtcttttcctggttctgcactaactgcctgagtggccaagttcacttttctaactgcctttgtctcctcccctttaaattgaagatgg

SEQ ID NO: 54689 - DNA, 2605 bp, Bovine  19866881251557
  misc_feature (1)..(1): n is a, c, g, or t
natgagtttggggattgaggaaagagatttaatagactgaataagctggtcaccaccaaaagaagtgaaaacctgagcgagagtcatcagtaagaacacagcattagtgctggggacgtggacttaaaaagcaaataaaattaagtagtttattattcctctggctctcccactattaataacgtgttttccctcaagaactgagtatttgaaaatccatattaatcatcaagaccagtgttcgctgttattggtgggcggcctatcgtgccgctgctgctccttggcacaggaaggctggccaggaccaccgcccgccgccgccgacctcggacgggggacggtccacaggagcaagctctctccagtttgctgcccaggcggctggcctcttctaccctggctcttcactgtagggccaatatttcaactgcaggagaagagggacataattactgggacagacaatgttctattctacatggtctatggcccctatactaaccttaccttttcatccttacaccccattgcttcctgtccactagctgttcagactgggcagatggagaaggcaagaacctgtgtccatggtgtggtcccactgcccccaaggccatatctcagggattcagtcaagattatggactcctgaggcttctctgtcattaatgcctggatccagttctataggagaattatcttgtcccattctgtgaaatggagtaactattagtaaagactgagagaaattagtcccaactaacagtttacttttggacccttgtacttttgttcatctcttcctaactctggagctctgggataagcccccacttcagatccatcttctacttattgctaagggactccccagaatgctgtatctgagaggagacaagctggtgctagccttcctatgaatatttgaatattgcaggagatttagcccaattgtagctgtcatttattgtcaggctaacataacacaatgttcactgtctacctggactccagggcctgaaagctggagtttgaatatgtatcctccacgttttagttataagatttcagtgaagtcattgaaccttccagacccttagttcccttgtctgtcaaatgggttgttgcagggaattaagaaatgttcattgcttagatcattcagtgttaaaagccagaatattaagtctcacaacatgggtataacattttactgttattttcatcaacatttttttattatcattatgtgatttttactgtaaagctaccatgcaatttttatatatgttgcttattttagctgaaaaatatcatgtgttatgtaattcacttatcatccagtttacacattaatatctgagacagagccaatacttgaatttggggctgttttcaaatcctgtactttcctaactatgcaagtattttacttataaagaagtaaagttacaatattaaaatttctattatgacaagagatcacagagaatatcttatctagtaaaattttagataactgataatgctttactttttatttaagtatatactctagtgctaagcagtgcataaaatcattaatattttattttatcataacaagaaccctacaagacatcttcaattattactcccatttgacagataaagtggctaaagcttagtgagtttttttaaacctacatacagtgacagagctaaggaagttaaaagttcaaatttacagtaccatttagaacccagattcttaccaaaatgcctcctgtagaaaatggcaacctctgtatgttcaaaagataataattgaagaggatgaaatgctgaatggtagctgagattattgatgacttaagaagccaagaagttttggggcaatgacattcaataagacaatttgatgataatttgatgttgcctaaaaatgttttcattagaggttcagacccatgcttttttcctaattttctgaagcaccattatcataattacagtcattgttttcttaataataacttagcattatttttatatattttcaaatagcctcgtgtcaaatatttaatttctctttcactgatacctttgagagagtcttatttacattcgagataccaggaaactgagacagggctaagagtataggacattttgtcaaagctaatattgtccaaatctcttgatgactcactctattctcttaacatttactcctgtccacttgtgagaaatataccaaaaaaacaaaagaaagaaaggaaggaaggaaggatgaccatttctctcccctcctcctccaaccagtaactccaattactggctgagatttacagtgtgtgtatatgggtatgtaaagcaaatcatgtggcagaataataaaatgttaaaaatctctattaattcttctcatcttttatcttgatgccttcattagcaaacatactttgagtactaattctgtactagccatagtttagttgtagaagcaaatacatgcaatggttgtggcctctaatctcaaatatttgaaagtccatgaataaaacagatacaggtacaaatcacaatattttaatagacctagtgttttaatagaggtgtc

SEQ ID NO: 54690 - DNA, 1033 bp, Bovine  19866881315028
  misc_feature (1)..(1): n is a, c, g, or t
ntgcagtgtattcagaaacctttagacacatttgctgtctatgaaatgaggatacaaacatttgtacctctcctctttgagacatgaggatggatggcaaaaatcacttgtacaatactttaagtgtcttggaaaaagaacctatcgaaatggaaattattatcatcagaagagtcataacagtcttccaactgtcattgttatagtggaaaatggtgattcattctactccccatctcctttgtcccggtggatagaaatcagcttattagtttcttagtgtaactgacagtgtctcctttataaaacccattcccaattcacatttccactgaaattttaatccaatgaattatattttgtcctctgtattgccaattcaaaatcgttctttggtaactgtactctctgccttctagttctccttcaggaagtagaattactttgagaaaagatagagcagagcctgctgtggatatttcagttttgtgcccttagcagtgaaaaaggaaggattctgacctatttacaacacttatgctcccaaagaacagtcatgcatatgagggttaggtaaagaggaggtgggggtggtctttctattcaagttatgttcatgaactcttgaaggccactctatctagcattgtgcagaaattaacagcctcactaacagtcttcacccaatgactctttgtagttggtttatgaataacctagttccctcgccttttggatggagtaatttgaagcatgtttccctaattttgtgtcccctccaagctgctgtttgcctcctaggttctagttgcctcctaggcttaccagtttgtgttcccagcatcactttccactctggcacctcccatgtaaactctgtgtatttgaatccttgcctcagagtttagttctgggagaatacaacctaaaacagataacagcttcctatatctgatcacccaagactgacatagcaattagagttaaaatcaaactttttttttcttcatgtctttctacctcatctaaatca

SEQ ID NO: 54691 - DNA, 1318 bp, Bovine  19866881569530
  misc_feature (1)..(1): n is a, c, g, or t
natgaaagggttaagattgtaagtcctggagtccaatgtcccaagaactgggaagctctgatgtcttagagcacaaaagggaatgatacccccacctaaagaagagaaaggtcttctaccattctgttctacttggccctcaacagattggataattccaatcctattgatgagggcagatctttaactcagtctgctgattcaaaatactcatctcttccaagaacaccctctcagatggatctagaaataatattttgccagctatctggtcatcccttagccctggaaagttgacacaaagttaactatcatattttctgcactattacatcccagcttctttctactgctttgtctcatctcctctgtgcaatttgccttttctcatcctcctttggcctgctttctggctcccttctttgtcttaacccctgaggtatgataacactgagatcctagttcattcagcttatctttttcccaaatcttcctccttttgtaaaacacagcaaagaatgactggaagcaaaagtacctccagaacctgagtcttcctcttcccagtcatttgcacattcagttgctggcttctttgcctgcataatttcctcttagaaataaaaacagttataaacttctcagggttgagtttctcttttcttcattcattggagacagtcttcctatcctgaacagtcttcttccatggctctgtaaaatgaattatttgatctgagaatccataatgaatttttttggtcttaattagaccattaaaccagaggttgagatcataacatgtcatcctaatgatagccatttaatcaaaatgcccatttgttttcattacatcaagtttagaaagcaacgccaaagtgctctccagagtgttaattggtcttttaggtttctttcttcttctttttttattttattaatgtggaggtgaagaatgtgctgcagtggacaaaaaaagaatgatttcactaggtcactcactggttctcctctgtctgtcattatcctctgttcttcaaagttcatcctaaatgccaatgtttccaaaaaatctagacaagatttgcctgtgatctttcatcatgctggctaatccctggatcttcatttatctacccacatgcaaaggaaatagtaaggaaaacacttcctaaagaacaaaataaaaacaaatgaaaacaaacaaacaaacaacaaaaaaaaaaccttagtgtattttgtttagaaatggcaacagatgacagcaggtatcactagctttcccagagagaaaaagaaagtctgacagagtgtttga

SEQ ID NO: 54692 - DNA, 930 bp, Bovine  19866881653995
  misc_feature (1)..(1): n is a, c, g, or t
nacggggtaataggcagggcagtatatcacagaattgcagtataaagatgggaggaaggaggaaatattttgcaaacagattaaaagattttgtttttgtctaggggtttgggactagaacaaattggacataaaacttaccaaggaaagcctgatctattttcatgttttgagattttaagttgccactttttacaagatagacaatttcatttaaatctttgtaaattcaaatctatttaattcaaatgaatattttttatttggatgcctactgtgtgtctgttattttcttgctgctataggagctacacagaaaggaaaaggcaaactcctgtcttgttaattattaaaaaaaaaaaaaaaaaccagttttggaggcaaggttagcatatatgaagcaattacaaatcattactagaaagaacataaatctgccaaaatgcacagaatagtctgtgaattttgagtgctacggcatctcatgggaaaagatcaatgggaactagaattatcatgggatccaccataaagtaggaaatatgaagtgtttcttataaaatggatggccattggaatgtgaaaacacaaggaaagaccattccagaggagaaaatagctcagggaaattccttacagtgaaatatactgtatagtggatagaatatatttttagatttggaaagatatagctttgagttactattttattatattatttgtttaagggagagggaatagctggacagaaatgtagtgtttgtgacttgaagcatgcatgttttaaatactttaagaatggcttatatgtttgaaagaagaattaacatatccattgagggatattttaaatataaactgcttatataaatttgagtaatagattactatacaaagtgtgtttttaatggcataacagttcttctttaa

SEQ ID NO: 54693 - DNA, 1350 bp, Bovine  19866881752978
  misc_feature (1)..(1): n is a, c, g, or t
ntaggcaacataattttatgagaactaacatcttagttcttaaaggaccaatgctacttatttaccccattgcaggatcagtgttagatccagagttgtttttgttttatgagcggtcatctcatcttgtcacgttacagacaaattaattcccccttttgacataaagcacaggctttctcttccctcgtacatgcttgatcggacatgtaaatacatatatttgttgaatatatgaagacaaacataaagagcactccttatgagcttacccttttagtcatgacaactaccaccctaccaccctccaaaaatggaaataaaaattctaactttccttgaaagtgaaagtcactcaatcctgtctgactttttgtgaccgaatggactatacagtacatggaattctccaggccagaatactggagtcagtcctctccaggggatcttcccaacccagggatcaaacccaggtctcctgcattgcaggcagattccttaggagaatttatttttgaaaaattgaatgcacctcaaagcttcgaatagttatggtttaggtgtttggggaaaaagccttttttttaaaaaaaaaaatctgatttctataagtactgttcctaaatgaaataaaagtagcacaggtttgaatattcttagaagtgtgtataaaagtgaagctcttcctgctgttggaaagtagttctcttgtttttgtggagggaactacaaacagcagaatctcaggcctctgtaatgcacaacaccactcatctgtcaagctctatcatttgaaaataaagagcagccaagaatttgaaaaactaaatctattaagaatatttatgcaggaaaactatcactaaacacctccattcactcatgtaatgagattggcatcacgataaaattcttgtcttgtaagataatgatcttatggctttttctggctcttaaaccaaagataattgggttaatctctgcgggaagtccatctgtttccagtaaaccattttaattgtggatgactttatttcagaaaagttgaaaaggtcttgtcacttgcttcctgatcttggggaataaaagaatggatgtcaaaattcaaaatgtagatgtgtggaaaataggactgccacagaggatgtacctgtctctacacagtgtacatagagtgttatgggcaatattatactatatttactgagggctttttgctaaggatttaaacattaagttttggtcattaatacttgtgcgtcattcctgagacatggacagaaagatgtgttgatgttgcatggtaacatgagattatgcacaggcaaatttataaaactaaaaacatat

SEQ ID NO: 54694 - DNA, 1294 bp, Bovine  19866880386336
  misc_feature (1)..(1): n is a, c, g, or t
ntctttgtattaattgctggcaaacagactgggcgaacagttcccactggtgactccgataactaatctcactgtacctgaggcaagagacagccaaaagtgagccatcacagacgtctgacaagattatccatttcatctgtgctgtgtgattctgacattccatctctgggagatgggacaaaagggagtttccctggtcagtcaagctctaagcctcgcctgattcctgattcctgagtggatcaacactaccatctagcggactgcccgacagcatcacatctttccaaaaggaagaccaaaaacaagtttttacattaaaaaacgtaaaacataaggatatgtcattcttttggcagttatgtcattcaattaaaaaaactgggctcaaaaataaggaaaattataatcctccaaaatattttgacaatcctttgtgatttatttcttttattggtcttatcaaatagtaattctgctgattgttcagatttaatctaaaaagatctagttccatgtagaatgtattgaaatcttttcttatttagagcctactgaaatgctgacttgctattaataatcttctacatgaaaacgcattttttgtctaaatgtctgtattaaatcaccttgaaatcttgccatcattttaatccaacccttgaagatataagatcccattacccacttgtttaaattgatgctggttttatttcccatccaaacctcaatacaacctccttaatttgtactgcatttaggaataaaattcagctaatattatattataggaagtatctataatattgagtaatttgagaagaataaaattctttagaacataaatcttgcatagtaaattttctgcttctcctgtgtcttctatggtatcccaaactaaaagataacatgagaagagtcaaaaagtactattttcataggtttatattacttgaaactgttaaaatttagaggaaagaaatgggatgtaaacagaaaaacatgaaatagtctaagtacataagaaacagctttttgctttacttttatgttttactttaacacaccctccatcaaacttaaaaaaatgtgcaacatgtaaaatgtggttcatggttttgtaagatgcggttttgtcatgacacaaacagtactttgccattgtactaatcaattcaaatcaaaatgttgacacaccaaaatgtgttcagttttcccccatcaattaatatctgagatgcacagaatgggaaaatattaactatcactgtttaagaccagagaatcctat

SEQ ID NO: 54695 - DNA, 2113 bp, Bovine  19866880452150
  misc_feature (1)..(1): n is a, c, g, or t
ntaacaaaccttggaacaaagaaaatggacttttaacacttgctaatgaattgaacagaaactgattaaatatttgtctttctgcttttctaaaatgagagttctaattttctttctatgcacctctctattctggctagttgaacataaggcagtggttcctgacagtggctaactttgctctccctttccctaccccgggatttttggcaatgtctggtctggagacattttttgctacaaactgaagcagaggtagggagtgctactggcatctagtgggtagaggccagggatgctgcttaacatccttcaaagcccaggacagcccctgagaataaaaaaatattcaactgagaatgtcaatagtaccaagattaagaaactctagtctaagataccaagtttacatatattcacttctttaaacaaactaagcaatttgattcatttattaggtgttcttaattttttaaccataaattgtggaatggtttgattaaacaatgaaacttctttgctcttatatcaaagcactgatcaggctactgttgatcaaacataagaaaatgacaccttagatgcttcaaaagtaacataaatgcctgacaaaactggcctaagtaataagaagatgtatttttccctactttaagcagcccaaagggtaaaatggctccaatattggacaatttgttagtagcataacattgaaatcaaaggcttagagttttcctcattttgttctattaatatattcctttgtcatcaaatggctttcctcttgactgaaagatatctgctaggattccaagcatcccacatagatacaagaaactgttcactgaaggaagtgggactgttttctcctgtgcacatctatgtaagagcaaaaaaaaaaaaaaaaaaagttttcaaaaaatctgctctcttgtcccattgtgaagaaatgagtcccatactcatctttgactaaccttaggcacagagaatgaaaaacctgattggctcagactaattagaatttattcataagtcatatgggagatgggtagacatttgaataaagttgcgattctggcagcaaagaaggggaagcaaggctactgacaaggtgattacaaatgggcacccatttcaactctgagatatacagttagggacttgacaattcattgccgttgcaagtcctattgtacttctcagaagaacaaagatactaaccttggaggtttggctccatactacactggataattgccttctgtttctaaagtttaaagtagagaaatgacttcttttttcttctcaaaatatgtgggaacatatttctactttagaagtgctatcagaactgggacaagggttaaggtgaatggaccacccagggtgcaaaacttaaggaggtcctcactgaatttgtaggggggcccctttacatgtgtgtcccagatgcctcacttgccttgtcctagtccggccttgtgactgtcttacaatgtgagcttcacacacaacagacagagcttctgactatttcagagaagactcaagacaattgtcattctgcctgctggaccacaggtttgtttttttttttctttaagacttcttgaaaataattcactgcttatggaaagaccatcctccccattgggtatataccaaaatatggcaacagttttttgagccagtgaaacttggttataaaatgattttaaaaatacttttcccttgaagtcttgacatgatcagcactgggcgtgacccaacgatggaatgaacaacatgaacggatgactgtttccttagcaacaagaaccatgtttcctttgaaacgagaaaccaaaagaaactgtgcccctataattttctttcctccagtttagtgatttcaaaagtagtggcataaaattttaatatctattcaaccaataaataatgtaacacaattaatctattaatacctcagctctggctgcacataagaattatctaaacagcttttagtaaacaaagatgttggggctccgatagcacacaattcaagttgtgttcatctagcaccagcattttttaagagtgtcccccaggtgattcaaacgtgcagcca

SEQ ID NO: 54696 - DNA, 1759 bp, Bovine  19866880504797
  misc_feature (1)..(1): n is a, c, g, or t
natatatatatacactatatataatatatatatataggtatctatatatacaatacttttaccatatagaatttgtcagctacatgttttataatcttgaaaacgcatatctattaccaagatacacactcagaggcatttggggaacttttccataatttttaatataatcattttgatccttccaggaaaatgtcttttttcaatttaaggaagactctgctaaaagttgaccaatgtataaaagcccatttcaaacaaataaaaaatatattcaagccaccaatgaatcccagctaacatcatcctactaataattaactatacttatacacttatcatgttgaattattatctttttcatatggctcagaggttaaagagtttgcctccaatgcgggagacccggattcaatccctcggtagggaagatcccctggagaaggaaatggtaacccactccagtattcttgcctggagaatcccatggacggagaagcctggtaggctacagtccatggggtcacaaagcgtcagacacgactcagcaacttcacttgcactttcatagttcttattaaactatgaagtatttaaagactgaacccatatttcattcagagcctaattcatgtagcaaatttacagtcagtatttgtggaagaagagaatggaaagaacgaaagaaaaggagaaaaggaaaaatggacaggcttgaacaaaaaagctaaataagacaacccccaaagaaaaggaatgtatacaatatgtaacgatattaagtttagcagcctttgctatcagacaaggaaaagcattaatctctaagtcatacagatgtaaatatggttgctggacttattatttatctatgcttgagaacttcaacatgtttttctattatgtaagctcaccttacttcattaccattctccaaggacacattttgtgaagatgagtttatgttttgttttgttttttcaaataaagagaacacattccatccacccactgctgtctagtttctgaaccacattatcaaaactaagtttccttctgtgaaagccatacaagaacacccaaaggtgttcttatgaaccaccaataaacagtccccttaggaacctccagacaacagcagcagccatacctgcgttcagagccctgctacctaggaagactccaccggcaagtcttagactaatctccagttggaggggaagttgcaaacacggtcagtttctggaacagaggctacagtgctcatcccgcgaacaatcttcaaggaaagaattgctcttggttgcttcagtaaatgcagtctttcttgtgcattcatttttgacctacaaagaatgtcaggatctccctaaagtactattgaaatttttaaagtcttaaatttcattgtcagaaactgaaagtctatgtactgctcttttctggtaataagcagtgcatttccttctcacaaataatatggatttcaattctaccaaccataagacaaggttatattatagtctaaagcaatcatctttcgtctggtatagggtctgaatacatccctaaaattgcatgatgtatctgtcctgagttttaaaagctaatagaaatgaattccagtgtcctactaattagtcaatcactattatagtaaaaaagggatgatgctataaaaataaaaatatgttgaagtttggaaaacaattttggaataatcttactaacccaaggaatgggggaaaaagatacataa

SEQ ID NO: 54697 - DNA, 1927 bp, Bovine  19866880598755
  misc_feature (1)..(1): n is a, c, g, or t
ncattttgaccctgacactccctttgggtatatctgactatcctggtacaatgcaccattccccattattgaatctacaacaaactgctgtaggttattcattgattgagtgtttaagtatattctttaggagcaaatagagaactaatccgtaagcaatcacataaaataaaattcagcagaattcctgctttaaagatgctttgagcttaggcacttaattatgtggattctttgattatattgtgttacattcaataaagatatataggaactctgtttctttgtatctctgtagattcttctcagcgcttcattgtaccatgcatagaaattaagaaagcaccttccaaagcagtcataccaagttgaagcgtatctgctccctttttataccagtattttttcccctgggtcaatcacattattcaccagaatgtttatttaaccaacaaagatgctagcagtgattctatagttttctaatatgcatcacctatatatcaggtagactgttttcagactccagatatacatttgtctaggcataggcacctacattcatcttgctgctactgctaagactgtattttaacaacaggcttgaggactccttgctcagtgttcttaaacaattcagaagctgagagcgtgtgcggtggcatgtgtgagagagcagacagctctgtgtccattctcacggcccctctgtcagtgcgtatttaggacagctttctaacatgaaatcagctcagctgcagagtcgacttcaggggcttctgagagagcgagaaagaaagaaaatacttcaactccttaaaatgtagttgctgtttctgttctctgaaaccctgaatgtgttttctcatttctcaaggaaacgacttttggaggatatatctaatcatatccaacttatatttctttttgttcaaatcagcttggtagctgttaataatttgacaaacatttagaaatgtttaaaaatagagtaagatattcaaagatatatattttcagaaaaaaactttatagaaatgtgtacactttttaaaaaagtggatttttaaaaaggtggtgagaaaatgaagtggaaataatttttacagccatatagatgctgtcttattttattcttttgtaaaatatacttctggtttgttaggttctatgtgttctgttctgtcctatagccagcaaagctttcatggcagccactatctgcataacagagggaagacatgtaccaagtattgatatcagtaaataaaaataatcacaatttcatctaaattccttttctaaaatgcaacagcagcactgctttgatgctgatgcttttatttactgaactatatttacttaaactcagcagagaaggcctgtagaagaaattatcactttgctgcctacctaatataagaattcagtataatctcgagtttattccagctaatgctgaatgtgaaacagtttattttaataaaacattttagtaacatttctttcaagtgggaaatgactagagactgtaaaacaattttaaaatacaagcaagcaaacaacaaaaaaagaaaatgtcagtctctgtggccaatgtcacattaccagtcacttctctgttcaagtttatagagttcttcaagtgtaacaattactgatccaggtcagttaatcaacgtgattatgctgtggggacctgtatgtgtgagaagaatgtggcccgttcgcaaaggactttgcaccgtgagacaagggtatagaaatggaactcagttgcttataaaatagagacaaaatgctgacaatatgagagattttaaaagagatttctcttctccagatgtatttcccctaaattatgaccgatttcaaaaagctttttctttagatggggaggaaatgcagagcaaatattttttaccat

SEQ ID NO: 54698 - DNA, 4470 bp, Bovine  19866880633618
  misc_feature (1)..(1): n is a, c, g, or t
ncctatcaatgtgagaatgaataagtaaattgtgtaaaggacacagtggaatatacactacacaacacacaattgcatggatgaattccacaaacataatagtaatgaaagaagtcagacacaaagaataacattctatttttataagttcaaaacaaatacaacagatctacggtgtcagaaatcaagataacgggtacagtgggtgagtgtgcaggggtgtgagggaaccaccgggtaaaggagatattctgtttcttaatctggatgttagatactcaggtacatataatacaacatctgagaatccatcaagttgtctacatttgttctcttagggtaaggtatgtcacacttcaataaaagggtaaagaaaagtgactatgaaattattaatgcaaaacggagaagagtcagataagaaatacagaaatcctctgctttttttaggtgcttcatgaacctttttggaaagaatctgtctcagaaattcaacactcagtaataatttatgacctacaacacccaaacccttgaaagtaatgtcatacttaaacagaagcttatgcatctgaaaggaagttcttgtaagagctctcagtgaatgtggatgagttggaactaagtgtgtatcagtactctggattctgttcctaactccgatcgttctttttctgtctcattgactagctctggtagctcctgctctcctaagatgcagtccttggcttgactcttttctttcccttctctcaactaattcactctccctcctcttcagctcttaaggctgtctgtcaagttccttgaattgaaatctccagctgcagttgctttcactggcacttcaatcctaactgctagactttccaccactgcaaacatagtctgtctaaaaccaaagttccgaagggtggttcctcaaaatattacacaatcccagcaattccacttctgagtacataaccaaaagaagtgaaaacaaggactgaaactggtacttgtacatcagtgttcattgtaacatcattcacagtagccaggaagtaaaaacatcctcacgcccatcaacaaacgaaggggataaacaaagcgtagtaaagacatacagtggaatatttagccataaaaagaatgaaatccttacacatggtacaacatggatgaaccttaaagacattatcctatataaaataaaacagacacaaaagaatagataccatatgattccatttacatgcagtacctagaaccgacaaatttagagagacagaaagtagaatggtggttgccaaggaccagggtgggggaggaatgaggagaatgaggagttattgtttaatgggttcagggtttcattatgggaagacaaaaatgttctagagatggacagggatgatggctgcacaacaatataaatgtatataattccagtgaacagtaaaatggataaaatgataaattttatgttacacacgttttctcaaaagttgctgaaaaaattaaaaactaaaagtatctccctttttctctctcaaagtgcttttttttaaaattctgctacgtctcttacaactccatgtcctctccaatgccctccactgttgttaccccagacattagactcttcctccgagtttctcacacaaccaacaactcctcacccccattattaccattccaatttagacctttgccttttcctaactaatctccaaaccactgttttctcattcttccaatacaacctggacctttatatcataggaaacctcataatacatttgcatcaacgtgaccactgctcaaaaactcatctacttcctacttgttatgagataaatccatgtagtctggcagttttcgcttgttcattcatctatccattcaacaaatatttattgaaggcctaccaatgtgtcagacattcatcttggagcttgaaattttgtagtcaacaagacagtaagtaagaaatcattgccttgtggggctcctattctaatgtgaagacatgaaaaaaaaatctaatgtaaatcttaaatggtggcaataaacactatagagaaaaacggattgcagaagagggagagaggagggaacaggggaaagaaattcattttctaaagcttgtcaagggacttccctggtggtacagtggttaagaatccacctgccaatgcagtgcacatgggtttgattcctgatccagcaagattctacatgccactgagcagctaagccagtgcacctcaactaccgagcctatgcgcctagagcccgggcttctcaacaataaaagccactgcaatgagaagcctgtgcactgcaactagggagtagcctccactcgctgcaattagagaaagtccacgcagcaacaaagacccagcacagccaaaaataaataactaaaaaaaattttttaataataaagattaccaaggaaggccttgttgagaaggtaatgcttaaacaaaaatccaaaggaaaagaaggcatgagccaagcagctattgaaagtaagaactagaagagactccctgaagcaaacaaaggctggcatgtttgaagcagggcaaggaggctaaggtagctaaagctgagtgagcagaaggggagggaagtaccaggacgagaggtcagggaagtaaaggtgatgagctggggcaaatggataaagccatgcaggtcagaataaagatctggcttttcctctgagttagatgagaagtcattttgaacaggactactacaagctgacccctgttttcactggatgaccctagatgctgagtggagaactgatttcacaaggcttaagggtagaaacaggaagcccacctagtagaatactgcaattaacaaggggaaagatgacatggcttggatgagagtggcagcagaaagacatataagaagcaagcaggatctggatgtgttctgaaggcaaagccaataggatctgctgacaaattggatgtggagtgaaagagaggggttagttaaggaagacacgaagattcttcacttaagcatttggaaggactgcctccattaaagagctgctgctgctgctgctaagtcacttcagtcgtgtccgactctgtgcgaccccatagacggcagcccaccaggctcccccgtccctgggattctccaggcaagagtactggaagtggggtgccattgccttctctgattaaagagctaggaagactgtaagagaagcagtttgagggcagatccagtagtcactcagatatcaagtgagaagttgcacctctaataatctttattagccttacgtgtgtctacttctcacacaaccccagctgatattttcaatcttatgaagcacaggttcacattattaaacatactatgtgttaagcgctgtatctgtattcactgcaactacagtgggagaaaattgcaaggtattaagcaagaggtctgcctatttattaacctgagtttaattgtactcatcacctatccctgctgctgctactgccgctaagtcgcttcagtcgtgtccgactgtgtgtgaccccatagagggcagcccaccaggctcccccgtccttgggattctccaggcaagaatcctaccattaagaaaacagcacatgatctgccctgaagataaactatgcagagaggaaaaatgacaaagatgcactttctttactttttgccttcaaattagactttatcaatctttgacaaatatgatcacttagggagaataatgggcttccttgatagctcagttgattaagaatttgcctgcaatgtcggagaccccagtttgactcctgggtcgggaagatcccctggagaaggaataggctacccactccagtattctgaggctttccttagagttcagctggtaaagaatctgcccacaatgtgggagacctgggttcgatccctgggttgggaagatctcctgaagaagggaaaggctacccacttcagtattctggcctggagaattccatggactgtataattcatggagtcacaaagagttggacctgactgagtgacttttatttccactttcagggagaataatggccagccgatcctccactgccccatgcagggatgcaccctctgtcatctgggaagttatcttggattaacgggttagtggaggaaagggtagagtggagactgagagggagatggagagtaagcggatggcttaggtcccagcgaccccatactctgcccttcctagaactaggaccctttcagggtgaggagtggacggtgataaaaccccatataagtttactggtggtgtgtggttcaaaccagagagagcctcgggagacttagagcctcaagtagaagtcctgcatctaacatggcagaaaagcaattagctaagtgcaaccttgaggaagatgagtccataacattcaagaatagaaaagaacactcagaatcaag

SEQ ID NO: 54699 - DNA, 1795 bp, Bovine  19866880712174
  misc_feature (1)..(1): n is a, c, g, or t
ngacatttgcctttgttagtattacacccagctccaggaacaggaatatttttgtattcttgatacttcaaacttgctgggaccaaacaccaccttgctcaatgtactcattagttttaagaacattttttggacagttttttcttggactctctatagaggcttctagattgtgtgattaatgaaactggtagatatggagtaaaggaaaaatgttttgcttttaaatcaaaggaataaaaatttataggcttatagggtatgaggtgccctttgggacattcatgtaggctagaattcattaaagacatatgatttagagataacaatttgaagatttttcagcagatagttgctaactaaaatcatgggagtgaatgagctcaatccagagtgtaaaaagataaaaaaacagaaagaaagatttctgaggatagtagcaataatctgctctcatttcatccttttacaacatctataagcagttatttacataactaaagtttgaagaccgtcagtgggacagaattagtttctatcatcttttagtatctggccctggtaattagaaggtgtgcagaaagagcatagcaggcctgggattgctatccttagaaaggtctgcttccaagattatcccagctggtctctgggaacttggatttgggagagtttctatcatttcctgataaaaatggctcactgtacctaaactgcacaaaaaatgtaggttctgctgctgaatacctgctttccttctgggaatctggaattttggtagatgttaagtaaaggatgcctacctgaccaaaactcaacaaaggccctggccactgattctctaaaaagtgtccttggcagatgatatttcatggatgttgtcacaacttatgctaaagagaaattaggtgtgttctgtgtgattccagtgggacaggactcttagaggcctgctcttggtttcctctgactttgcttcaagagcctttctcattgctcacttggttttcatcttttaatgtaataaatcacagctatgggtatgaacataactatgtattaatagtaagtcctatgagtatttccagtgaatcatgaacctgggagaaggtaagaggcttggggactcctgataaagagtttatcatttaattaccatcactttttacatgctgtatatatttttccttcagtggcttttagaattttctttttagatttgagttctgcagttttgttataatgtgtctgcctatgattttcttcttattttatgttaccacttgatgtatcttttcatttagagtgctcatggctcttcatggcttattatttctctgccaatatttatttaaatgttgactctctaccatgccattgcatggagtctgaaacttctgtgccatttccatgtgtcttgtttctgtctcatattttgatatctctttatctgtgtgagctgtattctgaaacatttcctcaattctttctccgaatttgctaattcttcattcagttgtgtcttatctaccaattgcccataaccatcaattttttttatgtgaatagccatgactttactaaaactcttattattttttcctatatccatgctttttttttttttttttttgcataacttcctattcctggtacatgtgtgctattccttattttatctatttggagactactatacttactttaaagctcaggtgcatctatgaagtcatctcttcaggtataaattctcatttttggaattgatattccccatatgttctgtaattgtttt

SEQ ID NO: 54700 - DNA, 1270 bp, Bovine  19866880767244
  misc_feature (1)..(1): n is a, c, g, or t
naacaaacaaaacccctgccgtctgcagaggtggaacacagccggctcgatcaactttatcacacagctgtcagcaggtgtaaatccaccctctctgtaggccgtgggattccagagagaaaagcgaagggacagagtgtggcaggcaagtccacttcatacttgcaaaccaaataagttgttcctcttttctggggagagagagcataaggcctggtgagtgagacgctgggcagcgtttctcatcctcggcactgttgatattttggactggataattctccattataggggactgtcctatgcattgtaggattgacacattatataccaggagcacaagcattagatgtgacagtccaaatttacccaaatattatctgagatggggataggagtgtgaaactactcctattaagaaccatagtttagagacttcttttacttggaaatgggaaggaaaaacagattaaatgttccttattactgaaaactagcaattcagtgcatttcaccattagattttaaactccctgactacttctttgaaaataaagcctagaaaagtgtctttcaagtaggcgataatagtgcaaaacattctaactaatgataattcagacatgaccagaagaaaaaatgttacttgctaataagaggaaagttatctttctactgattataaaataaaaaaaaattcatatatgtggtattaatgaaaattagcagatgaagataaagaggcaataaagtggaaatgaggaatatgaccaaattaatccacccagtatttatatgttccctctcttgtacacagcattcatctcagtgtttaggggattataaactgtacccgtactcaatcatctaaactctggtcttccccgttgtgaaaaatatgggcattctgacacaaacctataaaaagttcaatatcaatatcaggtagggtgtgaatcagtgcagttcattgttctccttttgccttttagaatctatcttttggttccctaaagtgaagaaagtcttggctgcttttgttttcagtctgtaagcttgatatcccctccctcagagatttttcatctggattagatacttttcatatattcaagtaaatccattttccatgtagctacagacactgtgaagtaagctatcaaaaaagaaaaaaatttggctagctaaggttgtggaataagataagaaaccacgaataagcgaatcaagtgagaataatgattagagtgtgggctaggcatggacatgt

SEQ ID NO: 54701 - DNA, 926 bp, Bovine  19866880815613
  misc_feature (1)..(1): n is a, c, g, or t
ntctttatatattgtccttgttcctttagctttgtgccctaaatgtccttcccaaaggtccaaagtggactcaccctgcaaagcttacatcatatactcttcctccatgaagtcttctctgattccctcagcctatccctcagaacttcctagaattttagttttacctaaatgccatatatcacttttcccttgtatttgtttataacatgagtatttttttctacgcctccaaaaagcaaggttgacattctatccatctttgttaccctcaaatcaccgtgtactgccttgacaaaagcaaacaatcaacaaatatttgaatggataaatgtgatggcatacagactaagaaactgctctcgatcccagcctccctctctgtattcttattgttattataaggagtagttaggctgttcacagagcttttaaataaatataaagttttaattctcttaattatcactgctattatattttgctttttcccatgcattttgtattcctataaaatttttatactctgtaaaacagaatattttaagttttttgaatacataatagcagtaaaaacaacacaaagtttacttggtttgttaaacttttagaagaaaattaccttttcaaagtttattaattttattagaccctattcttttaagtttctagatttttccttctgcctcttcattcataaattgtgtctagagagctaagtttttgaacttacataagtataaatttatttcaatttcaattgtacaagtataaagaaaggtactaggcaactttaggccatggacaggggagcctggtaggctgcagtcatgctgtgtcggacacgactgagcgacttcactttcacttttcactttcatgcactgggaaaggaaatggcaacccactggcagtgttcttgcctg

SEQ ID NO: 54702 - DNA, 1583 bp, Bovine  19866880849985
  misc_feature (1)..(1): n is a, c, g, or t
nttcccttctccattggatcttcctgacccagggatcaaacctgggtctcctgcattgcaggcagatttttttttttaccatctgagccaccagagaagtcccaagaattcttattcacatctttgaatataatatattatgaggttaggcgaagttgtatacgggttgtgactactaagtagaaaagcagatattacattgtctagttcctatgatttttagaagatatttagttgttgattatggtgtattttccatggattctaacctatgcctacctacctttttttccatggacagaggagctctccaaagagtatatgaaaatgcctactttacaattttaacaacactggagtcagactgctgaggttcaaatcctgcccctcagttgaactacttcattgacaagactcaaaatttttcctatccttaagtattactatcttgcagacaagtagagtgcctgtttgtgggctgttatgaggaagggtgaaagagggcctgagaagctgagtgttgggtatgtgggggccccatgacaatgacaaagcattctttatctgaatattaaaatgttagctcaacacttgtacagctcattaggagcaattttattgtcaataacctatgacaaaactgttccaacccctctctgtaagtatccacataccatttgtcctttggatgttggccattattgtgatgtttttgtcatatagatgcatccatgcatgctaagttgcttcagtcatgtccaactcattgcaaccctatggactgaagcccaccaggctcatctatccttggaattctccaggcaagaatactggagtgtgttgccatgccctcctccaggggatcttccagacccagggatggaaccctgatagaaggcacctaaaaatgaagacttttgataaaaagtttgataacttaatgcaaagaaggtaaatgactgttttctctgcattattcatggtgatcttcatataaggtatcaaatcttattttcatgcttttgattttaaagtcaggaaaatcatttttacaaagaaaatataatagtatgaagtccagaatattacagaggaaaacacattactcactgctggtgaaattctggagggaagtgtgtgtgcatttaaaattcacccaagatgagagaaacacccaggggaaaacatgcacatcacaggcaaggtattcttaaagggtgtctgttctagagtttgaccaagtggaagagcaaattattgactgggaattatatttgccccttgcccagagacctcacaaggtaacaacgtgtctccatgaaaacagcatctccactgtgtctctgcttaccctgcctttgcgtttccgcttagcccagcagagacactggcagcaccacccagggcaaacagtgtttggtttctaaataaggcacaaagctgaaaatacataaaaatggagtggatactaaatcaataagagtcctgcatcttctgtccatgctttgtggtgatgatgtctctgtctttgtagagctcataacccaaaatcttgagagccaaggaaaataatgtttaactct

SEQ ID NO: 54703 - DNA, 1175 bp, Bovine  19866880888617
  misc_feature (1)..(1): n is a, c, g, or t
nggcaggcagagttctttatttattgctcccagcaggtgtcagatgccatagtttctttgcaaccatccaacaccctggggctttttagttccatatccaagacaaggaagacagaggatggccactaacccccaagagattagatgcctgaatcctatcccaactactaggagactccagctgtgctgaaatgttttgttgttgttgttgttgtttttgaagaatttctgatgctcagtggttgctgattacttccagattttagttctaccccagtggagctttgctacagagagtttatctgttgttaaaattgcaattgctacaggaaatgtctcctcttaagccagttctcaggatgtgaactgttacaaaggttaaacaaacaaacaaataaacaaagcctatttactattaaaaatgcattcatggcactgatggagagttagtaagagtgtgtgttaagactagcggcattggttgatgagtctcatcgaatactcttaggatatgattgctgaagttactgcatcgatgcctgtaaagggctccagtatgtgttctttagtcaatatatctaaactgacaaagaaaactaatttttgaaatcagaatagtggtccatctattaaagggaaaaaccatttgcaaccccgccggagtttagtatttttccctcaatagtaaagaacactcactagattgcaatatttcactgacaactgaattgtttaagaaccacagctattgtctaaaattgtgagtgtgtatacctgtatgtttgtgtataccttgttgtatgtgtgtgtgtcatgtgctcagtcatgtctgactctttgtgaccccatggactatagcttgccaggcttctctgtccatgggatttcccaagcaagaatactggagcagtttgccatttcctccttcaggggaccttccggacccagggttgaacccacaagccaaaatctcctgcattgaaggtggattcttaatctgctgacctatcaaggaaccctacacacacacgcacacacacacacattagtattagagtgtgtgtgtgtgtgtgtacacatcttaggtatcgaattgacatttttagatggatatgagattttaggacactcaattgcactaaatacatgcttccaggctcagaatgttctaagta

SEQ ID NO: 54704 - DNA, 1082 bp, Bovine  19866880922165
  misc_feature (1)..(1): n is a, c, g, or t
ntcctattgtcagcaattactttccttagaaatcctcactgaaaattctaatttgaagtgaggtttgcattttattgctgtccatccaaattagtttaaaattgacagctacattttcatttaaaattttaaagatattaaatatgcttgagaaaactgaagcacactcagctccgcataagcctctctgtgtgtgtgcatgcatatgcggacacacacacttagaagaaaagacagccaacacccaagaaggcgctttttatttttccgaaagggagttgttgtgcaaacatcacaccatggttgcttctgtgaaatttcaggtttctgattgttacatttacacacagacccctgcagtgatgctctcacctgcacacagatggacaaggaaacaacacactattagactgctttctagggttccgagctccctctgggatatggctgttggatggtttttcatttgttctttcttcatgctccactagccaatcaactatttcccttccctacgttctgagcattgtataaagctaaaagggaatatagcctcaaaaataatactgaggagttgactcataattagcatgggtccattgatgtattttaactaagggcaactgatgagtcaggctcatcctcaaactttgtaaaagtttaagcaccacatatttcccaactgatggttttcctcttttaaaacttaagactggtttccttgaaatacagctggatatctttaacaattagaccaggcttccaattgttaactttaaagatatggatgcaaaggtcacatatttttctctctaccccatgattaaaattctgaaactgtaaaacaaatctttaaaagacttgagttaatatacctgtgcacagagaccctgtgtcttagatgaagctaacagaacttgctctgggaaaagcatatccacatagttatatcatgataaagagggtaatgtccataaagaacatttgatttattaacctagagatagaattacattaaagggaaaatgacaatgaaattccataattacatgtctaataattcagtaactaataagggtggt

SEQ ID NO: 54705 - DNA, 1004 bp, Bovine  19866881153920
  misc_feature (1)..(1): n is a, c, g, or t
ntctaaactgaaacatgtaatgcagaaataagctcttacataaaaaagcaaaggaagtacagactggtaggcaaatagacccatatttatttactaatgttgttacagtattccaatttatggatctgctcttatatataatgcttcttatagattactgtctcttatgtctctgggcactaggaatgatgaaagtgttggtggcactatataaagattagtgtaggccactggcagatcagggttcaaatttcaagtctgctgcctgtcctctgggtgactgagcaagctgctgaacctgatccttactacccctacctgtaagaggaactaataatacctatttcacactggtcttggatgataaaatgggaaaatgctggtaaaagcacacaggacctaacaggcagtagagtaagtgttagttgacactaaccatgaatctgatgtgccacacactgcctttcttgcctcttctccattcgttaagagttctgggagagaagcgatggagtgtggggcacacctgactcctctgagtgtcaccaggctctgtttctgctttcatttggcctgtcttctgttgctgatccccatgcaaattcatcaggggatttcccttagagacactaggggtaacagcaaggagaccttacgatgccaagctcaaggcaaggctggatgttaacttgattttaataaaatctgtgtatgtgatgtttgctctaagaacaagtagatggaattcagattctaaaacactatattcatttttagaaggcagtaatagaactgctttgtgcaaaagataaaaagactgattcaaagatagacttcttttttggttcacaggagtgagcaataagaggaactattattcattatgaaacagaaatgctaatatatacagaatctgaaatatatttaaatatgcaaagtcttatattatcagagaaatatgctcttactacataaaacagatagaagtacccactccagtgtta

SEQ ID NO: 54706 - DNA, 2054 bp, Bovine  19866881205230
  misc_feature (1)..(1): n is a, c, g, or t
ntgactagatggacctttgtaggcaaagtaatgcctgctttttaatgtgctatctaggttggttagatatcctaggtaagggttaaataaggaaagagaaagattcaatttttctaggaacaatactgtgaaggctgagaaaccaagcaatgttatacaatcaagtaacagaaaaaaagacaaacatgttcagatttgaagaatgtggaagagaggcaataaatgaaataagagagagaattttgagttaatattccagggttttataaatctttaggaatgggacttttttcagagtaatatacaaagaacaaattagaaatagactgaccatattatccagcacccctacacctgtgtatttacccaaaagaattaaaatcagggtctcagagagataccagaacttccatgttcattgcggcactatccagaatagccaagatgtagaaaaaactaatagcttctctggtggctcagaaggtaaagaatcagcctgcaaatgcaggagatccaggtttgatccctagattgggaagatccactgaagaacgaaatggcaacccactccagtattcttgcctggagaattccatggacagaggagcctggtacagtccatggggtcacaaagagttgaacatgactgagcaactaacacttccatggccttttcggggttctctggtggctcagttcgtaaagaatccacctgcaatgcaagagacctgggttcaatccctgggttgggaagaccccttggaggagggcatggcaatccactccagtattcttgcctggagaatccccatggacagaggagactggcagggtgcagtccatggggttgcaaagagttagacacaactgaaagactaacgacagaaataactaaagggtttcccaggtggcactagtggtaaagaaccctcctgccaatgcaggagttttaagagacatcggtttgatccccaggtctgaagaccccctgggaggagtgcacagcaacccactccagtattcttgcttggagaatcccatggacaggggagactgatgggctgtggcccacagggtcgaaagaagttggatacaacagaagtgacttaacacatgagcataaacaactaaaacacatgtcaacagatgaacagataaagaaaatctcgtatacatacaatgggatattattggttttaaattataaaattctgcaatatgcaacgacatggatgaacactgaggacataattagtgaaataagtaagtcacagacaaacgctgcataattctactaacatgaggcatctaaaatggtcaaattcatagaatcaaagattgggatggtgttcaccagagattcagggaaagaagaaatgaggagtcgataatcaatgggtatagtttcaattaagcaagacaaataagcttgagaggtctgctgcacaacattgtacctatagaaaatattgtatttaaaattttgttaacaaggtagatctcttgttaattgtttatcaaaatagttttttttttaaaggaatggacacagtttaacattaaattatattttctataaaactttttcaaaagcatatttcacagatctagaaattctaatatagagcccaagatttggaatctcccatggaaagaatgataacacactggccaccagaacgtgacacttctaagcttttcagctctgcataataaaatgtttaccttgagaaaaaaaaaatttaataccaaggtaagccatttacttttctcatgggttaatggtaacttttgtctactcagatggaatgtatcagaaataagatgttttcttttgtgagttaggctatcaactgaacagggttagaactgttcaattggaagccactcaaatggtgataccaaacttggacacaaatgctgacctctgtcttgctcctaaaacgtgacttcttttctccacagccaataaggccatgtttttatttccttcaataacacatgatagatttcagtgagaaaaagtaattctgcagcaaattctgcaggcaagg

SEQ ID NO: 54707 - DNA, 1172 bp, Bovine  19866881245841
  misc_feature (1)..(1): n is a, c, g, or t
ncacacacatttactttaggggcaacatatatgtatatattaaaaaatacttaaatgtttatatacattataaacacacataaatgtttaaatgaaataaatatgatatattgaaagacgatggtggtcaaaagcaacagtgatttacataaatcagaatgtagaatgaaaaataaaacatattcagatttattaaaatacatcttttgagcccactatgaaaatattattatcaacttttgtcacaaatttaaaaggatgggaaaagcagaggacagaagaatgtagggagagagagctgtagagtcagaaacataaacaccgctgacccaacctgacaatactttattgagctttaggaagctttcagtgatagtattcaaaaaaggcttccatgtagcagcagtatagacatcgtcaacagccacttcagacagttcagatagagcttccctccgaggatggaaagaagtgataagtggaatgctgctgtaagcatctggacttagaaggatttctcaactttatatattgatggccaagttgaaagaatgtgcagcaaggtgagaatcttgcttgtgaaacaaaaaaccaaggaaaggtggtcaataaaaaggtgagaaggagtgcagttggatgattagaaaccttaaagttaaatggcattttgcaattcattgtgaaagaaagaacaaaaaccactgagactgaacgagaagaatctcaaaagaattctccatttacaaatgtgcctacagaaaaatggaacatatgaaaaggaagaggcttcaggtctgattatacttcatcacagctttcagatgaagagtgaaacgttgtttaatcctctatagatattttcaggcatgtgtgtaaataacgaagttgaaaacaggttactgattcttaaaatctagcatctattgaatagtatggagtcagatttttctttaagtcaaataacagtatgtgatatgagtaaagctcttccagaattattatctctacagataacttttctaaactagcgacagatgaagaaattgaggtgaatttcatgttctgaaatttctgattttttttattctacatgatagtcataaagtgtggcttctttatttacgtatttatttatttatggagatgtctgtatgtatgtaagtacttgttta

SEQ ID NO: 54708 - DNA, 809 bp, Bovine  19866881265647
  misc_feature (1)..(1): n is a, c, g, or t
ntgatacatgtataggtggcaattattcctaaaagttgggaaataattacataagtcacaatagggttacttccagaggggaagaaaaagggttgttagaggtttattggagcaagactggaacacaatttaagagggaaccaaaaaaattagtaatcagaataaatatatcttaatgcaatatttttaaatataaaaattaatgcaaaaatccatgataaagtcaaaattttaaataaagacaggatcaggagggagctggaggtattctttctcttgacctgggtggtgggctacctctatgtctgttttcattgcgctgttcaatgcacgtctctgtacatgtattatatttcaaaaaattgcagaaggtggtagaaacagacacaaggctctaatttcttacgcttttttcctttcttacgctaatttctctcttgtgcttaagtcccatatttctgtgctgttctgaacatgtctcttggtttgttttaaattctaacgtttcttttatagaacaacagttataatgccaaacaaagtctccagtgattttgacagtgggtttagactgttcatcagaaagttggctctgtgtctgcctgtattgtggcacccaaatgttcactttaactccaggtaccaacctgccttatggctcttgttcatacttgagcaattaaccttcattatatacttggttcacattagaacaattatctagttgatagctctagtgtaaaggtagtcatgaattttcatgtttctgaaggctttttcctgtaccttacccccatctcaacctgcat

SEQ ID NO: 54709 - DNA, 1570 bp, Bovine  19866881270467
  misc_feature (1)..(1): n is a, c, g, or t
ntagggaataattttctttacagactatcaatccttacactttagaatatagctatttcttcttaagaatattatattaatagtcactgtttcaccaagctttcatgagcattctcagaaataattcacctacaatctattcagatgcaggacagaatctgaccttcccagtgtcacgaatatgatttgggggaattgctctgacacaagggacgtttagctcttttcgtcacgctagcttaggcagcaccttcagcttgttgtgacttctgtttgctctggacagtgatgtcccacaattttaggggtacaaggtaaagagggtccacagagttgctaccaggaaaaccagttctcaaggtttcagagtttcagtgagctgagagggtatattctgtaaccacagagagggggagatgcgggcttctctactgcactgggacaggacatctgtactcctagtcaaatggctacccaggcacctcagtgctactttatgtaatttccattatgcctttagactgtcatctttcagcatattttcatttattgtttttagctacgattagggcagtaataggagagcaattctagggagtgagaacacagataaaatatgtagacccggcaccagtggggtctacttagccacacctcatatttcagttcacagaaatgtgcgcggggactgacataagtactccctgttgtgttattgcttctggctcagtagccctttgagaagaacgcagaataaaggactgcagagaacgggtgccatcaaaatggcagtgctagagacggtacctacaagcacccgatagagttttatgttttttaacaaatgttttcttgatgttacctttaaatcccacctgcaattccttctcttgccatcgacatcagtcgcctctctgcttttcaggcttctttttgaggcatcaatgaacctaaaggaaaccagcatgatgggaatttcatgacaacttgcagcacatagcgctttcttggcgagcgatgttattgaatagcattcagactctcacggcagggccatggctgatcaataatttccaggagacccttttgattgtgtcagaagcaaaacccaaggaatgtgactagaccagttagaaatagcaccctgacaggaaaatttcagggcagtcaaaggataaattgtaacatttggttatattactatgtgctaaggctctttcttgacaggagacatttggttcctattttcaggctatagaagactttaactaagcataaagatatgagtgtcacaaaggagtgtttcaaacagctacattaagaaattgaggttgtcaaatctccccttgtgattaaagatgagaaatgatcatctaggtatgcactaaaaagttccattagaaaactctcttaaatgctgttttcctggtaaagcctccgcacatgaaatggaaatgatgttatgattcctaaactatttttttctcatttttctagcaggaaagtttttcaacttgcaatatagtatagttacatttctttagcttattattttcttggtagtagtagt

SEQ ID NO: 54710 - DNA, 1342 bp, Bovine  19866881277657
  misc_feature (1)..(1): n is a, c, g, or t
ntatatgaagtaatgtctaggttgatctttttaatgctttatttttcaaaaaaagaagcttttagatcaaatgtgttcatgcttatgtatgtgtgtgtaatttgccaactagagtggttttacataggagcacaggtaaggacctttaatagacatttaaaaatgtgacctgtgtttcttattgagaatgtttcccctacatgcctttgttttaataacattttttttaatgccagcattttcccttctatattgatataaaagatttgggttatgaatattgatatttgcatttaaaaaaatagatcaggtattggttttatttgtatgtctttcatttactctataaatgagagtctcttcactcagtaagatgtctgtgaatgaggttctgtgtgggtaagacttctttagtaattagccattaaatagaacagtatgtattgatggaaatcatcatttttctttctgataccttttcctttattttagtccagtgggtctcaaactgtaatgtgctggaccactagtggatgggattaggaccccatattcagattctattttaaaaagtataatgtgggcccactcaagcagatctgtattaaaagcaagttccatagataactctaatgttcattgaattttgagaatcgctaccttagatataattttattgtaaatgaaattgtgtatagttttatttttaaatagtttgatttggaggaaattgcaaaaataatgctgaggtttccctttgccttcccccaagcttcccctgatgataatatcttacataaccacagtatgttatcaaaatcagggaagtgactttggtacaatactcacatagagaccttatttagatttgtatcacctcttacatgcattctttactttaaaaaatttgtcttgatttataattctatgaaactttcatacatgtgtaaatgtgtgtggcattccacagcagaatacagaactgttgcatcaccacaaaggcactcccttatattactcttaatggttacaccctgcctccaaccctggcagccagtgatctgtcttctatgaccataagtttgttactatgagactcatataaatagaacatatagtacttaaccttttgagactggtttccaccccctcagcataatgcccttgagatcatccaagatgatgtatatcaaggcttgctttttattgctaaggaagagaaggcaatggcaccccactccagtactcttgcctggaaaatttcatggacggaggagcctggtaggctgcagtccatgaggtcgctaagagtggacagactagcgacttcactttcactttt

SEQ ID NO: 54711 - DNA, 1656 bp, Bovine  19866881289814
  misc_feature (1)..(1): n is a, c, g, or t
nttaatgaggaaaacttttaatagttccagcatagatattactttgaatatattgatatttgaatatattggtaaatacactgaggatcacagatttcttttctgtgggctttttatttttaataggttgtatttcattttttgcttcaaaatattttggacatatgattggtgtcaagatttctccaaaagctagtgggttttcacagacaccccatggaattagggtgaattgcagcggaggtagtgccccaggacccccactctcatgcctcttttaatactttgcatttggattatgagagagtggtgggttggagttcttctgcctcctttcccaaattctcctataatttagttatactgctttaatgttagattaaaaaacaagaaaaatcagaactttggaatcagatagtcctgtatgtgcccctgacctcttctctccactgaggcaatatttccactttttaaaacgttcctcctttttctagtgtgacctctgtgactccctttttaaaatttaattggtttggtttaataacttggaaagcactcaaactaaaaaacctacttccctgttttgcatgtcaattaattaatatctgtggctcattaaattaaaacttttttttaatttacttaaaaaacattatctactctcggtatttccctgaatagccttttaaaaatatgtcacgttgttttagataatgctttcttttagttttagtttttctattttgcattagtttattcatagaggtttctattttcttcttttaatgagacactaatgcatttccactgtcttaactaaggatgctgagcacagctactcagagctagtccttttcattctccatttcctgactgacacatgccctctgtctcagctacttttcactgggtagtaaactaggccaaactgtaatggcttaagtatccactcacgttttatcaaaagttttgtaggtcaggatttggaaagggcttagctggatggttttctgaggcagattgactcccaaaggggttatggatccacttctaaagtggcttttcactgtatgtgcctggtattgcttggcacctctcccctctctctttctcacctctccccagccctacatgatgtctcatcctctagagcttttccagttgcgttgtgcttctcactatacagccatctcagggtagtccagtttcttacatgacagctagcgtccaagagttaatgagtgaaagccatcaggctagttaagggacagagagaatcagcagtgtgcctctcccaccacatccttttgatcagagcagccacaagcgttgcccagattcaagggggtggagaaacttcatttcttggttcagtagcagggtaacacttgcagaagagctactgttgcagttctctttggaaaacacaacctgccatacccacccacaactgagaaccatagaggacgaagaagagattatttgctttaccttcattgaggagatgaatttggctcaatttctttattcactgaataatggaagtctggatcgtggtcttacttagactgtaatgaagttgaagttgataggtcaatctataatctcgagggaaatcaccgaaagggataaaagatactcggtttctctccagat

SEQ ID NO: 54712 - DNA, 957 bp, Bovine  19866881377528
  misc_feature (1)..(1): n is a, c, g, or t
nttacatgcaaaagaacagggaaagaagtcctggaaaaaagatttatttccttttaagaagatccggtttatatttttctactaaagggacatcaaaaggtaaattgtaatgatatattatgatatatgatcaatgatatattatgaattatatggaagttgtaagttaaaatggactttactttgttttatttattattttattacatggtattgatatttggtttttttttttaagattccaaacatttgccataacctgtttaaaaactaattattcagctttattttccactagtttcaatatacatcctttgatggaatttggatgctcttgtttcagtatcacattccttgctcatttttcccccactctgaatccgccctcgtttttcttatcaaggctggggttttgaagcccatcagagttcacatcttttctttttacccaggttcatattactgacctgttgatgttgagcagttaataacacttagctgagtctgtaactgcttattaattgctttgtgtgtgtcagttttgcctcctcacctagactgtaaattcctagaggaagttgtgttatgatcaggtggatgtatgtgtttgtgtgtttgtgtatgcatacctatctatgtatacagttacacagacatggctgtgctgatgttcctacacacacacagaatcacatatgcgtataattgccttagtgctagcactaggtagactgtttctatggagcctagtagttgccgactacaccatatgcctgcattctgtgtcttgatattttatgcaatgcatagattccttttaagtaaaactacttttgagagttttcatgagagtttaattctatgttcatgcctctgttttgtcactgacaacattgttgctttttgatgggtaatctgtcatttttctcggctcgttttcaaatttattatcatctt

SEQ ID NO: 54713 - DNA, 1826 bp, Bovine  19866881497007
  misc_feature (1)..(1): n is a, c, g, or t
nactgggtggctgttgttcttatgtctgtgtcttcatgccttcgacaaatctcagcatcacacaattgatgaggtgctaagagatgccgtccactatgctgctgtggccaagcagtggtgggagcatttgccaaaagcaacatgaagatgaccaatcctgagaggacaagaagatctgacttggcgctgctccttcatgtgaaacaatgataaggcgccatttcagtaccctcagaggccactgcccactccatgccagggaacgagggattgggaatgagctggtggccattggacaggttccctggacttcctgactacccccctgctttcttacagtaaactcccatcacgtaggataacaaagcatgcctcttatttttcatgctctgttgtttatatcagaggaactacgaaatgaaaatctggagatattctgaagtctaagccaaatttaagaagagaacaagaacagagcaagaggtaaatgttggggaaaatgaaaacaacatctaaccaaccaggaaatgccattaatctcttcagttgacgttgctacaaatttttaaaaaaaaataaagttgccaagaattgagacacataaatttagaaggacaaggccaatttaaatttctggaataagtgcatgtactcattttttaagtaaataacacttgttagaagaaaaactcaatatttttgcttgaacttcatttcaaatccttcttttaaaaaaatagttccatttaatgctgacatttgtccaaaatacacatttatctatgaaggataaaattacatttttggttgatattccacagtccctgtcatctctcagatctattcagtatgtatgaaaaactccttacactaccaatggagaggctttgttaaaatgtctcatttttgtttctacttatttctccttgaaatatatgaaaaggggaaagataatctaacccttaactctttagtaggttgaatatgccccttgtcaatattattattacactaaactttcctatttaagaaaaatatcaagtcataagtgaaactacatgactactacagatttaaactaaggtacaaacttttgtgatcatacaaaaaccaaatagcagagttgctcttaagaatcattagagctaaacagtggtatcctatttcctccacatactgaaagataaaaacagagagatatggagatcatataatcatgctatttaataaagggatattgtacatttctaattgagtgagtgagtgaaagtcactcagtcgtgtcggactctttgcgaccccgtagactatacagtccatggaattctccaggccagaatactggagtgggtagcctttcccttctccaggggatcttcccaacccagggatcgaacccaggtctcccgcattgcaagcagattctttaccagctgagctatcagggaagtccttgtagtggcccaaatcctcaactttctatataaagtaaaaaaaaataggataaaaagaagtcatatcaattgatccatgagatcatttgcaattgtatattagcaagaagaaatcctcctggaaccctaaagaagaacaggaactgtctttgtctcatcaatgagcaaacgcttgattagcaagaagacaagcattgataagatctgtctataacatcctgccaggatgaacagagagagctccggaggacagccaacaatgtacacacaggctgtgttgaggaagccctcaagtatcactataatcctgacagagcagccttggcctttaaagtggtttacagtttaaactgctctgggagcatgtggcat

SEQ ID NO: 54714 - DNA, 2137 bp, Bovine  19866880361748
  misc_feature (1)..(1): n is a, c, g, or t
ngaggcccttagatagtcataaaagttgagcatctcctctgggccgggcaggaagaagactgaagacacagcaggtgtggccttcacttcatggagcttataggctagtttgggagactgataaaaaaactgccacctaggaaatcaggccaactacagttgtaaaggaagacaacaaggaatgtaatgaagagggaagactatttcatattaggtggcagagaaggtctcagggggcactcaaggagggctctggaggatacgagaaatcaccctcgagtccagggcaagtacaaataagagctaaatgaatccttgagcaaagaaaaaactgcacgtcatctggaaacagagaggacttcaaagatctgagttcaaaccatgagcctgctacctaccaactctgcctacactgctcaggcctagaattgaggttgtaagatatggtggttacacctgttgccttcatcttgatggccactaagatgaggatttaccagcctcacagttcactggccttctactgtgggtacttcaccactacactctatggctacattttccatttctaaggaatataaagttgtcttttacactcacttcttggttctaatattttaatattgtcacccctgtggtttcctttcaaaatcctgacaagtattccaatcatatagcagatctttagttcactgttccattatttggttggactgaaaaccatactgattcacctgcactcggattttaatatcactttggctctatattttcatttctgctgccactaacaaatgccagcctctgtgaatttcttaaactgccactttagattaaaaaacaaggataccatctggtgaatcctgaaaaagtttaaataaatatttcttttactgttgtatcatttctttgtgagtccaattagcatggctcctacacacccccattcagtatgggtttatttatactttgagtggatatataacacacagtcaaaaaaagtgtgatatattttctcgaattgatgctctttgtgtgctcaattctcacacaaagaacatcagattaagaaatggaagattataaactcctcaggaattcttccatgacttttttaaaaagcaagttctttttattttatttatttggctgtgccagatctttaattgcagcccacgggatctagttcctgtcctgtgcttagttgctcagtcacgtccgactctttgtaactcatggaccgtagcccgccaggcttctctgtccatggggattctccaggcaacagtgctgggagagggttgccatgcccttctccaggggatttccccccccctcccccagggcagattctttaccgactgaaccaccagggaagcccaagaatactggagtgggtagcctagcccttctccagggggatcttcccaacccaggaatcaaaccggggtctcctgcatgcattgcaggtggattctttaccagctgagctctggttcccttcccaggggtcaaacccagttcccctgcattgtgagagcggagtcttaaccactggatcaccaggaaagtcccccttccacgactcttcagtcactaactcctccagtgtggtcactaccacagcttctatgagcccagacaagctgtgtctcctttggagttttcatagatgagaacatccactgtatagtcttatgcctgcgtgcttcactccatattgtcatactgatccaggtttcatcgcctggatggctttacatcatttgttctgagtactgcataggattccatggtgggaacagactgcaatgtacttatcctttctacaattatctttgcaaatctttgagcagttaataagaatgcacatccctcaaacccctttccaccaacaactcattctccttctaggaaacacacagttactgatttttttgtgagatcacttttttttttttttggaactgccatgttgtatcagtgttacaattacagcttcataaccacattctaattgatgaactgctgtcctaacagttatatatataatcaattatatatgtccattacagtttacacaatatatttttaaaacctactgtctcacttatttaatgtctccaaagcttacaaa

SEQ ID NO: 54715 - DNA, 1992 bp, Bovine  19866880440283
  misc_feature (1)..(1): n is a, c, g, or t
naccgtatgctgcaggttgtttgccgagatggaaaaaccatcagtctttgtgcagaaagcacagatgattgttcggcctggaagtttacactccaggattccaggacaaacacagcttatgttggctcagaagtcatgtatgatgagacagctgtggcttcctcccccacctcctgacacagcgtatgctgcaccgacccctgaggcatatggctatggtccatacagtggtgcatacccaccaggaactcaagttgtctatgctgcaaatggacaggcttatgctgtaccctatcagtacccgtatgcagggctttatggacagcagcctgccaaccaagtcatcattcgtgagcggcaccgagacaacgacagcgacctggcgctgggcatgctggccggagcagccacaggcatggccctggcgtctctgttctgggtcttctagagtccgtggaacctcggcgtgcatagcttctgataccccgtgtgcaataatatgatttgcagggcatttctgtttgttataaatgtttttagtaataggtttaatagttcttttgaaagtagtgacaaaatgcttataagtacatagaagtactgcagagaaagcttcggactgctgtttagctaaaatgtggactctgtggcggcactggctcattcgaggggtttccttataaaactctcgcaatactttatttaaacacacctgttttgaaaggccattttgtttttagagttaggccttacttcttaagggataattttagtgttttgctggtaacatggtgatatatgagtgagtgaatggccgtggcaagaaaaactgcagtttttttggtttaatgtcggactttgaaacctcagaccagaactggctgcatgttacttcaggagttataggctggaaccttccttaggcagcggtgtgatatcccacagcctctggggctccagcaaagctgactgctcaggacgatggatgggatgacagtttccccccttgaaaatgatgctttttcattttattcttatttgtttgtttttggtagtgatacttggaaagcagcccaaattaggagtagacttgagtgtcaacattttagggctttatcatttaaaacttgaagaaggcacaacaactacaaaaaggtgtgtggaggtagatttatctttttcagaggcatcatggttttagtgtttgctttgggcattttttattgccacttcagcctacttatagcttatttttctacttgttgagaaagtattattaagagaatggtgaggaaagtgaaatgagagccatagttgcagtgttcctgttccaggggattgggctgcacggaggatgtgtttcatgtccttctgaaggctgttgatgagcccatctcctgtcttttgtaggactgggcactgttgctgcccctgagctctgtgctgcatggtgggggaaactcaggttatagatgggaatttcggcccagagacatgaataacctgctcaagatacctttccacctgaccaggacactggccttgcttttatttctgactttagtgtcacagagaagcttgaaccatttaattttgagccccagtttatatgtgaagctctgaaaaaccaagggtcctgcatttctgtaattttcttatttctttagctgtgtaaattttaaaacttcagttgttccagttttctgtcccgcatgttttaaaaaaaatgtacatttacaaaggcacattgaaggtctctgcacctatactccatgtggccatgtttccataaaatacactcctggtagcacaaattctgtttttattttatgtggccagttacagacacagtcttttgtttcacttatcagtccactccacctccaaggcagacttaaatagatctatctccgtatgaaaaccagacgccaaatgaacgtttgtgggtgaccacaggtctgtttccctcgccaattctactgtacttggtga

SEQ ID NO: 54716 - DNA, 2088 bp, Bovine  19866880519459
  misc_feature (1)..(1): n is a, c, g, or t
ntttgttgttcttagttgctcagttgtgtccgactcttttgagacaccatggactgcagcacaccaggcttccctgtccttcaccatctccaggagtttgctcaaactcatgtgcattgagtcggtgatgccatccaaccatctcatcctctgtcatccccttctcctcctgccttcaatctttcccagcatcagggtcttttccaatgagtcagttcttcctatcaggcggcccaagtattggagcttcagcttcagtccttccaaggaatattcagcgttgatttcctggtttgatctccttgctgtccaagcaactctcaagaagagtcctctccagcaccacagttcaaaagcatcaattcttcggtgttcagtcttcttcatggtccaactctcacatccgtacatgactactggaaaaaccatagctttgactatacgaacctttgttggcaaagtgatggttccgctttttaatacactgtgtagttttgtcacagcttttcttccaaggagcaagcgtctgtcttttaatttcgtggctgctgtcaccctagtaatcctaacaaaaacagcagtacgaccaccacctggcaggggggtcattgcttcgttattctttttaaggaactttcattcataccaccctgcttgtctctcccaaattcgcaagctcagtaagctctgcaaggggaggagaccacttctgaatattttacagccccatcagtcttctgtgaagtagtgcggtacacagtggcacttaataagtgctgattaccttgcctggactcttgggagctcccctgacttggctcctccggtcaacacacgggccctcccagtgagtggctgagggggccggtccctctgctttgatctggcgctttgttttcccagagctcagcccttggtgcagccaagaccacaacctctgggcttgtccgacttggaaaagcacgaacgacatttgcagctggctcagaccctgagactgaagccttgtgcgtgtaagggtagcttctggcagggtttttgtttgctatggaatacagacttccctggggaaagtcaggcatgttttcttctttttttcccccttttcttaaaaaaataaaataaaagggctgcagccttaatctaagtggcatctgctgactttaaagcacacacacacttaatccttaccccggagcactcttgaccaggacacagaaagccttttggtttcaatcatcaaaacacaaggggaaagtcatccattttagcagatacactttaagccattttggccacagttccttagatttttcagtggcccttgataaatctcattccaatttctgaccctcctgattcgaactcaactgtccttatagaggaacctgaaattataataatcagagaccaggttctcatgcatatggttttacttttacgtttgcaaagttgagaaacaggaagttctggtatctaccttttaaattcatgcacactgtagctttctccaaagatgatacaaagtaaagtgatctatgaacgagggtgaaagtgtgagagggcaagagaaaagggtgggaaggtaaagaggaactagaaccaagcccccagcagagcaccgtcagtcctcccagcccgcctgctggacaggatgagtcacgaaacaggttctgaagttttctgcactcgtgttttagttgcaaaaataacagctatgttttatttaaagaccaactgttcaagaatcactacaatagagctcagtattaaagtctgtgctcagtcatgtccagctctttgtgaccccctggactgtagctcgtcaggctcctctctccatgggattctccaggcaaggatactggagtaggttgccatttccttctccaggggaatcttcccaacccaggatcgaacccgcatctcttacatctcctgcactggcaggctggttccttttactactgtgccacctgccattcccttcttcaggggatcttcctgacccagggatcaaacccaagtctcccagatttcaggcagattcttttaccatctgagccaccagggaagcccacaattaaa

SEQ ID NO: 54717 - DNA, 1196 bp, Bovine  19866880669579
  misc_feature (1)..(1): n is a, c, g, or t
natgtgtgttaatactcaggggtacccaggggaagcctccacagactttcctgattaccagatgtcgccctttctatgtaacaaccatctaatcaccaattctcttgccaagaaatgagaaaagcatttttgcatttggaaaaccacactaggacacgtgaagcgtattaagaaggactgtttcccctgactccacatgcacttttcctgtctgggtttgtttttctaaaagataaaaaccacacagccatgtatgcagtacagttagatctgagaagtgtctgcgcttgcacaaggaggtttcagtttggccagcgtaacttcatcattacctgagttgtattgtaagtaatctctgaaatggtataacatgtgtggccagtgtttatcttgttatgctttggactctttcattgtttaagtggtgattcatgatttatggctgtttaacatgcaaaataatgctgtattcccaggagctctgggaaaacaggcgggttcagtggagtctcagagcgctttccctcgagcaggaagagggtgttagttaggcagttaagaaaaagcagccaaggggaacttagctcttcattgagcaggtatttaaatgaagtagtccatcctgaagctcagattttctgacagagctccgtagcctttggaaagcatatcaaatccgtatgttatttaatttcacaaaaaagcaaatgacaggtgaccttgggctccactgtgtggatggtcccaagcccttgaagtgctcagaaaggttagagggccccagtttaatgtcttggatgtagaagaagagattataaggatttcattcatttgtatgaagtttaaaatgctatagaacatctcagaggcaataccttagatgtgccatttaagtagaaacagacagacagaaccgtatctttaaatgtgatgttatacttgacgtatcaaaaacacatgctttgcccctgtatctgactttctcatgaatcactcaagtttcgaatcatctggtacactgctcttcctccgatggctttctttagggcagcctcaaggagtacagtcagtaataaccgtgagattttctgttaaactagtgttctttttggttgttaggatcttggactttttaaaccatggaaaactaggtagtttagttcatagattgtaaaggtaggtcttaatacctctgt

SEQ ID NO: 54718 - DNA, 1286 bp, Bovine  19866880902223
  misc_feature (1)..(1): n is a, c, g, or t
nagaacgtctggagagtgcagggcaacaaatgtgacgtcaaaatgcagcctggtgacgctgagcactgtagccagaaccaagagccgacaagcccaggtggtcagggcacaggacaagagccctcccgcctgcccctcatcatttttgattggcccactaagactacctcagaccaataaagcgtctgggagccaatccaagctacttaactccgaattgctgaggtgccaacaggcactaggcttataaatcagtcttttattatctggttggcttagccaggtctccaaaaggaacagtaaagttttatgatgcacttcaacaggctgatcttcagagccaggctttgtcctggatgaaattttcccctgcagccaccgaggtcagactagatcacccagccttgcattgctgcccccagtcggcgggctgaggttagagggtcggatctgaatggagttcgcatttgatataatgaaatctcatcttaatgtacacttagcctttttgtgagaggtgtaactacaaagaatttctggttgctcagtctgttattgttgcttttttttttaactgtttaaaactccaccttagggtaggcaatttgaaaatatcgttgtctcattcctctgaaaacatttttaattttttattggagtatagttgatttacaaaattgcaaaatagtttcaggtgtacaataaagtgattcagttatacatggacatatatccagtttctcagatacttttcccttataggttattgcagaatattgagtagagctccctgtgctatccagtaggttgaaatcattgccagttatttctattcaatttatcttcactttatttgctcttccatagaaatgccatttaaatgcagccaaattgttttaaaagtaaatggaaataattttttagggtgtctactaataagccctagaaaataattaataatttggctgtaataagaactcaaaagaaatacttaatgttctttctaggagtaaataggactgtggttgaggagtatttcagtcacggtaacaatcatttctccggctaaaattttgttagtgaaagaatgatttttaacttgtgtcgtggcatttcaaccactcagaagtgtccacaggaatctagagcggatggtagaaaatgacaagaagtgatcgtaagaaaaagaaaaaaacaaattagtgatccatcccccagtgagagagcaggtccacaaaccatcacggtatgttcatcaaaagtccaagtcagaattcctttcttag

SEQ ID NO: 54719 - DNA, 1403 bp, Bovine  19866880905754
  misc_feature (1)..(1): n is a, c, g, or t
nttgggaagcccaaaatggagtataacctttaaaattatataagaataataattaaaaaatatttttaaaataaagacttttaaaattgtgttttaagtagatctcatacttgactttggagaaggcaatggcaacccactccagtactcttgcttggaaaatcccagggacaggggagcctggtgggctgccgtctgtggggttgcacagagtcagacatgactgaagtgagttagcagaagcagcagcagcatacttgacttcaaggcaggctttggaatgcgtaatactaggctgattgtagtccatctctgagagaaccctggcacaggaagtggttagacttggagtctgaaatccatgtcgattgccaagtaactgtgccaagcaccgcaccctctgtgcttcagtatttctggctataaaagaggcaggggcttccctagtggctcagtggtaaagaatcgacctgccaacaaataagacgtgggtttgatccctgggcggggaagactgcacatgctatggagcaacgaagcccatgaaccacaactattgagtcatgctctagagccgggaactgcagcttctgagactgtgagcctcagctcctgcaggcctccctagagcctgtgctcggcaacaagaggacccagcacagcgagaagcccgccgcagtgagaagctctcgcactgcaattccagagtggccccgctcgctgcaactggagaagaacctgtgcagcaacgaggacccagcacagccaaaaataaataaatacaaattattttaaaaataaagggagcaggccacctacatttcttgcctgtcatgcaagaaagtcctgtgaaaacccaagcagcatataaaggcaagctgtcacaggggtatttggggtgggaactaccatgatgttaaactcacaattcctggatttttagggcttattagcacatgtgcatggtaggcataaatgatggagaggcaggggcattgttccagctccataaactgggttagcagcctcccttgtcaccctaagccctgtgtaattattcctgtcccccatgctccatgagtccctctgcaaaacagcagcattggagccacgaagtaactctcctctctcactcttgtgtgtgtggtggggaagacagtcacatgattttctccctaagcatgagattcagaagcaaaaaagttttctttatgttgccctaaagcagttcaccttcagcattgtgtgtgtttgaatgatggctataaattcatactgattccgcttttaaatgccctgtgacttctagccagattaatgtcactttaaaacagccactttgggaagctgtacttcctgcctatgatctttacttgcttaagacacgtcaaaaactcttctgg

SEQ ID NO: 54720 - DNA, 1341 bp, Bovine  19866880970654
  misc_feature (1)..(1): n is a, c, g, or t
nccttttccaggggatcttcccaacccagggatccaatctgggtatctcgcgttacaggcagattctttactgtcttagccaccaggcaaagttcatataaaaccaaataatttgatttgttgtttaaaatgaaaggccacttcatttgggaattaagatggactgctggagaaatagacacaggtgaacaaacatgtggatgccaagggggcaaggatgggtggcgtgaactgggaggttggcactgacatatatctgctgtgtgaagtaggtgactagcggaacctcctgtgtagcatggggaactctatccagggctctgtggtgacctaactgggaaggaaaggcaaagaggaggaggtgtgttatatgtgtgtagagctgattcactttactgcacatcggaaacaagcacgacattgtaaagcagctttacgccaataaaaattaattttaaagaaagatgaactgctggagaatgtgtaatagcaacatgctgctttaagtcttttccaccactcaaagtaagcactttaaagcagtagccatttgttgtaatgtggcaaggaacacacacgtggttcttctgaaaactggcctgagttgtgaaaacaaaaatgttaaataaggagatccaagacacagccctgtctataacgcttagttctgggattttatctccagggctctgttccttgtctccctgcctgacatgggagcttcacaaaaaaagctgctctggcgcacaggcaccctggaatacaaaccagggccatcaggacgggcacacaggcctctatctaaaccatcaaattccaaggaattaaagacaaaaaattctaaatttatttcaatcagaaatgtctgagtcaacaatcaataaagtctataattaatcttaaaatggacttttctcaattaagtgaaacagaaattaaaaacagtaacagcacaatatctacccaaatcagcttggtcttcatctaggatattagattgggagtcccagagctgccgtttattgagaataaaaccagaccacagctgtgagaggacatgcagaagactgatgagtctgtgatttagaagcgagaccatcgtttattccttgaattttacctttagtatgcttctattaaagcacattagatttctatactcgaaattactgtgttccatgacaccacagaaatggataagacttctaaaataaagtttaagtggctgagaaaaaccattctggaaatcaaaaattgtcctagttgttgacaatactcaaatttggataatcaaccattcgtgaaatttctttactaaccctttatttgttaaccaacaga

SEQ ID NO: 54721 - DNA, 1515 bp, Bovine  19866880985488
  misc_feature (1)..(1): n is a, c, g, or t
ncatgtgtcctttcaaccaccctcagctactgctgggttttcacaaaacaaacacggctctattcctttctcacagaagaaaaaagcgtacaccagggtcccgtgcattagggaactccgggtccaggtgtgggagctccaagagtagctaagccaaggccactgtcaaggagctcagagaacagagtccccagagaaggaaggagctacgaaaggctgctctgagggctacatgggaaaggagggagggggcttggccagatttttccacttgttttggtaccagtttgggaaggggtgagagccagggttacttagttggggagccgtctcccagagcccctcttcctcctctgcctggttagcccagtttcaggggtcacagacgtgatgcgaaatatggcaggatccatggaactactcagaatggcttctgtccacagaaccaacaaacattcccatggaattgtttaagatgagtaaagaaatgcaagtgtccttgaaagagaaactgacttcttacagagagcccgggtccttacattttacacagtcttgtgtactaaggaaaatagtttaatatttcattctcagcaactgcgctgattcctaaacatcaacttcagttgctcttttcggaatattccccttgtgatattctgggtatgtttatgcagaggacacaggctttttgaggctgcaattaagcatttggtgaatataaactatttgaaccacatctatataaatactactcaagttcaactttgacatgtctgtgtgttctttaccccgtccgttgtggggagtttataaaagccatgtccacctaagtcaaagacgtggttctgtctctacaataaatgaaaacccagcccaatttgttttgcaaaggtataaagtaattcccaaattactcctgagaggctaaaaaaaattagattcacgaaagtactcagctgaaactattctctcattggaataactccgtaattccatggccaaaatggcagtcaaccacagatttacaaatgccctttttttgccttgacatcccagtacctggcagactctgggactgaagggaaacgtataaataaatacatctttgtaaacaatttcctcctatgactacttgatgatcatgtactggtaattttttttaatatgtatttccccccccgaccaaagctattttccctggagatattccaacaatatactgctaacatactcccattgtggaattcagctggaaaattttgcaacttaagaaaacatctcagccatctaaccagtgtctctacggacctacagactggagaccaaaaaaaaaaaaaaaaaacccaccaagtaaatatttttggtttagctctaaaggagtgggtgatgtgtgtgatggagcttattgctgttgttcagttgctaagtcgtgtccaactctttgcgaccccatggactgcagcacacaggcttccctgtccagcactgactcccggagtttgctcaaactca

SEQ ID NO: 54722 - DNA, 1858 bp, Bovine  19866881290699
  misc_feature (1)..(1): n is a, c, g, or t
ncaggggaagggctgacaccccaagaatgaggatggactcgtgggcaccatctgaaacctggagggcactagcagctttttatagttcaggaacgtgcaaccatgccgagaaaataagcatgtaacttcccgagttcacggccactgcttacaaggaacactgctcagagtgatcatccacaaacccagcttctcctgtgacactgttcgggggtaaaactgattgcttaacacacttgtctaaatctcggtaggagtaggtgccttcataatataccacatctcactaatcagagaagtatctagaggggactgttatagacaattttaatgaaaagaaaccacaatgtgggaaacctgggcttggaaaaatgtcaggtttttattcactcctgttttaaaatgaataagaattaagggcagagtttctgattagaaacagaagactaagcttaggtcaatttcaccaacctcgtaacttgctaggagtttcagaagcagactttggacttaccttacttacatgctcaaaaggcatacgctgtcttgctaccacttctgatttctgaggttccacccatgtttgtttttaatgagcataatcacacataacttttaataactaaaataattccagcatctctctcccacctttatctacagagcaaaatatactctatggattccgaagaaagaacattttgctcttcccttgaggtacccatctaatgcagacgctgcactggatcctccccttgtcttttatcatttagccatggccttggtatctggggactcttagctccagctgttttcaatggccttccagaaaacagtatgtgtgttaagacactgtgctccattaccaggctagacttcagctttaataaaggaaaagcaaactcattaagacagacctctttgtaaaaagagtacttaaaattaacatcctggggaaatgaacagaactttctgttatctgatttctttccacctatggttcaatgctctgctaatggtttccatttgaaaaagcaaattcatttagaaagaaagacgtttcatcatgtatataagatttcacggtcttcagaatacaccagttttttagaatttgagtgattcaatctaagaattgacggtcctcagttctaaacataattaaccagtacttgctcgtacttcgagttgcaattgccattggttcacagttggcacactcaacccctcagtgaactctttcacaaaagctaaagagattcgtgagcactgcagctgtgagggattaacatcctttcctcaaacgtctgcctaagaaccgccccgcctgtccccacacgtttcccgtgctcatgccctctgctgcatgccctcttcagtctgcagagcagcctagcttctactcctgtgcattgctccaagtaccaaaaatctctgtgaaaatgatgggtgctgaggaagccatttaatgagaaaccgattcgctataaatctgcctcactacatatatttccattaagacccaagtacgattttagcatcagagtattttgactgaagtcagcctcatctgaactgagatacatggggagagtaaaattgctttctcttcttcacgctctgttcttaaacaatacaggtctctttcaggacagaatcttcggagcaaaagcaaaggaaacttcaaactgaaaacagctttcccagtgtaagtaaatgcaatctaataggagatacacttaaaaatattatgaaatatgagttctgtccatggacctgatttgttaagagtcaacatataccttgatctctctgtgcttttgagccaatttctttagggggtttggcacatgaataa

SEQ ID NO: 54723 - DNA, 1410 bp, Bovine  19866881375517
  misc_feature (1)..(1): n is a, c, g, or t
natacacacacatatacatatatatcaatatgtatatatactcttctccatacgggctagtcctaggccggtgaacacagctccctgtgctgtcgagcagcgccttgttctttagccattgtgtgtgtaatagtttgcatctgctaaccccaaactccagtctgccccgccctctgtctcctcccacttgacaaccgcacatctgttctctatgtctgtgcactgttggctttctgagccagataactctttgtttcggggtgtcgtccagcgcattgtgagatgttcagcaacatccctggggtctacccactgaatggcagtagcatgcacaccgcccccccataccccccggtgggacggccagaaacatcccagagcttcctgaatgtcccgaaggggtgggaaagtcacccttaattgagaaccactgttttaaagaagggggaaggcgatggcatcccactccagtactcctgcctggaaaatcccatggatggaggagcctggtaggcttcagtcagtggggttgctaagggtcggacaccactgagtgacttcactttcacttttcattttcatgcattggagaaggaaatggcaacccactctagtgttcttgcctggagaatcccagggatgggggagcctggtgggctgccgtctatggggtcgcacagagtcggacatgactaaagcgacttagcagcagcagcagttttaaagaaaattaggattcagtttggctaagtcaaatggcagaaaccactggccatttttaactaaggtggtaataattcagacagtgataaaaataaaacaaggtcttaaaaacaatccaaagctctggaacttctgattcttatggtcatcataagtatgctgttactgatgagtgggaggaaaaccgaagacgtgttaatggcctgacaggtagattttctgaagccatctgcaccttctccaaagtcaagctaaaatttccccactgcacacactggcaggcagcttgatgggacccgcagtaccccaggcattgtactttaggctatggcactggcaccatgaccaacttaacacttcataaaaatgaacagggaagagtggaattctaactataaatgaggaatttcgaacaccaccttactcaaagattccatttctatcagacaaaagatgaagcaaaatttaatttcctggcagtttatatgcttcagcaggaatgtgggcaagagccagttaaagtgctgaacctgactctgggacatgtggttaaaattaagatcaaaacagagctcgtattcacgattatactcctttcaggggaactcagatgggattgaactctcctttaacactaggaacttttaacattgggtaccagatcttcaaactctccatgcaatttcc

SEQ ID NO: 54724 - DNA, 1250 bp, Bovine  19866881326517
  misc_feature (1)..(1): n is a, c, g, or t
natggatgagtcgagtgccccgacatggcgtgacagtgatgggtgtgctctcaccacaaacttggaaagaagggactcagcttgccctctgagaattaggctcagaaaccaacatcgaaaagtattagcattgaattacgtgaaatctctttaaagaatccaaatgactcacaggccagaattaatgctggctacaaccagagttgacattcagaaatgcaatccaggatgtatttgttgaaaaataattgataaagaatgaacgtgtctgaaagatcacagagatggctggtgcccatctcagcaggcctcagtttctctttctccgtgataagtctgcccagtggtgaattggaagcatcataatattatcctgctgataacaataagcatttgcatttagatcaggttacttctctgactcttatcagggttaggcccactgaagagcctgctggtctcttggctctccatgtagcctgtccacggctggtcaggctgacatgagcatccatccacttgatggtgagtttcctcattgcgaattagcagatttggcagcaaatttgatgaatgtctctgtgagcattgttagaatgagtcagtgttctgggtccagtcatgttcatggctttgacaggaggaatttatgaacccaggaggggagtggccagactgtggaccctgggaattgcccaagataagagtcccctttgggccttgtcaggcatcctctcaacctcatttcctcaatactatgaattgtatttctctttgcatatggcagttcatttttttttttttttgcagtaccctgccattccatctaatgttgagaaaaccaatattggacaagaaaaccaatcttgttcccctgggtagggcagcagaacccagtgaggtgaatgctacaggaaccaggccaaaggacggagagagacctgggaccctgacccgacttccgctgggggttgagtagtttcaggtatctaacgaggttggtcaggatagctcatatcgctgtcgccatagctctgctgtggtgagagaaacattaaacttggagtcagcagggcttagtgccatgattttggcctctttatctgggtgaccttgcacaaggcaactttttgggtctttggccatgaagttaagaatacatgttatgcatgataataatatgtactgcacagtattgttgtaaatttaaatgctatgattgatggaaaagtatagtataagctaaagaa

SEQ ID NO: 54725 - DNA, 792 bp, Bovine  19866880541920
  misc_feature (1)..(1): n is a, c, g, or t
ngggctcaatgaatatttttaaattgctcaaactttaattttggcaacgatgacaaagcagtgataaggtctgtgtcacatccagagcaactgccagagtttctcagtcttttactgaaagggtgatgtatgtgcgttcatattctgcagatgctaattgttgacaacataattcagtggctcaacaaattggaactgacaccatcaacctgctcgattcatttacaatctttcatcatcaatgcaggggactttgtcaactgagcagggccagtttcccctgtgagtccagcatcttgtttcccattagtgacgagcattacaagtaaacagagcggcttagtagtgttcaattgcatcgaagagcccagccaaaaatcacaagcaatgcagaaaaagcaaagtaatgagaagacagactcaagtcagtgcacctttactgagcagaagtttcattaactagtttctctcccaccagcctggctgcatcccactctccatagggtacccagagtgatctttctaaaaggccagtcagttcacatcacctccctgtttaaaatggtttagtaatttctttattctctccttgtcattcatgttttcccagatgccctggaatttgagccttgcctacttctctagccccaaactgccccattctcctcattctacactgtactacacacacacacacacacacacactcactcactcactacactcgagagtacaccatgactgggagtcccttccaacaggacctttgcacatgcgacatcgccgcccccc

SEQ ID NO: 54726 - DNA, 1359 bp, Bovine  19866880688281
  misc_feature (1)..(1): n is a, c, g, or t
ntattctaacatcaatgagaatctaatgaagccttttgtttcactggagtgtttttgaggttttgtcgggggtggcgggttgccatttgtttgtttaattattttggccacgatcagttttgcattctgaaaagatcattctgactttcttatagagaaggactggagggagtaggtgggactagagttgaaaggagaagggagcgcccaacagacctacaggctgagaactggaggacgtgcagagaccactgtccccagggcagcgcaagagggcagagtgaggtctgtccatgagagagacaagccttgccaagcaggcagagaaccctggcagcctcagagtgcacgaatcaacaaatttggctgaaacctctcctttcaggagcaccaggcacagcagcttcaacagctccacttggcacagggctgggcgacactggcacgatccaggcagcccgccggaagccatatgccctgcttaattcctccactaacctactgcttgcagccatgcagacatatgcagccttaatacagttaacagcgtttcaagctcccaaggaagttgggtggagggaggttcccgcccaggcacggtgatggagagaaaaattgtcagcagtgattcttggctgagattggcaacatacactgtcacttaaacctatcaatagatggagctgatgatgtttttcacttaacacctagcgacgaggctgtcagaaactggcaggagatccctgcacaccctgccaagagagaggaacatgaaaatctgtcaaaattcatgcttgctaataaatatacccctggaattcttttttaaggaacccagggtttcagatgtctaggcgacacttgccagggattcaaagagcttgatcaagctaagaggtttctcctcagcttcagttttcatgtgactttggcttgctggcaaaggaaaaggggcgaaccagaggcttagtgaaggagcggccccaaagatactaatcgttgtaaattctagcctgggagtctgtagtctacgggcaaagaaagcagacacatgacattgcccctaggctccaggcacgccctctaggccatgggaccagattcaggagagggcatggtggctcaccagagggttcaaaggaaggctaaataatcagaagttcatgctctttggcggctgtgtagtcactggtggctgttcaatgaataggcccagtaggataacactttcccattccccggaagctgggtgaggtcatgcgacttgcactggccaatggaaatgatgcacatcacactgccgggtggaagctttaagaggcaaagtgcaatgtgcgcttgtgctttcctcgccccagt

SEQ ID NO: 54727 - DNA, 1435 bp, Bovine  19866880741007
  misc_feature (1)..(1): n is a, c, g, or t
ntgttcttgcctggagaatcccatggacagaggagcctggtggggggccgtctatggggttgcacggagtcggacacgactgaagcgacttagcagcagcaacagcagcccagtctctccctacagaagtacctactaaaatgtactagcaagcaggtgttctcaattaacaggctttaagcaggtatttcttaagctgtatgcaaatgtttctctttgtcttccttattctaaatatacagcagcctgtctaccagaaaaggggatggaggttttgttctttaattaagaacactgatcatcctctattagtctatttaacaccaagaaaagaagccatgccaagggtccaggccccacctgggcactttcctaccggtctttctgaacaggcccatctatgcagctcactcacagttggctttgccgagatgactgatgaaaaacctaacgggacactgtcaccctttactgagaccctctatcatctacattcatggtctggtaacataacaaatctcttgatgaagccatatgaaaagtgactccccctttactagtatagaaggggcatactactctgtcaggaactctacacagtaagagtgtgtgaagagacagtagccaaaatgcagtgtcttattcagtcgtgaaattaactgaggagaatttcttaaaggtggtaagatctccctgtagacttggtcattctccaattaaccaaatgtatttattttataagtctcctataaattgtaaccctggtaatttatatgaatcaattaatgcctatgtctagtaatcatccaaaagaaaaattaaacatattgaaacatatgtaagttaattttttgtttcacttatcacaacatgaatcttttctcacatatgttcagtcttatcaatgtacagctgctattgcatgattctgtgctcatgacttttaaaaaaggaggaaagttaattttaagacacccaaattaagcatttttggtaggaaaacactatgtcaattcaaaagagattgctatgctaatggaacaaaagatctagagcattccttacactgacaaaagtaatcccctattcaggttggcccccaaatgatgggctacccaaaaggaaatgaaattgcagcaaaatgggccctatgaggattaataattttataatttaatatttacatgatcataactaaaacattaactccaggcataaagacatgtaactggttagtacaagtttaaatacttaacagttatcaagacagaggtcattggcaagcgaaaccacaagaggagaggcccctgctatgcctgatcctgctgagcaattttcagacctcagctcattctggcagctacgagcaaagaatatacagaaaccagaattataattacatgattttacattgtatcaattagcatgcttccat

SEQ ID NO: 54728 - DNA, 1122 bp, Bovine  19866880872990
  misc_feature (1)..(1): n is a, c, g, or t
ncgaagaagatgaaaatggagacataaaaccagttaaagcaaagaagatgttcttaaagccccaagattaaagtgtaggccttaacatatagctcagggatgagagcatattttggaactcaactctgtaggttcctctatagttattaatggcgtaatgtttatttgtaaagaaatgtatacttttggaaacatgctgcttttggaacaaacatgtgatggatgttatacatcctttgcttaacggtgttcatcaagagtggactttaaacccttggtcttcaaatgtacataggtatgtggtagcttcctaaagaatattttgtctcagattttttttttaatataactctccagtcactgacctgaaattgaactcgtgaaaactaataccagtgtttaaattgcctttatgtttataaacatgtcaagtcagttcatatgtatattttggaatcatgtcatgagaatttattatatgttaattcatcaagaacaaacttgcctcttcaggctaagtattttcatgctacaaagtcaatgtcaatgtgtggaattgttttttgttgttgtttaagccttaatttttagacatggttctataataaatacctgttttcatataaaaaaaaaaaggataaaaagaactaaatttaatttaaaaaacccaaatggccagtcattcaaataaagagtaatgtgttcctatgaattactacagctattttcctgttaggctccatgttatatccaaaacactaccactttacaacaaatagaggttcatgttgtaagactctcacactgtactccccaatcaattcctcatgttatatccatcttgctttatgaaaacatggatgtatcacgagtaaccccagaactccagccttctggggtcacattttctttaagatttaaagaaaggagggacttccctggccatccagtggttaagactctgcgctcccaatgcagggaacatgggtttgatccctggtttgggaaactaagatcccgcaggctggccagcatggcctaaaaaaaaaaaaaaaaaaaaactaaagaaaggaattcgagcgtcttcttctatgacaggaaattgaagtcctcctgaatgtt

SEQ ID NO: 54729 - DNA, 1200 bp, Bovine  19866881341043
  misc_feature (1)..(1): n is a, c, g, or t
nttgcttcctttgagtctgcaatgtataacccagggttaatccaatgctttaacatgatttcttcttttttgcagactaatgttggaaagttttatttgtatttcggaaggcattctcaaaatgtaaatgctttggaggctgtggaaacagacatatgtatatgaaagtaaaatcaagagtgcttagaagctggataagtaaagagaatgagaaagccagcaataagtgccaaattactttttaaatctagaaaccgatcatgtcactttctcagcttaaaatgtttctgtggttctctatcacactgagaataaattcaaaactccttaccctggccctgtgtgacttggaactgcctttgcaatctcaccttactatctaactctcttatgatgatacggtcaatcagatggccttctcgccacacttctcaccccagtagggtttgtgcacttgctttgtcctctgctgggtaatgcttttccagaatgtaaacaagtctgctcaaaatggaggacaaaacagatgcagactatgccctaagtttaaaaacacagagccaaacctaaaaacaaaagacagtgttcccatggccaccaggggaatttagcccgagtaacaaggagaagtcgaaaccgtgtggcctgggaatgcaaaatgggacaaccactttggaagacagttggcagtttcttacaaaactaaaacacgttcttactatctgatccagcaatcatcgtccttggtatttatccaagggagtcggaaatatgtacacccaaaacctgcacacggatgtttacagcagctttattcataattcacccaccaaacttggaagtaaccaacatgtccttcaagtaggtgcagggataaataaactggtacaccagacaatggaatattattcattgctaaggaaaaatgagctatccagccatgaaaagacatgaggaaactttagatgtatattactttgtgaaagaagccaatctgaaaaggctacatactgtatgattgcaactatatgactttctggaaaaggcaaaactatggagacaggaaaaagatcagtggttgtcaaaggtagggaggaagaatggatgaataggcagagtacagagggtttttagggctgagaaattatctgtatgatatgacaatggggctacatgccattatacatttatccaaaccta

SEQ ID NO: 54730 - DNA, 1026 bp, Bovine  19866881374858
  misc_feature (1)..(1): n is a, c, g, or t
nagggctggcccagattggccaggctttgcagtgttactttcccccaaggactagttgggactcccttttcccccaccccaccctccatccatttctgtttttggtgtctggatgcagctctggcagtcacaaaagccctaggccatgtatctgcaccagtgcacccatccatttgccacgataagtgaaagctgatagcacagttctgtgtttatttatgactttccttccagctatgagaagttttttattcctcttccctcaatcgctgggagctgctgtgaagcaagtgtcttctcaattttatagtagagcaaatggagatgtgaagacatgtaattggctgtctgagcacctagtgagaagactgttgtgtctgtgggtgtaagatgttagctgtgtgactggcaggagcattgtgctaggaggttacagatatgtgcgttctgcttccagttctagcatggagtcgctgagagagaccgggcaggagacattgcctctctcagggtcagttttgtcatccaccggccctcagtgcacaatgaaattctgaacctgcagagggagcagggaaggaaagaggattgagtagcaagagccggtagagcaaatctgagagtttcagctgtgcggatggggagctccagagtagagacggcccgttagaggagcaccttggacagggactgttgggcggtgttgcccccgtcgcatccagcccttggctgggacccacccagcctgaaccctggggtgcgtgctgaagaaggttgtgcagctgaaggcttttggctgcctggactcctcgtgactgaccctccctagaaaggagctctggtgatacacctccatggcgacaacaactagtttgtttgggtagtttttttttttagcattcagggattattctggacccctctgaaagcgctgtaagtctggagacatagttactccaggatgaagcactgtaatactcctctgtttctactatgtcttcatttataaaattgttaaaattctat

SEQ ID NO: 54731 - DNA, 799 bp, Bovine  19866881511794
  misc_feature (1)..(1): n is a, c, g, or t
natgggtgagaatacatacaaataggtttaaaagaatctaataagaggcttctcatatggaagaattctctagaaattgctggtgatggtcaaggtaacttgaggcttatttgtaatatttattctatttttcaatgttcatgcaccacctgtgttgaaaaatattaaaacatttacatggtgctttgtagatatgttttcagcaaggacattctgtgatcttccactttgtcacaagtgtaaaactctcatagttcctccaaaccaacattatttgcccatttcattgttgttcttgattaaactacagtgactctctaacaattcactacattataatgttgaactttccccaagtttcagaattagtgtttgaaacacattttttcttccatttataaatgtacatatccctctcaaagcaaaagcctcccatcagactcacatgcccaaacttgaaaatggaagcaggtctaccaaagaagcagagcctgaggcagccattctaagaaagacggtagcatcaacttcattgtattccacaggctgcgatgatgaagtccccagtctctctctctctcagctgtctgtgagcaggaaacacctccgggtttgaacctgaggcagcaggagtacgatctttggcagttattcctgactgtggcctctagtcctgtattccagccctcccagacacaataccattttgataaatttattttctgctgaaatgaatcaagggtgggtgtctattatgtgcagctgactctgtgatcttgtgaaagctagctaatttctt

SEQ ID NO: 54732 - DNA, 1983 bp, Bovine  19866880483100
  misc_feature (1)..(1): n is a, c, g, or t
nctgcagaggattctgggaggtgaccctcacccagagccaggaggctggtggctggggctccggagggcccctcagcccaacaagcagacagcattcgcttctcgtaaggccctctcctcaaggccccagagcaaacatccctcctgggtctgaccctggccaggcagccggggctctctggggagggttttcacaaagacccgttcagcccctaggccgctgcaggaaatcctggaggccagaattacaatacattgcttccggccacccaggggtccccgtgcacaggaaagaggtgccgatggccctggtggtttccaaagggactggccaggtggccccctggtgagggatagaaaggctgtcctgggcgagggtggcacgcatttaagctggagagggacagccttcctagcacccctgtctcatattactcttctgctcccacacctgtggctcccccttacaggatcaactccagacaccgaagctctaagctcggcagtcaaggctccctcaagcctctccaccaatggcagcatccatcccagccaggctcctgtcttgactccaaacattccaggcctgactgaagtctttgtctgggcaaccatcactgcactcactgtctcagctccaatggtcagcccagtttattttagtgctaattgtgacagaatctgacagctcctccaattctaatcacttacatccagaaagcgaaaagacaactcacagaatgggagaaattatgtgcaaatcacaaatctgatatgggatctgtacccagaatgtataaagaatgcttcaagttaagttcacttcagtcgctcagtcacgtccgactcttggcgaccccatgaatcgcagcacaccaggactccctgtccatcaccaactcccggagttcactcagactcacatccatggagtcagtgatgccatccagccatctcatcctctgtcgtccccttctcctcctgcccccaaatccctcccagcatcagagtcttttctaatgagtcaactcttcgcatgacaatccaacaataaaaagacaagctagtttttaagtgggtaaagtattcgagtggacagttctccagagaagacatacaaatggccaataagcacgtgaaaagatgctcaacacctttagtcattaggggaatgtaagccaaaaccacagtgagatagcacttcacatccactaggatggctagagtcaaaaagagggtagtgagtgttggtgaggatgcagagaaactggagtgctcatacattgctgatgggaatgtaaaatgaggcagctgctttggaaaacagcctggcagcttctcaaaatgtgaaatgtagagtcaccatgacctggcaattccacccctaggtataggaaaagtgaaaacattcacccacattatatctcatccacaaatgttcagagcagcattattcataacagccccaagtgaatgcaactcaaatgtccatgcatgggtgaatggatcaatgtatatggtttatccatgcacgggaatactattcagcctcaaaaagaatgacaaacaacatgcatgaaccttagcagtatgacgtcgagtaagagaagccaatcacaaaagaccacatagtgtaagttctctctacgtggaatgtctaaagcaggcaaatggcttgagacagaaagtaaatcagcggtagcttagggctgtgagttgagcaaaatgggtagttggagggaatggagtttcttttcggggttgatgaaaatattctgggttttggaagtcttgggtggttgcagaatctctgaatatattacaaatgcatacacttttcaggggtcaactgtatggtatatggattgtacatcatggacgcagttacacgttaaaaagcagatggacctttaactgctttggttaagttctctgcagatgacatgccccactcctgccccaccgcctgcaagcccccacggc

SEQ ID NO: 54733 - DNA, 1240 bp, Bovine  19866880637980
  misc_feature (1)..(1): n is a, c, g, or t
ntgaccccacagacagcagcccaccaggctcctctgtccctgggattctccaggcaaaaatactggagtgggttgccatttccctctcctaaaacagctggactaggacataattcacataccagaaaaccccacactcttaaagtctacagctcagggggctgggttgcggtctattcgtggacttgtgcaactgtgcaactattaccactatctgtttctgggacattttcatcatctcattccctgcttcccccggatcctggcaaccaccaaatccactctgtctccagggctttgcctcctggacactttatgtaaatacactgcgtggtcctttgggtctggctttggtcatttggcagaatgttttccaggtccacccacactgtggcgggtgtgggcgccccattgctttacgtagctgagtaacagcccatagtttgtgcatctgcatggacggacatcaggttgttcccacctctgggctcctatgaacagcgtgtcatgaacgtatgtgcacagattttgcctgagtacctgttttcaattcttttgctcatctacccaggagtagaattactgggtcatggggtagaactctgtttaacctctgaggaactgccaggtcgtcttccacagtggctgctgcctcggacagtcccaccagcagtgtatgaggttctaatttccccgcatccccgccaacactcgctattgttatttctaatggggacgcaggcgctggcagctgctgccctccaggtggagggtggccttaccagataggctgctgcttcaggtgtgtgtacaggtagatcttctctcctttcctctcctcctccgggctgcacacagtcactgtgggacggggagggagacttgagcagggcaaaccgccccagcagccctcccggcaggccccatgtgcccccagagtcacacaaacacgcaggggaaattccagggcccacactgaggcccacatcagtaacggcatgctcaggcctggccctgaggactcagtccaggggagggtcccaggaacggctcccccaccctggaaacggtccttgacgtccctgggatgagaagttggtccctagagaagtggtttttccgtggaaattcagtaagaaattacaggctggagcaggagcaactggagaatcacacagggacagtgtctcctgccatggggagctcgagccccagatgtgggtcacctgcccggagggtt

SEQ ID NO: 54734 - DNA, 1784 bp, Bovine  19866880709769
  misc_feature (1)..(1): n is a, c, g, or t
nttcggccttgctggcgccgtgaccttccccacctggccccgtccatctcaccggctgcccgggccaccagggagcctttcacagtgaggggaccttctccatctgcagggcctcccgggactttcctctccagctctccagttacattccattcacaaaaaacaatctagatcttagaaggaaaaaagtgaggtggaaaaatgtggtcagggagcgagtaagctgggattggggcacaggaagtggctgctccgccccctttccacccacccacacacatgccagctggggagcctttccatctgctgtgtggactgcctgcactgcggagggggcgggtgctggcccaagaggcaaagacactcagaggtggaccccctccactaaccagccctttctttcctcgctgctgggggctgttgggcaggttcactctggagaggacctggctgtgtcctgcacgccgagtgccctggcacagggctctgccactcagcgggcagcttttcctcacacacaccaaggaccacctggacccacggtcctggctcctgtatctttacttcttatatgcctaaagcagaactttgctaagtgaggaccaccccaccacaactctgagactctccatggctcccactgacctacaagatagaataataacaataatagcccttacatttcctaaccatttactgtatgcccagactgtgctaaaggagtttgtgtgcaatgcctcttccctcttcccctgtcacatgcagtcttcacattacgaagcacgatacagaaaactgcacaaacatgtatgtactaacaaactagaaacctttaaccttcacagcggccccacaagtgggcactgttactatcccattttccagatgaagaaactgagatgcagagggttagctaggaatagttgcaggcctgaggtcacacagtgaatgagagaggctggatctgaacccaagcctctgggtgcataaacccatgggatcctgtgctgcctcatctcagggagtccttcagatccccctccccgaggcttttctccttgtgcactgaggtcagagggttcaatggcttgcttgtccaggaaaggaggagaccctattatgccaccgcacgtgcccatgcacagagtaggtgctgggttgtgcctgtgcgctcctctccaggcagttttgtgagaggcggtggggagacaacattccctgggaggccaagtcagtcacaaagtctgatgggagccttcaccccttcaccctctttttccgactttgctggtacccagaagaggtttgttttgggacagagtcccaagatcgccagcctttgcctcccactggcccctctggagcaggacccacaactgcattctcccctcaccccagagcgctttgcacacagtagtaggacctaaatagactgaattccagactgcatggtcatctctgccgctgggagagccagtgttcaaaccccacccctggcgttgccaccttcagaaaacgcttggctgcttaggacctcagtttcctcacctgcgaaatggtaggaacaccttgcctgcaggtttgctgtgcagcttcaaccaccccctctgcagtgcgcctggggggtgttggcacccgtggcagtggctgtgtccccaccttcacgtcacgtggcagcacgcatagatctggtggcttaaacaaagccctgggctgctcttcaccttgaatccttatcctcgttgtcccacaaagcttattctcattcgggaattttttttttt

SEQ ID NO: 54735 - DNA, 797 bp, Bovine  19866880518478
  misc_feature (1)..(1): n is a, c, g, or t
natacttcttttgatttctacatttggaaacacagaggaagttattatttacacagaggttgacttgtctagtttttaagaatgtctattataaaagaacccagtgttgaggtaaagacccatctcagcttatgcactgtttacttgcctttgaagtatgtgttattttaagtactgagctgtaaaaataatacaaaggctgttctgttatattatgaataaacaagagcacagtatttcagtgttggcagatacttgatttcctggactcatcttacaaaacttttatgtggtgttttcctgtgtagaatctaattgtcatgcttatgtctgtttgtcagtgtggagcataaaaaggagaggtgacgggaagggaaatttattaagtttgatatttaccaaataatgtactctaggtgatttgcttacttgcattaaaatataattctatgaatattacagtatactctaatattacaaaatcttggaatcttattctattttaaaagaaagataaatttttttgaacatggtaatactcctttttgccatgtacgctgagaagtataattgtgctcttttctaaattcataacaccttactggagtaggtaagaagccaatcctttctccagggaatctttctgacccaaggattgaaactgggtctcctgtattgcaggcagattctttaccactgagccacctaggaagccccttaaggatgctgctttgctattatttctctaaatccactttaacgtatgcaggtagagttaccaccttttgtctgtcatt

SEQ ID NO: 54736 - DNA, 1671 bp, Bovine  19866880560346
  misc_feature (1)..(1): n is a, c, g, or t
nctcactgactcttgtgagggtccagtatacaatctacttatgtttagagtagatgactggagtcctcacaaaggccaggcaacatgtttttctctacaacagaagagtgacattagacaaaccctcaaacagagatagaaatcaacgatttaaactgttcatctttatgttggtttaaagatggctgaaagaaaccaaaaagtgatcaggagtgaatccagtatatttagaaaccctctacaagaagtaaggagtaaagaaaagcagattttatacaaatttgaagagaaagaggttaatataatttataatatagtaatttattcatacaataatatagaagataattatgtatttttccaccccaagacattattgttattgttttaagcttctgtctgcaagctcagcacataagaggaagtttatattcatttagattctttaccttgggaagagctttacagctggacagccaggctttctggaattaatagagtgatttcaaaatttcttttgattcaattattcttttaaaatgttttttgatttcaaaaattactcatcatgattttttttaagtgaaagtgacaaatagattcaagggattagatctgatagagtgcctgaagaaccatggatggaggttcataacattgtacaggaggcagtgatcaaaaccatccccaagaaaaagaaatgcaaaaaggcaacatgattgtctgagaaggtcttacaaatagctgagaaagaagagaagtgaaaagcaaaggagaaaggaaagatacacctatttgaaggcagagttccaaagaatggtaaggagaggtaagaaagcctccctaagtgaacaatgtaaagacacagaggataacaatagattgggaaagactagagatctcttcaagaaaaatagagataccaagggaacatttcatgcaatgatgggcacgataaaggacagaaatgaaatgggcctaacaagcagaagacattaaaaagaagtggcaagaatacacagaagaactatagagaaaagatcttaatgactcatataacaatgatggtgtgatcactcacactcacctagagccagacatcctggagtgccaagtcaagtgggtcttaggaagcatcactatgaacaaagctagtggaggcgatggaattctagatgagctatttcaaatcctgaaagatgatgctacgaaagtgctgcactcaatatgccagataatttggaaaactcagcagtggccacaggagtcaaaaaggtcagttttcattccaatcccaaagaaaggcactgtcaaagaatgctcaaagtactgcacaattgcattcatctcacatgctggcaaactaatgctcaaaattctccaagttaggcttcaatggtacgtgaactctgaacttcaagatgttcaggctgggtttagaaagggcagaggaatcagagatcaaatctccaacatgcattggatcatagaaaaagcaacagagttccagaaaaacatttacttctgtttcattgactactaaagtctttgaccgtgtgaatcacaacaaactggaaaattcttaaagagatgggaataccagacctgcctcctgagaaacctgtgtgcaggtcaagaagcaacagttagaaccagaaaggaacactgctg

SEQ ID NO: 54737 - DNA, 1847 bp, Bovine  19866880980522
  misc_feature (1)..(1): n is a, c, g, or t
nagcccaccgcagcatcctctctgacatgggcgatggggaaagatgtaaaagtgggactgtggtcattcacatccagaatcactaccttcgccatcagtgatctcagtcgccggtccgtcacgttcacagcctggtccgatgcggttactgtcaggacaacagttggaactctctctctgtcaaggggagacgtggtgaccaaagtgccagatgaggggtggatgagaaatggattcattccagggtggttggcttcaatgaagtattgtattctactgttcaaaaaacttccatcaccatctttggcattgaagatgtgcaccagagtgccaacaggggtgttctctggtacacttatcacaatgaactcctcccggaaagatggggaatggtcattctgatcttccacagcaacactcaggaagaccgtgctattcacgggaggatttctgctatggtctttagttaccaccctgagaagataatgagacatcatttcataatccagttccttagagaggaacaagtctcctgttgagctgtccacttcaaagtgaccatccttgtcatctgcagcgatactatgcaactttccaccatgctgtcgttgaaggtgatcaggtgactttatcaagctcattacttttgtaggcttcaagttttctggtataactaaatgtctaatattctgagaaatgacagttctccctttggatagtggtatcacctgaaataagaataaaaaggagctgtttatttgcagtattttaataatttaatcaacacaggtgctgctattcttttggaccctaattccgtctattcatgatatgtatatatacatattacaaataaatatatatacagtaattgatgagaaaatgtcttttcttttattgcctaattccagtatgtctctgaaaattaaaaattgcatcatatctaggagataagaaagtacaggattttctacttcccccgtttgctgtaatggatgcaatgatagtttgctgaggccacagatgagaaccaaggtagttagttccacaaactactctaaatcctagaaactcttgtctccttaatgacaacatctgcatacatttaagaatcatgtgtctgtttatctgaaattagagacttgaaatattatgatagaattttctcctaaaccacacatccttagtcagttaatatactttggaaacagaatacttggggatatatattcctgattagtattcatatctatgttaatattactgattatcatgtgtttgaataaaaaatcttcctatagtcatcttgttattgatggattggtgtaattttttcctactatcaagacttccaaaaaaaaaaaaaaaagacttcccacaaatcatttgctcattatgactaaagggaagccttaaaatatggacctcaagtgactttctaatttttaaaatagttacaaaaactatgtgatttattattggccatttgtttataaatgtttcttctgcaaatttgccaggtccttgcaattaggaaaaaagaaaagatattttttgttcttcattaaaaaagtagtataaatacccacatagtgattaaagtatcttgtcagtaatttacaaagttaaaataaacgtttatttaaatatagtcatttctcaaatagtagtaaagtcacttaatataatgtacacatacatctgcaatgctctttaaagggagtattcacatttttaaagtatcttcactctatacatttgtatataaagtaaaaaaaaaaactttcagggcatttttccccatttgggtgatgggtgctattacctgaatattaataactgcctgt

SEQ ID NO: 54738 - DNA, 1685 bp, Bovine  19866881000305
  misc_feature (1)..(1): n is a, c, g, or t
nacataagccacgtgttataaaaacttgcatacatatatttgttacataattccaactgtcacattttttcttttagaattggtacttgcttctctaacacatgtttatcctataagagcatttcttcaaataattaaagaggtttactgagtcatattttataaaatgacttctcaagaattgtttatcattttatacttcatagacaaagccattgaaaaccttactttgtcttgatttaaaaaaatatgaaccttgtgagagaaaaaatagcccatctcatatgagtatattcagtaattagcatttttatgatgttaaaaagatctgaaacagccactgcaattgttgaagattcatgatatctatattactgagacacaattctatttttatccaccctctttaacaacctgaaagggaccttccttagccattctggaaagcatttgaagcattgctgaaacagatccttggagacccgagctctaacagaaatcagcaactaggtctggactctctctctgtcagttgggcttttaggtagtgtgcatgcaggcctcagaatggaaccatatgtacaggatttaataaatattttgatgaaaatttccaacagtacatagccagactataatcatgacttccaaatcctacacattcaatctcacttccaaataatgttcttattaacagttggaccaaatggtatacgtctgagatttttttcctgttgttcatacagaaatgactttattttgagaatgagatggtagtccatctctttaatattttctgaaaatcagggtgaaggaatttcattcaattatgtgtgtgtgtgtgtgtgtgttaactggtgagaaaatgtcagtattacaaggttgacactttgtatatataactgtccatcaagctacatcaaaacttttagaagacattatctggcaatatggtgacagcaagataagagcagtgacagtgagtgtcactgtcttgtgacaatgtcagtgtcatttctgcagagtactgaagagtgaataaatgcttccaccaaaaataaaatggttcagttgtgaaaagtgagggtcttgatgtccaaattaatccaactatttaaaaacacatgatttccaactatttacaagggtatgtttctatgatcttagagatgttttgatactaaagtctttgattaacatggttgaccagtcatgctctaccttgatttatcttggtatacctcataccctgtgaacacatacaatgagggcaaaaaaggtggctactgtaaaatgttcaccccaggaaatgtgacctagctacaaaccagagatctatattaacaaacaggccaactactgttggtttcctgaatacaacctctatgcctaccatctgtataagtgaaatggtaaatcaagtcaaatttccttaatgcatatgcatcttgagaagatcatttgataacagaggaaaatggaaaggataaatgcaagcaagcaatcacaggttgtaatcaacagtgacttagacggtacctgatgactcatctagcataaaggccatgttttcatttcctgagaggatgctaaatgttactcttccattccttcctgcatctggatcttgagcagttatgtgatgcaccaaggagcccaccgcagcatcctctctgacatgggcg

SEQ ID NO: 54739 - DNA, 776 bp, Bovine  19866881310643
  misc_feature (1)..(1): n is a, c, g, or t
natgtgagctttatatgactagatgtagcccatgatagaagaataaaggaggccaaagtggcaataaataggaagtgatgggaaaaaattgcccaaagaattcaggtccaccagagaaacacttggattatttctctgagctcattccagccaaagaatagcctcttctttgtgtgatatctgtaatgctagatgcacttaggttcaaaagcattaataacaaagtaaatgactatcatatgtgtccagttataaaattctctttctcccatgacgaaagctcaactgctcattttcactctgaagttccaattcatcttcctctcaaactaaattctaggggaagctcactaagccatttcaatatggtatcctctgagaaaggaagagctggcagcccagactcaccccactttccaaactcggaagagagccgctgcccacagagtccataatcataacatgttccaaaatcttgctttgtggctgaatttttgaagtacctctaaaactaaacttgcacaatctgtttctattttactataattcctctttaatttgtactccactaatccagaattttacataattgaaacaccactcctatgattcctatttaatagaaaattgaaaattatttccttattgaaaatattttgggcccttaagaataaaatatttgattttcaaagcagttattatttcaaaacaagagttgaaagattaaggattctttttttttgcttgcttcctggtctagcaacccccttccttat

SEQ ID NO: 54740 - DNA, 1727 bp, Bovine  19866880186521
  misc_feature (1)..(1): n is a, c, g, or t
nttcactttccccatttcactttcatgcattgaagaaggaaatggcaacccgctccagtgttcttgcctggagaatcccagggacgggggagcctggtgggctgccgcctatggggtcgcacagagtcggacacgactgaagtgacttagcagcagcaagcatactgtgctgggcactagatagtatgagttatattagaaattaagaatgtaagaaatgaaatcgcttcttaaaggattagatcaagtaagctgtcatagttttatcaagatgactgattctcaagccaagtgtattttccaaggatttaaggttttgctgactttttctcagatcacttggttatagaattgctttcttgaaattaaagtaagattaatcctccagttaagtggctttatgtcaagtatcaacatgacagtttccttttaaaaaaaagtccttctaaataaacactcagtttcctgttttcctactcttcattcattcagtgtactcaatacatatgtattgtctgcttccacgtggcagtaacctgtactagatgtttgtgatgcaatcggaagcaagactttcagttcctatgtttttctccattgaccctctctatttaaagggatctgaaactctggtctagattttagactactctagacctcccagtctacagtcccatctgcctttaggtagggagggtcagccctttcctgtgtcaagccattcgatgggtcacttgcatccacgcattgctatcaaccacctgtggtcacgctgctccaacaccatgcagcgtccacagcctcttcctctaactgggtctcaccttccttgagtcatggaaagggcaataaggcacaaatcttgctctggctttctcaactccatcgtggggtttctgttaccccaaaagacctacactctaggggaaagagacaaaaaagtgagaaggcgtcttacttggaacttacactcctctccctcattccagccttctctgctcaggccctaaagagcttttatcttctccctgtgtgaagtgtcctgtatctttcctgctctggagcttatagtaacattcttccttagcctcccagtctttggttctaaattattaaagaatagcttttggaattgggggaacccttttctctttgggggtgactagtttcacagttgaaactctgcccttcaaaactattttctccctatggactatgaatgtcaaagctgagagtgccctcattattctagtctgtctttgtcttcttcctcaatcaacgaatgggtgaagaaccacaagcaatgagaataatttcaggaaagagggttatggaacctcaggttaaaactgcagcagcagcagtagtaggattattgttgttgcttagttgctaagttgtgcccgactctttgcgaccccatggactgtagtccaccaggctccactgtctattgggttctccaggcaagaatactggagtgggttaccatttccttctccagaggatcttaccaacccagggattaaacttgagcctcctgcttggcaggcggattctttaccactgagccacttgggaagccagaagtagctactgctacttacattccagtaattacctggtaagtatcagtttctctcactaggctgcagtgtctctacaacagagactatgtctgtttttccctcgagtgcttccccagtaataaagacagactcttgccc

SEQ ID NO: 54741 - DNA, 2433 bp, Bovine  19866880460531
  misc_feature (1)..(1): n is a, c, g, or t
ntctagtcagtaatttccttggttagaatgcatccctgctgtgtcaacaacccctcattctgatatttatattctataccttgtaaaacagatttaagctctacttttctgagaggcagtttgaaagtgtgcccgcatcaaaagtcagggtgaaagcaaaacttgctttctgtgttttccttgtgtctaagattatatgcccatgcttgcttttgtttaatgtttgaaaacttttattacctatgtttgtcttgctttattgttattgactgagtgagtgagtgagtgaagtcactcagtcatgtctgattctttgctaccccatggactgtagcccaccaggctcctccatccatgggattctccaggcaagaatactgaagtggatttccatttccttctccaggggatcttcccaacctggggatcgaacccaggtctccctcattgcaggcagacgctttaacctctgaaccaccagggaagcccactacaagagtgcagatctgatacttattgcctcattatgggtgaacttccagagaacttctggaagtcaactgtcattcttccttgtgccattctcatgtgtgaatgtgatacaaggaaactctgcatcttgttgctagtatggaaacgaatctaaaacctggaagaggtcacggtccaaagaaattgagccaaatatgttgaattaagacaaccttgaagaacatgttgtctctggatttcaagttatgtgaaaatataaatgccttcattgttaaacttaattgaattacatattctgttacttgcaggtaatctattttaactgatataagcccacacatatatttttaaaattgaaagttaaatcatgttaaacatactgtgaaagaatattaaatttattttttgtagtgactttttaatatgtcaatcattacatgaaataagtgcttcattggctggggctaaatataatagagacttttcataaaatcacattttgtttttactaattaattccttaatgttttaaatattttaacactctgtgaagctctggggaacaatggtataaaaccaaaataacacataaatttgtgtctctaagcacttatgtatatgtacgcctagttgttgttctgtcactcagtcttgtcctattctttgccaccccacggactgcagcactccaggcttccctgtctttcaccatctcctggagtttgctcaaactcatgtccagtgagttggtgatgccatccaaccatttcatcctctgtcgcctcttctcctcctgcccttaatctttcccagcatcaggatcttttcctgtgagtcagctgttcacatcaggtgccgaaaatactggagcttcagcatcaatttttccagtgaatattcagggttgatttcctttaggattgattgatttcatctccctgcagtccaagggactctcaagagtcttctccagcaccatagtttgaaagcatcagttcttaggcgctcagccttcttaatggttcaactctcacatctgtacatgactagtggaaaaaccataactttgactatatggactttttggcaaagtgatgtctctgcttttcaatatgctgtctagatttgtcatagctgttcttccaaggagaaaacatcttttcatttcatggctgcagtcactgtctgcagtaattttggagcccaagaaaatgaagtctgtcactgtttccattttttctccatctgtttgccatgaaataatggaccagatgccatgatcttagttttttgaatgctgagttttaagccagtcttttcactctcctctttcagcttcactatgaagctcttaagttcctctttgctttctgccattagggtgatgtcatcttcatatctgaggttaatgatatttctcccagctatcttgattccagcttgtgattcatccagcccagcatttcacatgatgaactctgcatgtaagttaaataaccagggtgacaatatacagtcgtgccgtactcctttcccaattttgaaccagtccattgttccatgtacaattctaattgttgcttcttgacctgcatacaggtttctcaggaagcaggtaaggtggtctggattctctttcagaattttgcacgtttttttgtgatccacaaggtcaaaggctttagcatagcaatgaagcagatgtctttctggaattctcttgctttttctatgatctcatggatgttggctatttgatctcttattcctctgccttttgtaaacccagcttgtacatctggaagatatatactatcatgttactattgccataaatatgggtgtgtatatagtatatgttgctttgctgcaacactttgttgccaaacataccgtgggtgactttctatgtcatttgagagggagaaatgtgtaaatcac

SEQ ID NO: 54742 - DNA, 1885 bp, Bovine  19866880599600
  misc_feature (1)..(1): n is a, c, g, or t
nttatcatagctttccttccaagatccaagtgtcttttaatttcattgctacagtcaccatccttggtgattttggagcccaagaagagaaaatctgtcactgcttccattttttccccttctgtttgccatgaagtgatgggaccggatgccatgatcttagttttttaaatgttgagttttaaggcagcttttccactctcctccttcaccctcagcaagaggcattttagttcctcgtcactttctggcattagagtagtatcatctatgtatctgaggctgtttttaaaataccttacaaaagaaaagagactgaagatagaataccagatgggggtaggaagagaatcataaaaagagacaagaggaatttcctgaggaaaatatgtattgtaccatgtgcaataggtacaatacatcttgtacctggacatggaatgaaattgttaaatggcatcaccgacttgatggacatgagtttgagaaagctctgtgagttggtgatggacagggaggcctggcatgctgcaatccatgggactgcaagagttggacatgactaagtgactgaactgactgaccaggtccaggagccaatagagaattgaaaagtggtgattcagtttggcaatgaggaagttactgatagttattgttcttgtaggatggttgtatttatgacagtttcaaacagtgaagttgataaggagtagatggtaagaaattaaatgtggtgaatttagactattctaataattttagtagtaaaaggaaagagaaaaagatcatagtagcctgaggtccaaagcaaacttatattttctccacttgagactttttatctatgattctccatgtgaaataatttaatttgcatttcactttatcgactcacacattgactgacaaagtacactctaaagggcttgtgaaatagacagggtcattagtcttggtgctaatgagaaattacagtatttttgctataatgataagttggcatgtgaatatttaacatatgaaaaagccttcagagagtcagctgctcccactgttcattatcttatgtgtggggttattttctcggcagaaaataccatttggttgtgaatctatcatcattaggagaggaataaagatttttaacaatacacattctccttctggaaaaacgatagttgctccctcttaagtttccatgtcctggctctaagttcctcccacacccttctgtttctctacaattaaagcctttttttactggtcagtcaaatttaagctcactagcaaatttctacattatgaaaatatggagcattttgtgcgaaaagatatttcttgtcactagccaacactttataaagtctgcacttgcttagagagctctgatgaacttcatagtatgcttcgtttttcagcagcatgcatccaaatatcatttagagagtactcgtgttctcacccagaggtagacctgaacataactgtacacaagcattcagttcctagctctgaaacaacacccaattattggactgaagtaacactactaccacttctcaaagccaactggacatagtagttgtattgatcagactagaaatctttccctttggtgttgtaggattcagaaaactttttctgtagagggccagataataaatatttttggctttgcatgctatatagtctctgttgggacttctcaaccctattgttgtagtacaaaagcagccacagacaatgactaattgtgtgactttattccaataaaaccttatttacaaaataggcatcaggctagaattgtctcactggctttagttttccaatccctgctctagaaaaggaccctgagtgggatatgccatttaaccatcca

SEQ ID NO: 54743 - DNA, 1744 bp, Bovine  19866881336411
  misc_feature (1)..(1): n is a, c, g, or t
ncttcgtgcagtgcatccccaaggggaagttgtccatcaccttctgccaacagctagttcgaacgataggccacttccaagtgcgtgtccacccaggagaaagagctgcgggaatatgtttcgcaggtgacaaaagtgagtaacttgctgcagaacatctggaaggccgagccctccaccctgctgccttctctgcaagaagtttttgcaagcatttcctccacaggtaagggtcgtggccttcccggacagcctctcttggaaatgtagtttgtgtctcttacatacacgctgtgttcgtttccctgctctgaaaacgtcttcgtggaaaagctgatcttaacaccctcatccagattctcttccacttgccatattcagcctgtcactttggaccttaaaaaaaaaaaagggcagtgtttctattttaaaggttgagaatgtccaggtctaagacctttggcaggaaacaagtcgcttaattactcagcctctgctcaagttatggaatgctttgaggatgacagctactatataaagcatgtaaagcttttattcatgagtgactaatggcagcataatcatgtttaccgtatcataattgtgctgtgattttgtcatcttgttgtcatgagtttttccttagcttctgaattttcccacattttaattcctggactgtgccgttcgttttattgctggattatcctagttaaccgtgtagttgctgaatattggcattttctgtttgtgagagtggatgcaggggggctgagtgatcggtgtttcccgctccaggtgtatataggcctcgaattgtgtccttagaactacaggagggggtcaggtgatacttaacaggaaaatgccttctcacccagaaattttacctgtgtgtttacattccttgtccagacatggagcttccagctctgtaagttgtgcaacacgagatccaaaactgtgtttactccctctctgcttggtaccgtcatccttccggaatttgcatcatcggagtttaggtttattttttaattgtaattgttcttatattgcctgtgttgctagaacagttagatttccccagaagtttctcactttagcagtaaaggtgctcaccttggctttgcccaatttttatgtgttttaagcaaagtccccctaaaattcatcttaatttctacttctttaagagatttaaaaaattgtccttagaacaatgtaatgactactgtaattaatagggataagctactttggaggatctaaggagttcatttaaatgatgccttgcatttcttttctgactactgcttttacaaatgactattttagcacgacaaaaacagtattaaagaatgcaagaaaataaagtaacttatggactaaatatggtgataggaatagtttttatgttgcagtagttcttcctgtagagtgaacgttcatcgctattagctcttaatctctcacttctgcagttcaacattccttgtatgttagtgtctacacaggaggtggagcataacaaccacttggtggaaggggtggtaaactcttctctctacatacttcatttaaaccgtcttgctatattcctttgtctttttcattaaaacaatatagatgcttcatttgaaccttctgtagcactggcgagcctcgtgcagcacatccctcttcagatgatcacagttctcatcaggagccttacaacggatccaaagtaaaagatgcgagt

SEQ ID NO: 54744 - DNA, 1812 bp, Bovine  19866880181786
  misc_feature (1)..(1): n is a, c, g, or t
ngacgcatatatatggaatttagaaagatggtaacaataaccctgtgtacgagactgcaaaagagacactgatgtatagatcagtcttatggactctgtgggagagggagagggtggggagatttgggagaatggcattgaaacatatataatatcatgtatgaaacgagtcaccaatccaggttcgatgcacgatactggatgcttggggctggtgcactgggacgacccagagggagggaatggggagggaggagggaagagggttcaggatggggagcacgggtatacctgtggcggattcatttcgatgtttggcaaaactaatacaatattgtaaagtttaaaaataaaattaaaaaaaaataatacaaaagagtctaaaacacacacacaaaaaaagaaatcaggttaaataaaatttcaactaatactgacattctagacaggagaattcaaaattaaaacattcaaagtcaaaggagaatgctaaaacattgttttaattcctataggtcacaactgcattttaaatgtaatatagaaatgaagaaagcacgtttattttagcagaatgatttgaatactaacaaatcagtttgataatttaatcagatgtcattttactttaaatctgtaactgtctctttagattcattgcaacaaaagattaaaagaaattttatatataattaatttaaatcagtttgtctggacataaaactcttagctgcccaaccattatgtaggaggcaccttcctatgaaaaataattctattgaaaatgtatacattgaccaaagagatcaattttttaaatgaaatgcaccaacattttcaaagttattaatcattttacatcatggcattcaaatactgtatttactatagtactaaaagtctaagaaaaccatcttcagtaaatatgtaattactgaagagatacagacatttaaataagtaatcaagattccagaaccacacactctcatagcactcaaaaggaaccaaccctactgacgccttgcttccagactcctagcctatggaaacaggagataataaatgtctacaatgcaggccatccaacgtgcggtactttgttctggaaggcctaggaaacaaatacagctaacaggcagccaataaaatagtgtatccctgcattcacacaacaggcttcggcggaagagcgttcagaccaaagccagccagctttgcagccactgcagactagcacgctctccttgacacggcagccacatcgttgtccaccagaagctaccctgcccagccccaggagcacggctacgcagcgctgcaccacagcagcagcaaaggcccgccctcagccaggcggcagactcatcaggaaggaggacccccatcacctgggttcaagcgacggctgcttcaggttctcggagcctttctaactcctggaactagagacctctgaagaaaccccacctgctgccttggctcctgcagcagaaaaggtgacaatgcaagctaaaatgacgtggaaacagaaacctctgttggcagccagacagaagatgccatacagagtaaaagctagaggtttgctttgttacttcccttaaaatcaaaatcacttcctataatcttaaaagcaagccctgttcttaggtttccatgaaagccctacttcccttcctgctgtgcaaatatcttttaaacctgagctaatttcagtcaccccttgcaaatacaatccaaagaaaaacagaaataaacactcaaacccagaccccactctccgggagttcattctagtacgtgtcaaat

SEQ ID NO: 54745 - DNA, 1580 bp, Bovine  19866880459335
  misc_feature (1)..(1): n is a, c, g, or t
naagtaaatttgatggtcagggaaaatgatgtgttaatgtcttaattataagagaaagaagaagagaaatgagagagggaaaaaagatgagaaataaaacaaaggcaaaggatgaagctttgtttttgaattctgtcatctgcatgcaagagtgctcccctggactttaaatcagttaattaagtattaaaatcaatcatcggaaagtcttaatatttaatattggttagattgtatatcaaagtagttttattatttatttactccaaacctttccagaatacttcatctgacaacagggggtctgtttctcacaagataaatgcatttacaatgccaaataaattatatataaaagcatttgtcttaatacatgtcattcaatattaaaaatcacccattggtaaaatcctgaaaccctaattcacttttaccaaccacacaattgtatgatcaagtgtcgcctattaaataggtaaggactacagtaagggtctacacactgagaacaatgattgaaagaaaattaacacagatttaatgcctatatttccaaattatcagaataagaattttagggtaaatgatccactataaaaatactagattcataaatgatacacataatcagaaacatgcagaatatatgaagggatcacaggtgggtttaaatgttttatattataaaaaacgaatatgtttggctttctgatatccaaatgctatgaagtaactggaaagtggccgttgttaccatataaacacgagaaaattgagcatttatgaagagttacagtggcctgacaaaaagctctccacatgtatactcatatggtttcagagttcccttgaacatgtactcatgatgtaaagattgggaaagctcagcctagtgaccaaaattcttgtcattatagccttcaacttatttactgctctgttttataggcatagacacgacctctagccattacactatttggtcaggttcttataaaatcaagagaattataaccaacaattgggagttcaggaagaatactgaaaagaaaaaacaactggacaattacattaaactgatgatgagattaagaacaaggaaaagaaataaatggccactctgcattaagcatcaaatcaaatcaaataattcagtcaaaaacaaaaagaacccctctttggttcaagcctgggaaggcctaaggtgtttgcagaagcacaggagtaattgtgaggcggtccctctaaaagtcctggtggatctgacatttagccctgagctattagtaagtggtagggctggaaaataaatttttaaaaaaactaaaaatagcatttttaattaagtaatagtaaccggaaaaacatggggtgtccccagtggttcagcattaaaggactgcaagttcaacccccgggtcgggagatccctggaggagggcagggcaacctctagtattcttgtctgaagaacaccatggacagaggagtctggcgggctatggtccacagggttgcaaagagtcagacacgactgaagtgacttgacaggcacacaggcacgcaatggcaaaaacaca

SEQ ID NO: 54746 - DNA, 717 bp, Bovine  19866880517666
  misc_feature (1)..(1): n is a, c, g, or t
ntaatgaagataatggcagtttagttcagttcagttgctcagttgtgttcgactctttgtgaccccatgaattgcagcacgccaggcctccctgtccatcatcaactcccggagttcactcaaactcatgtccatcaagtaggtgatgccatccagccatctcatcctctgtcatccccttctcctgcccccagtctctctcagcatcagagtcttttccaatgagtcaactcttcgcatgaggtgcccaaagtattggagtttctgctttagcatcagtccttccaaagaacacccaggactgatctttataatggactggttggatctccttgcagtccaagggactctcaagagtcttctccaacaccacagttcaaaagcatcaattcttcattgctcagctttcttgacagtccaactccacatccgtgactaccggaaaattattagagtagcttgttctttatgccagaactttccggaaatgtgtccctgatcacctggggctttgattcctccgcttgaaatatgccacacatcctgtcaaaataacttcttatagctgcctaatgactgtgggtggcctgtgatcaccttgtcagagtgtcttttacaccctgagatggtttccagctctgacttacttcccggttccccctccccacaattatactccaagtatcatctctttccttatttattttattctttttt

SEQ ID NO: 54747 - DNA, 1311 bp, Bovine  19866880573139
  misc_feature (1)..(1): n is a, c, g, or t
nggggggagctcggctgatactgacacagcttaaaatggagacacatctaatttactacactaacaacatgtgaatctgtaactatgccatgaggtggtcagtcttatctctgttttgcagaaatcaacatctaagggggaaagacctttgctgaaattactttgtccaggactaggactagagcatacctggctagaacttaccccaggctcacccacacaagttccatgtgctcatcacatgacccccaaaaaagtaaggtccaatacataaaagttatagaaattaactatatgctagataaagagccacttcatatagtaaatattgagatttggagttgtttgcaaacttgaatggtgtcaaaaggaacagaagtaaaagggggtaaaaatatacctgtcatataaacagtaatttgattagaaagggattcaaaggtgtaaagcaaaagataatttttttctagcaaaaccagtattaagactacaaaatataaccttagttagaagcacatgacttcaagcaagtgttggaaactgaaaaactgatttaaacatttaagtatttctatattattttagtattaccaatattataaatgtgatattttgacaaagggaacacaaaagtctataatttaagaataaaaagtaactattatcatcaacatttggccacaataactattaacacaagtggaatactacattcaactaaggctcctctgcagagtgtatagtttgctaaactttcagaggtaacagcagtctgaatcactgaaggtaacttgtaaatagctctacatacgttcttttgacgtcctgttcaatcattgaccgaagttctttatcctggaagaacttgttccaaagactctgaaataaggaaagcaatttatttaaaaccatactgcacctttgcttgacttttatgatctcaatctaatgattcaaataattaaaatttatccttctctgagttatgatttcacattgcagatagaaaacctggaactggaaagtgttttattaaaatctagtctaatctcagagacacataatcattctaacattagtttttccagtgatattactgtgcatatttaaatttttctactatctacttaaagtgaatgatacttttactgctagacatctgctgctacccctaaacaacaaagaggtcacctgaactagaggaggaccacaggccagcgggtccactggaacctgacctgcactgccaacacagaaagctatgtcaggttttctacagagctttggtttcataatcgcatagatttttat

SEQ ID NO: 54748 - DNA, 2280 bp, Bovine  19866880620405
  misc_feature (1)..(1): n is a, c, g, or t
ntaccaattgatattatttcttgcatgtttggcagaattcaccagtaaaaccatctgggcctgtagttttctttgtaggaacattttaaattatggattcagttttgttttgttttccataaatatcacagtattcaggttatctatttcttcttgagtaaactcaggtagtttatatctttaaagggatttgctcatttaatttaaattgttgtttatggaaataaaacttctcagtatattccccattctccttttaatatccacaggatttacgacaaattctcctctttcattcctgatactataatttgtatctcctctctttttttatggtcagtttggctagaggtttatccagttttatcaatcttttcagaggatcagcttttgatttcattaatttctctactgtcttttatttctggttttagctttacattttcttcttctgtttgctttagatttaatttgcccttcattttctattttcttgagatgaacgcttgggttacggactatagggatttttctttttttcaaatgtaagcattcagtaacactaaacatttctctctaaataactactttagctgcatcccacaaatttttatatgcagtgctttcatttttattcagttcaaaatgtttaattttctattgattcttaggttatttagaagtgagttatttaatttccaaataactaaagatattacaagtatctttatgtgattggttcctaatttaattccattactgtcagagaatatattcaattcttttcaatttgtttttattggtcagaatacggccttgtttcatatacacctgaaagcaacatgtattctgctgttgtcagagtaaatgtactgtaaatgtcagttagatctagctggttgatgttgctcacgtctctacatccttaactaattattttctacttaccctatcagtaatgagaggagcgttgaagtctcaactgcaatggtagatctgtctatcactcttctctgttctatcagtttctttctgttggtggctttatatatgtttaggactgtgatggctttttattgaattgaccctttgatcattactgtaatagccttctttatccctgctaagttccttgtttctggtattaacaaaactacttcaactttcttttgattagggtttatagaacttatcttttctcatccttttacttttatcctatctgaatcttcatatttaaagtgggtttcttatagacaggatatgggtgggtcttgcttttctacccattctgactatctctataatttaattggtgtatttagaccaggtgctggcaaacattctctgttaagggccagacagtaaatatttcaggctttgcaggtcatatgttctttacagcagctactcaactctgccgttgtagtgaaaaagcaggcacagacaagatgtaaacagatgagtgtggctctgttccaataaaactatttatggacactaaaatttgattttcatataattttcaggtgtcagaaaatattatccttcttttgattttcttccaaccatttaaagatgtaaaaaccattctcaggtagttggccatacaaaaaagcggcataagctgcagtttcctgacccttgctctacaccactgctcaaatcattcttctgcttaaaatccctgaggggctttctacagctcttaggagaaaatccaaactccttaaaatatagtctccgtttctcaactcttcctgccttacaccctaagctacagctacaacaaaatgtgaaagaaaggaaagtgaagtcgctcagtcatgtctgactctttgtgaccccacggactgtagcctatcaggttcctccgtccatgggattttccaggcaagagtgctggagtgggttgccatttccttctccaggggatcttcccgacccaggaatcgaaccaggtctcccacattgcaggcagacgcttttaccgtctgagccaccagggaagctaaatttcccttaatatctcaggctatatcctagcttctgaggctttattcattcttttacttgttcctgaactgtctggtgtttcttgtccttctccgtatggcacactcctgcatatcccttaagagtctgcttctgcacctgtacatcaagtcctcctgtacaccaagtacactatgctaggacagcactatcacaccaactgcactaccactgtactttagaatgttaaaggcactcattaatgaatgaatgaccgaatgaata

SEQ ID NO: 54749 - DNA, 1714 bp, Bovine  19866880686743
  misc_feature (1)..(1): n is a, c, g, or t
nggagaagagattctcctgtggttacttgtattaagcatttaaaagaaggtgtaaagtatacaggggtttatatctaaatgagaaggggaagggattaacaatgaaacaaaggtgataaattctatcaggagcaaaggtttgtgaatgaagagactgctcaaataaatatacattgctttgggcttcagatcttctgagttatatttctaatcatgggtatcactaggagtaaaaatgcagtctgcgtgcagcatcctaatcccctttgtactagacctgtaatgtcttactaggtaaagccgtgaaaaaggatccaggtgtgtgagagagagggctgctcacttgggggtgttctgtctcagcccctgcttgctgtgtccttttttgttgttttatggagatgttttattaatgttcaattttgatacttcaaatgaaatggatcatcaccagtatgtcccgtctagcagtaaacgtgaaatgccatttcacatggtagtatgtgagtgtgggtgggggaacaggcttcagctccgtgaagtcaacagtcgcaaacccattataaataaaagtttaattacacttgtgggagcttggcttacaaagctcagaaatccataatggagcttgctggtaataaaggcctgatctgtttgttaaactccactgttccatccctttctttgccttcttttataaagtgtttggacatctccgtggagtaagagctggtaaatggagctgactctcttgagttacaaaatgtatttcctttacctctttggctgtgcatctcccttttagtttaataaccaaaagaaaagaattaggaaaataggaaaaggcaaaggtattgttagaaaaataaaagtctttcgaaatagttacttttaatccacatttataaatgagggttttgcatacagataactttgtattcagatgtgtttgtgatataaatgtctaatacttatgtgaacagaagctaagtggattccattttcacagggaatttcatgtatcattttttctaagactgatttcaaaattaaatataaaagaagtggatggagttgtggtccttgcacatttggcatagaaatagttttatcatttctgactcttatagagcagtcagaccttttttatgctaatagttcttgctgggaaaggaagcattacaaactcctaaaaaagtaaaatgtattaaatgtttaatgtacttctatactgaattatcagaggttaacaacatttgttgtaataccaagtcttttacagttaacttcatttatgtgccactaaattgtctttttccaaagccaaatagtgatgtgtctgtgttggactatgattgaatactgaaaattaaaatccagtgacagaatggattaccgagatagcaatttgaattttaaaattacttagcaagcattttttcctgttatttgtagtgaaaacagtctgtttaagtttgtttagtgtgtttgacaacagacagtttgatatattgctgggcacagcggtaggttggacttgagtggtattagctctccgtgttttgattaatggtaattgtttcgatgaaaaggcatgttttacgtacaactcatagttctggaaagcagaagtcaacttgcaagatccataattactgttctgagttagcatataaaaagggcaaggagaacctgccagagtagcacagtagga

SEQ ID NO: 54750 - DNA, 1000 bp, Bovine  19866880733187
  misc_feature (1)..(1): n is a, c, g, or t
nttctaaagagaagcatagaaatgttgggtgatttcctaaatgtttatccaagaagcttagtatgatattttaaaaatattagtcctccctgatagtagcagatgtcctcctgtatatcttttgtataatccatgttctttagtatgtttgagggaaagaggggtgggaggtgaaatctgcaatgcagaaacttgcgctactatttctctctaaaacggaacgaatgatcctgctctatagtttcctgaattgaaatggattaaatgctgtttgtcaggttggatattccaagcagaattaaaattaataagtggttgtctcatgcacacctaagcctttgacataaaaaagggagtatcatttttaaaaaaaattccctcgtagtgaatagctgtgtgtcactgtggcatcttttattgaaaggaactttatttaagtagcataaacttgttggatgggcttcaattaaatgatgatttgttaatgcaaatgtgtggtgaatgactggtggtacatctgtctcttcatccacaggccattactgtgcagcgttagcacatgattgtaaaaaaggagaaatcattatatgcaggtagtacatattcaatcagttctgaccttatgtctctggtgaaataaaaaaggtatataatgtaaatgatacttaatctgaataacaacaacacagcactttgagtctctctgactcaatctgttaggtgatgtgaggtgactgatatttcggtattgatggttattggtgccccagtgggaaaaggctatcacttgaatcctttgtcattttattccccatgcactcctccaaccaaattgtatttcaagttctcttttcattgtgtttttcttcttgaaaatggtttgtggagttgcggtgatgaccaccagcatgagcatggtgagcagtgacaattaatacaacaacaaaaaattggacaattagcttcagctccatcagtgtctaatgagccatttgtcagt

SEQ ID NO: 54751 - DNA, 1392 bp, Bovine  19866880907566
  misc_feature (1)..(1): n is a, c, g, or t
naccctgaagaaatggcacccaaatgtacttttaagttaatgatattaaggactaggaataaatttcaaccagcctatataagattaaaaaattaaaaatttaaccctctcttcccttccccccttgtctctctccactctgggtgttttgtctctctctatacatgttcgcatatgtgcgtttgtgtaagtaactcattttaggaagctgaatcactaacacaaaaactaataaaaccttctataagcagacttagaaggccattctatttagttgacattaactctttgagtatgaaaatctggcaaatcaacttcactaggcaccagagtctgctcttagatattttggtaaacaaaaaatcttgtcttcctgttaaaaattcaataggcagagaaggaatgtctttgaaataaacaattgaatcatcaccctattatttctcagaacttaaaccattatcatatatacaaacattccctacattgacaattttaccaataaataaaattctgattccctgatgctatcttagcaaaatgcaccaaacctcataccaattaaagaactgacaatacatactccttaaaaagaaagaatcctgaaataatccactttgtttctaaacagacatcactgtctcagacttaatcttcaacatttctacaaaagaataactatcaaaattagtgaaatgttgcacagttcttatttgggagaataccctgactaaagcagaccactcactaataaagtgcaacttaataaatcatgtggaatcttattttgttcaaacccttactaactcctagcaccatctgttaccatcaaaactatatgacaagatatgatatataattaataggtaaacaacaatctaattaaaatggacaaatactccatgttcctgccatttgggagctctaattacagactaaattttaagcttgaattaaatatttaagctggaaaattaactttccttctcgagccttgaatacattaatacagatatgtgaagcgacttcctgatgggaacttaaacatgtaatttagtttcatcaaagcagttactaattgttaagcagcagtaccttaccatatgtacacaatagctattcagagctgaaaaggtggttccaaagcacccctctgcaaccctttcctgacataaatataaaatgtatatacagcacagcagtaaatacacacactgaaaacaaattacttcgagtcttcagctttcaatgcttctcaaagacaatgagaaattggtttaaataaacaaaatatacctatatttgacaaggcaaaaaccacacaaaagtaaaaaaaggctagaaggacaaaaaggatccaggtataaaattctaggataacacaaaattaat

SEQ ID NO: 54752 - DNA, 1153 bp, Bovine  19866880914645
  misc_feature (1)..(1): n is a, c, g, or t
nccccacacaatagtaagtatgagaacattccccacggttaaagacctcctgatatttaccactcagcaatttctcaggcacctgtaaaaggctttcaggttaactattgcaaacccaaacattatggccctgtcccatccatctttagaatccaggaaacagatcaatattctaactacaggccgttgactctatatgcaacctttcaaagttgctcactacaagcaagtacaattctttaattaatcacgtaacattttagaaacctattttgttataaggactcatataaatttttttgatctctgttaatggtctatgataggtaagtgtaaagatttatgccttaccaagaaaagtccaattgagcatattttgtttaaattaataaagaaccgtggagagaattggaggttgaaggcttaggtaatgaataagagaaacagatgcggatgaaatatgacttccttcgtgtgctgtatttcagggaatctttaattcacctgaatatggccgtgagttatgcttagagtattgtattagaattcctagtagaaagggatttagatatacacgtaaagttaaatatggttagacagtaaaatattgattgcttaccacaaacaatgcagcagggtatctaacacttgttttccttgtgggacataataaggtaattaatttatctctagctgagttttatttgtggaaaaatttttttttggtggaatagatttaaatgtgctttgtgtgtgtctccggcagctctctatttgtgctgtaataaccacgtgcagcttggagcagccctttaataatcatcaccttggaaatgggtgtgcttccttcttgttttaaacagtgcagtacaaggctcagcagtagagcagcactctggatataaaagctaatgactaataggagagttctgaccctctgaattgcgtttactgttcaccaatgattatgtcattaggaatgaattagatagtcaatggggtgaatcttcaaatcaaagctgccactttgaaattttcaataatctgttcacttgtaggattagggtgggatttaacagccattgctgttctagtgctggggttatgtagctgtaaaaacagttttcttagggatggttttttttttccctct

SEQ ID NO: 54753 - DNA, 1237 bp, Bovine  19866880928907
  misc_feature (1)..(1): n is a, c, g, or t
nacctccattttccgcaaatgctagaaaaaaattttaaccgtaacaatatcccataaattggaacaaatatgtagtaagaatctgcatgcttacatgcagcagaaatgagaaaaatacatgtcacaaacatgagcagtacaagatatacatacttctaaatatatagagggaaccgcgagaatccaatattttgcttttaccttaagagttgtgaaataaggaaggactacaggccatttgacggaagaattgtttcttgtgttcctgaaaatctgcttctccccctctttaatatttaagaaacacacacacaggttgccgacaacccgcggagagcggcttgtgttgtcgttttcacttccgcggctgtgaaaaagtgcatatgtgagggctggtcgtgcatgcacaagcgtggacggcgccggcatcagacggagccgcagcacagcgccgagcacagccgctcggcggggtgtgcctgcagtccacctcgggagactgaaaacataaatacaagctgctattttggtgtgatcacacgaacgtggcagcttgtgtggtttttttctctttaacattttaacactgggcagattgtctgcattaacacacaccaaaatcaattctgctctgaaattgcttgtaaaatttttctttccctgaggaatttggtttttatttaactaaaaaaaggggggcgtggaggaaactatataaaacacaccaacatttaggatatcttaactttgcactagtgtgagaatcactgttggattagagaaccagcattatttctctgaaaaatgggaaatgtgtagaagatggactttaaataaggagggaaaaaaaaaaaaactttgtaaaatcacttttgtacattattaatacagaaaacattctcaaagtagtctaattttacactatccactatataataactaaatttgatcaaaaactcatataagacttgtacactataaaaactgatggaggtttcttaagggcagagacaggaaacaaaagtaagtatgtctctaaaagttcactgtgaataaaaagtaaaatgcatatattcctatgatatatagtacaaaaatataacaacaatcaattcattttcacagtactgtgcagcagaactttctataatgatagaaatgtcctgtatcttgagagggtgatgaagacttattttatttattctaaattaatttcaatttaaatctccacatgtgc

SEQ ID NO: 54754 - DNA, 1351 bp, Bovine  19866881014123
  misc_feature (1)..(1): n is a, c, g, or t
nacgaccaagggtccaaagaattgtgaagtattaatctgggggaaaggacaagtatagggatgatatatgtgacactatccttaggaaacatcactaacatttatttaataatgcagtctcctcagactttagctggtctacgtaatatttattattgttgctcaatcactaagtcatatacaactcattgcgaccccatgaactacagcacatcagcctcccagtccttcactatctcccagagtttgcccacactcatgtccactgagtcggtgatggaccaccatccgtccctctgtcggccccgtctcctcctgccctcaatccttcccagcatcagggtcttttccaatgagtcagctcttcacatcaggtggccaaagtattggagcttcagcatcagtccttccaatgaatattcaggtttgactgactggtttgatctccatgctgtcaaagggactctcaagaatcttctccagcaccacagttcaaaaaacatcaattcttcagtgggcagccttctttatggtctcacatctgtgtatgactactggaaaaaccatcgttttgactaaacagaacttcatcggcaaagcgggacctctgtcttttaacacactaagtttgtcatagctttccttccacaaataaaaagtaatttttccagtctctacttaacaagaaaagccaaagggactataaaatacctaactagtatttcttcccacaatatgattctaatttctgtttctgtaaataggagaataattaattaaaagccatgtggtctatacggggccaataaaactcaagaaaagaacttgtagtctgtgatgaggagaaagaaaagcccttgttttctctctgctggaactgaagctgtctgtttctgagtgacagccatcctgggacagtgaaagaagcctgcagacaagcagagacacaggaacccaagcgggtgccctacccacacgatgctcgcagaccaaccctggagcctcccctccctctgcaatggccactgtgggagaaaacgaacttcattctggaataaggcaaattacttggggtgtctcccattcaaaggtgaaatcaccacagttttaagtagtttttaaatagtctcaaaaataagtacctatgtgaaagctatttgaaactaggaaacacttcataatttatatacaaattacaactttagaaatataatgtaagccttcttaaatcaattaagagcttaatcacaaacatataaatgaccggctaacaggcaaataaataatgggtataggctagttttgcttgattgcataaaactgtttacaatacatttctcaataaagaaaa

SEQ ID NO: 54755 - DNA, 1631 bp, Bovine  19866881184071
  misc_feature (1)..(1): n is a, c, g, or t
ngaatattggagtggggtgccatttccttttccaggggatctttccaacctagagattgaacctgtgtctcctgtactggcaggcatattctttaccattaacccaccagggaggcttccaaagaagctttgagccaccagaaaagaacaagtgtacctacagatgaaggagaaccgtagaggcatcattagctgctggaagatactggaatcatcctttaaagttatgagtagaaattattttgaaccaaagattctattttatggcaaaatcatgcgtttttagacaaaaagtttatctccactttgttgttgttcatcactcagtcatgtctgactctttgtgactccaaagactgcagcacgccaggcctccctgtccttcaccatctcctggagcttgctcaaactcatgtccattgagtcggtgatgccatccagccaactcatgctctgtcgtccccttctcctcctgccttcagtctttcccagcatcagggtcttttctaatggtctccactaatcctttgtaaaaagtaacttgaggctctaaacagaaatacaagaaagcagacatggaatgtaagaaatactctttctaaagcaggagttcagtgaaaccatatcccaggaggagagctgtgcaacggaactaggagacagtcgttcctaaatagaaccagaggtgagggaatccaagaaaaacatgtctaagaaaaacttatcccattccagtcaatgttttttaaaaaatctattggagtatagttgattgacagtgttgtgttagtgtcaggtatacagcaaaatgattcagttatatatacacagatattcattctttttcagattctttacttgtataggtgttacataatactgagcagagttccctgtgctatacactaggtcctttggttatctattttctatatgctgctgctgctgctgctaagtcactttagtcatgtccgactctgtgcaaccccatagacggcaacccaccaggctcccccggccctgggattctccaggcaaaaacactggagtgagttgccgtttccttctccaatgcagggaaggaaaagggaaagtgaagtcgctcagtggtaccaactcttggcgaccccatggactgcaacccaccaggctcctccatccatggcattttccaggcaagagtactggagtggggtgccattgccttctccgattttatatatagcatatattatttgtaaatatgttaatacatagatatttgaaattgttctcatttaaaatttctaaatggtaaatattaatgtatacaactgacacaagcaaatgactttgtggtcctcaataacatttgattaaactgattctgagatcaaaaggtttgatcattactgccatatgtattcactatagtctttaaatatggatcagagcaagtaaggtggatgagagatgatagcacattccagtgggatgacaagaagacatgaagcattgtgtggcctattcaggaccttaagaagacatgcagatggaaatggagtatgtggaacagattatggagagaaagtttgaagaaggaaaggactctgccagtcagtcagaagactttaaacttttaaagtaagaga

SEQ ID NO: 54756 - DNA, 949 bp, Bovine  19866881234166
  misc_feature (1)..(1): n is a, c, g, or t
nttggaatatgtcctatgtaggattctgcagttagatgttttaacccttagccaactaatttttttaaactgtttcatgttttgaaagatttgaaataagtataggaaaattggacaagactgtaaacgtgtcagccacatccctcacatcttgttcttcagagcagagtaaggaaataggagacttgaagtgtcgcagacgtctcattgcacatattgcaataaacagctatagaattagatcatgaaatcagctaacctcatgtgcaatgatcaggtagttactatggtaacatttccatttgtgaatttttgtagagttaaaatttgtagccatcccatcataccaccattggcttttgattgtgctccctgcatcagccgcagcactgaactaccatccctatactctaggcgagggaatcaaaaataggaaaatgaaagaaatgagagcattttgctaaattacattttaagactgtcctgatattgttggtaaaattttaagcatgtcttaggagaagtaagagcattgccagttactctctgagatgcttggatttttataagtatatgatatgaaattggttaggcgtggtaacagtaggaggtaaggagggctttaatttatcagctaagtgggtgctaagtaaccagaacagaagtaatgacccttctgaaactaagaagattccttttgagagcagtccccttttattttaaccttattaactgtttgaaatttgttctgtgtttatatactcaaaagttgccctgcttatttcacttctgattataaaatcagactctaatatcttagattaacttggattaaaatagcctgtaatgttcccttgtatcaattactgtattccagtaaagattcctactgtttctgttttgttttgcttcccaaagccccctgctgctgtgattacacctagatctg

SEQ ID NO: 54757 - DNA, 924 bp, Bovine  19866881295114
  misc_feature (1)..(1): n is a, c, g, or t
nctctccgtggtgctgcttaagtgtcctttctctaaaggagccttcccctaaagcaaacaacccaagaaggaaaggcagtgtgttaaagaattggcaagtgtatttttaaaaccagcacagtccgtatgcagcctcccaggtttcccagatgcccttttccgctctgtccagccggaagtggaaatgtgggcggcgcctgaggtgggatgcactcaggaggggcgcttctgcggtcgcctgtcatggccgctctcgtcccagcggccacggcgccctggagaggatgctggggtgttcagtccagcttcctccctggaaagaggagagggcagattcggttcaatgtggcgtggtgaagccatcatcccaagcagggaggacaggaattgaaagtgtctgctcctttcatcccggctcacctcacccctctggtttttgcttgatttttatttcagttttcctttaataaaacagtgaactagagtaagacattatagttattttggtgtttaatcgtattctagggagttttcatcagctcattttaaattttagatggatgctggtggtggaagttctgggtttgaagtgtggacacagcatcagttattgttcctgcaagccctccggtgcggctccatcctcctgcttggcgataaaccttcaccaagggctttgctttttccctcgggacatcttattgaatacttgcatcttcagtaattcatctgggcccagtgctttgtctgttttaatacttctaattacctaattaggtgccataatgcagtgacaaagccctttgtcatttcactcttgtcttaacccttttcttgcttaggaaacactctttgtgtctctttgttgtctgaggaactctccatcatggatattccttggatatttgcctcactccctttttg

SEQ ID NO: 54758 - DNA, 937 bp, Bovine  19866881299929
  misc_feature (1)..(1): n is a, c, g, or t
nataatttttttaatggattttcaaagtgccttataaggaaaaacattacttccaaatcaatagctctttcaaaaagaagggcttaataaatgtaggaatctttaatgtgtcctttagatcctttatatattacttaatataaataaaatacttgttacttaatttttctgttataaattcaagtgttttgacatagtatttcatttaatagtgttcagttattgttcagaatatggtgttaaatatattactgtttcttttttatcagaaggacaatatgttacagaaaaattgcagagaattacagaaaaattggaaaataaaaagcacacacgatcccaccccatagaaacaaccagcaaaacctttccttttttgaaggaagattacggagctaataattcttcctggatctgaagatatacctgttcccttacgtcataattaattaatgaaaatgcactatgttcagatttgtcaagtaaacctaatttgaagggtaaattttgctacattggtttctatgtacaatattaaaatattaaaaactgcaaaagaaatactaacttattggaaggtttataattcagagtggcatgggaaattgaagtagaaaaatcttagatatggtagctctggtatggtaatctttagataataggtaatttgtattgctcgaggtgattaggtctttagaagttaatgttcttgtcagtaggaaactgaaattttgaaatataaataattgaaccaaggttataagactgcaatgtatctcaagctcataactaatttgtgtgtaaatattctttgaatgaatgtcttacatgcaggaagttgaaaattttgccatgcatgttttaaggaaagttatttcagaaaaattaccataaatttatatattaaaaaacaatgtttgcatttcttcaaaatatt

SEQ ID NO: 54759 - DNA, 887 bp, Bovine  19866881439066
  misc_feature (1)..(1): n is a, c, g, or t
natcacccctatccattaaataaagaatgcaggttaatgctgattaattttaacaaatgcctgcaaagatatatgccttcaggaagcataccaactgaactgcaaatggtttctagagacaaaatcctttaaaatccttccacagcatgtagcaattttaatactatcaaaagctagtttagtatatttcactatcatcagattgggaatgaaatatttggggcgcaactaataatagaccctgctcacattgtttcatgagagtctaccttttatgaagcgagtcctatctctatgaataatttgttccataacccaactcaatctgttggttagaatttggatattattgcataatcttgttgagaaaaatagagtaacatcttgaacagtcaaggagctcttttattcattttcaataataatgtaaaaatggaaccacaaattgatttgtgcatgtggcactatttaaaataaaaaagaagaaatattctgtttcagagggttcacttcttcaaggaactgcagcaacatccttttttctgttctgctagtgttttgttgagttttaaccatttatttgctcttataaaatttccagtgggatttgtctgcttgaaaaagacgtatgctcatgttagcaggtgttttatctgaaggaatacataaaggatgaggaaaataaatgcatcaaattgaataagtggattgatcttaatgaccagaatggatcattctgtgatgtagctgaatttcactccaaagtgtccgttttaaacatttctaccccattgccagtgagctgtcttagttacagcttcctatgtctcttgcatccttaatctctatctgccttgacttctgctggaaacttgtccctttctgct

SEQ ID NO: 54760 - DNA, 867 bp, Bovine  19866881639196
  misc_feature (1)..(1): n is a, c, g, or t
nagtgccgctgagggctacacggctcgtcctcaccgggacctgagggaggagggcctcatctttttcatgatcttaaaccctgttcgagggtcaccgctcagctatctccttccggagagctgtcctcgcgggtgcggccttctcactcctgagagagggaggctctgtgcacggcggcctctccggccccgccgtgccctcctctcggttctcgtctcgctgaccctgagcgctcacagccccagggcctcccctccaccgtgcccgtgtccggaagcagcccacggcatgcccccagcgctgcctgcacacagcagggagtagctcccacccggctttaggtggactgacatggggtgaaagcgtcatgctaccggtgtagagtgacactgcctccatgctgactgataatgagacacaagcagctctggtgggcaagagcggccgaggcgcgaataaacaccaactttaccccttcgtcctgggaaagggggttattgatcatcaggtcttgctggccaacagccttcctagggtttgtgatgtgctggaaagaaagaaaacacacacgcaaaggtcagaggccgctggccttcaaagcctaattaagaaaacagttacgttacttaaagcacaacttactatttctttaacgctgctataccatgctcttagttctttaattttacttatccactgacttttatcttgaggaagaacacaaagaaaaagctgtcaaaaaaaaaaaaaaacaggaaaacttttatgaaaatcctaagaaaacatgaaactacgccaaagggcatcacttgaaaactgaagacgatgcattcgtggtgctgcacactcatcacccttccagctcg

SEQ ID NO: 54761 - DNA, 1423 bp, Bovine  19866880350644
  misc_feature (1)..(1): n is a, c, g, or t
nggtgcctgaagaaggaacgttgtagtccagggccctgtgggagctggtggtggatataaaggagcctggtggcatctactgatctaacaacagagtttacctggtaaagagcaccatgtttggagtttagaccagcttcatatccactgagaaactgaatatccctgagcaagttacttaacctctccatgcctcagtttcctggtctatacaatggggctatttatagtacctaacctataaggcctgtgtaagtcttaaataccatataaatagttaacctggtctcaaatacattgcatgtgcttaaataatataaaattaagtacaaattcaaaacatcactattattttacattcaggactggccctctgggactggactctggctggcaaagaccatttctcatcttgtttggtatatgccacaacttcttaaatctactttctctaccttgtgacctgggccccagtcctctctcctgaccttcttgatgtcattccaagcaaaccaaggaaccagactcaagtggggtagggaagagctaatgcagcggcctgccaggcagacagcccccttcacttccctcccatattattccccaaaatctggctatatcttcctagcataaccctcaggctccaaattgggaatgcgggatgtgtgtgctcaccagaacaaccctttacagaatttcctcccgcacatgaaactggatgcctctaccataaaaacattaactgcaagtttccataaagctgtgtatcaccaaaatacttcctttccaggctagaaaatgttctcagaaagcatattttattttcaagaagacaatctagaaactagtggctgcttctgtggttttccagctgtttaaaccagtatttggataccaccaaagtgtctctctctcttttttttccccggagaactgaattacaaaatactggtttctattagggtgtgtctagcactttctttgcggccaagccttccatttttatagtctgcacactagattttccatgaacaagctcaattttattcctaggcaatgatgtttagaaaatccaatatgaacatgaagactgttctaaggcagtttcagaatttgtgctatgcagttgcctaaaaagaacacttctgatgtataaaaaatatgtttggggggcatgtgataatatatgttggggaaaagggttctcactactctttatgttttctgagactgggctatgtcagagaacttatctgctaaattcttcttctcaagcctttatatttatacttgtacacagtacagcccaaacacccacctacacaggcattttacagtaagagttggaagccaagtgactgaaaaacaaaacaaaattatgtatatagtgtctttacagagatctacatgtgaattcaaatgg

SEQ ID NO: 54762 - DNA, 991 bp, Bovine  19866880394873
  misc_feature (1)..(1): n is a, c, g, or t
nttagcagcagaagtggaaagagagccaaagattcctgatggtaagcctcactgtctcagttttactttagaaagctgcctaacatttttctaaacccacataaaaataaaggacagtgctattggggatttttgtattatacctggcagtcaaagaatatcctctatcctggtagcattaaatcaaagttagaataaaatttttagtataaatttttcttttgaaatacacagtgtagacacctatccaaaaaagaatttacttacttagaatgttgaagtttatcttctatcaatggaagaacagctggaatcatttctcgggggaaaatctggctgacgatagtaagtgccatacatacttctactaggttagtgctctgcaagtcctgacataattattaagcaaagaaaacattcagtgcaaattctgaaactagggacagtgagctcaacattgcaatggtcctatacacttaatatggtagttttcaactaatttgtccatttaggaataccttgtattttataggaatatcagtgtttcacttgccttaatagagtcaatagataaagacagcccaaaagtaaccgatctaaaggaaactatatttctgttctgacactgatcaaagtagtcttctttactacagcctttaaaacttttctaaaccagtaacaaaaaaaattttatgaatttttattgttaaagcaatgagtggaagtttaaaaggaagcaattttttaatacatactataaaatgtatgcatttatatatacttatataagcacaaagtttataaactattttaatagaaactgaaactacgtttttgaaagtttggaaaggtttaaagccactagtgaccttaagagaatatatgacttaaaattcagaaagtactacacacacacacactctctcacatatcagaagaaataagataaacacgaaaaagctcaacaattcaattatacttcattaccaat

SEQ ID NO: 54763 - DNA, 2820 bp, Bovine  19866880491962
  misc_feature (1)..(1): n is a, c, g, or t
ncttaaaaacagttcaactgagggcttccttggtgcttagatggaaagaaatctgcctgcaatgcaggagaccccggtttgatccctgggccaggaagatcccctggagaagagaatggcaacccactctagtattcttgccctggagaatccatctcatggacagaagagcctggcaggctacagtccattgggttgcaaagagtcagacacaactaagcaactaacacacacggttgaagaatatcatatctttgaaagaatcactcctgctctttttccaaaagtttaaaacacaataatcaaacatttattcatgtacaagatataaaagagagcctgaatattcaactagctatgttttttacactgctaagttgcctatcaactgatacacataaacattttgggtaaaaagttttactaaaataaatactttctaaataaggagagaaaagaaattagaaataagtatatttaaaaaaataaacatctctttaagaagtgaatagactttaattaaaggaaaacctataaagtcaactgaacctaaaaagatctttgcagataatatgctgtaaagtctttactctgtgctatgaaaaagagttgactttggacctccccagtagctctgtggtaaagaatgtgcctaccaaacccctggcccaggaagactacatgctgcagaataactaagcccctgcgccacaactattgagcctgtgctccagagcccaggaactgcaagtcctgagcccacatgccccagctactgaagcccatgcaccccagagcctgtgctccccaagggaagccaccacgatcgtaagccctcccaccgcaaccgaagagcagccctcactcccagcaactagataaaagccctcacagcaataaagacccagcatagccaaaatagtaaataaaattcttttttttaatagatttgttttcaaagaaaaattttttcaaaaagttgactttatgacttcatgaagtaaacagagaaagccttggtcaattaactaatcaactaaggcaggactaggcaaaataccattaaacccagccttcagcctatctttgtaaactgtgaactaaggatgatttttatattttttgagatataactgatatataaaattattagttttaggtgtacaattacatttttaaaggttaaaacaaaaggagaatatatgacagaaacctatacgacctacacaaaacctaaaagaactgctagtttaggtatagaataaaattaatagttcaaaaaatacacttatttgccaacttaggcatacacacagactcagaagtcgctcagtcgtgtccgactctttgcaaccccatcgattaaaaataggtttttaaattattttaaaataatttagagattttaagactgtttatactccaactctacaaaagtctaagtccacagataaaaaagcagtcactccactgtctcctcactgcagtggttaaaacgaaagtgcctctgaggacttctaaaggaaaaaaatgcaatgtggagttttgcttactcctccaaagcaacctaggtcctaaccaaaatatcattaagtaaaaattaccaaattaataatgtcctaacattttgtgacacactgtgactttatcacagatattttgggtaggattatgtacaaaatttgaggaattctactgattactctatccttcagactagactttacttacattttaaataagttatctactgtcaccactctggcaaggaaatgggggtaccagccaatgagggtggtagtccactttctccattctgcttcctttaacacttggaatggcaggggatgctgcattcttctggatggggaatgagggtaccctgtctgggagaggaaggggcaccccagtactgctcccgatgtgacctgtactgagaacaacggagtgactctagtgtacgggaccagtagaaaaagccctgtcactctactaagtttcctctaccaccaccccaggaaagatgggaggggtacctcaattgttctctgttccttgatgatgtaaaacccaggcttcccacatcatctccactggcaatgccagggagggtccctcttgacatacggcaggatcaaactgcagctgccctcttggtcttcaccaccgagctccatgggagggttggggtacctcattatacctgatgaggatggaaatcttgattcttcattcagcctttgctgctctgggtagtccatagttttttctatgtggtgcttgactgcaatagaaaaactattgtctaaaagtcttccatcttgctagtctgccctttttgcctgagtcctctggctagagagtaggctttttttcagggcatttttatctgcacctgttggcattttcagactgctggctctccagtaaccagtttggggcatacaaggcaaaaagaaaacccagggtactaaccttggagtcattccttacatgccaatgtccctaatcagtctccttcatttatccacgtttcagaatctcatgtgtttattttacatataatgttcaaagtttttaggtgtacttagtgggtagagtacacctaaagtacttctatctactttcaatggttctatcccttgtatttcattttatattatctctcagtttacttaatagtttactaaaaatgtccttctcatcttatcagtttcctgcccaaaactatcccatatctccatatttatacaatccaaactctgtggctaccataggaggacgtccgcaatatacccttcccactgctcccactattaa

SEQ ID NO: 54764 - DNA, 1945 bp, Bovine  19866880507903
  misc_feature (1)..(1): n is a, c, g, or t
naaatgatttatttctttatatgaaaatggctttagtttgtaccttggaagttgtgtttctagtaaaagagttcttattgcattgccataaaaaacttcttaaagttttcacctaaaagttaaaaacagtatgatcattgttgctctcttcaaaatctaagactaaggaagcaaaattgcatttttatttactttttgttcagtcactcaccatcttgtcctccatcattcccttcttatcctgtcttcaatctttcccagcataagggtcttttccaatgagctggttcttcatatcaggtggccaaaatactggagcttcagcttcagaatcagtcttcccaatgaatactcaggactaatttcctttaggatggactggtttgatctctttacagtccaagggactctcaagagtcttcttcaacaccacagttcaaaagtatcaattctttggtgctcagctttctttatggtccaactctcacatccatacatgactactgaaaaaaccgtagccttgactagactagacagttggcaaagtagtgtctctgctttttaatatgctgtctaggtttgtcatagcttttcttccaaggagcaagcgtgttttaattttcatggctgcagtcaacatctgcagtgattttggagggcccccccccagaataaagtctgtcattgtttccattgtttccccatctatttgccatgaagtgatgggactgtatgtcatgagctttgttttctgaatgttgagttttaagccagctttttcatgctcctctttcactttcatcaagaggctctttagttcttctttgctttcttccataagggtggtgtcatctgcatatctgaggttattgatatttctccctgcaatcttaattccagcttatgcttcatccaacctggcattctgcatgatgtactctgcatagaagttaaataagcagggtgacaatatacagctttgacatactcctttttcccaatttgaaaccagtctgttgttccatgtccagttctaactgttgcttcttgacctgcaactgctaagttaaaaagtggcctaagcaaatcttataaacttctaatgatttttatatgtcacttactgtagagggtctgaaaatactttattttgttataaataattttatagcagatttactctagtgttaaagctgatttatagtaaagccaggtctcagttttctgcgttaatggagaggagacatggacttaataatcccaaatcaaattcatatttggctttggaatgcagtatatgctttttggtcagcaagtcattactttcaataatgtttgcttagatcagtactgagctaagttggcacagcacatactaatacttcaggagacccataagcacgttggattttggggggatccaatctatggtagatggacttccctcacagctcagtcagtaaagaatctacctgcaatgcaggagacctgggttcaattcctgggttgggaagatcccctggagaaggaaatggcaatccactccaggtattcttgcctggaaaaatcccatggacagaggagcctggtgggctacagtccatggggtcgcaaagagtcagacacgacttagcgactaaaccaccacaatctatggtagagtttttattataacttgatacacataattgcaaacaatttggctacaaaatttgttttccacttgcattaatttttaaaattcaaaatgaattactgtgttcttgttttcaaaactcagagccatttacataatactatcatttagaaacaaaacctgttaagagcacacagtactaaagtaaacaggtataaaaggacttttcagttatggcaaatatcttagttaccacttagattttttgggcacattaaaatatggaatagagtacaaaggcaaaaccat

SEQ ID NO: 54765 - DNA, 979 bp, Bovine  19866880526556
  misc_feature (1)..(1): n is a, c, g, or t
nataaatggaatcttccagattggaatgtgtatttagcttttctaagtacaaaatgctttgaagggaggaaaaaaaggttccactcaacacttggcgagcggtatttgttctgtaaaataattagcgagtattattgaactaggttgtcacataatcacaagagaatttttttaaaaaaaggatttaggagactcaattttccctcccatagatcaaaagagtgactaatagaaaccatgggtggatggttaataaaaatctgtacaggaggagagagccaacatgaaatgaaaagagtgctgatctcaggtcaggagccttgagttctaatcccaattctgaaaatatataatttttaaaagaataatgcaggggaccagttacagggggatggaagagctaagaagccagagggaagtgtttgtgccctggagtgtttgtgctcagtcatgtccgactctctgtgaccccatagactgtagcccaccaggctcctttgtctataagattgtctcaaaaagagcaggttgccatttcctattccaggggatcttcaccacccagggattaaacccgcatctcttgtgtctcctgcttggcagatggattctttaccactagcaccacctggggaaccccaaggaagcctagatattagcaacagcaggaagccactgccatcctgggctggagggaaaaaaagagaggatgtgctattactggaacccagaggccatggtcacctgatggaagctggaactacagtgggtccatcagtgggagctggagccagggaagagatacagcaacagtcacaggactgaaggatggagggctggagagaatatcccggttctttcttgccctgtcctccagtcttctgccagtgcttcacattgctagatccagctagcaactagctcatatcacaggatggcaaatgcaacctgcaacggccagcacttcctccatacagag

SEQ ID NO: 54766 - DNA, 3305 bp, Bovine  19866880639680
  misc_feature (1)..(1): n is a, c, g, or t
ntctctggggcttaaaatcactgcgtggcagaggacgcagccagcaggggatctttaccgaatccttcttgccatgaaatgcaagaatgtccaggcactgcctagaagcccatggtcatgatgctggcctgatctcctagctgaacccattgaaaggaattatttcagtaccaagaacacctttttccagtttctatccatgaaattgaaagtgttagtcgctcaatcacgtccaactctgtgtccccatggactgtagcccaccaggctcttctgtccatggaattcttcaggcaagaacactggtgtgtgttagttgctcagtcatgtctgactctttgtgatcccatgaactatagcctgcaagccttctctgtccatggaattctccaggtaagaatactggaatggattgccattcccttctccaaagaatagtgaagtaggttgctatttccttctccagaggatcttcctgacccagggatcaaactcgactctcctgcattgcaggcagattcattatcttctgaaccaccagggaagccccttccatctggatgtgaagagaaaaggcaaatgcctctctatgtgccagggcccagaaacaagcagaaacctcacccacagtggtggccaacatctgagtttttcaggagtctctctgaagaagcaatgatattcttctgaggagggtggggtgtggtggtgataatatggaagggggaaaagaaaacagctcagaaagtgaggattgtgtaggaggctgtcccctgggggcatgtctctgcttcctatgcatccccgcctgctgcactccaggcctctgtttccttcctccagcaggactagttgcagcaaaaccccattcccatgaaagagatgcatctgcacttgaagaggatttgacctatgcctggagaagcactctaacccatgtgtacctcagggtggttatcaattcccaccataactggaaagggcatggagtccgaagcttaattctcccacttagctgtgtgaccaggacaagcttttcaaactctctaatcagttttttcatttgaacttaagatatgtccatagggccatctggatgaagcatgattaaatgcaatctaatccattactttggcccaatactttggccacctgatgcaaagaactgactcactgaaaaagactgtgatgctgagaaagattgaaggcagggggagaaggggatgagagaggatgagacggttagatggcatcaccgactcaatggacatgagtttgagcaagctccggaagttggtgatagacagggaatcctggcgtgctgcagtccatggggtcgcaaagagtcagacacaactgagtgactgaactgaactgaactgaaatacaaattaatacataaaggatctacaaaatgcccacaagccaatgggtgctcaataaatacacttttcctgttgaaatgcctcattgttaacttactaaatgatgttatattactttgcagtggattattatttcttttaacttccagtctagatggtcccttttagcttcttgtagttttgttttggataatgtaagatatgttttatcttaccattttattttgcttacaattttgtgggcttcccaggtggtgctagtggtaaagaatctgccagccaatgcaaaagatgtaagagatacaggttcagtccctgggccaggaagctcccctggaagagggcatgggaacccatgccagtattcttgcctggagaatcccatggtcagaggagcctattcataggatcacaaagagtcagacacaactgaagtaacttagcatgcatgcacacaagatatgtttggtttttaataaagttataataaagctttatgttggaactagctcaatctaataacattcttaaattttaaggtgatttgagggacattcattcctgcattaattcatttatagcccaattgcatcaaaacacttgttccaaaagtatttttaaggggcttataaaaatagatacagaaggatataaagaaataagattaattgttatatgttggtcacagaattagtcctgagcttcctagaagccaaagcaaggaggaaaagctgaacaaaaaataatattcacagtgtttgtaagataccaactgctcccaagaaacacaacttttcctgcactgagctctaagtgaccttgatcccctctcaacagtatctctacagaacagctgcctctgatcctgtctgttggtacaaaccagggcaccacacctgagggctactcaaaaacaatccaaccgaggtaggctttctgttggttgggcttgattcgggggtgggattttactgacaggaatcaatgaaatgtatatctcttacagttactagagatgcataacaaattacccccaaatttagtgacttacaactaccattttattttccttacaattttgtgggccagaaatttggccagactgtaacatctttggacaatacaataccttttatgcaatcacccataaatactgtatctgcaactaagccttgatgagaattaagtagatctaaagggcttacagggtgtccttctggtgccaaacatcaaggaagaatgtcttggcttatatacagcaggttcgagagtcacagtgaacagacactgaatgaagcagcagattctcggtccccatgtatatcattctgctcagtctccacaacaagataccatagactgggtgcttaaacaaaagaaatgttatttactcacagtctggaggctagacgtctgagatcaaagtcccagcatagtcaggttctgacgagaggttttctcttgaattgcacctggccaccttctcatttccctggtagctcagctggtaaagaatcctcctgcaaggcagaggaccccaattcaattcctaggtcaggaagatcccctaagaagggataggctacccagtccagtattcttgggcttccctggtggctcagacagtaaagaatccacctgcaatgtgggagacctgggtttgatccctgggttgggaagatcccctggaggaaggcatggcaacccactccagtattcttgcctggagaatccccatggacagaggagcctggcaggtgacagtccatgggatcgcaaagagtcagacaagactgagcgactaagcacagcacagcacagtaccttctcactggtgtgttcacatgaccctttctttgtgtgagctcatgcacttctatctcttcctataaagacactaatcccattataaggacccta

SEQ ID NO: 54767 - DNA, 3545 bp, Bovine  19866880651940
  misc_feature (1)..(1): n is a, c, g, or t
ncgtctgggagttggactagatgattctgctcatttgttttatagtctcaatttaataataacctcatcagaatcagaaactgagtttttaagtccattaaaaaaccccactgggcatgcttgagatagagcccctgccagtgggagagaccctcagctttccttctttcacactggtttccctccagcctccaagctcgctctcagctctgcactgccagtggtttccgcagtggaatgcctcctgcttttccgtccttctgaaaacctggggcatggaccttggaggctccagctttcctttcctgtggctttcctccaaaattacaccttccctcttcccccctccccgctccagccccagggcccttgacttctctgtcagacgtcagcctgtgcttgccacagagcggcggtcagcaagctttcccccaggcttctcccggcgctgacctcagcacccgcagaccaagctgcagacagccaagtgccggcgggctgccctgtgctgacgcagctgcacacgggagctgtgtcccacacgccaggccccgttcctatcaccaggcccacagccctgtcatcccacctctctgcccccaagagagattggctcatcctttccgcggtttcacccatggctcagtgcatcttctccccagatccaagcatcccttgctgtcctccttccccctctcctctgagccctccttctctccagaacaaactcggttcttggggcctgttcagggaccttccatttggcgtcacatgttcgttcactgcaagttccaggagagggggactgggaatgctgtgtccaccatggtgtccccggcacatagaaagagctcaatgatagatttaagcctcaaaccccaacactgactgggcagcacaggaagtgatgtcatggggaagagggtgagcccggagccccaggaagaggcctgaggagggtcagccacaagaggacagaggcgctgcggtcctgtcctgtcctgtctttcaccccagactcaatggcattggctctcacgaggtcaccttctagttgttcctggggagtgactggatatgggaggacattttgttgtcatagcatgggagtgggggggttctatggggcatcagtgggtgcggccaaatatgttacctctgctgtaatttctgggacagggaatgcctgtggcaccctgcgacacacactcgggccttggctcatctgaccttcaacagcctgtgatgctcctttggtctctgctttctggattcccctgtcttggtccttcacagcatcttccaaggcctcctcttccttctgcccaggcctgaggcctaggtgttctccgtttgctcaggacccttttctctcttgccacacactctcccagaatgtgagatgtcaccccttgctcttgctgatatgcctcccagcccaggtgtctctgctgaggcccagccccacatgttactgcttgccagccctctccacctagattcccaggcctcatgctcagagcttctctcagcccctttctcccacccctctgcagcctcctccttgtattatatgtggctttgctgcctgcccagtgtctggacaaaaatgtgggcgtcatccttgccttcacctcgcacatctaaggggacattagactgtcgattcggtctccttcacatcttcaaatgtatctatatgcctttctctgtctcactgacaccaccttagtaccaaccctgatcatttctcacccgaatgattgtccgtctcctcactcatctctctgccccagcttcctttctgttttccacactgggcttaagagttggctttcatgatactcctccatcagggagaacatcaattgactggctggcttcccatggccttgaagacagaggccagactcttgagcatgggatgctggttgctgagctcacctctccagcttcatcctccacagactctgagctcctgattccaggcaacgctcaggtttcacctgtcctgctccatcatgtctgggtcccctctgcacctttgtatattctgttcccctgtgcctgaactttggctctgccctcaccaccaattcctattcaataacctccagggctccccgaaggacttctaacatctcagcaacttttctctgcaactacttttccctttgttatattcttatcaccatggagagcaatcatccattggttgaatgagtgactttatatctcaccagtctgtgaacaacttgagggcaggaatcatagttaatttaacactgcaactttagccagggattgaaacatagagactgttgcatgcatgaatggctgacagtcttgacattttattgaaatccactcacactcacgtcaggaacaataatgataactggagcaggtggggtctcaggacgctgatgcctgcttcctccacacaggggcctgaggttgccacactgccccttccccacctgggcatggtcactctgagcttaccagttactattatttttaattttatttctaaaaatcgtttttcaatgtaatataggtacattatttaaaaagttaaatccttctataaggctcataatgctgtagactctggcccacttctgatcctggctttttggaggcaaaacactttataaccattgcaactaataattactagttattagtaattactaataattatgtttaacttcctttcacagaaggtgagaatttagctgtcttttccattcatttctccttccaccttcccaatttggttctatttcaatatttgtttaaatcaaacttaagtgattacattgctgtgatagagatgccattcatagctgagtcatatatgttctgtcacttccaatgacagcatttcctttcttattcatcttgttttcccaggagttaaacactgccttgtatttcttttggttagttttctatctaccgggcagtaattcactctgaaagtgaagtcgctcagttgtgtccaagtctttgagaccccatggattgtagcctatcaggctcctccatccatgggattttccaggcaagagtgctggagtggattgccatttccttctccaggggatcttcccgacccaggaatcaaacccaggtctcctgcattgggggcagacgctttatcatatgagccaccagggccttcaattcactctcagatcagatcagatcagatcagtcactcagttgtgtccgactctttgagaccccatgaatcacagcacgccaggcctccctgtccatcaccaactcctggagttcactgagactcacgtccatcgagtcagtgatgccatccagccatctcatcctctatcatccccttctcctcctgcccccaagccctcccagcatcagagtcttttccaatgagtcaactcttcgcatgaggtggccaaagtactggagtttcagctttaacatcatttcttccaaagaaatcccagagctgatctccttcagaatggacggtggatcttcttgcagtccaagggactctc

SEQ ID NO: 54768 - DNA, 1940 bp, Bovine  19866880651942
  misc_feature (1)..(1): n is a, c, g, or t
naaaaccctggaaaattaaggaagggtaataaagaatgcttactggaagtaataacccaatggttccaacagaccctctgtgcttatggaaatgttctcttatcagagctgcccaccaaccacaagagcccagtgggtccttcacatgaggctagtacaatgaagtcactgagttttttttttaacttgacgaagttttaattccttcagcgtgactagtggccaccacactgcgcagggcaaggttagacttctgaggtaaccacataggcagaggcgtctctccgtctcttgctgcactttccccaaacttccaccagtctttcaaacttgccatctgtctctcatcccagatatggtgagctgctggcagaaaagtgagttattttccttagcttttggaactgggataaagtttttcaaaaaactcacagtccttcaatatttaccaagtgctcgtgaatgaagatgaaggaaggagaaaatgaaaaatctagattttccccttgaggaagtaaaatatttagtaagatacataaatcagttaacaccaatagaaaattttggtttaaaatttataagcattcttctaatagaaaaataacgaagaaaaaggtttaggggtatcttttacataagatgatttcaagttatttcttaaaggtaaagtaagagctggaatgacaagaaaaggaaaaagccaaagaagtaagattctacaataaggccaaccaaaagaggcatgggcaagatcactgaattgagaaccaaaactttatagatttgagtcaatgctctgtattaaagttaaaattactattgtaatcatcactacaacactccaggcagaagaaaccagcatgtccaaaatgcttggggatgttgaagaaggtaagtgaagtgaagtcgctcagtcgtgtccaactctttgcaaccccatggactgtagcctaccgagctcctctctccatgggattttccaggcaatagtactagagtgcattgccatttccgtctccaggggatcttcccaacccagggattgaacccgggtctcccacattgtagacagacgctttactgtctgagccaccagggaagtcaataagagctcataagatcatgtaaatcatctgcaaatgttttcttattaaacaacttactgtttctgaagccatacataagtcatttctacttctttcttcactcacagtgtgatgtcagcagaaaatggtatttcccccttttctaatttccttttcctgtgaaacaccctttctcatctgtctttctcacctctccctcacctctccctcaggtagaagaatttaaacactgaattggtagaacaaaaagtcactgtaaaattttaggcagagtttgactttgtatcatgtagtctacaaaatatactaaaagtgttattctttatgtagcagtcaaaatggtttgtaaaacagcaagtgttatggtttatattagcattttaagaaaactaaattgagatgccatatcaaaaagcaagtttaatactaaatttacttttaaagataaccatattgcacttaaaaatactttatgcttaggcaaatccaaaagcctttacaataacattaaccaattaagtcttctgactaaaatcaatatttatctttcagtataatactggcatgtgataaaaacatttgccttaatatactttacttacttggtccatctgaagtcttatctttttttcttcttttacatatgcagcaaaaaagagaaactatatggctgagaatgataagtggtggaggcagaactggtttctcatgataagccataatgaaatgataacgttggtacttccatacaatattggaaattgccttcacttgcaaatacacattgcttaaataacaaagaataaacaaacttagataagcacattttaaagt

SEQ ID NO: 54769 - DNA, 3051 bp, Bovine  19866880715093
  misc_feature (1)..(1): n is a, c, g, or t
ngacctttttaaggagttttgtcagaggaaaacatcttagggagaacttgaaaatatacggcttagataaaggttaagaaatgcaatcttgtacaattcacagcccctttttcccccctcctcttttccttgattggataagtaggcagaaaactagaaagaacagagtagacttaaacactatcagtcagttttacctgatggaactcatagaatactccattcacaacagtggggtttccaaggggcacactagcggtaaaaaacctccctgccaatgcagtagaagtaagagatgctggttcaggaagatcccctggaggaggacacagccacccaccccagtattcaggcatagggtcgcaaagagtcggacacgactgagcgacttgcacttagagaagtacggctatactctatatgggcaatcaacaaattttttctattaagagccaaatggtaaatattttaggctttttggaccacttactgcctctatcacctactgttttgtttttcaaccactaaaaaatataggaaccattctgagctcaggccctggccagaacaggccttggccagagttggtatacatggcatagtttgccaacccatgctctaaatctcacaaaagcgtcccacaaaaaaatctcacaattccactgagccaattccatctaacaagtctatgctatgtccttcagagtcttcccctgcactgtttcttggatataattagcgtcccttctaccaggcctacaatcccagtagacccttgtattaagagttgctttctaaagacaggaaaaacaagaaggggccaaagagtctcagatgtacatgaacaaagttatttttttctgcaggaatttcaatagaaaaggcattaaataaatagatgtaaacacgaaatgtaaacattactgaggaaaaaaatatccagcgttcgagtacatatacctagcttctttccccagaaatggtcactttcaatcaccaacaacttaaaacacttgagtcccttctagtactcatttagggcttccctggtgcctcagacggtaaaggatctggctgcaatgcagagacatgggttcaatgcctgtgttaggaagatcccctggagaagagaatggctaactactccagtattcttgtctggagaattccatggacagaggagcctggcgggctacagtccatgaggtggcaaagagtgggacacaactgagcagctaacactttcactttctttcggtactcatttgtctattatgataaaatataaaactacccaaacaggtacattgttaaattgcaggactggtacaaatgtactcatagttagtttcattttatcactcttattaaaaataataaacaaacagccagtactatctcttcacaacttcaaatctttcatagtagtctctgacaaatccatccaaaactttagtaaacccttgccaacaaaggtccgtctagtcaaggctatggtttttcctgtggtcatgtatggatgtgagagttgaactgtgaagaaagctgagcactgaagaattgatgcttttgaactgtggtgttggagaagactcttgagagtcccttggactgcaaggagatccaaccagtccattctgaaggagatcagccctgggatttctttggaaggactgatgctaaagctgaaactccaagtactttggccacttcatgcaaagagttgactcattggaaaagactctgatgctgggagggatgggggcaggaggagaaggggacgatagaggatgagatggctggatggtatcactgactcgatggacgtgagtttgagtgaactccgggagatggtgatggacagggaggcctggcgtgctgcgattcatggggtcacatgcagagtcggacacgactgagcgactgaactgaactgaactggttaagtcacttaaatagtgtcactctgatgttcacaaatttttatcaaattttgtgcctacagagacatacaaaaacattaccacgcttcaagactatcacagtttcccctaccttcattattcaccaagtttatttcaagagtttaccatctctcctgtttgtgtaaacaccaaatataaatatattctccccatacacagcagttttgtcatttatggcattcattgattacattagggattggcttcctatgcctgacagtgacatatcccagctgataatggcaaatcattcccaataataggtttctacaatttttgaaattctgagcttctgctctacaatcaagaatccaataaaatgtgccctggattataaatacatataaaaattcctaattttatccttattttgctagactgcattactgtattttaccaaaagatggcacactacaaacacaaatctgaaaattcctaaacttaaatgttctagataaagtaaaaactataaccacagaatgttagcaaaagaaggaaacgtgatcttcagtggtaaaagagatcagattctggagttcagaataacctgttcattgttggttattctattaatgcaaccttaagtgtctgaacttctgtttcctcacccataaaatagaataatatacctatctcacaaagttgctctgaagattatgatccatgtttttagcaaaatgcgccccacacagtcatatctcaacaatgcttcaaaattcaattttagattcctcctgtctcctagtaataaggggcatatatgctacaaagaagtctactaaccacattctactcttcaaacaaatcagtaccagcacatccttcttgactagatactgatagtgaaaattgagggggaaaaaaaaggactgctttaaaagttctacttcaaggtaacactgaaaatcaatctatttttacaactaaatacacccaacaattctatatattaatattagaaaggagcctccagctatggagcttctattggactaaagctccaaagataataaccataaactcaggataaaataaaaattaaaaaaaagaaaactacttagcagca

SEQ ID NO: 54770 - DNA, 1424 bp, Bovine  19866880716128
  misc_feature (1)..(1): n is a, c, g, or t
ncagcttgtgcttcttccaggcccaacgttttttcatgatgtactctgcgtataaattaaataagcagggtgacaatatacagccttgacatactcccttttcctatttggaaccagttctgttgttccatggttgctgctgctgcttgctgctaagtcacttcagtcgtgtccgactctgtgcgaccccatagacgccaggcccaccaggctcccccatccctgggattctccaggcaagaacactggagtgggttgccatttccttctccaatgcatgaaagtgaaaagtgaaagtgaagtcgctcagtcgtgtccgactcctagcgaccccatggactgcaggcccaccaggcccctccatccatgggattttccaggcaagagtactggagtggggtgccatcgccatggttaggaggccccaaatattctgaaatatgctatcactgacattagacttagaatgccgcccattctgctcctggataagttgaaatacaacaacaatattttatcctccatcttgtgacttctctcctctcttccttctccctcatccagtttatgagggaggcatgaagccaaattttgatggacccatgactgaaacacactgacttaaaatgtctcaagggacagtttacaggcagatcagtagctctccagctggaatttttaaaggagactgagcttactatcttttgaaggagaacactcttcacacatattttgagaacatgtggaaacttctgtgtgagatcggatcaagatccatacaaatattctcttcttgacacttgctgctaataaagaggtgtatatgcctccagatgctttttccaaagtacatataagcatatttcttctttgtaaaaagaaaatctagcactttcaaatgatctttaaaactttattataaagaggactgttgattaaatcatgacatctgttaacctcactccctattctcttctcttactttgaatattcatggattttggtaaagctgtgttcaattatttcttatttaatttttaaaaaagttatattttgggctccttctgaattcttaagtgctattggcatttctgatacaaaagtatttttgccagttcctaccaactttatcttatcctttcaacttacaaatttaatgactgaacctaggttatattttttttagattaattcataacttttgaaacgtttgttgctctattttgttattgttacttccttagtttcaagcactgccaacttaaggtgggcttacggaacactcctgttcttcattctattatcttcaaaaaagctgtgaccctcatgctctattcattctttaacacttgcagtgttatggtgggttaaaaacagacagaaaatccaagactaaataaatagctgttttgggagaccacaga

SEQ ID NO: 54771 - DNA, 1754 bp, Bovine  19866880765089
  misc_feature (1)..(1): n is a, c, g, or t
natggaaaatctcaccctgctttttttcccccagtcccttggcaattaaagcaatttcagattggcttgcaacatagcctacttagtaaaagacactgttgaagtagaatgggagttctgtcattgttttccctagtattcctgctgtagagaaccgcttgttcaaccacctcagatttgatatcacaatactctatgactggctcttcaaaaaaagctgttcaatctggatagatgttgattttcacaactttcccaattcagacattttaaaagccaggagtaaaagaataaagcttctagaagaaaacataaaagaatagcttcatgaccttagaataggcaatgacttcttaaacaggacaaaaacacactaatcataaagaaagggaagataaactggatactgttaaacaatcgttgagttttgtttatcaaaagacatcaataagacaagaaaaagaccaaaacacagagtgaaagacgtcctcaatatgtaaatagacacatactcagaatacataaggagaaggcaatggcaccccactccagtactcttgcctagaaaatcccatggacggaggagcctgggaggctgcagtccatggggtcgctaagagtcggacacgactgagcgacttcactttcatgcgttggagaaggaaatggcaacccactccagtgttcttgcctggagaatcccagggacaagggaagcctggtgggctgccatctatggggtggctaagagtcagacacgactgaagcaacttagcagcagcagcagcagcagcagcagaatacataaagaatgtctataaatcagtaagaaacaactaaaatgaaaacaggaaatattcaagtgttggataaggatttggagcaactagaatactcatacatagctggtgagagtataaattggtacaaccaccttgaaaaacagtttacttgtatctcataagcaaatccagcactaagcatctatagagcagaaacaactgggttctatgcatatgtcttacagtagaatgaatgaataaatgtagcacacttatatagtgtaatactactcaacaatgggaatgaaagaaccgcaactacacacaacagtacatatgaattatactacacacatcatagtgggctaagaagtcagagttcatactgtatgattagaattcagaaacaggcaaagataatctaatcagttagaaaagaagatagtggttgtccctggtgtgtgtgatgggggagcaatgtagcaaccagaaaggggagcaagagaaatttctggagtggggataacattttctttcttgatctgacaatagttacacaggtgatttcaacttgtgaaattcactgagatgtacagttatgattcatgcactcttctgtgtatatgctatacttcagaatttattttttaagacagagatctccagtctgtcaaccttgtcctcatgataggctcaaatcaagacatgatcaggattgtaatttattattttctttcctttttcatccatttattaaaattattcacatttctcattagtttctgccttgcaaatctctaactggcaagttctccacatcttgaaaccctttaatgatttccacacaggagaatattatgccaagttctgtgctttgtggtctgtgcttttgtgttatagagaacagagtatctcccttaatccacaaatctaatgaaattgctcaaataaccaaatgggtaataacaaaca

SEQ ID NO: 54772 - DNA, 1994 bp, Bovine  19866880849272
  misc_feature (1)..(1): n is a, c, g, or t
ntgtggtgacctccttgtcttcctaaattggccaaaaaccacaaagaaacctactgtgagcagccactcttcaatatacttcccgcccacgaatgcaaatcattacaactaccatggtctcattttacagagaagaaagcaggtctagggaagggagatacttcggaaggaatggagccaggctctgaacccaaggtattgggcagctgtcgctctttgctcaaacaagacacaaatgccagagacacatttaaattccacccactcacccttgtttggaagtatttttgttttgttttctgatgtagcaggtgagaatctcatgttatcaacttggatgggcaaagaatgaagcttcatttttctatatatctgagtttgacttctctgttgatcccccatcccaccagggagccaaaatggaatcttactcaactcagggtttcctcggtaaagtccggagattcctcttgaggtttcttctataggtttcctcctaaggcccggagttgtctctacatttgagtggccagggcaggggctgtgggatccacccctggaagcgagtttgataagtgcatttggctgcaagtaacagtcagaaaggctaaaagtaagggacttccctggtgatccagcagctaagactctgtgcttccactgcaggaggcatgagtttgatccctgattggggaacgagcatcctgcatgctgcatgccaaaaaaaaaaaaagggtaaaatataaaagaaaaagtggctaaaccacaggggtaacccatagctcagtaactctgtcctcaagagaggcttgcatgtgggcaagattggaagccgcgtcaatgacatggtatcttcacacagtggaggaatattatacagctatgaaatggataaggcacacgtgtctgcctgacctctgtgcaggcagcctgcaggtcctgagcaccctgcaagttctttttttaaaaatgaatgctttttaaaagttatctgtttgagtaaaagactccttacttctatttctgcagactccacctggctttcaattattctgatacattgtcttttgcagttcttcacttataacagtttcttcagcaacgtcctttgctggtactgttaatacttgttgtccatctggcccgaccacaatgatgggctgacctagtccacttgtttgagcggagtgcaaatttccaagctgaattccatctgttaactattgtgatgacctgagggatttttggtctttgttacatcatgctggttccttggttgtggcatgcggaatctttagttgtggcactcaaactcttgtggcatgcgggatgtagttccctgactagggattgaacccaggcccctgcactgggagcttggagtcttagccactggaccaccagggaagtccacctgcaagcttttgctgactgtgccagactgcagatgcgtacttctcccaagaccaagcagtttccatagctaagcacataggctacacaacatgactttcttttctttttagctgggccacgaggcatgcgaaatcttagttcccagactaggggttgaactcatgcccctgcggtggaagcaaggagtcttaaccattggactgccaggaaccctgcccccgcgccccctgcccagcatgacttctgcgtaactaattcgttcctgacagagggaagccggcttgtttaccgctttctacagaaggtgctcagcccttggccccctgcctctcagcatgtgagtccagtgtgtcacccatgaggcttgggggctgaggctcatgcttgctgaactgtgagaaagaaactgtcttgctccgatgcagtgagtcccacagttgactccacaccaatggctgaaggacaggcttatttctgccattctctaggaagtgagctgcttcattctgacgaatgaagtgtgatgatgagtgaaaaaaaaagtcctagaaggtttcaaagagcatgatactacattt

SEQ ID NO: 54773 - DNA, 1164 bp, Bovine  19866880879148
  misc_feature (1)..(1): n is a, c, g, or t
ncttttgttgctgagcactggctctagggcatgtaggcttcagtagctgcagcatgtgggtgcagcacttgtggttcctgggcactgaagcacaggctcaatagttgtggcacatgggcttagctgctctgtggcatatgggatcttccaggatcaggaatcgaatctgtgtctcctgcattggcgggcagattctttaccactgatccaccaaggaggatcaatttgggagttttcaaaaaacacacacacacacacaaataaaatttatgccaacaaaagcacgtaagtcatgagggaaataaatgcagtcacaagtattttaaaggttcttgcattgaccaggaagtagtaaaagtactaatctgtaacagtaaccagttaaagatgtattttatagtatttataaaattaacctgcagaacagaaaaatatacaaataagatgctataaagaaaagcaataattaaaaatacgttaaccaaaaagattaaaaaagggaacaaagagaaagtgaaatagtaaatgaaactaaaaaaggttcaatgcaccaaaacacattctgtatttgtgtgtaccaatacaaagaacttcaaaataaagaaatgactaaaactgattttctgacacactattatataagctgtcagataataaacatacattatttaattaactggcttcctgggtagctcaaatggtaaagaatcttcctgcaatgtgggacacctgggtttgatccctgggtcgggaagatcccttggagaagggcatggcaacccactctagtattcttacctggagaattccacagacagaggagcctggtgggctctagtccatggagttgcaaagagctggaattaattaaaaggtaaatgaagtaagacactttaatacacaatataccttagctctgtaggaatgagaacccccttgaaaatttatgactccataagcatccgttgggctctgttctgtatgtttttccacagaccactcttctaatgtctgattaaaatggtcacccaatttcacatctgagtatttcatggcaagacttgcagtaaaacaagcatgttgcttgaccaagcgaccacaaaaacacctaaagggaaaaaaataataaaacttttaaaagatcttttaaaaaaatcagtcaat

SEQ ID NO: 54774 - DNA, 2336 bp, Bovine  19866880961667
  misc_feature (1)..(1): n is a, c, g, or t
ngaatgtgagaaaaacagagtgggtcagttcctatcctacttaagcttgagcctccataggtctttttaatgagctctccagctgattctgatacaaagtttcagaactgatccaagatcccacttaaaataggatagtatgctatttgaaataataccccaggtacaacacaaccagtacaaagtaaagtggggctgacaccttgctcttcaaaatggcatttactttttaaaattttttaagtgttcattcatattaaatgtacaatcagttaaaatgatcgagtcttttccacactatttgtgcattaccatcttgggccctaacagccaacctttataatcattcccattaaaaggttaagagagccagggctaagaattttaggtttctatttctaagtggaccaatggccctacaggtggatttattttcagtggggaaatcacttaatggtcaagcctctaacactatggacatacttagcccaaaaaataaaaactgcattagcccaccaatgtctgaacgggagaggtggctgcaccaaagtatcttctctgtgcagaactctgttgtcaacattgtgaagtaacacacaggccctaatactaacactaataaactgaccagagagcctgatcgaacaaacatcttcagaaaaagttaaatatactaattatagttgtcctgaggtagacacattagtgctacagaaacctgattactagtggaaagctcagggaccaaagaaatgactcactggaaaactaagttgccctgaacttaaaggttttgtttcagtttgcttattagtatttgcagagagaagatatggagcctatccacgctcaacctgcttgcaaagggctacggcaccctcatcattaattcatgagtcaaaactttctcgcagtgactcctgaacccctcacaacttgttttacctgctattgctaacttaaggtactcaagggccaaaaaaaagtccattctatagaccatgagctcatcataagtatatctagaactgagggtgggaagtacaactcaaaatccaatctgatatttattttcatgtgagtagcaaacatcaaaaatatacctggcattttctagcaattacatgaagacagaccagatgcttcctgttgatggaacaggagagaactacagactgacagaatcagactaaagttcacaaaacaaccagaagcttcatttcagaaccattaaaccaaagcaggtatggctttaagtgttcacacatttacaaccgtcctccaacctagaacacccagactgattcagaaataggtaactcatgaactcttaagttacaagttagctctacatctgtatatgcgttacaatgcaaaagccgtttcaccaaaggtttcactgcgggactcctttttaatctggcattccgatagtactttgaagtgttcaacttcagaaattacatttacacacaagttttcacaagcaaatttaacatgggattcgtgttttacttgtgtacatcattaaaaataagttgtggaattaaaaattaagtttaatcatttaaatttttttcaaatattctgagtctctaaaatcatatgcagattatgcaatctttattcatgatgtttatgcatctaaatcccaaattgaaaaaaagctagagctcaagaaaaaagcacaggaaacaaccttcttatccgtatttttttaaatgagtcttttacaataatatcctgatttgatttgaatgagagcaggatagaaatgacacatttttcagcttttgaaaaaaggaatgagtatacagtggcgtttaccagcagttacatgatgtgataccacaacaaactgaacgcagaagtaggttcacgaatccagctatcttctgttaaacattcaaaacaatcagaaatgcaaaacaatgccactcttgcctaaaatatcactggcgttaacatgcaatagtcttttgttattttgtgggaaaataaattcgagaaaaagttaaaaaagacaaaggcatctttcgtttccttaaattcaaaatctgagcgtgaaagtggaagtgtcaaggtcgatggttacatgtcagtgagaagaaatttaaagcaagctgggtgggtctctgtgtgaaaaaagactatctgcaaaaagaacttctggcctctaacttctgcataataaactatggtgctttaactctgggaaggcaagttactgcactcattacaccaaaccattttctagataaaaactgtacttcacaaagtaacttgcctgaatcgagacagcaaatcaagtgtacagagagaacacttaagatact

SEQ ID NO: 54775 - DNA, 991 bp, Bovine  19866880981251
  misc_feature (1)..(1): n is a, c, g, or t
ntggagctcagaaatttttgtgtccccagatcaatttcccacttgaactcatgtataactgccaatgctttcatgtgcttctactgtcatatagttgtcactttagatttcactgtggtccttaagttacctactctgaataaaataaaaaaaaaactatttttcaatattgtttcaatggttttgatagttaactaagaacttccagcatggaaaggcaaacagacagaaagcaccagttaatatctgcttctggatctactctctgatttctcaagatcatctgaaccaaactaaaagaagtagtgtggaggaattcagccaagataatgaactgaaatagaaacattttaccctattcagcgcacagaatgttaggctaaataataacttaagaaatatatacccaggttcaaaattggggaaaaaaattctccagaaatctatagacatagcagggagaaggagttgacactttgctgcccatgagagcgaccaaactgacctatgcctttgggctgggcacatctaggcatggaagctgaggctgttggtcctgcacctgcagggagctgtgaaactactacactgtccaagaatggggaccaggaaagccttgcaatcgtgatccagctcgccatggatgaaaacaagatgacacgcaagtgatggagaccgggggtactgttcagagtgagagttaccctaaatttggatggcccaaatcaagaaacaaacataaaaatgtgtgtaacctaaaattaaaaggagattgactagagaggaaaaacaatcggattgctcatcagcaaataagtgctagaaaacagtagaataatatcttcaatgtgctgagatttcaatatgattgtgtgactgtataatttcattttttataattgtcaaatttaaaatctataccaggcctatcactgaagaataaacacaaagactttttcatatgtagaatactaagagagttgtcatccat

SEQ ID NO: 54776 - DNA, 3204 bp, Bovine  19866881037504
  misc_feature (1)..(1): n is a, c, g, or t
nagggatcgtgctcttaaaattcttgataaccttaatgtttcggatagatacagctattattttgttagcctaattttctgtcttgttttttcctcccaagaacaatggaggctgctgaaggttgacagacactgattaaagacaggtgcaaagatttggacatgaagatattcactgatgctattttagcagaaaattggaaacaacctgtatgcccaacaacagaggatgtttaaatacctatggtacacccatataatagaatatcgtgcagcttttaaaaatcatgttgtcagacagtagatggagtgatgttcaccactgttaaaaggaaaaagcaagttacaaaagcagattgctatacacacaaagaaggatatttttcaaaagatatgctaataattaatgccactggtggaattatgaatggattttaaaatcttcttttgcttgtaagtttttcccccttttttttttctacagtgatgtgcattgcttttgaaataaggcaaggtgggatgggtaacaataaaaattattttgctagccaggaaaaaaaaataggaaaatccccttctttcaaggctgtcttccagcatcttgttctgccagatggataggaagcaagctcaaaccccactggtccagcttgcccagagccccatggaggtcaccttggctctgggcagaagcttccttggtgccagcaaccacctcgagacgagttattaaaaatgaggcggtcccaggcgagatctggttctaaagtaccaagggccacttcagcccaaagaaatggcagttccagaaccctgtgaattttcaaagcagaacagcagccctagcttgggagaggaacctccctccctctctcctcccggctgcctgccgaaggttgcagacggctccctttccatcccacaagaggagacaggcagatgagtcatagaactggcttggattaaaggagtattatcgtgttagaagaaatggatctactttattatctgtttcttgtcgccttacaaataaatatgcttttcccaccagacagatttccttaaaaagccaccgatttcattagctgaagctaagaaatgaccaatatgagttagaaatgttcatgtctgaagagtagccaagctgaaaagatgtagtggaaacactgaggaaagtggtttataagtctagattcaagtctgcaaagtgatgccattcttctaaaaatatacagaggaaccacggaagtcctttccccttttctaagagctttctctttctttcttttaaagaaacatactaggattggtttgtaaatctgagattcaacacctcagatttccccttttttgtcgagatgatgatcaagcgatactattttaaggacttccttctcttatacagatttttccacactgggaggacagataaggtatgttccactaatgttcctgattaaacccacttgcgtgccagcagtcatttccctttgtcttgctatcccatgacaacagattgcatatcataggaaattggaatggagattttatttggtttggatctctcttctccattgtttaattccacattcagtttttcattctacatctgcctccttttgcagacatatactacgattaaaacgtcggagaaggcaatggcatcccactccagtactcttgcctggaaaatccaatggacggaggagcctgatgggctgaagtccacggggtcgctaaaagtcagacacgactgagcgacttcactttcacttttcactttcatgcattggagaaggaaatggcaacccactccagtgttcttgcctggagaatcccagggatgggggagcctggtaggctgccatctatggggtcacacagagtcggacacaactgaagcgacttagcagcaactatgattaaatacagggatggctaaacgagttggtgttgcttattgccgactcacttcgtagacttctcaggagcactctgaccagccctctctctccccagagttgcaaagagtcagacatgactgagcacacacacacacataccctctgccctcagaatctctggtctaaaatgtactatgtactcagtaaagagctgatgactgacgtacatatctctgttgttaattgcactcccagtactttgtttactgttgatcaagttccaatagtcagtttccctgtttgcgctaagatgtgtggatgtctcagtgatatttctgtcttcaacccagatcacctgtccattaaaacaaacaaaaaagaaaaataaaaaaagcttccaccaagtgccagaaaagtaggtctaggggggcagagaaagtttcacatttcctgttgctgaatttaggcatggcccttagaggaagctggatgacttttcaatccaatatgctctgttctctgatgctatcatccttgtttttccttaggactacaaagccatgttgccaaactttttttaatgacccagctatttgttttttgagtgtcaacttttatccaactgttgctatgactttttttcttttcacttaaaattgtgattttaaaatattttgtttttctaaatggaatccattaaatctaagagcgttctttccatttatcaaacatgaactgtgtgccaggcattgggtactaactagcttccacactcattatttcactcactcccttacaaccgccctatgaaggagatgccatcacctgagaaaactaagggaggttacaccatttgcccaagatcttatgtctagcgagggttctttaaacccttccaataaaatccatccagctcttactagcttaagtccatgagttttgccatccagaaaacgttttctgagaacccaaaggagaactgtatttgcattctgaaaagtccagacctcctccaaaagaggcagactccaggcagtcaagaggccagactcacttgtgacactaccttagtggtcagtagaaagtccagacatcagatcagatttcaaggcccaggctcacccacatatactgagcctgagaccataggctcagagactgtttccacatctcaaaatggagataacagtttaagttatcttcgaaactgccaactttcaaccatttttgacctccaaaacaaaatttttttttcaaattcctcactgggtcattgtagagattaaaacgagtgcacaga

SEQ ID NO: 54777 - DNA, 796 bp, Bovine  19866881242318
  misc_feature (1)..(1): n is a, c, g, or t
nttaatgaccttaagatgaagagtctgtctcatttccaaaaaaaaatccctgggccttgaaataacatcatttcaggtgaagaaatctggcagggtcagctgtaagctcttctagctcattatctcactttgtcttagacgcccccaatccacccacctcagcactgaggaatttgtaactcaattaataatcatgtcagagataatgttaactacaagcatagattatgtaccccaggtagtgtatgctatgtatttgaccctcacaaaagggctgcaaaaggaagtctgtgagtcctattttatagatgaggaaactcaggaacagcagatttaagtaattcatttaaaactacgagactagttaagtaagacagctgaagttgagccaaatcaactctagacaaagcctgcaatctttgcctccctgcatctgcttttagaaaattggccctggttccctaatgactgtgatttctcacttatttgagaaattaaataggtctcaattaaaatcaccatctagcactgagatttacatttcatcatttaaaaaaaatattatccccaaaaagccagtcttatgatgtgacagaacaataccacctattcatcaaaacttgaaggtagatgtaacctttcatttttgagagggcattctatatatttgaacagagttgcattctggctttgtttttcatattggattttatagctagctctgaaaagtgaatgagtgataattttacttaacagaactaactgaagcagatacttgtgaagtcactggggtggg

SEQ ID NO: 54778 - DNA, 1869 bp, Bovine  19866881242497
  misc_feature (1)..(1): n is a, c, g, or t
naactggacacacacaaatacactggcagccatttgtacttaattgccacccctaccttttcattatttccaaaaggtccagctgcaagttcaaccatgatactctcaccattctaaaattaagaaaggtaaaagaaattgttcaatcactaaaagtgaacaatcttccagtattcatgacctagggcttcccaggtggcactgccggtaaagagcctgactgccaatgtagcagactcgagagacatgggtttgatccctgggttgggaagatcccctggagaaggaaatggcaacccactccaggattctggcctgggaaatcccacggacagcggagcctggtgggccccagtccttggtgtcgcaaagagtcggacacacacgcacatttatgatctactgccacagctatggcctaccgtaagctgatggaaagtcatctgtagactgattttcctaaaatggtccctgtagatagcaaaaggaaatggcaacccactccagtgttcttgcctggagaatcctagggacaggggagcctggtgggctgtcgtctatggggtcgcacagagtcggacacgactgaagtgacttagcagcagcagcagatagcaaaaactggagttacctaaaacaaatttcacctagcatactactccactttattagagttcaacaaataagagaaacttacagataaaccacacaaaaattattcaactgaaggtttgagcactgatttatattgacaactaatatctagcatttcttctatgggctatacattttaagggcttttacttatattatggcatatactatgtgtcattagtcatttttagcaataacaatgaacagggacagaagaaatactgaaatttttcatatacagatttgtaataaatagatgactttatttaaatatacatttaaccttctgtctactcaccacattaacaatgaagccaaacttgaaaagatcaagccctaaagaacttgagaacatttctctatcctgactcttctccaatttcagctttgcctgctcttaatacaccaattaaaacattaaccttagcagaattttttccttgtgcatgtctaaggtctttttatgtgggctgtgtgagaaattcattaaaaagttctttcctgacagtaaagtctactggggagagaggaaacatttagatgtagcaaggtaagactgcatgagcaaccatcttacacttaaaataatgccccaaacaggtcatgggaagataaataaatgctgaatttttaggagaatttgactgattagctatactattttccatgtgggtggggagcatagaataaattacttgagtttatttttaagaggatttcactgatacccgagttgagtagaaaaaagaataaattccttggcaacagaaatcctttcctcatgttaagatatgggttacagaagggttaaatcacaggagtttatgaaaataaactaatattaaatacagttgcttacaggaaacgcccatgatgtgattcaatttccagataaagagtttattttagttcattttcaaattgttatttaaaacatttaactgaagaccattactgacatcctctcatacattcaaagatatctacctgagaaactactatttgcaagacactatacaaagtatggtggtagatgaagaaaaaaaaaagacaggctcttactacctgtactcctatggctacctgccctgccaactcattaaaaatatactaatcccagggtcaagaagttatttagaatgtctaatgtttaattcttgaaattttcagtgaaacccacaaaaatcagaaatcatgtatctgattttcattttg

SEQ ID NO: 54779 - DNA, 2053 bp, Bovine  19866881296857
  misc_feature (1)..(1): n is a, c, g, or t
ncctttaaatgctctgtcccacattattcttcatctcatttgctttatttccttccacttctaactcaaagttaccctatgaacaaagcttccttgaccatccctcactatccctcctctacattttatgcgtctcccaaagcacttattatttaatttattatacacttagttatctgtttgttttctacatctttcccactagaatataagctccatgaaggcaaatattttgtgtaacgatatattttcagtgcctagaagagtgccacaataaggttcaaaaaacagttgctgttaatgaaatatatttttgcaaactaatttaaataataactatgttttactttggatattaaaattaattggccttccttctatccaaactgtgtatgtgaaaggaaagacttagaatataagattatattaaaaattaacttcaaaagctatttttttaccactgtctaggcaatgaatcggagaaggcaatggcaccccactccagtactcttgcctggaaaatccatggacagaggaacctggtaggctgcagtccatggggtcgctaagagtcaggaacaacggagcgacttcactttcacttttcactttcatgcattggagaaggaaatggcaacccactccagtgttcttgcctggagaatcccagggacggggaagcctggtgggctgccgtctatgggatcacacagagtcggacacgactgaattgacttagcagcaggcaatgaattgccattcttttctcaatttaccagcagttacaaagtgacaagaataacactttgctatacagtaggtcagcaaactttttataaaggaccaaatttgaagcattttaggctttgcaagacacacaatctaagaactatccacctctgctcttatagcacagaagtgtgatacaaaaccatacaaaaacaaacgtggctgtgttccaataaacctttatctacaaaaacaaggagtaggctggatttggtgcagggaaccatagtttgcaaacccttgctccaaagcacattattcttgggaattccctgacggtccaatgattaggatttggcactgtcatcacaatggcccaggctggggaactaagatcctgcaagccacaagacacagccaaaaacaaagtcttaataaaaaaaaaaaaagtaaatgataaagcatactattcttttaaaagaacaaacaaaaaccaaattcattttttcagttagcatttatacttaagaactatagattacttaacagaagactagtatacatttatactgtgttgacttttcaaatatctgatatgaaaaatttacaaacacatcaaataaatattataccaattttattactgtttacctgtgtttactcctccagttaaaatccaggctccggttgtaactgcagctttaataagaccctttccaagcaactgcttgattcgtgggtgaagctcaaacttctgcatgccaccatgcacagagataacaagtttgggtaattccatttgccattctttaagcagaagttgtagaatgatttcaggtttggtgtcatatgatagcctcacatactaacaagaaagatttttaaaaaataataattcataagtttcataatgcagcatcacatgacttaagaaaaactttatttgcataagattattataaagtagatttcataggctacttgtaatatatttatactcctaagaataagcaataacaaacaaacaattttaaggttggaaaatcattctgtaagagctagagaaatagtggcactctaattttcaaactttaagatgtaaatttgttactccttctgattatataaaccaaattaccattcacctggtttacagatttgtccacagtatttcttgccttgtaagaagaaatcaaaaatattcatatcaaatcttataatactccagatgttggggggaaaaaaacacttttaaccttctctaataaaggttctttccaaaacaatatattagccattcctttacagagatcaaacaccaagg

SEQ ID NO: 54780 - DNA, 1245 bp, Bovine  19866881359091
  misc_feature (1)..(1): n is a, c, g, or t
nccctgcaaataccttgattttggactttgggcccaagaactatgagagctaaattgctgctgttttaagcaaaccagtttgtggtaggtaattacaggcagattctcacacaaataccctgatgaatgaaaacaaataactcttagatggcctccatttggtcatgtattcactcattttctcattcattcattcatcaaatatctattatatacttggctgtaaaatatgactgagactttctagattctttgacactttattatccagggtaaatctggttactactaactctgtaggtgggagagagcttactgtagatatatgtacttcaaaagagctgtcatcttctaaattcttcatgagttaccttcatatcctgcctaacagttggctaacaaatggcaataacaagaaataaaataagatttttctgttttctcagaatgtcctttaagggcataaagttgaaaacaaggggtaataaatactcccacactgagaggaaaggtgctagatacatctctgcaggattatgaaaagataaaacccttaccacacatactctaaatatgaggggaaaaatgttcgttagaaaaacatcattgaaaggaattcatagactcaaaggtttctgttcttgggaacactccctacagctgtgctaagtgtatattgcacaaccacagtgggcaccgttcacctcacagtcaatggagatttgtatagtactacaccagtttaccagcagatggcagtaaaatatcttgtggagtaagatatttttcctgattctcacaagggtgtatgccctagcaaaggtgctattttttttcagtcttctgtataccctcccccaagccagctatgtagagttcaaagaaaatttcacagaaatcaggatagcctgcaacaggagagactaacatattagtcagtccctgaatgaatgctggctaagttacagaaactctcaggcctgcaccaagctgtttactatcagagcagagcctgggaatcctgggagagtctgataactgtcccaggagtcttgggcttaatgcttgctctatatctggagaggtctgaaggcaggagactggctagagctaccatgatagaagtcaaggggaggggagtcagaacttgtcaaaaactgctcttctaccacgtggcatggcaagaatacaggaattcaccaggccaaacggacacctgggtacaggtagccaggtgtgagctat

SEQ ID NO: 54781 - DNA, 1705 bp, Bovine  19866881619777
  misc_feature (1)..(1): n is a, c, g, or t
ngaacaggtgtggcaaaacatgttggtgatgcccttaaagagcatgcttccagatcatctcgaaagatttgcactattggaatagctccatggggagtgattgaaaacagaaatgatcttgttgggagagatgtaagagtgtttttaaaaatttctttttttttaagcttatgtcagaacaaaattagagtaagaatagtgcaaagtcaacctaaaatattcatgatcatactacagtccttttgaaaacaccatcatagatttaaacagttgtaattatagtgttagtacatttggtttctgcccttttttgtataactatttcacactttttccatatcatgccagtctgtgtaattaagtttttgatgattgcatgatgttaagaattaattgtattgtctgtgaaagtagtaatcaaatgctggtgttttattcaagtaggttaaagacatgcgaattggttgtagatattttttcaagagattgttaaaaaggaattaattataatggtcattttcaaatgcagttgaatttctaacatcaattttaaagattctacttatgactggaaaagtagcaatatgacattaaactgcttttattcaatgtcctttatatattgcacgttattccctaataatctaagagtttcttaacattctttatttatttgcttatttgctgctgtttcctttgcatgggatgatgaaatatgatatattctgcagtgagagccaaaatataattgtttggtttagcccattattgaataatcttcagttgcttaaaagctcatgctttttgatacattcttttatattttgtatttttgcctttacagattatttcaaaatttgtttttactgtatgttatatttaatcctacccactaactctcatgtttgttattggtttaggtggttgctccttaccaaactttgttgaaccctctgagcaaattgaatgttctgaataatctgcattcccatttcatattggtggatgatggcactgttggaaagtatggagcagaagtcagacttagaagagaacttgaaaaaactgttaatcagcaaaaagaattcatgctagtaagggcatttataaatttgttgttaaaattattctgggctgtattaattgccagcagcattctatgaaaggtagaatgttcttttaagtcctcatttccttagtagcaggatgacattaaacaacaaagagtaactgaccctacacaaaatgagacctaggaaaggaagtttgagattaaacaggatactcaaatatcaaggccaaagccacaaaagttcattggaagctttgttgctactgtaatcccattgcatctcaaggaattcagaaatattcttaatgtatgatatattccagtacatgactttgaagttcaggattgaagaggaaaaacatactttattgtgaagtaagaatcactttacataaagttgataacataagtaggtatcactctttggtagatatgtcttaaaaattggtattctagaaacacatcttttctaaccatggttaaactttctggttcaacatctagatttttatttcaaaaagaagaaattttgtaattttaggacaccaagaaggtgagctctatgatgaagtgaaatataagtacaaaaattacaggatagtattttcagattacgatggagtcatagcatct

SEQ ID NO: 54782 - DNA, 919 bp, Bovine  19866881716095
  misc_feature (1)..(1): n is a, c, g, or t
nagtctgaaatgcaaaataacagttaatacactggaattcattttctttttactatagagtatggcagcaatattccaatttcattctggaatggaaaggatatatagacagtcaagaataacagaattattttgacaacataatatagtcttgtcaaaattatgaggctttgttttattaaaagcaaaagtgtggtgtttcacacattgacattttgttcaaggatttaaaattaagataaatgatatgatacaaagattttaaaaaggttgaaacaaagaaatatcctctcaaacatcaagactctgaaacaccttgtgctaaatcgggaggggtgaataagactagcaagctccatcttactaaaaaatggaacatatataataatttaaatatcagtggattaaattacagaattgtactatttataaactttatctaacagataattattaatttacctgcttcatatctttaaagtctttgtggtttataaatgcaatcaatattttcacatcaagaaattcagatttgttccctgagggaggaaactaaaagaaaaaaaaattatgaaaacatatgaactactagtgtatttacagaataaagtacaaatcattcattaaatacaaatatctttttaaagttataaaacaatgtttcatgtcttctttcttaatattataatattaaaaaggattcaaactggaatctttttaaactgatattttataccagcacacacgttcctaacatatcatgtctattctaggagtggaaaagaaacaaaattttccaattaaacacctattataaccagaatgtttatgaatattaccatcagattattcaaaactcagccccgatagcacaggaaaccctatttaatgttatgtggcagcttgaatgagaggggga

SEQ ID NO: 54783 - DNA, 1921 bp, Bovine  19866880373699
  misc_feature (1)..(1): n is a, c, g, or t
ncatgacccaggaaaaacctagccttgactagatgaacctttgttggcaaagtaagacaggaagtaaaagatgggtaacaagggatactcgtgaatgaggagtactggagcaagaaatgaaagggaggagagaccaaacttggattatcgtaagctccactggaagtttaagggagttagttattcctgtgcccacatttatagcagggcatttaaagttgcgttaaaggctaaactataccatttttcctgcaatcctctgaacagctcctcagagactttgtccatcttaaactatttaatttctaggttatgcagctaattggtgtctttattctaggtctcccatctatcacattgattttacaatcaacattaggcttaatcagcaacaacttaaatggtattccatccatcatcccatacaaacttgctcttgtgtcttctcacccaatgggacctatgcagcatccatcatgaatcgtctgtacccaggagactgatcaacagcatgaaaatttgaactgagctcatattttgcttattttcacttttgcagttcctttagctatcaagtgtaactcacagaagacaacagacaaatgaatgagagactattcatcttcattacactattgatatgtgcaatttataatttttaatgctcttgacaccatcttcaaggagaaactcaaagccaaccattgcattcaattacctaaaacttgtcagcacagaatccttttcagtcagcatcatacccatcctaattaataaaatcatttagatatttatatgtttttttttcaaggcattttatatcctctcatcctccacatctttccattcgttttatcaatgtggctaccagttatcaattatcaagaaaagaacactgtagccattagtcatttagagttatatccaatctgttctcttcatgtcactttcaaacttctagaatctgtgaacatatgaatgtaggtgtagataatctctgatcctctgaagccaacttctcttaagggacataatcaaaataccactttatactgtcagcctccatgttctttccagaacacaatgcattgtcgctcacttctaaacaccttattggactttgggtaacagactataggaattacctattatatatttgactctcagactttttcttccttgatacatgcctttattcattcaacaaggcacagaacctactacgtacaaagtactatgtcaggtaaagtaggaattgcagccagtggacttttattcacttttcttgagccacctgcttcaagtgtgagggtctttgcttttctttttcatacttcacacctaatcagtggccagtgtatatgaagttttctttcacattatcttcttttttttccactttcttcccaccaccctattttaaatccttaccatcctgtacctgctgttgctgctactgctgctgagtcgctttagtcgtgtctgactctgtgcgaccccatagatggaagcccaccaggctcccccgtccctgggattctccaggcaagaacaatctgtaattctgtaatgttttgttttggaaacaaaaacaataattaaacttgttttgaagttaaaaaaaaaaaaagtagaactcaaacacttaggaaaaattgaaaatgtgtatgaagcaaggagtactggaaataaccaacatgaatgacatatagcatgttatttagtaacagactagagtacagtggcattctcctactccctaggtcaaatcacatgtgtgtgtgtgtgtgtgtgtgtgtgtgtgtctggatgatgcttgtatacaatcaggtcacaattttaatttctaaagctgaatgattaacataatcattatagatttctttttagatacagtgaaaaaagcgaagggtttattatg

SEQ ID NO: 54784 - DNA, 1442 bp, Bovine  19866880554297
  misc_feature (1)..(1): n is a, c, g, or t
nctgtaaattttggttgttaacacaaagtaaaatctctttgaaagtgaaagtgttagtcgttcagtcatgtccgactattttcaaccccatggactattcagtccatggaattctccaggccagaatacaagaatactggagtgagtaactgttcccatctccaggggatcttcccaaaccaggaatcgaactcaggtctcccacactgcaggcagattctttaccagctgagctaccagggaagcccttgatatctttaggttttacatatatagcaaatagtattttaatttcctcaggggatttagctccatttgcatttgagagagtgcaattttgcaagacttttttctttccctgtgggtaaatattcggcacaagtgcattacttgcgaaccttctgaaagataaagtgcttttcatgttttctctcaaggcctcactaaatggagcatgtgaggaaatgggaagctataatgacacccacctcctagccctcctggtgtgtgtgtgtgtgtgtgtggacagtttttggtgaactactgctttctcttggagccattcccatgtaagcggccacgcctgggccttgtaccgcattcagaaaatgacccgtgaccagcacacagaactggaaacgttgtcagtgtgatgagaatgcctaatgtccccagagtcgcgatgcagcagaagccaggcctgacaagtcgttactctgctgtccacagtgacagagggaatctctctcatatgcagttagtggctggggctgaatgcagtgcagaaggagcccacagcctggagccgaggtcgtccacgccctgtgcttttactgctgtccatctttgcctgggcaaaactggtagtcaaattggtgaccacagggcaatcatcaaaattcagaaggtaaacagtagcactgctacggcacgcttgtaataaattatccaatgctattcacaggaagtgttgtactcatggggatgaatgaaaggagactgccactccacaaatggctgcaggagagcagtctgcagattacagaaaagatgttgaactggtggagaacacttggatcatttaatcaggtggggagtcagcagagatagaaaggtgctgggaaaagctgtgtttctctgcctctgccacgtttctggccaatctaatgattagcaggcagaggagaaagacaccaggccatggcaggttgactgtgggtcctgggtcattctcaggtttgaagcccagcaagtgagaatgtcatccagtgatggggaaattagaaaggaggaattagtaatgagaatcattttggatgtattggttttaaacttatcaggggacattctaatggagagaagtgtgttaaagggactggatcaaagagcgggggcaaggtctgaacggaagatgactcaagtgagctccttaggacttagaa

SEQ ID NO: 54785 - DNA, 1587 bp, Bovine  19866880561159
  misc_feature (1)..(1): n is a, c, g, or t
ntctgttttcttttcctgtaccttttctactagcttgctctgtattctctgaactaagccagactaccagaggtcttcgaatttctgggccctcgttctgcgtgttcttctccaaataacaacagagcacagtgagcttctgaaggcaaagcttctaagacaaagctttcatctgggaattgggtttaggggtcagagccttcttgagaacccatcaatggcgattagagaaaatgctctgactgcccttgagtgtctccagacccacttttctctgacatactccatttggcagtgtgcccagatttaatggcattctacaggcttgctttatatatatatgctgtgaaatgtgctttaaagaatatattcttaatgagggcttttgcatagtaaatattcccagacctcaccagctgtggatatcaataaggatacttttacatttaaaacttaatatccagagctttatcctttccctttacatgacagaaggaactcagaccatgtttaacattccccatatcttttagtagataccttgaccacctgatgtgaagagctgactcttcagaaaagaccctgatgctggacaagattgagggtgggaagataaaggggtgagatgagttggttggattgcatcaccgactcaatggacatcagtttgaacaaactgtggaagatagtgaaggacagaggagcctggtgtgctgcagtccatagcgtcacagagtcagacaggactgagctgctgaacaacaaaggcacttgaggtgcagttcttagagatccttccaagattgaattcatattgctgcctcctagctccaggctatccttactgttccacttgggctaccatttgtatccgcacaattctttacttgtcctaaacctgatgacctggtgcgttcgccagccctgccacctgcccattctcatgactgttgactgatgctatacctgcccagcctggacagtccatagtgctctgctgcttgagctctacccctgctgccaagcccctccccactgagctgctatgattgtgtctaggatgacattttatttttctgctcaactgtgggtagaactcagtgctccagggagatattagtgcatcatatatactttctcaaagttactgggcatttttcctctgcactgctcctccttcttgttttagaatggtcctataatatgttgttaggtccaaaagttgtgcagagtataggagggaaggtttactgatctgcagcttccccactctctccttaacatgcacacaatcagtaaggagcaccatgttcatatatggttcagccaacaactaccatgtaatatgcactgcagcactgcctttctctctgtggccgtaggtagaataactttctcaggggtttctcatccttaaagtatttcttctctttctcctcccacatatggtacaccgggttttcacacatgcctatatttgtgtgaacctcactaatgggcttccctggtggctcagtccgtaaagaatccacttgcaatgcaagagacccagattgatctcggatgggaagaactctagaggaggaa

SEQ ID NO: 54786 - DNA, 1545 bp, Bovine  19866880696705
  misc_feature (1)..(1): n is a, c, g, or t
ncatgggattctccaggaaagaatactttagtgggtagccactcccttctccagggaatgttcccaacccaggggacaaaccccggggtctcctgcattgtaggtggtttcttttttggctgagataccagggaagcccataacttgaaggtataaaccacagaatggggtttataaaacctcaaaaggcagaatttcaggagaaagaatgaggctgcataaagctagcaaattagaccagaggaggttgagagcaaaataaaacaatgggctatctggaaattttttgtgggaatcagcccaagtcatggaatgatttaatagctgaagtgtttagatatgatacaggattactacttaaaaatttttttaaattattttgtgagcagtgaagttagaccatatccagtgtttgtcttctcaaggtttgatgatctctgagttttatttatttctaaagtaggtcagtgtgtgcatatattatatatctatgtatctctacctatatctacctatctgtactgtgctgtgcttagtcgctcaattgtgtctgactctttgcaacaccatggacagtagcccaccaggcttctctctccatgggattctccaggcaagaatactcgaatgggttgctatgccttcctccagggaaccttccaacccagggatcaaacccaggtctctcgcattacaggtggattctttactgtctgagctaccagggaagcccagtgggtagcctatcccttctccaggggatcttcctgacccaggaatcgaccaggggtcttctgcattacaggaagattctttacctggtgagctaccaggaagcccatctacctacatacctatctacatacctacctatctatctataaatggtatggaaaagaggagggactgtattttgaattttctcatttagaatcatgattttcaaataagagaggaaaattttaaatcttaggagacatggaaggattaataagtgtgaatttggaagatctaatacacagaaagaaggtgctatatgtaagcctcctgaactaaaatatgaaagtgaaagaatatgaaggataaggaagatactaggaaattttaagcatgcacgattacctactagtaagaattaggaatataatttagatgcacttagcctgaaaaatctcttaaccaaggtcaagggaataaaatgtttctgaaggtaagagattgccatgtcccaaaggtatgtatataggaaaagtccaaagcttggtattcaggaagcttccattaagccttgttactcaaagtttggtccacagcctagcagcacaagcatcccctggaatcttgtacttaaaggcactcacgctagtttactgagtaagattctgcagtcaccaggattgcagggtagtttgagagcacattgagtttgagaagcactgttcctaagggcactaaatagcagtagggtttggtgaactgcttttgacggataacgagaacttcaagattatgaggagatgagcggtgaaaagattctataaagga

SEQ ID NO: 54787 - DNA, 769 bp, Bovine  19866880810659
  misc_feature (1)..(1): n is a, c, g, or t
nacacacacagtcacacacagacacaaacacacttcatccacacttggaactccttttgaagattaaataaggttgctatgaaaaactctagtgaagttaagactttcacattttatttttgaagagagcactccagaacaatcagggcaagctcagagattaactgcagtccttcacttagtgagtcttctttatcatgcaaaaagcagttcttccacttcctttggagactagcaggtatgtttggtaataaaaatctactttgcatgttcctcttgcataagtgtattgctgtaagccaatctgatttgaaggacagaaatctgctcaagttatgaatgaactcaataaattggaatactcttacctgagagaaaacggaaatcccaatgttgagtgcatatttgaatctgactggtctcctgggaatagtgtgttttatttctatgtcttcaagttaaaactatctgacacttgaatctttattcccagggcctcttaggtctcctacaattttcatgcaaaaaatgattcagcaacactcattgcatacttgctgggtacaaggcactgtggtaggccttgggcgaaagagaaaaatcagaaatagaaagttgaataagatatggttcctgctttaaaggactttaaaatctcctgggagaagaactaatggttaattctgtcagttagattattgagatattttattgatttaacacactttaacagagaagtgtaaagaaaagtattgtgaagagaaaattt

SEQ ID NO: 54788 - DNA, 3282 bp, Bovine  19866880843882
  misc_feature (1)..(1): n is a, c, g, or t
ntaatcaccagctacatgtggctaccaggtacttcaagtgtggctagtgtgtctacagaaaacacacagcaactttaatggtttaaggtgtggcccccaacagcagtgaatcaacagtaacctcctactattcaaagtgcttagaacactgcctgatcactgtgttaactattactgacattatcattaccattaaatgtgtttgacttaagcatacaatggataccaattcacagctaaagatgctattcaatacacatatattattattgtggtatatttgaatgttctcaaaatttcccagggacagagaaaaaaagatctgtcttcagtcatacatgaacatacaaaaatgggtcactatggatgttaacagtttcacttagcattaaaaattatcggcaaatgaaaaggttaagcatacaactctctcaaagtaccatactacattgtactgttctttcaatagtgacatagcaagagaatttgcagaggaataagaattctccaaagagcaaatgtgtttaacttagaaattcagcactaacaaactggtttccactttgtgtgtttggaaaaaaagtttagttatggagaataagcaaataagtattcagaaaagaaaagaaaaaggaattagggcatgctttcattttaatcttattagacttgccttggttttttcaaaactggcgtcctcagtcattttcacagcttgcttcacctgcttataagcacttgcttctctttgctgcacctctgtcaagctgttcctcacggaaactagcacagacattaagtcatctctttctctgtcagcacaaaaagaacatcgaaaacaagaaatgatcaaatggtcaagtattcataagtcagggaggaaaaagcactgatatgcattagaagaagagccagggcaggccagcccagcacatgttcaagcacaccccagagaaagaccctctgttgtcacttggtgaggggcaggcaggacagccagaagagcagggagcactcatggcaggactgcatccaggtcgggtaataacctactgtggagaggactggcacactgagggctgcagaggaaagcccagaaaagaagaaattagttaaaaagctaagtgtaggcggcagaaaaggagaaaaaactaacaaagttgtgaacgtgtgaaggtcactcagttgtgtcagactgtgaccctatggatgataccatccatggaattctccaggccagaacactggagtgggtagcctatcccttctgtactggatcttccccacccaggaattgaactggggtctcctgcattgcaggtggattctttaccaactgaactatcagggaaggtgggaattgtacctcaaagtagaagtaaccatggtaagaagggactactgaggttttgtttacactactggctctctgctctactagaaccaacatgttttttttttcttttcgtcttcctttcacaaccctctttttgacacttcttggcttccctggtggctcagatggtaaagcgtttgcctgcaattcaggagactcgggtccaatccctgggtcgggaagattccctggaaaaggaaatagcaacccatcccagtattcttgcctgaaaaatcccatggttggaggagcctggtaggtttagcccacagagtctcaaagagtcggacatgactaagcggcttcacttatgaatgaaaaactttcacctacttatgaaagtattttttctttcaatgggtagtactgttggattactcaaatgccttgattacacataatacttgttattttacaaaatcttacccccctaggtttgatcattgcctaactctgcccccttctcagcaattctcataaagctaagctatttcttggggacagaactgaactgaatgccaaaatgctttggcatgtaaaatagcagcaaggctccaatctcatggattaatttaagcaaactccacataaaagatttcaggatatctggagctcatccactggataaaaatgatcaacagaccccccccaaaagtgaggtgggaaactttctattaacacaaaacaaacaaaaaaagtaagttggactgttacttatgctattccatactttgttaaagagctcaagttttaaactgtgatttcaaattcacttgaagtaactgctgtagcttctttttcattgccaagttctgaactattgctaaacagtcaactgtaaactattaataaagagttcattttaaggagtcctaacttaaaagattaaatctctgagtttgaattactttcaaaattgaccaatgtcttgattaaaaaattttcttaaaaataaaataatttaaactactttgtggcatttggaaaacagtcgtattttaaaaaatatgtaatactgaacaaagttacattattaacagtttcataaaagctctttttgttaaaagaagaataaattgctccaagtatcataaaatttgtgggagctgacttcactttcacttttcactttcatacattggagaaggaaatgggcaacccactccagtgctcttgcttggagaatcccagggacagggaagcctggtgggctgccgtctatggggtcgcacagagtcggacacgactgaagcgacttagcagcagcagcagcagtgatcttcattttagaatttcctgattcacttattttcaactgagaaaaataatttttttgtctaaaggaaatgaaaaaggagtgaattattttgatcaaatataatcaaacacagtaattatgtgaaaaagtggaagaatcaaagcaagattattctggttgagtaaaaaacattaagtaaaatgcaaacaaaatcaatttcatatttatttgcatttcagaaaatgctctaacataaaagggactagcttcattgagaatatgcaacccaactagaacctgtgtttccaagtagaaaataaaaattcactcttaaggataacaggtcaatatcatatagttacctttcctaaagttttagacctactaagaaaccaaagtcactattcaatgatactcttacctattcctaatactataccaccatcaaacctgaagttacaaataaaaagattaacaaaaaacctcagaatatatattaacaaacaggccacaataggatcaagtttctaacaaatttgcttcttacaggagacttacacttaatatatttaaactatttctagtatatcctcttgctaaaagtagtctggcacacagtacatactca

SEQ ID NO: 54789 - DNA, 758 bp, Bovine  19866880845130
  misc_feature (1)..(1): n is a, c, g, or t
naatagatgtatcacttctgggtagaagcagtgaagggcattacaggatccaccagcttccgtgtagctgatttgacaatcatgaaaacaaggaccaggatggagcttccagcagccctgggccagtgggcccctgtttgctccctgcctggccattctgaggctgactcgtattcttactttctctgtgggttctgctagtagagaccaactccttgccctatccctaatatgtgctttccttcacaaatttgtgctgcatggtgctcagaaagcccttttaaaattcaaagagaaagcagaagagaaactgtgaagagtagaagccagaatccttaatgttcatattatagtgagccttagtatcttgcaaggtttaataagtgcctcacttaaaaacaaaacaaaacaaaacaaaacaaaaaactcctcaaagtgtgaattttcacacttaaatagaatttatgttaccagtgaatagtaaataaatatcaagtgcacactttcctcctggagtaaattattcacataaagagcaaagaataaatggattagtgcaaacttggtcacagtggtctaggctcatattatgtaatgtcgtttatgtcccacagagcagatttgtccaagtaattatactccatggagcagatcagtcaagcaccagaagacagagttcaacctaagggaatgaatctttaaaatataccattaaaaaccaaccaactaatccaccaaccaaccaaccaaacaaggag

SEQ ID NO: 54790 - DNA, 1355 bp, Bovine  19866881024440
  misc_feature (1)..(1): n is a, c, g, or t
naaaagaaagatgtacccagagaactgtaatatttcagcctagatgaaaactttgactccataaaaactcatttgtaatttgtccctgatcaatcctcaaatattaacaaatgggatacagtggatctttcttccagcatactcataatattcttcatgacaagcacatattaaagacttgataaaaaaaaaaaaactcactttatactacagcagggaaatatgaaattgggcaaaatcaagagaattcctctcaaactcagtgctgtaatgaatagtgctggatcttcaattacagagtcatagaaatgaacagaattataaaggctatctacttcaatcctctcatttaaagatgagactaaaaccaacaaagataaaattatttgtctgaaatgactagattatacacagttggcagaacctacatattctttctttaatatagctacaatgaagggaccttagaaaatttattttatttgaagcttaacattaatcacatgtgatttagcatggggataaaaaaaactataatgcccatgtaaagatatgggtttccatgtcaccaacaaccccacatacagaagcatacttacttagtcagtctttcaatggtttgtatgtgaacattattatgggtttgggaaagaacagcttcatgctgagcacatttcaaacaaagaccaccaacacggttagaaatattagcagcaagtagagactctttatgctttagtcgctctttaagatcttcacagtttttctgatattcagctaagtctttcctaaaaagaagggaaaaaagctttagcaagtggacatagcaggggaagaagttaggataaactgaaaaaagtagcactaacatatatatactatcgtgtgtaaaatagaaaatagataagatagtggaaagctgctatataacacagggagcccaacctagagctctgtgacaacctagaggggtgggactggggacggggagactcgaaggaaggggagactcaatgtgaatgattcacatagttgggaggcagaaaccaataaaacatagtaaagcaattatcatctgattaaaaatttttttaaatgtccaggtaaaagtatactacttttaaatgtatcatcacagtgataactactatcatttactggtgtttaccttattaggtgctttttatacaataccttattcttaccacaacctggagatatagatgtgattatctgaattgaccctttgaataaagtgagacttgaaaatattaaagttgttttaagattttaacacagactagtgtgcctccgatacggctctcttttcaagggttcccatctcttcccaaaaa

SEQ ID NO: 54791 - DNA, 3437 bp, Bovine  19866881040911
  misc_feature (1)..(1): n is a, c, g, or t
ngcagaagccaaacccagtaaaagtgtaaaggcaatttgagaaaatgacatgcagggggaacacttgcaaacagttgtttttccaccaactgaagggggaaagggtggcttgtttagtagattatgttggaaaaaatctactcatggttttgagaatttgaacttggatcactacttaatgctacaaataaaggagaatgctagaaggattaaaaccctaaaattgaaaggggaagttataattttaatataataggagactatctccatgacctagaggcatgaaaggacctttgtaaacaaaattcagaaacaatgccatatgcagaactttcaaaaaataggaatttttgtccagtgaagaatgttgaggactggtaatagaacgagagaaggtgtctccaacatgtaaaaccaatgcatttatgtttagaatacaaaaagtggtggtggcatgcccgtgctcagtcacgtctgactcttggacaccatgaactgtggactgtagcccgcggggcccctctgtcgatgggatttcccaggcacagatactggagagggttgccattttcttctccaagagctcttctcagcccagggatcaaacccacatttcttgtgtctcctgcactggcaggtggattctttaccattgcactacctggaaataagaaagcaactccatcaaatcagcaagcagcgggcagcaaccgcacacactctctcacctagtcaagagcatctctgcggcatggataccttttccctccggtattatcaatgtttccctctcaatggtatcattcccatcagcgtacgcacatccttttgttcactattcagttttaaaaacaccctttcttaaccccacttcaactccccaaattgttgcctggactacttgtttccaattcatcttattctcaattttttatcatgtaatatttcattaatgaaaatacatggtaagttacaaaacattaaaacgtgaacaccaatgaaacctctactccacttgaaaactggaacatctccagcttcactgcaccagcctacatgttcttcctctgtgctgtcactctgccctttcgcccccaaatggagaagccacgtccttaaattttgtgtgcattattttattttactttataaacttttatcatatgtatctgtattcttaagcaaaacatactaaaatctgggggagatcatgtttcccttagttttccctccatatttcgacacattccaaatttaacaggtgcagatggaaactcctgacctcgcacctcccacagtcttcgcagtctcacagtatcatccttctagtggctcggacaaaattattttagtcacttctgactcctctctttctcttgtagcacctatccaatctatccgtaaagtctgttggttctaccttcaaaatgcatacagactccgactgcttcccgtcgctactcctttcacccaggtgcaagccactgtcgtctttcatcctgacgactgaaaggtccacgtatctgtgtccttgcttttgcccttgcccccatctccacccacagtctattcacagcatagcaaccagagcgattatttggaaatccacgtcagatcacattactcttcagctgaacagtctgcagcagcttctgtgtcaggtggagtgagcatctacaaggcacaccacgctccgggcagccccccagacttcacactgggctgtccatttcctttcccacagtcttcctcgggtccactcccacctacttccatcaacaagtcagaatcctcctgtcccagggccttggtcctctatctgggatgaaactcttttctgagaatatcccctttccaaattccctcctttacttcttaaatatcatctagtcagtgagactttccctaacactctacttaaaatagcgtttgaacaccattagcactttttatcctgctttcctgctttttttccactacaactcatcacattctgataggtatgttctgtttgtttgtttactctctattttcactaaaatacaagctccatgaaggcaagagtttctgtctgtattgttcagtgctctgtccccagcaatgcctagaacatactacatctcaataaatatttactgaatgactaaatggaaggataaataagtgaatgaataaatgaatgcaaatgatttttcatttacctcactttcaccagctacaatgatcctactcccaactccacatcttaccaccccccacctaaacctaatcaaactccaggccaaagcaaactggtggttagcccctacccagtgacttctagatggtaattacagattctctcttttcctcctttcagacccaccagaggcatcccacacagctttgcctatttctcctttagcaatcccaaagtctgtcagagcactgaaagctttaaaatgcattcttccacaactgaaggcagaatgctatttctctggaagtcattacctatttgtcttccaccactgacataagcccattgtccattttaaggatattaaagcctaaagcctaacagcctgtgagcaaaacatacaattttttcagttttaagaggtggcatatttgggtttaaattacacttagaaaaataaaacgcaatagaccagattccacttactctatatccttcctctttcttggaaaatcttagatcagatcagaaaaacctaaattacatgaaatttacaaaattagctgcctcatgaataaatggatttattattcaagatgttggggagtacattttattactcagtatccttggaacaaaatatttgaaatgtgagatgaaatattttcaagctgcttcactaaattaaggcagaccaaaaagaacatctgcacattaacataaaacattcatcaggaggtctgtcacaaggtagaagaaaacggcccccaatttttttttctaataatttccattaaatgtgtggctcgtgaccatttctactctactgcattctggaacttacttcaggtaatggaagctatatccaaagagctcataaactattcactacaaagaaatagaaacttccagaagttttcttaatgatcaagaagatatgaatgaccaaataacctaaaaatcaattcggttcctttcatgcatagctcaagaactgaagttcaatatttgtagaactcacgaacttttaacaaatgtagcaaatgaggaacaatgttttcaattttcaattaaactgttcaattcaaattttcaggcttatctctgagttcccctcatcttctccctctgagtctgtttctgatgtactgtttcatcaaggtcaaatcccaaatgctagtcacctgcctcttaatatttttaataaatgttggacccttaggttcttaaaggaaatgcaacatacatttttctaagt

SEQ ID NO: 54792 - DNA, 1226 bp, Bovine  19866881047660
  misc_feature (1)..(1): n is a, c, g, or t
nctctgtacatcagttcagttagttgctcagttttgtctgactgtttgcaaccccgtggactgcagcatgccaggcttccctctccatcaccaactcccggaccccactcaaacttacgtccattgcgtcggtgacatgtacatgctggactgaaaactgaaaatgatacctcctccccattttggatggttcctttgcttttagtataccaaggataacataataacccaatagtaaatggttgttgagttcatattcagtggttctcagattatttcttcatgtggctatactgttatttcctttgggtgcaaatttccaaaggcttatagttcatctctgagccactttcatctatagataactcactaagctctaagagaaagagtgtgtgtgtgtactttaaaagagactcaagagcaattttcagaaatctgtttgccattctaattcctttttttttttttttttttactttctctttctctcttagagctctcccatgagttttagagcccatattctaagcgaggataattttatattcaggaacatatcacatgaaagatgaaaagcctgtatggtaatttttcttgcaatgaggtacataacacatgaagttatcattcacatgatttccatataagagtttcatattatttttaaaaaagtattgtcatttgatacattcaacaaagtcagctgatttaaattctcaaaagtagaacgtgtgactttggtagaaaagaatgttttaaaattgtggcagctttcctctttaaaaagtgatgccaaatttctattggatagtaacagtttaaatctcatttaatctagttttactttggtattttcctatatttacaatcttattaaagtatttagccaaaaatcagtgttttggtatttattctggcattttcttgcatgtttgttttttttaacttaaaattttttctttcagtctcgtagtgtggataagcaacatgctgtaatcaattatgatgcgtctactgatgaacatttggtgaaagatttaggcagtctaaatggggtaagttaagagttttctttttatcttatttgactttttgtttaatattgtaagaaaacagataaaaacacaaaatcccgtttgtgttttatttccttttctttagtgtgcacctacttttaagtgcttactgggtacatagcactttgaggaccttagctagaatataat

SEQ ID NO: 54793 - DNA, 1192 bp, Bovine  19866881297091
  misc_feature (1)..(1): n is a, c, g, or t
ncttgctgtgtgatgctgtccaagttaagccctcttgggcttacggtcttcatgttgttcggagttctcagctttccctactcgtttccttatagcttcccctggagtccccaaactgtgcctttttagctagaaattttaaaaaccagcaggaaagcttccctgcaggaaaaggggcctcagagagaagcaattacagtctttgattatgaaagaacactcttaagggaatgatgtttaaatattccagccctgtctccttttgccttttctacaagaagggttttgatcaatagcagaagtacagaggcccagccagctaggaggcttggctccagttcagctccatgtcccagagagatggacggctgctttactttcagctctgccttggtgttataacatttaaaggaatatttccactaccttcaaaatgtttaggtccacaagccagttacgaaaatgtaatctggacttaatacagagttgtcaccttaccctggagatgatattgctgagggacttcacagtgccaaccacacaatgaatttcccaggcacctggctagggtatgcagtgaacagtccttggcagggaactttgtacaaatttgcaaactctttgtacagggttaaaaacaagccctgactggaaaagatatgaccttcctgaatagctagggatctccatttcgtgttctctgtagggaaagtgatgataatgatcttgactctctctcattgtgggtgagtgtttttactggcttgagtatcattttctacctacgtgttcattcatcaaaaattttctgtgttccttctctattccagctctttattgggtcgacagtgtaaaagtgacaatatgacaaagtctctgcttttttacgggtatcacttattagcagaaaaatctgttggaccatttaagtgcaataatagagctatggtctggtgttagctagtcctgactgctcgtgatctcagggaatattggctttaccactcctccttttgctctagttttatgggatgtgtgtgcatgctcagtcactttagtagtttctgactctttgcaaccctatggactgtagttcactaggctcctctgtccatgggattctccaggcaagaatacgcgagtgggtagccattcccttctccaggggatcttctgaacccagggattgaac

SEQ ID NO: 54794 - DNA, 1071 bp, Bovine  19866881305861
  misc_feature (1)..(1): n is a, c, g, or t
nccccagtttgagttccctgagtcatatggcagatttccattggctacctattttacacatgtaatgtacatgcttctatgctactttcccccactcatctcacccttctccttccccacctctgtccttgttcataagtcttatatctgtgtctccattgctgccctgcaaataggttcatcagtaccgaggctgaggattattaaagtgcttacaacacttggaacccagcacatatgtcctcaatatttataaaatattatttatatccatgcatttctttttctttcaaataacttaacatttatatagaatggattcagttatttgcatttcctttaagtttgtaaataaagccaaaaaaaagcaatgagaggtcacagcccaagccaggctgacttatttggtataacatctagcaagccctgacatgctccggattctaatgaggtcaaggagacggtttttcataatgtcttttctcttggataagtgagagaactgatcacatttgcatgatgagaaacaagactggcttccttttcatcatagaagggatttagtgaaaatccaacctatagattcactcttcttataatcaaagactggtttttcaacccacagttctctgcacagagctctcactaaaacgaaaggtgaactatggttccctttgcaaaagctggccagttaggacaccttccctacaaaagtgttaccatatcagtgtttgcagttaagaagagttcagttagacccaagcatttatttgaatatacagtggggtaatttttccaactctccaaataataactaatcaccatagccagaggatggcctggatgcaaacatgccaacaatctgcagtcactttcttggttcccaccgtcccttccccctactccatagggaagttcgctcctttggaggtctttatactttcatcaggttgtgctactgcatttaagtgatcggagcccctgactggctccttgtcttctccctaaatactgtacacaaccatcaccatgcttacgtgtatgctcatgcttaagacctgtggcaaggga

SEQ ID NO: 54795 - DNA, 1027 bp, Bovine  19866881416495
  misc_feature (1)..(1): n is a, c, g, or t
ntgtttgaaaatgaagaaagaagcagacatataactggaagaaatatctattaatggaaaaaggagatttgaacttcttcattttaaaataccttaagaaaattgcaaaacaaaatgaaacaatgtgaagtattctgaagaagaaagctgaatataaatgaaagttaacctgagagatattttatgcattttctgtccttgctccagtttggtggagtgacttgaaatcatgatccagtaacatttttgttgaactaagtgatatctttatgcagatgtgaaaggtggatataaaagtgattaattgtggggaggaggtggggcgactcccttggtggttccgttggtaaagaatccacctacaatgcagaagacccaggtttgatctatggaacaggaagatctcctggagtaggaaatagccatccactccagtattcttggctgggaaatcccatggacagaggacactggtgggctacagtccgtggggtcacaagagttggacatgacttagaggctaacccaccaccacccattgtgtgtgtctgtgtgtgttcatgtgtgtgactgaggattggagttaaattttattaccaggaatcttctttttaaacatgttaataccctttggaggagtataatgttgaattctggccaccaaatcattgtgtgacactgtgaatataactatcccacaaaatgtcattaaatgtgaggatttaagccaaaaggatccaaaatattaactagaaaacaaacatttgggcttcctatcatttactcattatagtctgtatagtctagatattcttttggagcatttatcattccagttaactaataacaaatcaccacattctgatccaagaatatagaagatgaaaatgatggtgaaaattatttttctaaggaatgtaatggttatggcattgaatcattattatccacccagtgaatagtaatgctattcttatcttctgatttatgaattttctaaatctgtgggttggaatgaaaataataa

SEQ ID NO: 54796 - DNA, 1294 bp, Bovine  19866881538442
  misc_feature (1)..(1): n is a, c, g, or t
nctgagaagagttgactcttggaaaagactctcatgctgagagggattgggggcaggaggaaaaggggatgacggaggatgagatggctggatggcatcaccgactccatggacgtgagtttgggtgaactccgggaattggtgatggacagggagacctggcatgctgtgattcatggggtcgcaaagagtcggacactactgagcgaccgaactaaactgaactgtaaagggcccctaaaaaaggtaaacaaaaagcttaaatagcactggttatgagcatccaataggattctatgctaattaggtgagggatattcaatgaatatgaaatgggcttttccctcatacacacacaccagacaagatatatacaacaatccacagacaagacagcatgttctaagcattatcatacaggagtagatgagtgagcaaaacagaataaatgcaggttttgcataaaggaggggaatagatgagagccatttcactgtccttgaatttcaagccgcagctttgcaaaattgaatttaaaaaaaaacagaaaacctcttttgttcttgcgcataaagcaaatcccaaactacctactacagtgactaacgatgcctgagctggggatgtgtttttgagccatctgtgaagacacacttcttgcacttgtttccagtgggatttacagggaggagagctgcttgttgagcttcaaagagattgtgtgacattaggctttcctttactgataactgcctctcggtcaaataaacctcgattgtgggtcccctgtggcctcaaaatcatcacttgctgttgacctttcttgtgtctctctccaagggcagtttgtttaactctaggaagccaaatacaattatggtattttttccccctttttctctttacagatattcttaaagcattggtaaattccaatttatctgttttggccatgtcatcccaagattctgatcttttgtctctattatttccaaggtttttgtgtaagaaactttaaagattagagccaagtcgcattgctgaagactgccaaagtgttatatgctaataggataatgagtctctgagtttacagtatgttccctacatggggcttccctggtggcccagacagtaaagaatttgcttgcaatgcaggagacccaggtttgatccctgggtttgaaagatcccttggagcaggaaatagctacctactccaggattcttgcctggagaattccatggacaggggagcctgacaggctacagtccatgaggttgcagagagtca

SEQ ID NO: 54797 - DNA, 1119 bp, Bovine  19866881730747
  misc_feature (1)..(1): n is a, c, g, or t
ncattgcaagcagattctttcatctgagccaccaaggaataactccccaatttgatgctaattagctatttaaacatgcagaaggtgggtgaaatgggggaatagcagggaaattggacctgcctcaacagcagcaacacacaggaatacaaaatacctcagagagttggggaactaaaggtattcctccgtctcgtcacagagcaaaagggtgaaaatattcagacgtctaagtaccaatagtgtggaaaacctatgtttgaaagagcttatctacgaagaaactgtatttttaaaattagctcacattttaccagtcaagttcaaattagcataagtgttcctaccttaggtggatctgatttcaatttaaaggaaaaaaacacctgacattttagttagcctgcacagtctgacaagggtaaacatgtaagttccttcaggactattgagatatgaaaaacagcctggaccccagagtccagggttggaaccagagctttgcaaatcaaacttccatcagcaatagcaaatgttacatagaccccaagccccttgagagagctgagtgcatatggctgacattatttttacctgaaccccttctccaaataccagtggcccgctggggaggtgccaaaataactccttataaaaaagcttaggtcatttttgtcactgtgttcagtgtcagaaatgtaaaagtcctcttccttctgagcgtcttcatcctccttgagactcagggtcaccttctctttcttcccagaataactctgctcaagagttaacagggcagaacggagaaggacatagggttctggctttggctttctttctcacatctttccctccctcccaaagggcaggaatatgtcaaagttgtgacatttctaatgcacctttgactcagcaccttttcttccatgtgttcgttgtggaaacacggcctcagttttgagatcacccatgcttatgtccacacccttggtccctgctgtccgtctcccgcaaccaaggagtgcctcccttgatgctgccacagctctggaaccacgcacatttgtagcattcttgccatattctcttattgaacacctactagacacaaggcactgt

SEQ ID NO: 54798 - DNA, 711 bp, Bovine  19866881883915
  misc_feature (1)..(1): n is a, c, g, or t
ntgcatttagaaaatagataattaagctttattttctataaaactaagttaaatttctgtagacttgtagtaaataaagctcaatagaaaaagctttctatggatccaagcaaaaccgtttttcttaagaacaaaggaattagttaccaccagtccattttcagcagttgctgcatcttaatatgctctacttgcaagaaatggatcttgtcagacagtacaaattgatacagcacaggaaaactctctatggactttgacttcagaaattaactctctgaataagacagaatggcaaagcaggcaaaaccagcattaatatttatttattgaagttcagccacactgagacattaaaagctgtcctatttctgtgagttagtagtacttagcacacaaatggttggttctcaatagaagtctgacagagaagaaaaactattacatatcatgatcaagctaaattctgaaacttctaagattaaataaccataggaactatgttaacattatgttctcacttctatagtgaaacactttaaatgggcattaaaagaatggctattattctgcagtattaagcaatttttttctcaataaagtgtttcaactattgggatttttccagatatcacatgtgtataaataatttattttctttctctctttcatttttttcctttctctctttctcctcctttcttctctttt

SEQ ID NO: 54799 - DNA, 728 bp, Bovine  19866882050441
  misc_feature (1)..(1): n is a, c, g, or t
ntaaggacctgggagctgtttttctcaacatatacatcaagataaacagcaccttttcccacgccctcagtttctgtgagagggtaggatcccgcccttgactagacaccttgctccaagctgcaaagcaatctcctaccataaagatatcagaaatttgttatttctatggataaagccaattggctaatccagatggtcaccccaaccaccaagtaaagttaggatgaactatgtgtgacaaatggtgccttgaagtcctctgacctgaggatttgttatagtttacagtgagaacatgtatatactcggctatatctgcttggctgtctacaaggatgagatttctttgtgtctccacagtctctagcagactgcctctgatgtatccatcacattctggtcttttaatgtttatttggtaatgaaacttttctttctctgctacctttgtggagcagttttccgggtggggagaagattctggtttgaattatatttcccaggagtaggccctctgtcagtctctgaggtcccagatgacagccagcaccaagggtcaaccatgggagtgagccatcctcaacgtccagcctcataaacccatgaataatcgcagtctagccaatatccgaccatgagtacacaatagacttcaagccagagcctcctggctgagctcagtcaatcaaaccaagagcgataacaataaattaagccactacgtt

SEQ ID NO: 54800 - DNA, 1126 bp, Bovine  19866880733307
  misc_feature (1)..(1): n is a, c, g, or t
naagcctgtggtttagaaaaacttctagaacatagtattacatagaggttaagagcatgattagcaatgtcacttgaattccatttctgccactacctagtttgcatggtattaatatagaagctatttattccaactctcagtttctgtagcagtaaaataaaaatgatgcatacctaaaatgattgttgtaaggtctgaataagagaattatgtgaactaccagcacatagctacttttatgatgatgatgatatgatggaattcttatgtttagttttgccaaataaaaaacatacttttatctgttcacctttttggataccagagatatagaattatattagttggcgtctctgccctcaggggggtcaaatagttaccggcttctctactgagtgaagagaaatcatatttgggatattttatgtttcctgattctaggtgtaggtagtaatagtgttcaagctgaagcccacctttctgactttcttggcaataatcagcagtattgacttttttggaattgaagtataagatgagtaaataaaagagattaagggggaaattattatgctgtggcatttggccaagatagagtaacagggaccagatttaccctcttgcctgaaacaaccaaaaatctggacagtaacaaaaagtacaacatatgaaacaatggttctgaagacattggacctcagaaaatggatgggatagtcattcttgagagacagaaagcaaatgaattgagctttatgattgccctcacacaccacctagagaaagcacagaggccgtggaacagggagagggaatccaggcagagcccaatggtatccctgaattgagtagatgaagctggggatccagggatgccagtgcagctcaagttttcagggcagagtagcagagaagagagagctcactgaggttcctctcttgagtattcagttgaatactggtcagtccattcatgtgaaaaaactgtccaggttaagaaccactcagaaggattaaagggaacaataagcaaagtttacacagggccaggaatagtgcttattgccatcaaccagagaggaaagtcttataatttataagcaccaggtaagatactgggctt

SEQ ID NO: 54801 - DNA, 723 bp, Bovine  19866880836236
  misc_feature (1)..(1): n is a, c, g, or t
ngaaaagactctgatgctgggagggattgggggcaggaggagaaggggacaacagaggatgagatggctggatggcatcactgactcgatggacgtgagtgtgagtgaactccgggagctggtgatggacagggaggcctggcgtgatgcgattcatggggtcgcaaagagtcggatacgactgagcgactgaactgaactgaactgaaggctaaaaaggataaagctaacccattcaagatgaaggaaatggcaacccactccagtattcttacctggagaatcccatggacagaggagcctggcgtgggatcgcaagagtcggacacaacttagcaactaacccaccaacctgttcaaggtcaatcaaccagtaagtggcagagatgaaactcaaatctaggtctagtttgatgccaaagctgttattttagccacttttccgtaacgcgctcctaataggaatgttgcttggatcactggttacggccatcattcagagagatactgaaactggagttttcttaacacattcttaagcctgtaaaaacatttaaacttcatttcagtggagaaatatctatttgagaaataatctgattaaattcatcagataattaaaccaagagagactataatcttaatatttttgtaaagaacaaacagacccatttttcagttaactgatagaagaggaaagagcgtaaataaagcgtattcttc

SEQ ID NO: 54802 - DNA, 1309 bp, Bovine  19866880850776
  misc_feature (1)..(1): n is a, c, g, or t
ntcaatcatagtctgctcaaactttttttttttaatatttttaagcttcgagattcaccagaccagtttcaagaatattataggcaaagattgcgctatcaccagcacttagaacagaaggagcaccagcgaccagatataccagcagatgctgcttgaaggaggtgtgaatcaggaggatggtcctgatcagcagcagaatcttactgaacaattccttaataggtcggtcttttagtcacttttttatatatgaggaattatttaaaagctattaagagcatgcagtaaccgctactttctgtgtatagtttgaaattttaaggctttttaagtatttcaagtagtgtagagttacataatctcttcagtcacagaagtctgagggctcatccagttttgtccactttctgttaaatggtctctcacatctgagcaaagggagctgtgagcatggtggtttcagcatacaggctgaaagtggactgcttctggatctggccatgtcccagggtagctgaagacttacgggaaattactgtcttcagattgcttgtttcctcatctatttcacagggttgccatgaagattaaacgaattaacctacataaagtatttagaacagtacctggcatagagtaaacactatattaagtggtagctgttattttattcttatcttgagagcttaaactttcagattttattgaattcagaatattaaaatgattctttcttattaatttcttctaaaatgtatgaacttactatttttgactataggaggtaaatacatggtaacatttttttttttttagaaatctgtaaaccagaatatgtgtacttaattgagctagagttgttggaagattgagttaacatatattaaaaaaatacttagaataatttctagcatataggaggcatgccataaatgttggctgtcatcatgatttggagtaggagatggcaacccactccagcattcttgcctggagaattccatggacagaggaacctggtgggctattatagtccatggggttacaaaagacacgactgagcacacacacatgcatgcatcaccatgattataattgggcagtgcagtggtgactatcctttcttggttcagtaatattggaagtaatctgcttgacattctgtgtgttattgcaagtcagtgagcctgaaactgatcctgtcttcagaccttcacacaaggaacatttatagtggtatctagagtctaggtagtcctctgaacattcaatttgaagattattttcttatcacctctgatcaagt

SEQ ID NO: 54803 - DNA, 2790 bp, Bovine  19866881184406
  misc_feature (1)..(1): n is a, c, g, or t
ngttccgatctttagaaaagttagtcaggtcctcaacaaggagtgagctgagtttttttgttttttgtttttaatatgtgtgctctttcccctcttatcaaacagccaaatgggtctttctccttccttcccctcctcctcctcactcccctcctttcttccaccaatatttcataattgtgataaatgtcattaaagagatacgagagggagagagtaaagagataaagtaggtgattacatagttaatcccactaggggactataagtagaaaaattatgggagaccctgtaagttaatgattactcgagagaggcacacacaaccaagcaggcttgctaagcaacaaaacgaggcagcagaggcacaagacgtgcccccaaacaatgaaaagatggtggcatgagaggcacatcccgctcagtgagctcgctaagttaatgatccctaggacatgccctctgaacacataaacaatttgtggacctagctggaccatgaagagacaagaaaactctcctgctcaacctggaggaggagctgataatggaagcatgatgtctactcaagaaagagtttttctccccctccctacttttccttggattgtgaaaaagactgcttctaagcctcacaagcatccaattctaatagatcacttcctattgatcactttacctctcactgaattttatccacactgagaactaaaggactaccgtaccagagctcttgggagccaccgaaacaccacccaaatggtttcacacagagtgctctgaaggctcatatcacgtgaaccagaactactacaggacatgagggaaggttctggaggaagaggaatgctaagagaccagtaagaaatatgcaggtagaaaaacctactgtatagcacagggaacactgatcaatattctgtaataatctaaatggggaaagaatttgaatgtatatgtataactgagtctctttgctgtatacctgaaactaacatacattgttaatcaactatgctccagtactgaataaagattcgaaagagggaaggtgggacagacactttttaagtagagtgaacagcacgaagggaagtccccaaggtggagaggaagcggggctgttggaggagcagaagaaatgacgtgcagggggtacgagggcagagtggacctcagcagtcttcgaggcaaaccggggccaaggaaagtgagtgcttgaagctgggggagaggatcctgtccttcactgaatcatttcactctgacccgaagcactaaggaagaggagtattttcagtcttcaccaataaaacacttttttacctttggagtagtgtttcttaacgaaggccctatcggtactggatgtgactgatctaggtacaagactgctctgtccctttctttcagactggtctccaggtaataagggcttccctggtggctcagacggtaaagcgtctgccagtactgcgggagacccggctttgatccctgggttgggaaagatcccctggagaaggaaatgacaacccactccagtactcttgcctggaaaattccatggacggaggagcctggtaggctacagtccatggggttgcaaagagtcggacacgactgagcgacttcacttttccagataataaatgccagcagcaacttcttcccccctagcccaggcactatgatgacctaaaataccccacacatttctgaaacctcctgagtggttctgcctctcactgagaaaatttttctctaatttgggctgcaagaatcattgccaccaacttcatgacttctttatcctttcctctctcaacatccaaactcctcttctgctagatgtcctttctacagacattctaatggtgctgatgtttgtctctatgacatattgggagtgtttttttaaaaagttatttatttatttggctctgccaggtcttagttgcagcatgtgggatctttagttgtggcatgcagaacccttagttccctgaccaaggacggaatccaggccccctgcattgcaagtatggaatcttagccactgaatcacaggggaagtctcctgggggcattttaatttcatgtagtaactgtggagtctgttatatatcaaggttgggagtacagatagggtagtgacagagaaagcttacacaagggacagaggagacagaggaggaagtgatgacctctcctggcccacgaggccagggaggatgaacattttacaggttgaggaggcagcagcacattttatggagacataatatacccagtgagcttggcagctgtaaagagcttggcattgttgaagcatgaatttcaagttgaggtgtggcaggaagaccggttggagagaagggcagccaccgttcaccaagggcctcacatgtcatgattaggagctgagagaacatgcaaaataaattcctaaatgtggtatacttacaaattttcaatcatcctgaaatgacatctgaatgagatgtttacgttttctagggacttccctgccagactccacacttccaatgcggggaatacaggttcaatccccagttggggacataagattccacatgccatacatcgtgaccaaaaaataataaaaaataaaaaataaaatacagcttccagaaaatctgttcattcactcattcactcattaaactttttaaaaaaactttctaaagagctatatagataaggtcatgtcagtgtgacacagtttctctctgactctataacctcatttatgaagttcctgtgtgc

SEQ ID NO: 54804 - DNA, 839 bp, Bovine  19866881191907
  misc_feature (1)..(1): n is a, c, g, or t
ntgaaggaatttaagaatttaaagtaaatttaaagtaagaatttactcaataaaacaccaagtatttagtttatattgttccgattttttaatattttgcaggggcaaagaagtaggtcaatgcaatttataaagtttctttctcatataaatgtatttaaattccagaaaaacctaccagttccatggaatgttgtgccaacaacacgaacacagcttggtactcgaagatcccagaatctaacagtcttatcttgggaaccagatgcaatcatccagccactccaagtataaagtgctaaaatatgccctataaaagatcacagagtcagttattactgtgggacagtactttgctataacacattcaaagctaagtattctttattgttgagaatgtttataatctagttactcaaactgtgtggtagagattttccacatatatcaaatatattggcaattttcaaaaaattaaattcagtaaaacttgtatcaaaatcataaaccttttgtgatgagtcaaatatttcaggacatcataattagtactgaaaaaaaaaaaagtaccatttgaaattatggcaaattttccaaagaggaaacacaggattgcagggttacatcaccagctttggacgggagagacctggggagatacctctgttctgtcatgatcagccgtaagataatgagcaagtcattttgccttttcaaattttgcttttttcacgtataaaaatggagacaggaacttcaggcttataaggttgttgtgagggttaaattaaggaattatgtgtataagtaaaggctttagcaaacaggaaaatgtcagc

SEQ ID NO: 54805 - DNA, 1087 bp, Bovine  19866881259808
  misc_feature (1)..(1): n is a, c, g, or t
ntgaaggtgggacaggctgggattatatttggttcaacttttaatgtaattgtttgttttagctacaaagtaattttaatattctctgtggcataaaagtgtataatttaaacaattttagactggactggaattgttgggagtaatattttcccagtgaaaagttgttttttttttttcccgaatttctggaagaatatattggagtttttttttttaagtattgtttttattaactcagatgcttttttactttttattttgggcaccttcatctggaatcctatttacctaagtattttttcaaaatagggcaaaatttaaactaatgatatattcacgtaaaacctagggcttaagggtagtacttatttatttttttttaatatttttatttacttattaatttgctgagtcaagtcctggttgtgtcatgtgagttgcagctcatagactccagtgctgttaatttgctgagtcgagttttagttatgtcatgagagctgcagcacacagactctccagttgtggcacatgggctcagtagtttctgtgcatgggtttagttgccccacagcatgtgggattttaattcctccaccagggatcgaacccaagtcccctgcattgcaaggcagattcttaaccactggaccaccagggaagtcctgagtagtatttaaatacattcctggatgggttgattcttgagatccttaacaggtctctttatctgtgactaaagatttcaaaataccaccttgaaagtgagtacttatataaggggcaaggtgtgattccttttctctttttattatttcctgctagctgctgtaattggaaccaggctgcatgctgctgtggcaatcgcctgcattgtgatggccttctacgtcctgtttataaaatgaattctgaagcatccatttcatcaaccgccagccaaggggacaaaggtgaagaacctgtcaggagcctgggcgcagcataggaaagctcagctaaaatcatcgaagtccccgggatgacaccacagcatcttcccctgcttacctgtggggaaaactcctcagattacaaacattat

SEQ ID NO: 54806 - DNA, 1741 bp, Bovine  19866881372157
  misc_feature (1)..(1): n is a, c, g, or t
ntggccgttctccccgccccctcccatcggagtcctccctttggcttctccgtgtccctaactcctgtttcctgtactactccgcgggttcccccgtcgcgtgcacatctagaacccccagtgcctcttgtgcccacaccccgagtccttggtccctagcctgtattttcacttctctcttctagaagttcgttttggcccttacaagccgtttcgcgaggccactcctggttgagctgttgctgtgaagtgaaagtcgctcagtcgtgtccgactctttgcgaccccatggaatatacagtccatggaattctcccggctagaataatggagtgggtagcctttcccttctccaggggatcttcccaacccagggattgaactcaggtctcccacattgcaggcagagtctttactgtctgagccaccggagaagcccgagctattgctgtagcaccagggaaatgagagaatcctcctcacagccctctgttttctcatactttcggatagtaggcatcttgggaagaccaagaaatcatagagggtttttaaggcccacagtttttttttggggggggggggaaatgtgaatcctaaaaaaaaagttcttattttgttaaaatgccagaaagctttcttttatttgattctaaagtcttgcctgggcgatcccatctggagaccgtagggaaagttgcaagggttgggtactgcgtcttctaaagttgtggcagttgccaccctgtttatctgacctaattttgcaggcctcttcgaacacgattatatagacaacgatttccccattccagcgaaggacaggaaacgaggcctttgtgttctttagagtccatcttactggaaaaaaatgacaaggcctcttacacagtatgattagaggggcataggagagtatttctcaaaaagtaccttttccataagcctttcacctcgtgacttttggctttgcaaaaacttacaggaggaggagattagcaggtaaaggtattgttcatcctaaaaacttggtatatgtattaatttactggactgttgctgtgtgacatctagctgtgagatagttttactggagggagagagggagatagagtggtccagaactgggagatgctggttgtgtcaaatattcttttgaagctttctggacagtcagaggtctaaggttactagacacagtacaggaagggtcatcacctagaggaaaaagtcatctgaactgagaaataaggaagcaattgaacacatagtaattaatgaataaattttagtcaccgttcccccctttgtggtctgattgttttttttttccacttagatgattcattgtgcttaccagacatagctcagtttacatatgtaagaactagaactatgtgttcaaagcttttttctcacacttgttccaccacgatgaagcctcaaaaaaaattttttttggcttgtttgttctcaagaatctgttactctggcagaaatttggtttgtaagtagagtatgatgcatgaagtgtaagacaaaacacaggaaaattagtcatatgatttctaactcttgcagtttccattaagcttttgccttatcatattcattaccaacagatgaagctctgaaagacttggctaaatatctagctcttctttatcacatgagtgatttatagtaagaacacatttcaatctctcagctcaggcaccaaggattcttatacttctctcaa

SEQ ID NO: 54807 - DNA, 742 bp, Bovine  19866881423556
  misc_feature (1)..(1): n is a, c, g, or t
nctgagtgttggaggcaatgatgcaataatccaaaatcttcttacttctctatatgtgtgttgttaagaatgtgcctaaattacagttaggagctttaagtacaagacccaacgatactttgaacccataaatcaatactctctaagtcttcaaacaacacatgttgcagtcaacacgaagtgataagatgacagcagaagcaaaagaaactcacctccatcctgggatctctagacatcaagtagtgagctgcttgaaggatcttgcaatacagacaagcaatcctgttattctaaatcatctttcttctttcttcaatagttgaaagttggctgcaactgaataatagaacaaagtctgagcttcaaaatcatgctgcgtctgggtccctttgactgtaagaaatcagctttgaagactacatgaggagcctctgatgtgatctaagcttgtcatttttcattgtcttttaaaagcattcaaaaatacttagactctgttttaattttcaaactttctctattcctagctcaagatttctatttacccaaagcaaataggagataatctcggaatagtatatcccaggccacgcctgggataggtcaggtagtcatggattttgtatccaatggatggtgtttctagattaaaatattttcaaaggtaatgtgatacaaggctcccactgctgtgactgcattggattatgctctggtagtccttatccactaactctat

SEQ ID NO: 54808 - DNA, 1162 bp, Bovine  19866880350324
  misc_feature (1)..(1): n is a, c, g, or t
nagaggactcagtctcatggtgccttttctgtggacaagtcatttttccaaggactaccctgattttggtccagctgttatcaaatgggaaaggcaataggaatatattctaagtctacatttaaaaggaaccgtgttcttcattagaggctggttttaatgtaacatttttgggttgtggtgatacctgcatattctccatgccttctatgccacaggaaagtttttaaaagacagtggatatcacagatacttctatctaatctcacaaaaggttttaggtaggaaagatgctttaacagagagttctgagtagttttaaggcaaggctgcttcaccaatcaattaaatggccaccatgatctgttttattattacaactagggagtgaatgacacatgcagtgacactttttaacttcaaatcggcaagaagaaatttgtgtcaggagtaggagactacccaatatattcgctttgtgatattagttttagtctgagattaattataggagttcaggaaacttagctaagtgaaattaacatttttaacttacaaaaacataaataaggatgctggtttaataccacttcttccatacctttttacttgttatctggcgtgcggaaattccaaacttgtatgttcaaattgattttccttcgcatggcaggcataataagtgccttcctgctcatggtgaatctgataacttcagcagtggcctggtgtattattttttttttttgtcaatggaatgaatagctagttcaagtccacctaattacttgggtggcagtcgggccaaaaaccagtggcagaacccagttttataggggcagaacgaagtatgaactgtgtgcgctcctgcgactctccttggagagaggacattttgtgaattagttgcattttcatgctcccgacaaccaagaggcaaggtgttaaaccattctgatgccctgccttatttatagccatgacccattctttttccccctcttacagttaatagaaagattcatgattcttcatgagttgtctatctagtgtctgacagtcccgactgcctgcgaaagcaagtcactatctataattgatatcctcccgtggaatagggtgctggctgcaattgaagggctttgctgaaagctcttaaatc

SEQ ID NO: 54809 - DNA, 1045 bp, Bovine  19866880352266
  misc_feature (1)..(1): n is a, c, g, or t
ntttccatgcagtatttccaaataattagagtaactaaattaactagcaactcccatgtagagaaaataagatcaaaatcttcactcgttcatttgaggttttatgtgcacacaaaaactaatttctgtctcttatcagagaccctgatcacatcctaaattcaattttctcttaggtaaagatatacaatgcaactttagcaaagggatcaaaattagctggaaaatatttaaaatgcaaatttgggaacatggtattaatatgaaaataatgtcttcaccacatcgtaactcttcctggcgtttctacagatgcatcaattctttacagattagatgtgcttcctttatatctacatctctatgatattaagaagaaagtcttgcattttcatgctgctgatgtatagaatttgtgttccaatggcagcaaagatgattatagctgtgttcttctgataaagaaaacttcagcaagcttttcaagatcaaaatttgcagcatatgaaagcatttaaaatccaagtaggtggctaatcatcgtataaaacggtgcatttttgacaccatgcttaaaagatacaaatgaaggagtgcagtgacatacatgccacccagatgaagctagggggctaatacaaacacctctcacattctctgctgttcgatctcacatgcaggagacaggagcccccacagtgtaactgccaaggctctccctgcaggattattctggggggatcagcgtggggaataaaactgttaaaaaataatttgatctttttaagacttttgaacaaatattatatgtattattctttaaatggaaaagaactggttggaggggtgaaatagaagttaagggaatggcagtgagagagcaaacaggtgggcattagttctgatgattatattgtctttattcttctggattccaccagtgatatttttaagcataactagaagcctgacagtggtgactcacaccaagggacacgttcttcgtccttcacatatattccctttccttctttttaaaaagcct

SEQ ID NO: 54810 - DNA, 1215 bp, Bovine  19866880360682
  misc_feature (1)..(1): n is a, c, g, or t
nacaaaatattgcagcacaagggaagtgaatattttctgaaaatgcaagaggaaaacatgccttctaactcaatttattatgcaaaccagaggaaaaaagcattctcaataactttgactgaaagtgagaagttatgacctcttgaggctggtggagagacaaatgatgtaaaaaggaaggtatgagtgatacgggaagtttgaaagataattgaaattgcaagcaaaatttaagtccagctgtaagtgttcaaaacctgaattgtcactacataaaaatgaatcattgatgcaaaagaaaaaaacacccaaagttgcaatgctgtctcagaatgtaaaaagaaaaacaaatgtaagaatgcgatgatgcataggtagtcaatactgcaaagaatggcagggctcagaacctaacagaatctatgatcaaacataattgaggaaattttggggggcttaaacaaaggcctaaaaatagagataaaaactaccatgttttatgtaacatgttaaaaagagacccccccccttttttttttatactttgtgctttttttaagcaaagagaaagaaaacaccatacgaagtaactaaataggaaaaactggttatcttcaaagaaacaaaaattgagctagacactgatttctctaaaacttagactagtacaagatgttggaacaaatcttatagaattttaaggaaaagctattgcaaaacaagtacatttttcccagccaatttatcatatgtgtgaaggcaacaaagagacatttggagataaataagagcccagaaaaatataaatttatatctttctttttaaaaattgcttgagtaaagtggtacagccactctggaaaacaatttggcagtttcatataaaacaaagcatgcaattaccatatgatttaacaattggcatgtattcaagaaaaataaaaacttaggttcacataaaacctgaacaccaatgttcatagaaattttatctgtagtatcctcaaactggaaaaaaaaaaaaactagatacacttcaaaagatgaatggttcaactatggtacatctataccatggaatacgactcagcagtgaagagaaacagaccatggatgcatgcaacaacttgtgttaatttctagagaattatgctttgtgaaaagtcaatccccaatggtaattactgtagattccctgttatatacagggcttct

SEQ ID NO: 54811 - DNA, 2210 bp, Bovine  19866880379930
  misc_feature (1)..(1): n is a, c, g, or t
ncgatgcacgatactggatgcttggggctggtgcactgagacgacccagagggatggtatggggagggaggagggaggagggttccaggatggggaacacagggtatacctgtggtggattcatttcgatatttggcaaaactaataaaatattgtaaagtttaaaaataaaataaaattaaaaaaaaataaaaaataaaaaaaattaaacaataaaaacttaatgatccccaataaggtacattctcagcaaattatggtaaatccacatggttgaaaatcactaacaatcgtgctttcaaaaaatttaatcatatgaggaaaaagctcaatgatatgtcatcagaaactttatgcacatgatttcaattattcctatgtgtacacacacacacacacatatacatacatatatacacatatgagcacatatacaaaattaccaaaccatgtgaaaaaaattttgcacgtgaactggaaaaaatataccaagaaatgtatgacatttattgctagttaatggcatcaccaataacttttattttctcttctaggtttaacttttttccaaattttctatagtaaattgatttatttcataagtgggaattaagttactaaaataaaaacataattttaaattgaaggcgttacatagaattttatgattaaatcatgcatattccatcaacaaacatagtgagtgtttactatgtgcccagccttattctctgctggtgctagtggtaaagaaccctcccgctaatgcaggtaaacataagaaatgcaggtttgacccctgggtcaggaagatcccttgggcatggcaagcctctccagtattcttgcctagagaatcccatggacggaggagcctggcaggttatggtccatagggttgcaaagagtcagacacgactaagctacttagaatgcactgtattgttctaggtgctggggatacaacagagataaaacagacaaatttttctcccatgaggaactttatatcctagtaatagatcacacaaaaacatctccctcagactctactgccaatacaagtatgttttagggactcaaagtggttaagactgagagaggaatcttattttaatgcagctaactcaggaggagttctctgcctatgtgaacactgctaaactttggaccactcataggtaaatcacacattcacatccaagggctctggtacttgatgccataacagcaattatgagttatttaagtccagattcatcctcttttctaaaactcagaattggtaatcttgattttccaaagcttggcatttcaagtgtatgtatttttatagatgatttgtagaatttctgctgcctggtttgtgcaaattcattagtagtctcagatctgcaaagacatgcctacaaatctgtaaatacagccaatgggggtgaaaatacttattccatcaactcagtgtcatttaaataagttcagttatatccacatttgttcattcacattagattctaaattctgaaagaaagggaccctagaggctactctgaagtttgtacagacactaacttaaacacattaattcttaataagaactctaatgcttcaggatgattaacactgggttactcagtacacagtagcgaactgtgcacattatctgattaacgacttacctagggtggtatataaatgttctcttacaaacttgtctgtacatgctttgatagttgtgctaaaaatcacgtttccagactatttacactaaataaagctgaagctgccaaaaaaaaaaaaagtgttttattcttgcttgaaaggatgtaagtatattcttgatgtatatttttgtataggagtctatattatgatggacacaatacaattatgcatttctctgtttttcttggggatatattcagggaaagagaatatagtcagggatagattatttctacatcaacatatatgttgaatctgtgaagcaatggtttatagtaacatatttcatttgttctatctctttccctttctgagaaaatttggctattcttgcacattcaccattttgtttaattaggatacatgccttattattaggagatccaagaaacatccaaaaatctaaatagaactcagaagactatttcatcatcatttgacttcttaaaaccagtactttaatcttttgtgagcagcaaaatctc

SEQ ID NO: 54812 - DNA, 3296 bp, Bovine  19866880389201
  misc_feature (1)..(1): n is a, c, g, or t
naggtagttggtgagaattctgtgcagtgaaagggatccctatgtattcaagcagctaaaataaccttagtggaacggaggaatggactgggaggtggtaagtattgataaacagggtaaataaatggagtcttggtgatggaggtccaggagtctcgtgtggactttatcttgagggcagagaagaaagaatttaagtgtggaagatagaattgattatgttggaattctgtcaccgtagctctatggtacatcaagttcccttcatatgaaccttcaagttgagagctttctaagatgctgatgtgtgttcacgtgtccggtcacataagttagttcacgtgtctggcgtacttctcaaggtagtgtactgtaagattaaaagatgttttattttttgtgtttgttttttaggtattatttgtgtgaaaagtattggaaacctactacactacaatactatacagttgattgttagttgggtacctaggctaactttgttggacttatgaacaaattggatttatgaacatgctcttagaatggaactcattcatatgaaggggacttactgtatatagtaggttggggaggcaacatagaaaacaggaacacttattgggctctactgcattaactcacatataaactggtggtggcttagactggattggtggcaatggggctgagagaagtggagtgaatcagaggcatattaggttggattcagtagagtttaataggactgtggggatgaagcagggagggtcaaggatattacccagtgctctagtttggatttcttggatacatggtggtaccattcactgagacagtaggaacaggtttggagactatgacaacctccaatttaccaggttaagtttgaggccatccagatgtttggcatcttagaaaggaggcttggtttggaaatgttgatggtcattgagaaggcatgagctcagagaagcagaacaagaaaagatggaatgtaggcgtgaaccccaagggacagaagtgcatggcgcccagatagaggaagaagtctttccaaatacgctttgctgaatgaagacatggcagatgttccgagaatgtaaaccgtgtaactggggccaatccattctaattgtaaatatttatgagtcttgtttccttttcttaattctgtcctaagtttgttatcctcagtttgatgttgtgcaggctagaatatgcctatgatgaggttggtcattactggagcaaatagatggggtgtcagatggagagcttttctgagagtgatttgctgtacagaattactgctggctgggactagggcaaggaactgtcctttatgcattttgaaaagatagaaatcgatattactgtcatgagcaaaaaaagtaaaaaatatctataggaaagactgaggtaatttgctgtgtttgcatttctgatgtgtgcatgctaagtcacttcagttgtgtcagactctgcaaccctagggactgtaacctaccaggctcctctgcccatgggattctccaggcaagaatattggagtgggttgtcatgccctccaccaggagatcttcccaacccagggatcgaacccaagtcttttatggcaggatctttaccactagtgccacctgggaagctggtgagggagggaaaagaatacgtcttccagtatcagaggcggggagactttggctatgtctgttttatttccttaaaattatctgatgcaaatatgagaacctgttagcttgcttacatccaagttgtaggtaacatgaataactacccatagtttttagtccttttctgtacatttggaatatttcataattaagattttaaaaagaaacaaaaataagatgagatggtatatgtgctgactgttgcgtttatttctcagaatccatggaaattactactataagcagtaataactcattataaataaataataaataaatgtttttaaaaattgcacactaaaataaatgggagtgtccagccatgcaaacacatttctgtattcagaaaccgggcctttggtgaacatagatgttcaggtagttctacataaaagtttcaaaacttctgtttcaaaaacaaaaccaaacatcttctgctccttgttccacacaggagaaaatgtcccacggagagcggattcatccttggagaagatttgctgcttaccttttgctaccagtagaattcctgagtaattggagtcaggagttttttttttttttctttccttggagcttctgatcaaagctgtttccatccaaatgaaggcaggatggagctctgggaggccagtgctcagaggccaggaggggggtgggcagctttttcagttcaggagatagaagcttcctccagggatttttaaaaagcccttttgaatgggctcattgtttataagaacagctccttaatggaaaaacaaaaaggcaagagggtctggagcacgctttctgctttcctgtgctggcctcattgtttatttgatttatcaagtctccagtagttgctctgctctgtgaccttccttgagctatttctctagagtatccatttactttatttagaaacataatatttaaaaaacctggagctgagtcaaaaaatcatcacctttttgatctggccggtccctcttcttttgaaactttaaacttgccatgaggtttccaatctctgaatcaacagtgtgtctagggcctggtttctgtgctgagacccaactggaccgaaccagggtcctcaaggagctagaagcaagggacagcggctctgctcagctctataggctggtttacacacacctggagggcacaatgtcagagaattctgtgcgaattggtagactgcaaagacaccagctgaaggtgatgatattagggggaaagcctggtggaggagatggcctctaaggcagacgggaagcatgaggtggtgtggttctgtgaagagatgtcagggaatgcggaatttgtattggcatccctttcttttttaaaattttattaaagtatagttgatttatagtctcttcctattttaatacagctgttgaattcttcctgagccttactttcccacattaaacattctgaacgtctgccatcttttaaagaagttttctttttctaagatattttttcaattagttttttaacatttgtctttccatcttctcattgctctttttttattttcttttacttttaatgataaatattctaactgtaaagtttgaagaccaaagagtagatgtcaaacat

SEQ ID NO: 54813 - DNA, 2460 bp, Bovine  19866880458510
  misc_feature (1)..(1): n is a, c, g, or t
nttgtaggagttgcagttagagagagagtgagggttcctcttatgagaaaagtctggctgttactctgtgacgatacttgtaacatgatctgatggacttgggttgggattagagttaatttcaaaatccaggcaagagatgctaatagcttgtactgggttggaaacagtggaggggcaaaaagtggtatccattctcagattctctcaacaacccagcaaggtgattcttatttttgattctctgaggttacatcctctgatagtttgaaatctcttggtttatagataaagtacccatgaatctcataggttaagaaactcttactgtctgcccctggtagagggtaaaactgggtcttgagccctcattctccccagcccttcccccagtaatctgagaaaagctaaacgctctttgtcttctgcatcattagccaccagcctggatagacttaccgacaaggatggacgggatgagcaaatgaaaagaacaagaagtccatatggttttttctaacagagagaccccttttctcatcacattccaagatgctgaacaaactagatgcaagacttcagaaactatataacagccaattattgagttgggaagcaataattagaaaggaaatgaagaaaatgggcattgggggccttaatgtgaaatctgacattgataaatcaaaggaagccttgaattagagatgtggatatttcaactgattatccaagataactcacatcctccattaacctcgtccatcttgtttggcctttgtgaggacaaagagagtctttgcaaatcgccaggcggcaggatcctgtctcccaaatgtttatccaaaaaagagggtgggggagggaaggggatgaagcagttgaaaaataatttgcttgttaagcagcccggaggaatgttctcctttccaccgagtctggtatatttatgggaaagataataagagtagcttatgatggattttgacagtcaggcaaaagtaaacaatcagcccaggaccgaaagccttagattcacgtacccttgacttttgacgcttatcctaatagttgagtgtaaacaaagtgccacatgagtgcgtggaggagtagaaattgctcagctgccttctctttcccgaaaattccaaagcaaatggtgtttatttgggagactttgtttttctgtctctctctttctcctttttttttttttttcctgagaaggatgccgctagggacagaaggcattttgggacattggtctgatcacgtgtctccagattgttttgattcttgtgatgatgtgatgagagtctaaaggagaccaaagaagtgggaatggaaaagacctgattggattattccactgcagctactccacccttcctggcaggagagggtccctcgacaggagatgtaacacccagcctttgccaaatgtcccagtagtctggaaactctgacgacagacaaggaagttgaactggagccatgagacatctcacaaaaccctgcgggcagagttaaagggttggatttactttggatgagtgtgtttcttgggcgttttataaatactttggtgcttgatttctggtgggttatcttgtgttaagatcacggagaatcctttccggcctttttccagacctgtgtctgcctccctgttctaatatcagccgtttcttttatgaagacgcctgtccaacgccaaggctcacagaaagtgggtctggttttcctagtggtacgtgctcagttgtgtccaggctctttgtgaccccatagactgaaacccaccaggctcttctgtccatgggattttccaggcacgaatactagggtgggttgccgtttccttctccaggggatcttcccaacccagggattgaactgcatctcttacgtctcctgcattggcaggtggattctttatcagtataccacctggggtgacccagcaacgattcaagagtcttggtttctgctcaggtctggaaaccagagccagatttggcagtgagcatggaggcctgagggcttccctcgtagctcagtcattaaagaatctgcctgaaatgcaggagaaagtgaagttgaaagtgaagttgttcagttgtagccaactctttgcaacgccgtggactgtagcctaccaggcttctccatctgtgggattttccaggcaagagtactggagtgggttgacctgggctcaattcctgtgttgggaagatcccctgaagaaggatatggaaactcactccagtgaatggaggcctgaggtcttctagagctaacatattatgctacttggttactatctgttgggtgtttgggagtcttgatcccttatcttcaaaattaaattcacatttcacctcaattagcctcctcaccatcctttccataggcctttcttatctccacttttaatcttaaaaaaaaaactgatca

SEQ ID NO: 54814 - DNA, 1433 bp, Bovine  19866880476892
  misc_feature (1)..(1): n is a, c, g, or t
ngggagacagggtggggtcagagattgaacggaggggagccaggggctgtgtacccaccctctgcagggtgtgtactgaggaaaatcagaattctaatgcccttttcatggggtttatgtaaacttatgagaactaggtatctttcctgtggcctgttatttaccttacatcctaatagtctgtgtatcaacaatggaaatttttcatctgttcccaagcaggcgagtggcctgaaaatcattttcagaaattttagaaatgttagtaacccaagtttgtggtgaggagctcaaaccacatctgacattcggatcaaaccatgttttcaaagcacggctgccccttgcatgtctcactggcgttttctaactattcctcgtctttgcagtgtattcttttgtttttggttattgactgttggctttatagatgccatttgttatctatcaccatagtaaatttagaggggaaaatgctttgtcattctatttggcagtgacattgtccccagtcttctcctaagtttaaaaagaaagcaactttttgaaagaggtttgaggattggaagttatgcgattctgataccatggattgtgcttcatctgattgcttctaaactataatggtctaacatttcctctgcaggagcattaatctatgtatgtggtgtgtgtgtgtgtgcacacccacacttgtgtctctcaatgtgtgaaaattagaccctggaaagatgtactgatttttaagcatttagatattaacatcagaactccttcaagggtagttctgcagccttgatcatctttcaagacaccatagccatttggctagaaggccttggttccaggtcttgccagactgccatgcgatgagatagaggatctttggagaacaaacaaaacttgtcttggcctgtgagttcagtaacgcagtcctcccacatcccctggctttaggatccgtgagattgactccagccctgaggtctcagggcggttcctgggatgggtaccagagttgggaaaaatcccaccccatgagtttggtcctgccctgtgcctacccgcttatgtccagtggtttgacttcccttcctgccctgacctagtgctcccaatcacattttcttttcttcaaaaaatgtttctctgtgaagttagttattttcctttgaatatagttagttattttcctttgtatatgtttactgcctgtctccacaccaggatctgagagtcaagaacccctcggtcttctccatgttggtatctctgcttggactggtggccagcacaggatgggacctcagtaaatgcgtgttgaatgaatgagtgggtgtaaaaatgaccttaaaccatagctggagggatctaggagaattttcatttcttttagaggagacattcctgcagagatcttcaggttttgatgg

SEQ ID NO: 54815 - DNA, 3426 bp, Bovine  19866880477553
  misc_feature (1)..(1): n is a, c, g, or t
nacagttctaattatttattcttcgggcatctggggtggtcagctctgctggggtcactcacattcataagtgggtgactgggataactgatctctgctccctaagcctcagcctccagcagtctagactgggtgtgttatctgagtgaaggcaagtgcagcagaaatcctcatagcttctgcagaactaggctcagcactgtcccattgtcaagtccaataaatgctgttagtcaaggaaggtctcaaggtcagcccatttttaagaccctgagaaataaactctaagaagaacagaaatttaaaaaggggggtatatatatatatatatatatgtatatatatgtatagatgattcacttttctatacagtagaagctagcacattataaagctactgtattccaataaaaattcaaaaagaaaaaaaagaacagtgaagtcacaagacgcaatggatggatggatacagggagagttgaagtattggtattattatcagtgtgacctaccaaattctgtgcatgcctgtcctcttttgccttggagttcttagaaactgaaagtgttagtcactcagttgtgtcccactcttttgtgaccccatggactgtaacccaccaggctcttctatccatcgccttctccaggcaagaatactggaatgggtagccattcccttcgctagggaatcttgccaacccagggatagaacctgggtctctcacactgcgggcagattctttaccatctgagccaccaagtaagttttttaattgtgtcttattcaccttttggtctgccaattcctaggactgcccttgtatgtagacggtgcttgataagtaaccttgtgtaggtttgtgtaggactgtacccagaataagctctgacactccaatggcattttaaactttttcttataacaatcacatcagtactagagatgcttccttgttctctacgcacacctactttggcattgctttggacgttttcccatgttgcgtctaggtctggattctctatatttatctactcagagtccaatatggcttttcatgcacctgcttgttttgagaaaatatttaacagttttctctatttcttctccatcattctctctagtctctccttctggaatgcttgtgggatataggtcaaatttctctcattttagccttggtgtcccttaacttcttcccaaatatatatcatgtcataatctttctttttttctctctgtcttaagctctgtctagtttgtttgttgttgttattattattacgtctctcttcaatcgtgtctagtaattgacttaacaaagtacttcacagttcttgttgaatcttagaatcacctggcagactacaaaaaaaatgtatcaacgcccagtcctgcccccaaagtttctggtccaattggtgtgcgtcagggcatgaacatcaatagttttaaagctcaaaggtgattatgatgtataaccagagttaagaattgttgatgaaaatgtttcatggaagtttttctgtgaccatattttccacgtccagcattttaacaacttctactttttctttaaatccacttgatcttatttcataacccctgttcttgtttagcaggtgcaatttttttccttagaacattttaaatattcataatttgagtctctttcacattgttacattatttgtagctcctaaaatgtaaattcctccagcggctgcctctggcaactgtctgtcataatactgaacttcctcaaaagctttgtaatttttgactataagttcatcttgcattgtgtgccttgggatgtggggacctctaatggtctatttgcttatgcctggtcacatggatttcactggctccaagtcaatttttatgtaactgtatctttggatttatactgcccagacctacagctcaaatttagggattgtatcttgtcacccaaaagcttagtgttctgagctcaagtaagtgacatattttacattcattacctagtgtggaaggctaatttacagtctagaggataaaggtatctgggtttttattgtgaacttgcagtatcttcccggattccaattcacatagagagcccagttcgggctccttggctggccttcctgatggacttccctatgtccaattcctgggtatttttataccagagaactttaatgccacaaacaaacacatggcagggactcttaccagttgtgtgacctcatgcaagttacataactgctctgagcctcagtttccctttctgtaaattgaagatatatatctcatggggttaaaaggattacttaagacaaggaatataagatatctaagatatcttccatagaattgatatgagtgatcaataagtagtttataaaatattctgcttaataatgccttttactttctcaaattgttaaatataacattttttccttagtttctgcatctgtacgtactgtttttgtttttctcattcatccaggtgggaacccaactccgtcaccaatttcatgaaattgtcctcacactaaatattttgtgacattgttaatattattcaccttttctattcctactctattctatttccttcatttagagaaaccaggaaacccatactatttgtgatgtgcatggaggttctagctacacaagggtccttgctagtctttgctattgcgtcttcttctgaagctgctattgctgtgtggctctacccaggccccgccccccttaatccccgttcctactgctattctgtgatttcaagacatgtttcagaatttgcttctcacttactatccccagctctgctaacatcttctattgttcctcagcccacacagagcaatcatgccccagaggtgactggacttcaccaaaaagtaatgactcctttagacaaataaaacttaagctcattagttttatatgttcacctaactccatgccatgttacctgctactggggcttccaaagaatgtcctctatccacctttgactctctgagacctgagtctaaggccccttgagcagcaccctctgggaaattccataccccatgaatgcatggagtgggtgcaggcctgctcagataaggctccatttgccaagtaagtgaagttcttgggatctttttttgaaaatgttttctttaaatcttcctgaggcctggggccctatttagatgaacctcagttacctgattatgaccttcctctgctcttttctctaaagggctggtgtgtttagttctatcaggactgttgactcatggtctggtcccaagatgccacagaaagatggatgtcatatcaagctctagtgcagctctacttcccggtgcctatcagtcatgtgagcttctttggaaaatctttccttttcataacaacaaaaa

SEQ ID NO: 54816 - DNA, 2578 bp, Bovine  19866880558697
  misc_feature (1)..(1): n is a, c, g, or t
nagtgagctcttgactcatactacgctggatttcctgtacaggtaatataaattatacataaaagttaatgagctcaccattagtacttattttaattgctagcattgcaatatcagtattctccattatttttattagaaatacaaaatatttcagcaatgttatgggttaagtagacttttataaggtagcgtggagattaaattgccatttataatattatttctgaaaatgtgttctgaattttaaacatcctaactaaaaatgttttgagtggtaacacgtttcaagttggggctatctgctgaaattagcaatactgggtaatgttgattcttggttctttaaccaaagaagggcttttctgtttgtttggttggtactttttgaagacagttatagaaaaggtcacaccaggttctctgagaactatccttatttttggaaaggttggtcataggatatgcagtcaaaactgcttaccccaaatgctcaccctggtctgatgacaccccaagtgatttcaagctcttgaaaaggggaaactaaacacagagttataaggacaagattagaaacacaagagacctttacccccagtttccacacatgttcacatactcatggcaaggagtctcctcctccccacggtggctcccactagccctgcccacttagtgcgacatcacaagccctgggactctggtaacagaactgccagagtttgactcccaagttcataacttactaactgcaactttggcaaattaatattacttcatatttgtttatctataaaatgaggctgatagtaactatttgtgggattccctctggggattaaataatatttatgttcactttcatgcattggagaagaaaatggcaacccactccagtgttcttgtctggaggatcccagggatgggggagcctggtgggctgccgtctatggggtcgcacagagtcggacaggactgaagcgacttagcagcagcagcagcagcatgttaaattttatattaaatataaatatcaagaaattggtatatagctattactaatcattattcttatcttttctattgtagtttatggtcagcttgaagacagatgtcctacaaatagaagcgatagagaggtggattgtcaccaaagccctgacgaggggaagttggggaagaggcagaggagagaggagactggaaggggacccccacacccttgctcatggcaaatcaagtctcaaccgaatgtgggattcccattagtgaggattcccagattcaggtttcattaataatttctgctctgaggatgtgctgatgggaaacagaaatatctttattccacctggattttacacagcatgtttattagctgctgccggcgctgtgttcctccgtgatgagcactgaaagcccaggcccaggtggggagaccggggaggtcagcagtgtcactcatgtctcgctccttctccatctacgtcaaccttagagaaagccctctagtgctgaaactcatcctgtattcactttctggaagattaactcaaatttaataggtaatgtctttaactgcccccaaagagcccagccttacaaattataccactattttaaaataaactttaaaaactacatggtaataacataactgaaagatccataaattagaagactcatacattctcctgagcaaactgaaactctgttctgtaagacacttcaatcagatcaggaattactgcgtatgctcagtttgttcaatgacacaatggagaaagtagaaataaaagtaatagagatcttttgcaccctagtcgttctgctgactgaaagcaaaaatatagcctgtattaagtcaatcaatagcaaaaccttctgttgcattttgttcagttgatgttgtggttagttcatatttcctctctttcttttgtccttgtaaaatatattttgagaaataaatcaataacatgaaggagattctaattttttttttcatttccttcaacctactgtatctctggtatttgacttggaaaatttcatttttttaaacacgttatattgtgtttctacaacatggctgtgccaatagtattgaaaactctagaaactaagagagttagtctaaaagacattaaattatttacagaaagtcaatcgcctattgaatgacagtgtcaggattcaatctctagtcctttgacatcaagatccatacttttccaatatgtattgacagtcaggtattcccaatacatattgatattgaaaaacgtcttagatcaatatttaagttggcattagaacattcttctggtaaatccaaaataagctaattattatttggatctcactaatacatcaattcttagtaattctcaagtggattgaggcatgatgtctatttgtgcaggaagactccagagccaaaacaactgttctcacaaaacttctttggtagataggtacaaagactccaaacttggaccattggtttcatctttgaaggttaactggactccactaagcaacttacttaaataaatattcacacaagggaaag

SEQ ID NO: 54817 - DNA, 1898 bp, Bovine  19866880614051
  misc_feature (1)..(1): n is a, c, g, or t
naaatcatcacacatccaggtaaatgtatgagttgcacccattcttgatgtcccttccttggtcacagccttaaaggctctgtgtttaagcagtgtgtgcagtggagacgaacagcactgagatatcccagctctcccagtccatcctctgacctgggcttcccacaagctgcccaggaagaacggaagaccctccagtggcagacctgagattttctctggagtaaagccaacacgaaccatcatttactgttaatgtcttatatttttattttgcatgttgcagcaggtagatgtcccaaagaggcttatgaaatgtcagcctcatctggagaaaatggagcccttcgtgagcaccaggctaggctcaggagctgccctggacagacatacgggcaagaacggttttaaagaaatcaattgaaaagtctgagatatcctgagagcttttctctctctttccttccatcacatcctaaacaaattgaagttacttcctccttttttttaatattttttatttatttttaaatatttatttattttgactgtgccgggtcttagttgcagcttgtgggatggaacctgagtcccccacactgggagcacagttccacccactggaccaccagggaagtcccaaagttacttacttctaaggctcaggtctggctctcatttctgaaaagggatgtctaaaactgcactcgtacttagtctctgcaatcaatctagagtaatgaatgaatgagcatcctgcacggagctgggtaatgaatttgcagtctgtttgcttttgcagaaagctgcccatttattctgatttagaagcaaataaacattctcatagtctcctacctttttccccccctgtattttccagttctccttccctttcctcgcttgcatccccaaaagggcctgccaaaagactggcttctcttatgatcaaaaaggattttctgagtcaccgattccccaaaagcaggaaaaccttcaggaattctttaggaacatcaataaaaatacagccaatgacccttaggaaggctcagtgtttcctccagtgtggaagtgacccaggggagacaagggagaacagtgagggttgtgagagcctaaggactaaagaagaacatgttcatttcattttggttcttataacattatattcagggtcattatatcctggatatagggcttctcagatggttcagtggaaaagaatccacgtgccaatgcaggagctgcagaaaacgtcagtttgatccctgcaggaagatcccctggaggaggaaatggcaacccactccagtattcttgcctggcaaatcccatggacacaggagcctggtgggctacagtccatgggaattgcaaagagtcggacacaaatgagtgactgagcacacacacatactggacatacacttgaccactgcctcatggcttctatttctaagacatactgaaggattatagaaatcttggcccactaagttaattctgcaaaaacattctaattttgcatttcttcttagggacaaaaaaggcaatgtaaagtattgccttattgtatagaactgaaaaaataaaatcaaatgtagaatagtttcttacattctatgggataaaaggcttgtaaatatgcacaaggaattagtaggatataatataaaatataagtcttctaattgttcaaaaacttcacatagtaattttatcaaatttaaaatgaattaagggtgtgcatcacctgttactatctgggcaactagttttccttttccatctgacttagtccacctaaatcacataacctcccccactcccaataatacacatggatatttctttggatgactcttctccgtgagaaaggagaactaaccctcaaa

SEQ ID NO: 54818 - DNA, 1828 bp, Bovine  19866880641068
  misc_feature (1)..(1): n is a, c, g, or t
nctgagtttttttagttctgtatgtattttagcgatctcatctcacctaactgggatgtgtttcaagtatattccttttatggaaaaggactctgaaaaaccctaaagtattctagggagaaactgtcttccatttcagttttgaatcagtattgttacactcaaaacatcctcttaaaaaaaaaaagaaaactgtaagcctattcctccctcccccttcttttttttagtaaaccggtgtaaatggtgatgtgcgcattctttcttttcagagagagggcaagtgaaaggatttgacgtgtctctccgttattccaaggaactaggaagttggtgtgcttgtgactaaggggttacacgtccagcgtttttccattttcctttacatatgctcaatgtttgtttttgtgttttgtttcttttgtttttgaattcccacactgggctcaggagtcggaagttggagagtgagtttgggaatctcttgtgggtgtactgtagccgaggtaacaggcttttgagaagctcccaacccccgttcagtttggggaatgcttcagacagatacacacaagtggaaattcagggctcctgtgcagaggagatacaactttgcccacagttgggggttaaaatccttcctgtccatacgtgtgctggacaggaaggtgggcacatctatatgtcagttctcagttatcgaccctgcctcccctctctgtctgtccaggagtgttcagcgctgttccagggggagacagggaggagtgttgggcgacgcccacacacactgttacttccatctgttctggtaagaaggtagatatgttatagattaaagctattgcatagaatttgggaaatatttgtgggttggcatatgattagttccatctcttgccccattttcatagataacagaataactgagaattgattatatctagttttgagtatataggtacttaatcccacagctggctatgttatcaacaatatattaattccactatagcaaaagagtatttctattctaagtgccctattttaggggactcatgaaatttggttgtaaaagaaaagctcatagaccaagatatttggaataaattgcttcaaacattttcagtatttaaaaactctaagggcacagtttcatagctgtgtggatacgttcttaacactctattacattatgcagccatttaagaagctaagtcttctatgcagtttgtccttaaggtagacttaagctagactttcagatgaaaaggtttaaagacttaaaaagtgcagctactccccatgtgtacagttgctacacataaaagacataccacgtgtgcacagggtatgtggactatccagcattttacctttaaaaagtatgtaaactatgaaaatacaacatcagcactgcagtcgacatgttgtattctgccccattcatcttggagttagatttatccaaagtgattcatgagtccgttatgtgttttttctcctttctgccatttaaattagtagtagacaaaaatcaaataaaagtatgagataatggaatattaggaccagctcatttttctcaggtttatgttctcttatttggaccaagaatctcacgtggggtaaaattcccctctgaattttagacttttgggactttagctgagacagttgggtttgctttcaactagatgaaagcagaggggtattgaggtcctcccgctgttccccatgtgcagcaccttcttttaaatcaaaggaagcatcccctttggaacagagccccaaatcaaaagacaagcagtgatctgagctagtagag

SEQ ID NO: 54819 - DNA, 919 bp, Bovine  19866880662912
  misc_feature (1)..(1): n is a, c, g, or t
nttttagtgtatttcttctagtctttttttctacacacatgtgtttatcacagggcttcaacatggtgacggaggagttagaaattctcctattttattccttaaatacttggactcactctccttctcagttctccttataggaaaggattttcaatgtcttgaagtttcacttaggagggaggttctgccccttactgaagacaaaaatgcgccccttagtgacacccatagcacaattatttctaccatagaaaagtccgtgaaatcgcatctcacccagacttctgaaccatctttgaaaattttgcaatcaatgcagtctgacacttaataggagcaaaggtgaaaagcagggtagagcgaactgttaatacaatgcccagagctactcagggtcaggagagctgggaaatggtgtgagttggcaagggaagacactgtggcttttatagaactgtgccattgcacatagtatgattaataaatagctgtgtgctgagtcaacggagtcgttgctgcagggaagagaaacaaatgaatcctcacaggttatattttgtctggggagtgagggttaaactgggcatgaactcacagaatgtctaatacctccttcccacccccaagggggatttaggaaagaagagaaatgcccaagcaaatacttgatggtggcaattgcagggagggttctggcatttcttttctttactgttaacttgtatttcagaaagaccaagggctttcttaaagggccaataagccctgtacataagaactatatctaagaaattacactgggactataatatttaagcttgaaacagctctgcaaagacacatttatttctaaattaaacattcttttaaaacattaagaaaattttttatggaaatagttgctttacaatgttgt

SEQ ID NO: 54820 - DNA, 1153 bp, Bovine  19866880709954
  misc_feature (1)..(1): n is a, c, g, or t
nctgctggtgggtgctggctgtctttggcactccttaagcttgcagacacgtcagttcagtccatctccatcttcgcatggctctgtctgtctctctccatgtccgtgtgttgtgtctctgtgaccgctggccttctgagaagggtactgtttggatttcgggaccgctttaatttatcatgaccctatctaattatatctgcattgattctgtttgcaactgagggtcatattctggagttccctgtggatctgaatttgggaggagacacgcttcagtccagtacaattgccttcattttttttggtattcagttaaaagaaagtaatgtcaatctggttagaaaagtacaaatcctagccagcagccataagaatgatgaatgaccgaactgatcccttttactttatgttcgtgtcatcatcagggataaactggataagcttgttcttgatttcttcttccttattaatacaaatgttaaatagccgtatcctacatgtcaaatttcactgtaacatttaaaaaacgaaatatattgtgggtttgcttaggaggaaaattatatccttataattttattgctaacctttaacgctacttagtaattttattctagataacacaaaacattgaaaagctctctttagagaattccctggcagtccaccggttacaacttttactgctgtgagcctgggtttgatccctggtcgaggagctaagattccacaagccaagccaccaaaagtaaataaataaaataaaagctctctttagctatcgttttacttaatcctaaaacatagaggtcatgggaagcacatatgttgggttttaaaattatatcctttttaattatatctgtttccagtgcagggggcacaggttcaatccctcgttggggaactaagattcccacataccatatggtgagtatgtggtacagaaccagaagtcaagtctgtttgaactaactgaagattcaggtgcttatgtgtaagataagttatttttttttactaaagtagagttgctgtacaatatcatataaattataggtgtacaatatagtgattcacagtttttaaaggtccattaactgttattaagaaatatttgctatattccccatgtgtctaatatatcctc

SEQ ID NO: 54821 - DNA, 1965 bp, Bovine  19866880729881
  misc_feature (1)..(1): n is a, c, g, or t
ngagcggtgtcccttgatgctaagtaaatgcacttcggttacattctctgtagggacgggacagtcagaggacgtttcttttcctttttacaggggactggggagcaaaaactgctgtctttgttcttaagtaagtgaatgtccggacaacgacccctacacgctgccaaacatcagaacaccggagtaggctaaatacaagtagaattcaccacgctgcctggggtccccagtccaaacccttctccacggaggccttctttacgtaccccatggaggactggaaaaacctggtcggctctgcagaagtttcccctgcagctgcttccaacagttccggagaagtcctcgggctacgggaaacggcggaacaagcagcaccagcatggtgggcgccatgtttctcggccgaaagccactcccatcaggcctctgggtcccgccccttccttgagcatgcgcatagacacagaattcggcaaacgcgcacctggaactataactcccagcatgcttctggagcggctctgcctttcctccaatcagaaatctagaaaggaacgcccggggcggggaaaagaaacgaaactggcctcagtgcgcatgtgcgcggatgtgcgttgggttttcgggtaaagatggcggagcgtggttacagcttttcgctgactacattcaggtatggaagggactcccgaggtcttccacgtaaccgaggtagcaggagctctgccgaccaggtttttatcttcctggtctctgacttggctcttcctgagggcctagtaggaaatgggggtgtaaatgcgagtttgccaagtcatttgcgggggccttcccgcggcctggggagcattggtgcctggggaccgtgggaacgcgaagtcggggtatcctgggagatctaggcgctgtgggaagttgaggccctcacccagggattttctttcgctttggaactagagaaaaaggcaattttgaatgagctgcttccaggtttcctgtccagaactcaaaagatttccttcctgactcaagtaggcctgattcaggagcttctggaggtcggaatcttggtcagctctgtggggttccttttgcttggaaagacccaactttacagttcagttctagtcttagcttccatttggcgctgatgtctttggaaaccttttcccgctttcgatttcttcggtgcccctaccggaagcttaagaactgaaagtgaaagtggtaatgtttctagcccgttgtctttgtgtgctccaaaataggctgtatttgctttggggctgttatttttgaaaggggatatgtttatttaaagaaagattgtaggcttttaaactttagaatatttatgtaagcatatttttcaaaataaatcagagatgcactatcatcgttcccggtgtaagaaaaccgtcaccaaaggctttactgacgggagaaggattcaattttgccattttcctacagatcagtaatggcctatttaattaaaaatattatctgacagctaaagacaggcggcatctaacttgttgagtactttctgtgtgggtggagcttactccatctctgtaggctaccctgtgtgatacatgttttctaaacatcttacagatgagctgaccacaactcaaattcaataactcctccctggtcataggttaatatttaaactgggttctttctgacgacaaaattaatacactttgcattactgtgtaatgtcttcttaaaatactagaatatttatcttttaaaaaaaagatctcatatacaatgacaggaaacaaagtttgacaggtcgctactgttcgtattcggagacaaaacctggacctttaagaaagtgttatcctaatcctagctgaaacatgaagcaaccatatgttatcagggactgaatctttctatagtaaatttccttgtttaaacacaccttttttgtttttaata

SEQ ID NO: 54822 - DNA, 1713 bp, Bovine  19866880743027
  misc_feature (1)..(1): n is a, c, g, or t
natttgttgcatgactctagcctagctactgatagaacaaacttacttgtctgtacttgggctccccagccttcaacatattaagtggtaatattcatttcttaaggacttctctttctacattctcatgttttcctaaatgttttttattttttttaacttcatttttttctaccatctcaaaaaaaaagaccattggatttggagtaaaaaatttgggaagaaaacttttaaatggtttaaatgataacagttggtatgtgtgctcagtcactcagtcgtgactgattctttgaggccatgtggactatagtctggcaggctcctctatcattttcattttgacagttacccccccaaaaaaaaaatatatatatacacacatatatatatagtgaacccaaatacctggtgtcaatgatagattaaagatgtgacatatggggtttccctggtggtccggtggttaagaatcctgccaatgcaggggacacaggtttgatccctggtctggggggatcccacatgctgcaaagcgactaagcccatgggctacaactcctgaagtctgtgtgccttagagcctgtgcccctcaataggagagtagtgcctgctcacctcaactagagaaagcccgcgcacggctacgaagacccagtgcagccagatataaattaaaaaaacaaaattaaaaaaagatgtgatgtatgtacttgataaaaagtggaatgatacataaaaatctgcccctgcccagcacagcagactgcccgcacttaattccagctgtattctagactcagcattattgtagcccaccaaaaagtgtcctatgttttggatgggaggagtctgcaattgattttaaccaccaaatgaaccttttcagtacattctcagataatattaatgctaagattacttaaaaatcttagacctgggattacttggtaagcttaaataatcttaggatcttaaagtactttctttttcctcttaagtattattggtgagtctttgaaacattatgaaactttactaaaggtttgatttctcggctttatttttgtaaattgttataatattgccaccacacactgatcatattaaaatagttatacttaaggaaatttcttaagtaaacttgtgttagggttacactcttcatgatgtcaggaatgcacccccaataattgtcaatttcttattttggggacagctcagtgaggagactaggagaattaatctgtaacttaatatttttaagagtgtcttattaggtgtttaaaaaatcttatgttgttgctatcattgtgttttcttagtcatgaatcatcttaatagtgccataagtcattgtttttcttaaaaaaaattctttagatataatgaagatctggaacttgaagatgccattcatacagccatattaaccctaaaggttagttcaatatttaatgattggatttgtagtgattttataattaactgtttggaaaattgaccttttcctctccttcatcaggaaagctttgaagggcagatgacagaagataatatagaagttggaatctgcaacgaagccggatttaggaggcttaccccaactgaagttaaggattatttggctgccattgcataataatgcaaataatgaagtgactgaaaatccagaatttcagataacttctctacttaaacatgtttaaagt

SEQ ID NO: 54823 - DNA, 1285 bp, Bovine  19866880765491
  misc_feature (1)..(1): n is a, c, g, or t
ncgtccgtctttcttccttggagcagtgagagacagaagttgtcgttgtgtggggtcgtccagatttacctgtcgtcctcagtttgaaggttgcacaaaggcctactcgagactcgaaaacttgaaaacacacttgagatctcacactggagagaaaccatacgtctgtgagcacgaaggatgcaacaaggctttctctaatgcctcggatcgcgccaagcaccagaacaggacacattccaacgaggtaaggctcctctgggagacgcctgttgggtccagagctcagggggtggaaatagagaatcctctggggagacgcgagcctgttccattgtcgtttcctctggccactcccagcatgagtggatgttaatgctgcaggtgaaggtttggggggcctcagaggaagggctgaaacctggtcttggatgggagagacaagctgaggaagggggaacaagtttcctgttgttcagtactgccacctactggtcaaacagtagtcgcatttaatttggaattccaccaactcgctctgcctggaatagcccgaatgcatttgaaggacgatgaccctgtaagcactaaggagagactgagaagagaggtgttgacagctgacagcttactgctaagacagccacttttatttgctttctccaggtggtatcttcaaatgcattatatcaaaaaagacttctgcagagcaacctgacttggctaaataggatttccagacagtctaaattccaaagggtcttggaagcttattctcagaaacccagaatggtttctagtcagttatttaagataatatattgagtaaagcttcaagggtttcctgatgtgttgttgttagtttgaggtatttatcccccacacatttcagagaagtgtaagaataaatgaaaatggtttctaattcacttcgcttacattttaactcgcttttgcctgcagatctccagcttctccttgaaggtctagctcagattctgcctctgtctgtgaaactttctcttgaatgaattcagagattaacacaaaggcttcccacatctgtggtggaaataggctagctaaccagaacttgttcatgagctgtagttctgccccacagagtgggtcatccgtttgcttgaaatcatttgagagagggaacattttgacccttggtgtgactctcatctgaccccacaaggtgccagccaggcccttcatgatcttacagagaagagctggaagagggaatttggtaaaagtgcaacattctgttcactgg

SEQ ID NO: 54824 - DNA, 1186 bp, Bovine  19866880778448
  misc_feature (1)..(1): n is a, c, g, or t
ntgcagttcggttctcagattaatcttgtccagcaaagaagtcatcatatttactagtgggagacttccatgcagagatcttttcccaaccctgggcatacatcgtgtaattatagcgaactcttcgggtatgcacagttcttttcattccaaagattcccaaagcacttttacaagcttaacttgggctaaagatccctattacctcatccagccctgaattgtagcaacctctgggggaaactgtggcagctgcttaacaatgcacagacatactgtacgcagcatgagcacaggaggctgctgagttcacaactctcgtttattttgcatggcaagagacacagatcaagagaacagaacccaggaaattgccttggagcactacagtggtccgtatgaatgtgctcttcttagaatcttagaggaacaaaacactttcacccagggcttgcatccagccaagcaatccttctggagctaggttgaggagggaaaggattggcaaaaagatgtttctgagaggcagcctagaagagtagcacttcataaaatttcctggttgttgagaatttaaacttgtgcaattggttcatgtgttatgagcgctggacagcgtgcatattcccctccagatctattctatacttttccactctactttttttccctgagaggttggccttttagaagtgcctcaccttggtttcccctgaactctggtttctgggatcagctagtggttggagaggagtgatgctggggtccaactctaacatcaactagtgaatggataaacaaagtatactaaatccacacaaagtaacagtactcaacagtaaaatggaatgaatactgataaatgcattacaactgaatctgaaaagcaccacactgagtgaaagaagccagatacaaaattctgcataaagtatgataccatttatctgacaacctagaaaacacaaaaccctagaaacagaactcaagttagtggatgccatgggctggaaggaaggtattgaccagaaatagccataaggaatcttttcagagtgatggaaatatactatatattgattataatggtgtatacatttgtcaacactcatgaaactgaacaataaggggaaattgtacctcaactattcctcaatacacctgatttttaaaaaattcagatcta

SEQ ID NO: 54825 - DNA, 1906 bp, Bovine  19866880941312
  misc_feature (1)..(1): n is a, c, g, or t
ntagtgtcaaagttgttaatatctccatgtatcttacaatcagcaccatatctgctatgtttttgtccataggttgactttaaaaattgaaaatcaataaagcatctctagcctcaaagctatagaaatgctcttatatttctttccataaatactagtgtctcacttcttttttttaagtccatttttatattattttattttattggcctcacctcgcagcttgcagggtcttagttctctgaccagggattggtcctagaccctggacagtgaaagcatggagtccttaaccactggactgccagggaattccttcacgaacttctttttaaaaaatatatttggctttgccaggtcttagttgcagcacttgctgcagtgtgtgggctcttaatatgacatgcaggatttagttccctgaccagggattgaacccaggtaccctgcattgggagcatggagtcaaccactggaccaccagggaagtccccatcactaacttctttgtgggtcctgatggtgatgtgtctagagttaagaacaagtggtttgtctattcttaccctgatttaatagcatacatactagtgtgttgcttttttgtagttactttaccttttcctctagtattgcctttatactatctttacatttctccctagcctcgcaaccatatcttttgcccttaagatggaatacttagctttcctgggcacttcgttttcccagttaatcttgaccaagtgtgttaggacatcccttcacagtcatctgggttggaaccactgtttcctgggtctgacaacttggtcattttaagtttattcttttattttactggggtacctcaagtaacttcccaacagcagaggacagacgtactttttgagttcttgcctatatgaaatacttttattttgcctttgcttttgtttaatcttttagctagaattctaactttaaaaatctgttaacactcaaagttgtagatgagaagtctgatgcctgtttgatttgtatacctttgtaaatggcttatttttcctgtctggaaactttggaaatttagtagtctgaaagcatgtccctagatgtaggtattttcaattaaattaagctaaattttcattcgttctgcttactacttggtggatcattccaatctgaagatgcatcctttatctcttctgttactctacttagttgaatgcctgacctcctgagttatgtctctgtgtctctaattttttctctcacattctccatctgtttactttcagttctgtgttctgggaaatttccttgaattcacttttcagtgcttttggtgatagtttcattttggccattgtacttttaatttctaagggctctttaaaaagaccctttcaatggctctctttttcagcatcttgctcttttgtacataatgctgtctcaaaactctccaaaagtttcctgcagggttagttgttcttgtttattttggtcattctcgtttatacccttctagctcctcataagcctagtgatcctgagtgtgagtgagtgttcgtgttaaaacctcggggatggaggttgccctggtttcctttctttggagtaagtatcctaacggtgcagatctattgccaggttcatcttttgggagataaagcagggctgtccacatgccaggaccaggagggctttatggcgggaagcagtgagagtcagtgtggcttggcccaatcaggggtcaggcaccctgcagtggtaagagctggtatgactctcgtggggagtgtatttgaatgagagacctgggatgggaagaaggctccaatattcataatgaacttgctttcccaggacagcacatttgtttttttgtttgttttacctttttattttatattggagt

SEQ ID NO: 54826 - DNA, 2126 bp, Bovine  19866880958781
  misc_feature (1)..(1): n is a, c, g, or t
naaaagaaagaaaacccaaagtcagcagcttatgaaccagaacaggcttcagggtgttctcaccatgctggtcgcgtagttctccaggtaaatggaaagggccgcctctacagcgcccccacctgggaccacagactttgactccaaaactctcttcaccacacaaagggcatcgtgtaaggagcgctccatctcgtcgcacatgaaatcatttgcgccacgtaagatgaccgatgcagaggtacgagccttagtgctatttaaaacaacagcgatagtctttaacagtagtaagtccatgaagaaattcactactacttacacaggacatttagacagggaagcaatgtctagaccatggagaagagatgaaatggtaacttcacctccatttacaagggcccagtattgttttatcccatgcgtataactgctcatatcactgaaggactatagcagcaaataaatgggaaggtgatctgtttttactcaataataaaatctgtacagccttacaatgtatgaagtagctcttactttttaattaagatcagttcatcatcacaaattctctcctgtaccacttcttctgcttgtcccaacattgaagcttcaaaagtttcttcgccttccaaattggccagcgttgacagaacagttgctattaaaaataattataaacacctgtaagcactgttctctcgtgaatattttcaaccctgctttaaacattcagaaacatggaatctaccatagaagtgacacataatctcaagtttaaggcttacagtaagacattcaaggaaccatcctatcctaagagaacgatgtcacttcgaggtgaagaacactgaagaactttcccagttacaaatgcacaaaagatttcacacatttgtacacaaagcattaaggaagttttctggatctgcttatcttaccatccaacgtaaaaagaacatgacagctggcaggagacatacctccggaagctttagcaatgcgtttaaggtccctttttaaaactcttcgaactgccatagcaccagcctccacaaaatacttcagacacatgtcgtcaattccaccagtggttaggataacgttggcaccagttgccagaatcttctggattcgctccttggtgatgtcagattctctacaaaaatgcagtacttgagtagtaacccaaagttatcttctgtatttttactattacataaagcttgaacttcccattaaatatttttcataaaataactacagattaaatgatactaatgagtctctcccttctatgagcagaacttacatcagtccaatttacagaaaaattcaaggaattaaataccagttagctctccccaccccaactttagtttctaaccaagaatggcgcctaagaaaggaagcttgacggacctggtagggagacaagaccatcaagcaaactcgaaggccagtgtcacttgcaatacacaatgcaatgcagggaggacaagcacacgagagccacgtgtccaggctggcagggggacaaggaaagcttgacggtctggagttgaggggtccagagttggaactccaggtaggaacagaaaatgaagaactctgtagcaatgtcagagtctgaattggtaagttttttttttctttttaatattttaaagcgagagtagtagtatcaatctgtgttttcaaaggatgaaagaatgaatacactctgaggcaataactggagatgagtctatctgatgtgaacagatggccttaacagagaaggcaaagcttatggcttgggtgactgggagattcagcgattgatttctggagtgaaataaatactaacaggttgggggcaagatgagaaaaaaaagagttcggttttcaacaaggtgaatctgaagcccccatgatattcaggtgaaactgcatgggaattacaggcaaactacgggatacacagatctgaaaaacagtcaataaatatttacttattcaaagaacagagaatcttttttcttttgccacaccgtgcagcatgtggactttgcagttcactgaccccctggtgaactcaaacccgagtcccctgtggtagaggctggagtcttaattgctggacc

SEQ ID NO: 54827 - DNA, 1137 bp, Bovine  19866880963490
  misc_feature (1)..(1): n is a, c, g, or t
ngccgtggaacgtgatgagagcctgcagttcatgtacgggtgaagctccgtagttgctgtgcctggttcgtcagatgatctactaaaatactgtgacaggaaagcatctggtgggggatccaggatgtacggggtattttcccaagtgcaggaggggatctgagcagagagaaacgtgaaacccttccatacagcacacatagggccagtcattgcagggacatcgccaagcaaagtgttaaaaggttgctgttatgtctacagagcaagacgaatcccccaacaaccgagaccctatagagggatcgtgtgcaaattagggccaagcacaccaacaatcgtctttcctaggaaacataaagtcctcatagaccaaattgcctccccacatttcctgaatatctaatccagatggctaattggtgagcccttctacagtgcctgtctctctgcccttttgacttcccttttgtttatttaaagatgtcttgaataatcttcctaaggaggggttttctctgtcagaatcatcaggatcaagcaacagtctcacaggctaaggatagaatgactgggttgaacagataacaaaacttcagcaaggaaacccagaatgactttggtagacaatgattctgaattcattctaaatgaactcttatggatttttctcaatgcctgtgacaaagcagtctggggtttttcttcctgtctagttaaatgaaaaataattaatattcacttcacacaaatgcttacttattaatatgacaaattttatagaaaacagatggctactttgagcctggcccacaatatttctgaatctttcatgggattctaaaatttcaaggaaagagaacttataaaattttcagaaatgggtgtccactggttctaaaggtggtgatgggggtctgttttagacagtttcttgctttatccttgtctcagccttgttctcatagagataaaaggcagatacacagagtcttttcatacacacatcttttcatgatgccaagctataaagtaaaagatctctggaaaggctaaaaataagggaaaaggtacatttccatagaaagcaaaccagtaagtttttcctgtgaagaaactggtcctttgggctaggat

SEQ ID NO: 54828 - DNA, 543 bp, Bovine  19866880971773
  misc_feature (1)..(1): n is a, c, g, or t
ntcattctttctatctcatcagtctcttataaccaatgaatactccttcctggacttatgatgctggatatctatctgtcttccagcaagaaggtttaaactggagttgtgtgtgtttaaaaccccactgacaagccttcattcatttaagtccacctgaaagagaagttctctattacctcaaagatatgaagtccctgggttgattgtgacttcgacagatgtatgacaagtcaatggccttgactgagagatgtgtcagtagcccctttatcctcattcatctcatcatgttagaacccaaatcagcagtgtgtgaggctgggcctgatttctctagcgaattctgggcacagtttttggagaatgttgaggggatgttattagtttgctgtcccagtttgtttcctgggacagcaatttcgttctctgactgctactgagttgaaggcgagtatgtgctattcttgtagactacattaagagcagccacaagcagacaagtcaggtaagtctgaggatcactggggcttggggtcctat

SEQ ID NO: 54829 - DNA, 877 bp, Bovine  19866881019425
  misc_feature (1)..(1): n is a, c, g, or t
nggattaaacacagtagtcttgtgtgggcataattgagagtgcacgtatgattcttacaaatgaatcggtccacttgttgtgggttctgaaagccagtttggtttgattttatgccacgggtctttgatctgctgttatcggaaaggccatccaatcacatttgcagagaactgtagtggaccgatggaaagttcttacagatgaaagggaacagaagtatgagggagcttgaatttcatcaagccgtttcttacatgtttgaaacgatgtctggagcccaccggagtgtggatgtagatcagtgtagctgacgccctccacacccacgctctatccccattttcctctcagcgctcagctccgctctgtgggccgaagcaggaagtgtcctgtaaggggcactgtaggtgctcatgattgccgtctttatcccttggaacctgtgggttttcggtcccatgtctggcactgtttcatctctcagtggatcacacacctgacttaataaaatcgcaaggataagttttgctttctaacaggtcttcctctgaggaacaggggtcccttgcctcctggatcactggaggcctggcttcctcaggccaggagaagctggcaatccatagccttagtctggcaaaatctccagctcctcaggccctgcagggatactggcaggtccctgatgggaaacctcacgggcagattcggctggaagccgggaatgagaatttgctgacatctcaatgtaataggcttatttcctgctccccttcctccttcaatttgtatcctggactctcattcataaacaattttggcttgagaccctccagtcatggctagctttcacagttgccaagaatgagaaatagg

SEQ ID NO: 54830 - DNA, 907 bp, Bovine  19866881201234
  misc_feature (1)..(1): n is a, c, g, or t
ntctgtccatggaattctgcaggcaagaatactggagtgggttaccatttcctcctccagggcatcttcccatcctagagatcaaactcgcagttcctgtgtctttgcattagcaggcaaattctttaccaaatagccttacttacagtggaatctcagcccccagatctgtggctaatggcagtcagcagtgaggtcactcactgaatggattaaatgaccttcttgatgccgatggtgcaggcttcctgatgagaacagagcagggatagggagaatgtaagaattttctttcttgagacccaaaaggaaagcatccctgtattgtaaagatgtctgatttcccatgctatataggcctgtgaagttatgaagaccacgttcatctcaaagttgtgtaagcagaatatgagctaggaatactctcatttctctgtgtttcacaccctgccattcctcctgagcccttgatctcaccctagccatccttggtcccacaaacatgagtgtgtttacaacatacactcagcctttcctttctctacatcacttccagctggagtctcccacccaacccctgttttgagttatgatgaataaatacatttgacgttgaaatcattttttcccttgtgccttctcccttgctctgaattccaaccccattctcaagacatgataaatacatgaataattcattaccggctggatttgtcttctccttttgctgaacttttcccatttgcaacttctgagcattttccagctctaagagagaacttcctgttcaattcctgctcccatctaagtcactaactgtgttttgggaagttcctccaagtaagttgataagggtctaatattctttaagtgactgtataatattctattctgctgatgttccaaa

SEQ ID NO: 54831 - DNA, 1130 bp, Bovine  19866881211497
  misc_feature (1)..(1): n is a, c, g, or t
nctactcattgctcaaagctctggggatataggtagaagttggcattaccccgttttatagaatggctaatgctgcaggggtgtgtagagatgagctgggctgagtaatgtcacccaagcattcctgctgaacatctgagtctcccacaaatccctggggaaggggaggagagctgatctgctcctccttgtcactctgtctctgcagcacctaaggaaaaatgattccatgggaagtaaaaactgtccaaaagggggagttgaaatggctggggagtgagggctacacaaatctgtccagggctagtatttgctgaaatatttcctggaacaattcagtagtggcttcaggacttggagttcaaattagcttcaaatctccatcctacagtatttcttactggaatagacaatttgaaaggtttcctttgattttaggttggcagcctaaaatttaagttcttctgtaaaagcttatagacacacacatgacaatgttaagaatgactatgatccaagccatttggtaacagtgtcattatcctcagaagccagcttatatttgttgtctgtatttcttctaattctgtgaggaaatgtaaagcatgtactcatattgtattgagatgaatcattcccatgacaagaatctgaaagttttaccaactactgggcatctaaacctccgtgggctgccaagaacggctactgacagccactggtgtggacttcggcaaaccacacaccctctgatgcttctttgccccatcttaaagttgtgccctaacatttacaacagctaccttctacagtcaaaatacacacacacacacacacacacacacacacaaacacatgcgaagcaggctaaataaataaagataaataaggtgtcatgcagtcaatgtggataaaagataccaaaagaccataaaaggacattaaggaaccaaccttccatcctgcacactcaatcaggagagaactgagcacctctgatcattaaataatattgtcctggacagaagccagggtgcccaagactctttttctgcagcaccattaaatgtatgagaatcaaaagaaggtaatttcccagctacagtcagccccttcattacaagccagct

SEQ ID NO: 54832 - DNA, 1294 bp, Bovine  19866881299047
  misc_feature (1)..(1): n is a, c, g, or t
nctccaaagtttttgaataccaagtagcataaagaagttgcccaccgaagaagagtttatactagcatcatgcttgaggtttacacaatctcactgataaccctctaagactggtatggtatttggtattagactccccatttgtggatgacgacattgagatctagtcccagcatctgacccaaggagaactaacacatgggtggctggctgttggtccactgttctcccgacacagtgactgcgttagtcacggctctccagataagcagaaccaataggatacatacatttagacacaaattctgagatgtataatgaagagagagtttaagaataaaattggccacataatggacggattttggaagtggagggtgatattttatgtgagagctgagtgaagttagcaaggcaaatagggcagggccactactgtgaagggcatttgagagggttccaaagtggggaaaattttgtactttgatgataattcttgtaaaatccagtgtgattggggttgggaataaaatagtctcgagggtgcacagaggaatcctcagaactttgtagaatcaatctgaaatgaagaggggccccagaaagtcttatactggggagttacatgctccaatgtgcatttcaaaatatcacttttctttgtcagctagagagctggtgagcaaatctcccatccttggtttctataaatctatgagtatttctcctagagacacagttccagttgttacacattccttatggagtttactttacctactttctttgatttaaaagactcgaatgtctctgagtacaaggactaactgataactgatttcaaatctctttagcctctgatagcaaagttgaaagcctaaaataggtgtttataattcttcatgatgtttaatccattagaataaattaaaaatgcgtatgtttaaacataggcgcgtgcacacgcacagaccagggagtctgaagtccttggctgcgcttctaggaggttcttttgagcggtcccaagcaggcagggcagacacagggctgggggcaattttatggtccaggctgaatcttccccagtgaaattcccacccttgttttatagactcaactttactccatgttaagataagcatctgaaaagaatggaaacacctgcccttgtctgaggcccacattctcggggctgtaactctagccctggccgtaaagctttaaagaatgaggctctaccctgtcagacaggcctcttcaaaagttcatacagcacattgcttttacctga

SEQ ID NO: 54833 - DNA, 2199 bp, Bovine  19866881388544
  misc_feature (1)..(1): n is a, c, g, or t
ntccaatcttgctaattccacacatccattcacacaggaatgtctcatgtctccaccttccaatatggagaatataattcttgatcaccacctctactgtgttcatcatggtcccagccaccatcattgatcccattgatgactgcaataggttctgtactggctttgttgcttccacccttgccccatacactctgtcctcaaaaccaaccagagtaatgttgaatatgagtcaaatcagggatatcccatttcactcagagtcaacatcacgtcagggtcagcatcattaccatgacctaccaagctcttcaaaatctgccctcccttcatctctccaaccttatcacctacatttcttcccttcgtgctcctctagcaacccagtatggtcccaccggaaggtcttacactggctgttcctcccatccaaaaagccttacccctgataccagcacagctaatctcctctccccctccaattcttcatccaactgtcaccctctcaatggcagctcccctggcacactctgcccccaatgctgctgcactccccattcctgtttcctcacttaattttttcatcgtgtttatcctgttccaacatactacataacgtgtatttattttgtcaattggcccacagtagtcaccagaataagtgccatgagcttagggaattttgtttgtttgcttcacaagtccctggaatagcacctggcacatagcaagaactcaatcagtattaccaaataaacaagtgagtgaatcctggtatcatcgggcctagtgatggatcccagaatcttcttcaatatttctgctaaaggatgtgatggaggtaaataaatctctttgcctgatatccatgaattcccaaactaaatatgtcagctggaattttactatcactttcataaaattcactaaaatttctaaaattctcactaaaattcactaaaatttcataaactcactaaaattcatcagtcatctatgattgtcacattgcaaaagtcattttgtaggtttctggagttttctcttaatttttttacacgtttgtctttgcctgccagtatagcataatttggtattaagatgttcaaggccaagattatggctttcaacttaactggtacataaagggacttaatatcattcattgcacactagtgctgatttttctttttttacataaacatttaaacaattctcttaccctttatttctaggcaaattctcctctgcatacagacccaggccatccaaccagtccattctgaaggagatcagccctgggatttctttggagggaatgatgctgaagctgaaactccagttctttggccacctcatgcgaagagttgactcattgggaaagactctgatgctgggagggattgggggcaggaggagaaggatgagatggctggatggcatcactgactcgatggacgtgagtctgagtgaactccaggagttggtgatggacagggaggcctggcgtgctgcgattcatggggtcgcgaagagtcggacactactgagcgactgaactgaactgaactgaactaaacataagaggtaagctcaggaaactggaatattttctcactcacccaagatcccttaaggacgagacttggagaatagctctagccatactgggctgccagaacctaataaatgagcctccttttatctggaagaaagtctggaaaacagaccaaaagttttcaagaccatttctgtctcttttcccaagaggctgggtcgctggtgtctggacacaagctgagcattacagtcattgttttacataaggagtccctttgatctggtttaaaaacacaaacagaagggcctttgcccaatctgaatttgacatgtgtcctttgattctgtaaataatcaaatttgaacacagtgttataaccacaactgcaaagtgtggaatgaagcaagtttttattataagaagacaatttgcatttactaagcaatatttttcaacactacattctttttttctgaacttcttaacatgttccttcatcagtacaatttatttctttttctttttcattcccataattctcaacaataaaggaaaatctatttaaaagaattcattttccacaaagagacaaaaaaaaatattttcaaaagaaaccaaaaaaccaaagttattcagat

SEQ ID NO: 54834 - DNA, 800 bp, Bovine  19866881391079
  misc_feature (1)..(1): n is a, c, g, or t
ntattcttgcctgggaaatcccatggacagaggaacctggcaggctacagtccatagggttgcaaagagtcagccagggcttagcgactgagcacacacccactaccaaaaaactgtttctgattttaagtcactcaacaactttaatcctcagtttatcatcagtaaagtggagataataatatctatcttattttcctcacagagttttttaattttttatttgtaaggatagaatgagatcatatgatggaagtactttgtaaactctaaagcattattcaaatataaggacgaataaaacccagaagtagcaataaaaaagcctaattaactgaagaatggagagattaagatttttcattagactaagaaaagaatatataaatatgttggtaatttggttgtgccccctcacctttgtaggctctcaccagctacaatgcatctttgccatatagtggccactacacaaatttcaggcatagtattgagaagacaaaagcttcatgcaagttagacttatggacttggcgttgagaacctgagacactcatctttctaaatctatccctttaagttaggagaacatacagggcaggccgttcaggaagagacagggccaggtattgggaagacagagcagtgggaaagaaagtaaagtgaaggcacagaagaaggactgagagaaacgtctagaatagaagtcagacaactcatctagcagtcaggtcgcctatgaaatggtgcttgaaatattatcttgaaaaagcaagggatgtaaaaagggaaagaccatt

SEQ ID NO: 54835 - DNA, 1268 bp, Bovine  19866881447788
  misc_feature (1)..(1): n is a, c, g, or t
ncggtgtatgattctataaactaactttatttgtggatcgagaaagactcaggcattgagaacttccaaattgtggccatctaatcagtaatagtagggatgccatagatgcaaatgccatagctggacctttgagcaccatccttcagcagaaagtgattccctcaaatgatgccatctgatctatgcacgtagagccaatgtctttgaggatgtgtgtccagtgtatgcccagtggctaatgtaagatttcagggaaaagagagatacaagaaaaatcaggaatattttggtacttgcattctcatgaactacaatgtatgaaggagaatttttctttccccttagaaataggggagcctcttccttttctctgatttccttgcattcctacaagggaatcatttcacttcatgtgctttgttattttacaatcatggtgaaagaagcacttaaataaactctctgcttaaaagctttgtgtgttcctgcttcctggtgcttcatcggcagtgagaattcagggtttaaggggcaggaaagtggagcctttcagggctcccagtgtgcaatcaacgtgctggaatttcaatggattccaaaggcgtaacaataatagcattaacaggccaaggcctttgatgttattgacaaaaaaagggggagtgggggcaaaggggcccctgtcatttctgtcatgagcttttaaacttttgacctctaaccttttgtgtcaaagagctttttccttatgggtgttagcaggctactcaagtctcctgaattccctggagcgtccacatttccttggtgggaaaggacattcagtgtcttggaagagacccagcgtagggtggttttccctgagtgcccactgttatctgccccatcttagtggggtgatgggatgggatggggtagggacactgcttgtctaaacatgaagtgactcccggcccagcaggaggcaggcagacttgcggggctagaagatgaagatgaacttcagagagatgatttagctcagggcatgtaggcatttgcctggagtaggctctgaacatggggaggtgcacaggcaggattctgaagagatggcagggcctttcaatgcccgagtttagcctgttattgaggcccactaggtagttgaaagagtcctccacagctgtacgggcctcgtccactgctgctattatttggcctccagtccaaccagcacaggcttccctggtggctcagactgtaaagaatccacctgcaatgtg

SEQ ID NO: 54836 - DNA, 840 bp, Bovine  19866881798683
  misc_feature (1)..(1): n is a, c, g, or t
ncctgaattttcaagccttgtgaggttaactgttaaaagagtaatttgtaaaattccatgattaaatgtggaaaatacatctcagttcagaactaaaattacatatattatggtttcaaaaactatattttagagagatatacttaataattactgacattaattaagtatccatgaatattaaatgcattgctttcttacttttttgagtgaaactatgaaatgctaggcttctttaatagcacagatggtaaagaatctgcctgcaatgcaggagacccgggtttgagtcctgggttgggaagatcccctggagaaagaaatggcaacccactctagtatttttggctggagaattcatggacagaggagcctggcagactacagtccacggagtcgcaaagagtcaacacgactgagcaattaacacaaacaaacacacataaaatacagattgtccttggcatttgtgagcatttgaaggggaggagggaaatgaactttaaaaattcctgaggggtacctctcaaataaattacttaagtctcattctgctttaccaatgaaactttcacagactatttggttaattagaggacatatttcagaatattccactcattttttttttctggtaagaccaaatgacggaaaagaagtatgaagcataagaaatggatgaatttatgacctaatataagtggaatcatgcagaagttgtgtgtgtgtgtgtgttttcttattttggggcccatcctgattcaccactaatatgtttttaaaaatcaaggaggaacttttccaaacctcagttcataggaatggaattaatattgctat

SEQ ID NO: 54837 - DNA, 1130 bp, Bovine  19866881815225
  misc_feature (1)..(1): n is a, c, g, or t
naaaaatcatttctagttctcgtctagaataaattccaaagtcagtgaacagatgacttcaggatttaaataagccaagagaatttatgccctgggcggtttactcttggtgggtcctctcatactgtttcctgggcactttccaggccactaaagtatcatttggtgaattactccttcagggcactaatggagctggctttgatctttcttttttaatctacaatttttgtatgtaaatttcaaaccttaaaagacagtctccccaaatggcatccaagagatctcatagcctgaggatattaaaactatttcttgagagaagcacgcagcaactgaagataaacctctgagtgtctttctctggctacaggttttatgatcaacccaggctattgtaaggagacccaaaaatcaatgcctctcattcctaatgagaccctcaatgcacagcctgatgacagccagcatgaaattgaataccaacaactatacccagcataaatattgttactatgcatttcaatttaaacatgcgtcaagccaattacatatttatggggtttaaagactcttccacttgtgcctccgataatacgcacttggcaaatctccctttagtctaagaggcatttggtccaatagtcaaacccctcgcgagtctgtaataaatcatctttgcaacccaaagcatggacagttgactgcttcccactgctctgcagactcacccccacctggtagaattttaattccttcagtaaaattgattcccccagttctgcacattattctccctgtcttccatttagcccgttagtttgctgacagcagagtacacagcacttaacagctggtttgtggaaccatcagtcaggaaattgtatgataaataggagggagccaggtttagtggcacttccttctgcttcagcagttttcgcctgactttggaaaagtcatcatgtggtgttttgtcgagggccagagcaggagatggctgcggcgcggtaacttattacacatcctcctgagttatgatgctccacagctgtgctgctcatgtgtaaataataaactgggaggtggataattatggtggctgctggcgacacaggcctgttctcgtc

SEQ ID NO: 54838 - DNA, 859 bp, Bovine  19866881876238
  misc_feature (1)..(1): n is a, c, g, or t
ntttgttcatgaacatttaagtagtatagtttaccaaagagtctcaccagagtagcagttttatgtgtgcagcacagctggaagtaaaaatgcacacaaaagagaaaaaacaaaccactgagttattaagctgagacagtagagtagcaatgaaactagtctggatttttttttttcttttccacagaaagataccatttggttgaataaacagtgcattctttgcatttaaataaacttaattttaaacagcagagggaagaggagagatgaaactaaaccaaacataaaacaaaaccagagatcattaagaaagggacttcaaaccaaatttttatttaattaagacaacacccaacaatagaaatctgggcaggatattgacaaaagaaacaaacttaaaaaaaaaaaaaatctaatcgattgagatggttggcctccaaatacctatataaatggaaaagattattgtgtgccccagtggattgatatggcaagggaagatttttccttacaagatgcagaggtttcttacagaaagtctgaaaacaataggcacttcccagctctctaactcataagtagaacccaggaggttacaaaaacaaatgccacattcttccaagtctaaacaaactcctttgaagtgtcatcagccatatgaaatgcacctctgttccttctgcaaagagagcataggaagattacagaaagaactcctctgaggaaggagagaatttcttgcatattttggaaatccatgactgcctcaagggacatccattatcctaatcttacccaagtctggactgctgctcaagctcggccgaaaggcaaagcttctccaacatgttctaat

SEQ ID NO: 54839 - DNA, 704 bp, Bovine  19866880340202
  misc_feature (1)..(1): n is a, c, g, or t
ntgtttgttgacagctttctgcacccaggcctgccactagggtcccgcatgctggggctgggctctttgcttggcccccttgagagaagaacctctttgatactgtctgattgttttctctcctctgggctctgggggtctgcacagagaaagatgctgcccagagagggtactgagcccccaaacacagccattctgcctctcgtcacttctctatcatcacttctatttactaagccgggtcatagctgatccagccagctccagccagtggctttggggggattaaagcagaattacccaagcataattacatgtctctctgctatctgctttgcacagctctcttaacgggatgtttgcattcggcctccctgtttaattgattaggtttcctgagtgccgtgctcccagcccccaagcaactgggccaaggacaggatggtcaggccagaaccttccttgagaggtgctgagatgggcacagagaggggcagagttggatcccaaaggctcttcaagagacccagggcttgagaaccatttgtaaacttgatcttcccttgcctcctcccagccccaggcctgacgtccacaaaggcactatgggaacagagattagcccacctcagtcagaacatctgccaactttaggtgtaaaactacaaaacaaattgccttcaaatccattggcatccactgcc

SEQ ID NO: 54840 - DNA, 1704 bp, Bovine  19866880345320
  misc_feature (1)..(1): n is a, c, g, or t
ntgtgagtctgatgtgtgaagcgcttaggacagtgcctggcacagagcagatgctgagcggattggctgctgttactatttctatcatcacgactgtcttcgcagaggcttcttgctccctggtgggtttccagctacagaggatctccaggccacagagcttcagagaaccccctggaatgctcgaggctcagtcctgaagccccaaagggagcagatggcttgcagagcagaaaggcgcctcccaccccaggactgatgggccctgctggagtatccgctctcctgtttcctggccccagcccagtgaacagccctcaccacacactctccttcacacagtactttcagaaacatctttgtctcaactccatgtgggggaagtggagactgaggcccagagcagctgtggggctccccgatggccctacagctggccacccccaagacccaagcccgctgcctgagcccagcagccggtcttccctcaaaccatttccaagtctcccgtctccccatctgactgcgtgacagtaaatcattttaaagacttggcatttccgagaggagctggaaaataccaggccggagttcagagcttgtgaagcatctttcatttagggagtcctccgaggcagctgaaagaggcgggagggctgggaaatgtcacggggcggagctccagcggccccctgccctggccctgcccctgcctgcccgcccacagacaggccgcacacctgctgacatttaagtcctctggagctgacagggaggaaggcttccctcccgcgcaggtctaaagacctgccatgatttccccaggggcccggggagatagcctcagagggcggggcccaggcagagaccggttgggggcgcgggaggcggagggactgggaagcctcaagggagcggagcttccctgtgaggtcatacacagtggccttcaccttctctgatgcatttttaactgaagtaaaatagttaatggccttcctggtagctcagaggtaaagaatccgcctgccaatgtaggagacgcgggtttgatccctgggtcgggaagatcccctggaggaaggcctggcagcccactctagtattcctgccaggagaatcccatggacagaggagcctggcaggctatagttcatgggatctcaaagagtcggacaggactgagtgactaaacaagaacaaaacggtgtataacgtgtaagtttcagggtaggacattgtagctccgcatctgtgtaggttacaaagtagtccccgatgaaggtctggttaccatctttcactacacagttgaccctccacactttatgcccacccccaactcggtgcctcactgttaaccaccaatctgttctctgaagcaggtgcatctttaaatctccatccccaagtccagtccgcagttccctgggcttcataaactgcccccactcagcttggacacagtgaccccagcccttcagctctgctcagcacagaggggatctgcctggcaccacattacttgggacctgcagagctcagcctgtctctgagcctcagtggccatgactgtaaaatggggacaatcatgacacccacctgataggactctgatgcgaaccagatgagctcatgcgggggaagttaatcacggacgagcctcctgtgataggtgtctacagaggtggcccacgtgatcat

SEQ ID NO: 54841 - DNA, 1966 bp, Bovine  19866880353631
  misc_feature (1)..(1): n is a, c, g, or t
ngttcgatccctggatcggaagatactctgcagtaggaaatggcaacctaccccagtattcttgcctggagaattccatagacagaggaacctgacgggctacagtccatggtggtggcatacctaccatctaatgggtgtcacaaagagtcagacacaacttagaaactaaataaaagcaacaacagactagacagtctctactgcagctattcaactctgaagctacagcacaaaagcagccagagacaacaggtaaatacacgggtgtgactttaacaggaaatggatccgtgtgtatcaccagacatcgtttcccaatcctggctttagaagacggagcctttctcagtttagacccgttccttctctgaacctctgcctgcctctctgttaatgatgctaaaagcaagaaaaagtagagaaagctaccatttattcagggctcaggttgtacctatggacatgaatctgaaccaactctgggagacagtgagggacaagaagtctggcgtgctgcagttcatggggttgtggagaatcggacacgacttagctactgaacaaaacaacaacaggttgtaccaagcaccattctcagtttttcatgagacttacttcattctgccctcatagtgttttggtgaaatgggtactgttattagttccgttttacagatgaggaaactgaggcagcaaggcagaatgaaatccccaggtcacacagctaactgaggttggaccctgtattctgacccgtttttaactgggacatgagtggagttgggtgagagacctgctctgtcagccctggctctctgggggttactctgcctggtcctacagccagagctggcttggcctcttgactttctgcccctcggcaggtctcacctgccacagtctacccacttgcctctttgcccctccctggggacctgacatggaccggactctccccttctcatggcttcaaggcgggggctcatctgagcgcatctgagatcgatgttgtacacgagaaggtgcaagtgtaaagctggctaaagaacataatagaatttatggaaatcgctggctcgcaccacagccctagcaatgatggaagtgattattaattaatcatggtcttgggggaacagtatcagtgcaaggagtaattaaaatgaagcattgtacagttgtaccgaatgatgatttatgagcccgaggaattgctgctctgccctctcccctccggcaggctcaatgggaaggattaactggacggattgttttcaacaaaaccagtggcttacggacggatttcgacctggacatcatcagcttgaaggaagacggcttggagaaggtgtgtgagctcagcagttgggggggcaggccaaggagcaggggtattaaatcccccacgacagatcccaggcagagaccctgagcaatagggcaagaccccatccacctaccccctcggggctcaacacgacccggtgtggccactgccttggcccctcttggccttctcagcctggaggggtgcagaacccagtggcctggccgtggcagatattcaaacgatcaccctgtcagcaagggccatcagagagatgcttaacctgggaaaggctcatgggacagacagactgtctctaagtcctctgtcatggggcagagggacagacgtgtccttgggtaagagaaactctctaatgactcacagatgcctgcctggggagtcgtgagctcactgtccctggagacatttcagcaaaattgaacaaagggattgcttgtctgggagactggaggtgattcttatccttggaaagaggttgaagcacatggattctgaactccccatgctaagcttctaaggcctctgtgattctgggaattacaaggaaaagcaagcccacagggctggcctcccatctggctaccatagaaatattcgtaatgggggccagtt

SEQ ID NO: 54842 - DNA, 1105 bp, Bovine  19866880386754
  misc_feature (1)..(1): n is a, c, g, or t
ngccggtggagagaacctgccatctgccacagtgtcatcagaggctggttgcatgtgacagagactcagtgggaacaggttaaggcaaaaagaaggactttatcatacggcagctcccaggacctggctttcaggcacagttgcaactaggaactcaagagccatcaggaccatccccttcctctcttgatcctctcttgtgcgttggctttattctttatttttcagttctcctgcagattgatccttctagggactggaagaaccatggcaccagcgactcctgccttgtggtttatgcccttccgtgtggttggggggtcggggggaggtcaaggaggggtggggtggagtcctctgattggcagcaaggactgcctggtatgggggaaggagcattctccagataaagggctttctcttggggaggggtaggtgggagctgagcagacccaacatgcacctaccactggtggtggtgtgtgtgtgtgtgacacttccccgtctgacacacagacaccaaccaccttctcagattcacgagttaacctccaggactcgggttagcagctctcatctgctctgctccttcctaaatgaaaagatagcatcccaggaggatggcagctatttccacacctaaaattctcctcttccctggctccttggtgaagattcactcaggtgggcttgatgaaggggtcatcatgagtagttctgagctggagggcaggagaggagaggagggatctgactacctcagtgaggtctcagttaagatcagcaaataaaggatcatttcaggtcttctacccaagatgcctggctaacagtggttctctctgtgcctggcgtttcttgctagccccgaaagctaagcagggggtgcctggtgctgtgataaatgtcaatattaaagccttattagtggtgtcttctgatctgtggggccatccagtgaagcatagatgacagggtctccatggaggctttaggagaccagaacagtatccttgagtcccctggaggaggaagcaacaaggatggaggcagccaccacacatgcctggcacaggtgctgctgcggatcctgtggtggggtggg

SEQ ID NO: 54843 - DNA, 4442 bp, Bovine  19866880455066
  misc_feature (1)..(1): n is a, c, g, or t
nccccgtgccgtggaactgccgtgtcctagtttgcaaaatgaacaaagtgaatttcattcaggtatctgtgacctcagtccatgcaggccacgttgccttatctcagctctgcccagctggctttctataaaaaaataaaagtgagatacagagagagaaggggggaaaaaggaaggcaagaaccgaagagggtcgtaaagccttcgtcggccaattcatttctgtttaatccatctccgcactgcagaaagctcctttgtggtgatgagaccaaaggtcggtaatagatttcaacaggttccgagaggctgttgactgcttggagccgagcgggagagtgtgaggctccccgagaggcagggggagagagataattggagacccagagccctagcttgccctctggttcctgatttcacagatttaagaagaaaaagagattgtctggaattccgcctgcaggattgtgtgtgagagggaaagagagcagaggtggagacacccggcctcgcctggacccccatggagctgctggcatggggctgctgcttctgctcaaagagaatgggctgggaggggaggttagggagcctcagagccaggcctgctggttgggagctgcccctggggagctgggagggcctcggagtcatctggaggctcactgtcttgatggagagtcagccacccacacagggcgcagggaagggctgggggaggcagacaccaaagcgaatttaccagctgttctctgcaaagcccctctgagtgtgtgctgcagctgtaacaagacaagaaactcctacagccagggtttagtgcccactccctccaccccagggatgcaggcctgaggaaccacagtggtttctataccatcactcaaacctttcactgtggatgcccaggtgaacaaagaagtgtgttacctggtaaactggacatgtctgaacaaaagtggcgtgccatggggcagtgaaagcgacgatgttaccctccttgctatgcaaaaccactggctgccaacatagggcttagaacaggaccctactcacggtgggtaaggactgcctgtgggacatcattttgatgacaggctgagccaggcttggggtggagggctggctgtctacacccttacttgcaaccctccctggcttcccatctcccagtgaatctagcagagacctcagcctggccaaaaaataaaaattaaaaaaataaagcccccacccctaccttttcattcatcctcttatactctctgctttggcccctcgctgtccccagttatgcagcaggaaaatgctcttgatggaggtaaagttatgatattctcaaagaaggagagaataggggcaccttaatcagcctggagacacagcttctggagaacaattcctggagaaaatggcacctatgttaaactctgcaggaaggacaacaaacgtaaggagaatagctcatgtttattcgatacttactatgtgccaggcacacaatcagtgctttacttctgttgtttcactgaatcctaaaaccttccctgtgggccagatattactgttattagtgccaacttacagatgggaggactaaaccagagaggtgaaggaacttgccccaggtcacacagcttgtaagggacagaactgggcttcagaatcaggcattataacatctgagccttcatcctaactaccctgctaaaccccactggactgtgagcctttgaagatagggactgcctgattcatttctgtactcctgggacccaggatgggttcctgcagagatgaggcaggaatgtggttaaatggatagatgaatgaatttagatatactttgaacccaaacagatcctggggtaacacaggtttaagattacagtgcattagtaaatttcaaatcttctatttgtcctagaacagtagttccccaaacatatgatatggggcatgaattcctggaaacattaggcacaaaaaggtatccatagtcaagtgagtttagagaactctgggttcaacaaaactaaagaggctcctttatttcagggcttcttaagttcttgtggtcgggacccctaggagcattcttctcaaaacctgatttggagacccacccgcctctccaaccaggagctcagccacccacacagcagtgggaccattgcccctgtggatgggagagctgtggacactgggctgcctgctgaccctgtatctctggcccagcttgaatctgtacagagcactcacagggactatgtccttcgagacacaggggctgcctttctggtcagtcacgagtggctggtggagccagtttcaaggtctcacctgcactcagtctttaggactcaaaatacctgtcgcaagtttccatatgcatgttttctcgctacaaactaattttgtcaaattattacagtaaacctgagatgatgataaaatcaagataaacggggaattcaataaggagcaagactgaatagaaatagaaacgccactaccccgctcatactgctgaagtaagctccatctcagacccagtgtcccctaaagagaggcaagagtgagtcttcattattctgcaggcctcagcttaaatatcaccctcctccaagagccctctctgatcaccttcttaaagctttagtcactcagttcatcttcattctgaatcctgtttgtttctttcacagcacttaatttacttatccacgtgctgttggcttgttcactatctccctttttagactgcaagtttcatgaggatgtggataataacagtttgattccctgctctgtccccagtgcccagcccagtgcccattcactctgtgaatgattgttctcgccttaataggagagggttttcctttgccatatgcccaagagtagagacatctggaggagagtccgccttcctaattttggcagcaggaccagatgagagcttctccaacccactcccacagagaggcatgcacatccccttctgtctgggtttcagatgctgtgtctctggcatccagcaaggagtcttgcctgctcctcagctggctggctggggctgacccccgctcttgtcagcccctatttctcaggagtggactgtccattgccccttcatcctgtctggttctggtcggatctttcagaagcttggcatcagcctttctgccagcctacttctctttctccaccatgtccagcccctccagagacaagacccatcttggaccccagtgtttgctgggacagcctggcttcgttgctctctcctcttactgagtaaactcagtttatgcttggggcttctttgggggccagcatcccatttacctactggcctctcggcttgttcctccttctccaaggcaaagatgagggatcttcagactaggattccgatgctggcaatttcctaatgactgaccttaatttgactgaattagtttctacgtgacttaatctaatcttcattttaatttttatcatgctatagatcttccaggcatagaaagccaacccagagttgtggtttgcacccaatctctggaaactcggtgaatgccactcccaagcaagtgatacttgcagtcagctctggcccttgggactcggatgtgtcacaagttccctcttccacccaagaggggggtttaggagatacctgagcacctcaaaggccttccctgcctttctttacccattgctaccacagacacttggagtctgaagtcagaggacatggaggcaatattctcagggccttgatcttcaacaagtatccagtcaccatgatggccactttacagccaggggtacctcctccattaagaagcttcttggctaaaataagatccatgctgttttccaaactgccaattcacatccatccactccacttcctaagtgaagtctccctttccctttcattttgcacaagagtagagaggcagtccctggagaaggaaatggcaacccactccaggtaatcttgcctgggaaatcccatggacagaggagcctggagggctagagtccaaggcatcacaaagagtcagacacaacttagtgactaaacaacagagaggtggtcacacgtggtcactctgccaggcgcctctgtcatccggttttgcttgtaagcaccccagggccaggtaccatatctgtttgctcacagtggcatctctagcccagtgcctggcacatgcatctatgctgaatgaatgtcctgggataatggagggggaaagtgaccagaaagaaccccaagtcactgttaacactaaaacccaaaacatgcccaagacacatttgatgtcagctgattctgttacagtcacatccaatatgtacaaacacatttaccgttcattctgcagtctgttacactgtctgcttctatctagctatcttttttgtgt

SEQ ID NO: 54844 - DNA, 1736 bp, Bovine  19866880514960
  misc_feature (1)..(1): n is a, c, g, or t
ntggacatggaaaggccccacttggtaagattcttcttccatcctcttctgatccagtgcctgatagccacccttccccctccatcagtgcctgtactgtgaagggcttagctcctgaaggcaagtgagaacacatgtggtactagaaagtgatgtgattagcaaagcaggacctgacttcttttgggtcctcccgggacctagaatgccctgagtcccactgagagaggcattatggcagaagaacactgactctgagtcaaaggtaactgaggcaaaacctgactctgcttcttaccaggtgatgacctgaggcagagtcttaacattggcctcacctccaagatggagcttgccgtggaatccatctcaaagagaattgggaagatgaaataggagagggagtgcacatccagggcttagcgcagtgcctgcctccagctaagtggccaacgacgagtggagactctgaagacccctggtccagggctcccaagttctctcctgcctgcccccaggtcccctcagccagggcagggtctcctgtctgtctctgctcgtttctcttggttctaaccctagctcagatcaaaccctcccagtgggacagagacttcccttgttgttccagcccttttctgagcttgcaggttgtcctggtctcccgcctccatgtccctctcctgcactttctctgtcttgggtttagcttgaccttgtatccaatctccttacttttgtccatcagcttcagactcaatgggtttctctggtggcttagatggtaaaaaaattgcctgcaatgtgggaaacccaggtttgatccccgaattgggaagatgcccaggagaaggggatggctacccactccagtattcttgcttggagaattccatggacagaggagcctggagggctacagtccatagggtcagaaagagtcagacatgactgagtgactttcacttcacttcagacccggcactgggttctcagcatctcccaccacctgggagtgtgagattcacattccacctgcttgagacctggaaactctggcctctggttttctcagatgggattcttgagcctcagagctagagaacactccctccctgagatcatcaggctcaaccccctcattgtgcagagggggaaagtgcctggacaggggagggacgttccccaggccctgcaaagtgctgggggtagggtgggagcctctgccttctctgttgaagtcaggaggcgtggctccagagttggacaggaaggatacctgtgtgggtctcagaactcctggaggaacttaccagggaagtaagggctccgttgactcttcaggggcgctgtgtgcaataactcgctttcctggtgatctaagtaaaaagctctgacttcattatcccagttaacctccaaggaaataaaaatatttcactcctctgacatggtttttgtgctgttttgcttttacgatcattcccttttaagtgcatttagttttaagctcctcaaatcctgtttaagtacatagggataaggcgtccatgaatgaggcaataaatagagaaatcagaagggctgggagttcactcttcttccctgctttgcctccctatctccctaaagcttatcctaaatgccctgaccaaatgccacaccagctctgggccagtgcccccaggcaagggatcaaagttcaccagaggccacataactcagtgtctgtgcag

SEQ ID NO: 54845 - DNA, 1197 bp, Bovine  19866880577831
  misc_feature (1)..(1): n is a, c, g, or t
ntgggctgtggagtcggggcaagagttaccttgaatagaaagcctctctggggttgtgaatcactgtggccatttaatgctttcccaaacctacccgttgtagtaacaaagcaaaaaaaaaaaaaaaaaaaagccggaactgtgtacgtgcagtcgaatttattaaataatacagcataacaactaactaatctctaatgatcgcatacgaaaagtgatagctagtttagaacaagatgtagaaatagccatttaggtgaatcagggatcctcattagcccttaattgctaataaataagcttaattttactttgatttttaacttctctcatgctcagggcaatttagttttggcctctatgaagtttgtctgagcccctgaggcctcaggtcagccagacaagacgttaaacccccacgcctcccacgccttgctttctgtggctttaactgccctggtgaaagagccttatctgtgattgctttctgcaaatccctggaaaggccttggtctcctttgtctgggctcacagcccctcctcatctcccttacacagagggaaagagagagaaggggatcacaccacacatgtgctgcacttttcctggctgtcttttttccaattaagaaaagcatttcctcatcctgatcccttcccctggtcaaacttctcaacctttggtgatgcctcttgtatccaattccagcctgcttctaattcttgaggtcaaccattaacctcgtgtctttgaagtgctttggcgcatataacctcttctttgtagaatgctgctctctgttaccatggcttagagttagggcaattccaaattatttcagacttagctttttggaaacatgatgaaaactgtgtaatgacatttataaatgaaaacacgtggttttttcataggtagctgtgaccatagggaatctctgacctgagagagggtgtgctgtagacgaggggatcttaggagggctgaggatgggggccatagaccccacttttttctgccccagggaaaacccacatgcactgcccttgttgcttctgggcctctagcaacattcacaccccaggtcaggagggaagaagggatggagctgggagcaagagaggagagaaggagggacagaggccccaaagctcagttcaattcaatttaattcaaagcacctactaagtgccagt

SEQ ID NO: 54846 - DNA, 1732 bp, Bovine  19866880635019
  misc_feature (1)..(1): n is a, c, g, or t
nccaggtccttggtgagactctccttgccttggtctgttttgatttcataaatactgaaacaccactgacagtaagatgcataatttgatgtacttccctaagaaagaaaaaaatgccaccaattaaactatgacacagtgctttcttatcatctattgcaagactcatctccatttcagggatgttaaaatgcggaggaaaaaaaaaagtgtgattttgaatcagtgaaatatggtcatagaaacaacactcactgcagtttatcaagttctctgctgagggctatccgtgtagcatctctttcaatcctcccaaaccctgtgagtcgagatattgttcagagaggttaagcaacgttacaaggtcacacagacaatcctaataatacttagtgtatgactaaactcaaataccagcacgatcgctctgcaaatctgtagttaaggagtttgagacacccagagcttgacaagcttatctgagtgcctgtagcctgtaggtggcggaggagttggggctggctgacctctctaccatcctgtgagcagctagcaggggtggaactgggcctcaaatccctcccccctggaactccaggctgtgctcctagccactgggcatcaccacctcttttcaagagaaaagggtaccaaagaggacgggtctacataggcgtctacctgcaggactcaccctctctctggccctcccaggcccctgcgggctactcctcactgtccaccccccctcctctggatgggcatttgctttccctcctgactggccggtagagggtgattcccacctctctggcctccttcagaatcctaagagccagtggaatgagagggagcagcaggcaggcagagatgaggcagaaacagagagcgagagccgccttcgaaaactcacaaattggtcccagagagaaatggagtctcttttttgcccatcagctcactcccccaaccattacccagcaagcagagtgagggccttggctggagcaaaaccccggcatgggtgtggggaatggcattttagggcagtcatggctccctctcagaggggcagggacaccctgggagccagcctgggcccagcctcctcagaggagaattgggcaggaacacacagctggtacctggggaagacttgaccctgctaacttcaggtggatgggagaggccaggaccggcttgatgcagggagcaggggcaggtgctggagagacagacccagagggctggggtcccaaaatccaccccaaagcagacagtggcttctggggatcaggcatgagcaagaggtggggcttggaattatagattcaggaatcagagccttatcccaagctacaggcagagagcttcgaggaaggagaatcagaggaacattcactatgtgcccagcactgggccaagagctttaggtgtatcacttgctctagcccatccagcagcactgggggaggtgaaatttccatttcacagatgcgaaaactgacattcagagcagatgagtaatggcttagtcagtggctgagccttggatgtgaactgtaccaaagcagtctggctccagaccactgtgttctggtgcttctagagaaatgcaggcgttagacaagcaagccaggccggacaagatgagctctcagagctggacacacagtcagtacagactaaccttcaggggctagtacactgtggctcctgaattccctcccag

SEQ ID NO: 54847 - DNA, 1559 bp, Bovine  19866880680109
  misc_feature (1)..(1): n is a, c, g, or t
nctaaagctggtggtggctcagacttgggaggctgtggcccatccttggaagcccatggtcccttctggatgcaaggttggtgatagaggggaagtgggaggtgggggcagagaggaacagatctcttctctgccgtggcaggtctgttctggcaagctcgggaaaaatagtttggcagggggtctttgtggggcacacaacatcacaaagcctcccctccctccctcaatgccaaaggcagcttcctaattagaacatccataaccctcagcatctgctccaagagaattcagctgctctaagatggagaagtccattaactttattgcaaaaacgtcggacgtgcttttagacagaggatcactgccaagtgagataaactgccaggacctgccaggggacaggccagaacttcctgcggtccccatttgggtcctcctgactgcctcctctccctagccagtgccctgggtgggactgcagcctcctgggaggctggagctggggaaactgtgaatttcaaatgcaggtgcagtctgggcacgctggctttccccatgcaattcacagcctgctggatggcagcgccagaattggcaccatctaactcccagaatgcaccaggagcccactccacggtcgggcccctcattcctgcgtcagcaggagttggatttgttggtgtccttgggagcagtggagcaaggtggctaagaacgggctttggaattagatattcctggggctgaatctcgattttgccacttaggagtcactgtgtgaccttgcaatagtggcttaatgttctgagactccatagtcacctctcagagggttagacgagatgatgctgggaaccttcaactcggtgcctgtcacgcagcaagggctctacaaacaagagtatccctgccaggtctgtagtgtggaaatggagaggaaaccaaaaccctgaaagtgtgtcagggaagggagtaaacaccaaataccaagatggtcctggcgtctaatcccagctctgccctatgctttgttagcctagcccctcagtttcctcatctgtaaaatgggattgatggtccctgccctcctttccccaaaggagaattagaaagacgtgaaagtacttggaggccgctaaagggatattcaaaagtgccactttattgctcctgttactctggttgtcaacctaatgtctagtgctcgccccggacccaccaggcctgaggctggctgtgccccagcctggaattcatctctgcctcagtaccccatgccacagccctcctgccttgtcctgggcgggcacggttctccacagggaacaaccacagagctcccaggctttgcaaacgtcttgccaagtaggcctcctgggcgtcctttctcagattcagatcgttcttaatatgaataattagcagaaacaatccgagtgggaggcggcagccatagcaatcgacccccatgatttccgagccacggggagagcccaatttcgctccaatccggatgctgtaaattcccatcaagctaagaaaatatagtgcaattt

SEQ ID NO: 54848 - DNA, 1688 bp, Bovine  19866880748126
  misc_feature (1)..(1): n is a, c, g, or t
ncaaggtgtgatgcgagacatctccggagaagcaatctgagatccaaggacttggtgtgtcggcctttttctctgctgagtcttctttgaaagctttctccccaccctgctccttttcgctccctcctcccacacagacacagaccaaagggaaggatgtgagagaggaaattgtcctgcctccgaagccctttgctgccggcaggcctggtgctgcctgcctgctcgcccagccggcagcccagcctgccacagagagaccttcattatgcctcttgtctctaatggtctaacaagcctttgaaagccaggagccattctccagagctctcaccataattttagcagtgccagccggcctcttggctccccaccccctcgaaaacagctcgagctttcccagcatcagctttgctcatttgatgtgtatcccatccccctccaattcctggtctttcatcccctgcagccgagcctgctttccaccccttaccttctggccaggcaggtaggagcccctcctcccaaggtcaggatgagaagactttctgtaagagaagggatttctggagctgctggaatgacacagaatgcctggagagagaggagagggacaagggtcttgatcacagagccatgaatagcatcacaggacgattatcagtgtaccactcacacaacacaattcacacccatcctgtcaaatccttacagcagtcctggtaaggtcaatataattatccccactctacagaagcagaaactgaggctcagagggggtaagtctttgcccaaagccagaaagccttttgtcgcagagttgggcttcaaaccaagacttgccagacttttaatcaggggtggcacacacaggaagcatgagggagtgaagcactctgggtggtaggcagcaaggggtggtggggactgaggcaaactccagcacacacccggagaaaagggtcattaccactcggctccaacagaccatgccaagcaggaatgcaggccagtgctgtgggggttcatgattttagagagagtttcaggtcttcatgtgatgcctcatggcttttataagtagccactaatttgattttttagaatgccattgaggtcaagcacagcccatctgtagtgtgaaagtggccctctgtcccctccctctgtatgccctgtgtcctttggacctctgcttgctggctaccagagagctagacacaactctgcaagagatagggtctgcgaagggtgagtaggtgtctagattctttctgggcagctccagcaagacacaggactgtccatcgtacaaactggctggcctatgcctggctagcactggagtctaggcactgaccaaggcctttctctgtgagaagaaaagggaggcagggagggaggcagggagagaaggtgaaagggagggaaggaggggggagggacgatgcttgccatcacggagaccaggccagttggcactcacgacaaggagataatcctaagtgcttgacccgggaaacaggactgagggcgagccgccagtccagccccccaggagtcacattccagccaaatccagtacagatgagagccccagggaagaggtgatcccagccacacttggtgctctgtctacacctgtcatctggggcggagttagccttcacccttcaggggagacaggg

SEQ ID NO: 54849 - DNA, 2101 bp, Bovine  19866880762809
  misc_feature (1)..(1): n is a, c, g, or t
ncactggagatgctacgaaatacataacaaaggtacagaagcagaaactgtggacggtgatggatcagaaatgagactggtttagacaatgtgtctggggaccaaggtgtgctcaggacttgggtgtgctttgcctcagtttcttggccaacttttgtgtctgacttccttgggagtccctactctctgccttctctgcctggctttctccctagtgacagacggggcatctcctaagcttggagtggactttcaggaggaactcctgtccagctcacctctggtacacgttccagcatcatctttagctttgtatagaccaacacaaagggaccctgggccagggacgccagcatctcctgggtcactcccttccagctaccttcgtggtgggtacctgcccttagcaccctcatcacctgaacctagcttctcttgtctttcatcctcaaactggcccacaatgcccaagatccttgccttatccctgcactagctcctgggggcgaggacggggcgggggggtcccaagatgccctcatgttctcaagttacttcctaatgcagaagccatccatatctgactcacatactagacacactgatccaagaaatagaaacttctgtggcctggccagggcagatgactttatggtgtcaacagagaaagtctttactgataattgaactgagtgaggctccactcctgatgcatctgaaaccataacaacgaattatgggttgcagaaccttgtgcaagtggcttagcctctctgaacctcagtttcctcatctctaaaatggggagaggcctggctcattggatcaagtgaaatgagagcatatagtttacccttaggaagtcatagttgttgttgttattactgttgttttttattcttttttttttttttttggagtacagttgatttacagtgttatgtgagtttcaggtgtacaatgaagtgaatcagttacatatatacatgtatccattctttttcagtttcttttcccataagtgttattatagaatactgagtaggtttccctgtgctatacagtaagtctttatttagttatctattttattttatttttcttcattttaaaaaatttattggcgtatagctgatttgcagcatggtaaagctgatttacaatgttagtttcaggcgtacagcaaagggactcagttgtacctatacatttatccattctttttaaaattcttttcccatttaggttattacaaactactgagtcgagtttaatagtattgataccatattatatattgcatgtgtatatatgtgttctgttgtccttcttccaatcacacagatttttttttttttttttttggtcacctcagaacaactcatgcttgaagctcagctgcacagagttccatttgtcacaaagtctaaaacactgaaaacttgactcaacaaatttgtcattattgtctgagcaagctatagcctttgattgaatttgtcaaacatgataattttattgagcaagccaaagtacataaggttgcatttgcactcctaaattaagagagtgactttagatatgaaaagggtgctacaaaaataagaattgcatatgtttcgaattttcccgaaattcctatttttccccatacagaaaaattaaaggttttggttaattttttttaacctaagctttccaagtttccaaaaatgttatatctcagccccataaggtgagggaaacatgccagaagcacagctctgcatttctaggacactctcaagcttgacagccccatctctgagtcactccacctacagcccagctaggtaggattgagtcggaagccctatcacactcccctccccaggctctgagccagaagcttcagtcccttccccaggttcaagccctcaaaacaagacgccagatctcatctggccccagtcccagacgaatctagtgtttcctccccgttttcagctccaagcattttcctgtctgttctcccttctcctccaccagctgtatagtaggttgaactgtatcccctcaaaagacattttgaagtcctccccctactccccccaccactgaa

SEQ ID NO: 54850 - DNA, 827 bp, Bovine  19866880771540
  misc_feature (1)..(1): n is a, c, g, or t
naaatgtggctcggtggactctgaatactcaggctgactattcatcctcatcctatgtagggcatgaggagggggcggaggaggacaagaagcccccggggaagctctttcttcctctagaagaagcagaagcttgagaagaggggcaaggattctctcctcccctgcactccatctaaccaatcgaggaaatggaggagaaggcatagctagtgaattctgactctcagccctgtgccccttctatactctgctgttctgaacttggaagcaacattggagaaaagtgtgtaagacatatgaaggacttcagctgcctcaagccagccagagcaactggagatattctgcctttgattaggagagagtcactcagttatctgtgggtaaattaactggcttgcaggtaaaccatggaaaaacacatcataatacagaaaataatggggcagggggcagacgtggaaaaaaagtcaaattgattaccgatcagtaacaacctccttctttcagaagatgccgactgtgtggaacacatgcttacacggaggtccacgttgtgcccttggcaacatggaaacctcccctgcagcagcagtccattccggcagcacatgggtgaagacagagcagtgaggactccaggagtgactctctgtgacatgtgtggactgaggtctggcaccttggcagagtggggttgcatgggttgggggaggggctgcttactaaaccaagcccccgaaactgctgggctttgtcaccttggcccgggcaggctgccagaatgtttagaaagcaaagagctcagcctgctcagtgacaga

SEQ ID NO: 54851 - DNA, 737 bp, Bovine  19866880833187
  misc_feature (1)..(1): n is a, c, g, or t
ncctcggagcctgggttgcaggggtgagcgtcataccactcataagggctgaacctgcagcaggaagaggggagcaatgaggcaaatcttcggggagatgggaggaaggggtgttcacgccttacaagctggcggtttagcaaacaatgatgtgccgaccactttagcatcaattccctcattgttctgctagggagtcagggaatgggaaaccagagtcattttgcttctcgttttttattgttagtgcccttttctggtgataaaagtaattcagcagtatctcttaaaattaaaagtgcacatgcccttcaacctagcaattctgcgactcattatccatcgtagaaaaaacactcttccaggagcataaagagaagtgcatgggggtgtttatcaaagcattgtttgtaatagcaaaaaactggaaacaagctaaatgtccttcaatagaggaatgattaaatagactacgccaccatcgcactctgaaaccgcacgcagccgttagaagagatgcaccaacagggaaggatcttcaacacatattgtttgttttttttaagtgataaaaataagaacaatatgatcacatttacataaatagattcctgaagacatagttgtgtacctatttatgtgcatttgaatacaaatgcatatacagtctgggaaggatccagatctaaaaaaaaaccactattgacctctggggaggggaaacgcagaagaaattt

SEQ ID NO: 54852 - DNA, 1623 bp, Bovine  19866880854518
  misc_feature (1)..(1): n is a, c, g, or t
ntggtcaaggaggcgggcgcctgccatcccatgatggtagccacaccgtaatctacccgccctacttctcaccccctgctctgccacagacctagaattccaccatcagggtctctcctttgattaaaactttgactctagaagagccctgtacatattacctggggagggcaggtcattgtgtgtgatttgattaaactgactgctgccacttagagagtacctaagtataagagaggagagggttgatgagtggaggagggatgagtgggagacggattggtctgagcaaaaggtgtggtcccgctatgtcaggatggtgtgtgtgtgtgtgttggggggtggtcaggcatgacccaggtggggaagcagactcatcgtgggacctcttgggcaggggtacaggctttggaggagggcagggtaggagtggcctgaaggcatcctttttgtctgcagttttcagaatcacgcatgcaccttatgaagtctatgtgctcctgagaccttcagatgctgccctggggctgcgctctggggctctggcagagtcctctcggacctgggctgtgccccctttaccttccctcagagcaactctcccttgcaacagaagcttatgatgtaggagagtgagtcctgcctcttggcgtcttttccccactggcaacatcaaaggtaactgtaccctctccttccagttaatgcattttggactgagaagatagactgtagcaaaacagcgatgaagacaataacatctcgacagtgacagcaacagatgccattttaagtgcttgtttcccaccaggtgctggtcagcactttacaggtgctgcatgtaatcctcacaaaggtcccacaagtaccccattttaccaatgaggagatggaggcgcggcttgttcagggtcatgtggtgagtctacaaaggatggggaatgcacatgcaggtctcacttcaagtggatgctcttgaacacctctcgaggtcaaataaagtggaagtgatccatcccttaattaagtcaacaggagagtgtgcaggaggaacccctgggggtcctgggcccagctgggttggggataggagaccagggcgagcccctggtctgtctgggggagacggggtggcactgttggggagcgctttctgctgcttgctgctgggtagcccttgtccttggttggcattcacagtgggacttccctgactcgtcctcagcaaagtttatccaaggagaacttggctgtaaatttccccaactccgtggccatccagccctggccctggcctcggtcagtggacgctgctgagctgacaacagattcgtcactggctgagtcctgagccagcacagctgtcagcagggaggagtggctctgcaccacgaccgtggcaagtttacccttgagcctgacaggtgcagacagagatctcagaatttgtggctcttctctctgaatgatggatggactggctccttgagtctctgctccaccaactgctgtcagagcaggcgagtctgtggaaagtgccgtggatggcgggacatgtctgctataggcctttggggcaacttggtcagtgggcagggctgggcatgggtgccatgaccctgg

SEQ ID NO: 54853 - DNA, 1159 bp, Bovine  19866880878136
  misc_feature (1)..(1): n is a, c, g, or t
ncttccgcttccattccaggtggtgctagtggtaaagaaccagcctgccagggcagcaaacataagagacacgggttcgatccttgagttgggaagatgccctggaggagagcatggcaactagctccaatattcttccctggagagtcctcctggacagaggagtctggtgggctgttacagtccgtggggtctcaaagagtgggacatgactgaagtgacttagcatgcacaaacacttcccattcagtcactagtgtcctgtcagctctccccttcgagcatctctgaaatctgctccttccttctgtttgtggacaccatcactctagtcctggacagtagtatctcttgccttgatcactgacgcagcccgctgtggcatcccagcttctacttccctgatcccagcaacagcagcagtgctctgtcctggggaggtgtccacaggtgtccctgagagaggtctcttgaacctggggcagatctggagttctggttccttgtgaactggggcctggctttggggagaagagatatgtgcgtgtgtgtgtgcgtgcgtgtgggtattttgtgtgcatgtgtgtgtgcatcgcatgctcgtgtgtcagcctgctgcctggggtgatcaaggagggaattctttccccacagtacctagaatgtttcccaagagcctgtctcctgcccgtcacccacccacgcgggagaacaaagctctttccagctgactgccgctcgtgtttgctgagacaagagttgtacatctcaatttttatcacatgaaaatgaaataaagaatgctggaataaacccgaagagacaatactgcagaaagcgactacgcatttgctgtacagtcccctcgtcccctctgcacctccccgaagaactgtccctgttgagatgtcagcgctctctctcttttgggctttcaaagagggtgtcgtggtttaaaacacagggagagttaaacgcgccacagcggcaggaaaagcggttccaaatcgcgttgagtgtttgctgccagctcgtgccgcccgccgccacagtcctgccttgatgtagctgccttgactagacagaagatgttttccttctcaattagaaaaaatccgcagcttctcgcccggcatgggaggtggcagagctggaatta

SEQ ID NO: 54854 - DNA, 1886 bp, Bovine  19866880890110
  misc_feature (1)..(1): n is a, c, g, or t
natcttctccattgtgagggaaaacctcatctgtgattacatgacaattccaaaaaccactgtagatgactattccattattacgatttgcatctttctttgcccacattttttttcttaatttaatttacactacccaagtaacatcactacgataatccttgccctagtttctgctttccagaaatcctaaactagagacatgtggttataaaatacattccactgtaagtgttgtgatggaaagataatcattcattataaaaataatgttaatatttctaaatctctgatgtcctgttatatttttgaaattaaagaagtttgggataaataagatggatgtatttttaaaccattttttaacagtatcaacattttgtttttcttggagctttattattaataatatgtgatttatgtatcataatattaactcttttaaagtatacaattctatggcatttagtttattcacagagttgtgtaattatcactgctatccaattttagagcattttcatcacccccaaaggaaatcccatagttgttagcaatcactctcagctccctcctcttcctaggccccaagaatcactaatctgctttctcagcctatgggattgcttattccagacattttatattgatgccatcatatagtacattgctgttcggactgacttatataacttaacatactgtttctaaggttcatccatgttgtagaatgtgctgctacttcattcttttcatggtcaaataatgtttcatatgaatacagaacatttttatctattcattagttgataaacattatggtttgcttactttttggttattatgaatgcttctgcaattaatatttgtatacaattttattttgtagggatgtatagttaatttctcttgtgtataactaggattataattgtgtcaaatggcttacatttaacattttgaggtgttaccattctgttttctaagcactgtaccattttacaatatcaacgaggaatgaggattccaatttttagtcatccacatcaatatttgttattgttgttgttgttctattttactcattctgctgctgctactgctaagtcgcttcagtcatgtccaactctgggcgaccctgtggactgcagcctaccaggctcctccatccatgggattttccaggcaagagtactggagtggggtgccattgccttctctgcacccccccccccagtgatgtctaaagttatgtgatgctccctctggttctttatattacttctgatatcttgtgacaaatatttagatggctcttttgagattttctcacttaatcatgaaagttaaaaagccacatatcatcaaaaaatgcttgtacttctttcctcaggcgacatggatgaaataatctaacggaaaacaattcatggaaaaactaaaatgtattcctttgtcagcaaatgtggtcagaagatgcaaagagagtaccactgaagatgtgagttaacaagtactagaacaaattatgcaacttgggagctctgctcttcaactggatgaaaatacagatgtttctaacatgtcttagcttatggtatgtgccaggtttaagttccagaaatgaagtacacaaagaattacttttttatgagatatactggggaagagatcatttcaaaaaccaatgatttatgtaataaaaacgatgttttatgggaaaatatataagcacaaccactgatagaggggatggtttaagtgcaatacacaaaggattgcaggttagggttatagagattactccaaacatgaaattcacccaaagatgagctgttgaagcaaagaaattaagtcaagaagttcacaaaatgatgcaggatgtc

SEQ ID NO: 54855 - DNA, 2190 bp, Bovine  19866880896550
  misc_feature (1)..(1): n is a, c, g, or t
nacagtggagcctggtggcctacaagtccgtggagttgcaaaagagttggacacggatgagcgactaagcacatcattctctcaagtggtgatgagacaatggggccattcctttgccactgtgaacccctggaactggctgagcctgaaggaccttcatcaggggtcctcaggtgcagaaacccaccagcagcctcttgcaaggctcccactccagaagatgggctgattgtctggccctgtttccccagcaacactagttctcaaaatcccgtcccaccccatgactgattcactctagagtttcaacagccctttgggatgctgcagagaaagggcaagggagtgtctgtacccctaaggggttctgagaaaaccactttgcagtctagctgggtggaaatctgggtcctttgactagactccatgctaagtctcagtgccccccatccctgcctccaaccaagtaggcagctcacaaggttggagaaaacagtctaggaggtgccggggaagggactgggactgcctggacagaaggggacttaggctagagtggaccctgctgcctggaaccccagcatggggcctggtgagagggccagcgtggagatttcaatcctgtctcaactgtaggtcagatgctcttgcgcagtgaacaccccgcaccgctgcactagctggccctgctgttagctcaggaacgaattaaagagaaggcaacccctctgccaggagaatcaccaaccacacgtagactcctaagtgaaatcgacctccttctgtaaaatgggaataataacagaacctaccttacagaattgttgggaggattacatgggttaatctgtgaaaagcacttagtgcctggcaaatataaactgcaatattattattattatgaatatcataattgtctttctgtgcactgcgtggcctgttactgcagcgacctttccagcctcgagaccatgcccaaagtcaccaaaggttaaaaatcatagctagcagtggaaaactatttccggaaaggtccctgagatggctcacttcctgaccctatctcccagcccctccctggccctatcctctaaaattagcacttcatttgtgaagccaccaaggccccagaatctatacatctcccatataaatacgctgccttcggagcagctgtaaaatgccattaatttctggaagtgctttgcggatggcatacatatttaacagccaaagcccagagcattaaaatggtgctcgccttagtaatgtctccagacctgcaacatttcctagggggtaattctgaactccgccaactacttattcatggactatttcacaatttattactggaaatgtccagacagccaattcacaagctctctcggctgctaatcgattgctcagtgaaggtgccctcaatttcataacttcacgctctcctattgctctgggagaacagcagtaagaacaggggtaatatttctctgcaacaagtcacaggaaacaagggtcctgaaaaataaccttttctgacttttcatcgctagggctctcagtttcttagtcgagcttcaccatcatgagagccaggcccggtgctaagattctcccagtgacgggacctgtggagttggaagagggggtcttggcgggcggggagccaagggttagctacctaagagctgcgttcccaagtcctcctggcttaggccatctcaacacacatctgcacgcgcatgcgctctgtacacacacaatgccacgggcatgaagacaccactttctcggatgctctgccctgctcagagacagaggtcaaggaccctggccctcaggccttggcttctgtcagttagaaccagggcagagcattaggagtccggctggtcttcccagcaggtggggcccagaaaaatccccagcctggcccggaatggttctcccagcccatattctggtctccgtagcttcccctctcctgtgccggatgcacaggtccggcctgcctggcagttgagtctaaatggtcacaatgcacacacggcacaaacacatccatcggtttgtatccagacatccctgtgtatagccaaccccacacccgcacaggtatccgcacgcatgccgacacagctgctcacttcagggccccaagaaccctaaccttccaaagcagggccccca

SEQ ID NO: 54856 - DNA, 1275 bp, Bovine  19866880946420
  misc_feature (1)..(1): n is a, c, g, or t
ngaaggcctggcgtgctgcgattcatggggtcgcaaagagtcggacaggactgagtgagtgaactgaactgaggctgcttctaccatgtggctccagcatctcaacaggaggccttctctgtaatcacctcaacaaagaaataaatggactgaagcatcatatgagtgctttttactgcctctgcccagaagaatggtatgatgtccactcacatttcatagccctggtggttcagatggtgaagaatctacctgtgatatgggagacccaggttctatccctgggtcgggaagattccctgaagaagggaatggctacccactgtactattttggcctggagaattccatgaacagaggagcctggcaggctacagtccatggggtcacaaagagtcagacacagcacttccagccttttcatgtttcatagaccagaacagcagacctagatgcggcctaactgccatcagcggttggagtgcgtctcccacgtaccccagatggagaaaaaactgggtgccagtgagtccctgtaacttcttccaccatcctcagctgttattgtccttctcctgcatctgtacccaagtttgttttctagacccggagccagccctactgcccaagagtttcttcttcccccttttcatttctgccacgtgtgctgcaggccatcctgagccccctggcccaggggaggtgattcttgcagaggaagggctgtttctgaagccctccctgaccctctccccggcccctcttctgctgactgaagagccctcgtcaatttgttgacaacccggaatcaggcctccggcatctgattacggcagtgcctctgactgtcagggataaatgtctgttgtctttacgaagatctatgttgatggaggtgtcagcagagacagtggtggcggaaccagatccctccccagtgagatgtcatttgtgggcaagtcagatatttccagttcccggcagaactcgggcctctgaagagagtggaggtaggatggctggcagatatgtgaggctgcctggggtgaagggcggggaaccagaagccagaagtgagcagatcatgtgtgaagtggcatcagcagcccagaggggaaactgcttgaaagaagctaagcttctaggctgcaggagaccacgaagatcccccaagcagaacccagcaggccgacaaacaaggaccagaacacggtgccggtatggtctctgaaaattagatctactccaggtcctatcaccagacagctgtgcgcc

SEQ ID NO: 54857 - DNA, 1708 bp, Bovine  19866880966451
  misc_feature (1)..(1): n is a, c, g, or t
ngcactggagtgtttctgctccaggcaggcccgctggagcccagagctgaatcacgaacccaaggagcaggggttgccttgattaaacagtgaagccttgcctcgctgctgctggggagggcatcgatggtgtcagtcaggaactccgtggtgcctgcatttctgttcactgcagaaatgtgtttgcagcctggactgactctccacgttcttcctgctgagaggccaggagatgaaatgcccctcatgtgtcagtcataaacgggagtgattttgcccagttcactccatccccccagtagcaacgtctgtgtcgcccccacactctgccacctccttcaggcagcggcctcctgcccttgtctcttggccagcgttctggatgggggctattatcctctttcttgagtcaactccctgaccacagtcattggttgtaggatcagtggctccaaggtggatcaactgagtcctttcctggtgtcttttaaacaggagatggaagagaagagacttttttttttccacataagaccataacagctgaaaacctggagttccccgaggctgtgatttgggcctcctggagacgccagctagaaagaatgaagttgactcacaggaagagtcagagatggagggagacagagacaaagaaagaggaagagacagagacaggagacagagagagaggcacagagagagacaaagagagagggagagacaaggacagagagagggcctccctggtggcccagtggtaaagcatccacctgccaatgtaggagacacgggttcacttcctggtccaggaagatctcacatgccaaagagcaaccaagcccatgcaccacaactactgagaagcttatactctagaacccaagctctgcaacaaaagccactgcaacgagaagcctttgcattgcagctagagagtagcccccactggccacaactagagaaagcccacgccagccacgaagacccagtgcagccaataaatgaataaataagtaaataaaatcataataaaaagagagacagagataaagggagacagacagagacagaggaagacagagagagacaaagaaagagggagagacagaaacacatagagacagagagatggaggcagagacagagaaagaaagagacgaaggtggggggactgacttgcccctgcctccctgcatttggctgcatgagccaataaaggcctctactgatacgtcacctgcttgatacaaggttcccaccactcgtaatcaaggcctaatgtccctctaacacatgccacacagatgccggacacacaaagctgatggtgcagccagagagggagccggtgggagaggcccagtgcctgaggaataatgcaacccaatggggattgacatggtcagaacagcagcctttctcctgggagattgccaccaaggaagaaactctcccaagcagaacaatagagaacgaccccacacttgggtttgtgcattttgccagtggaagaccaatctgttctgcaaacactaagaggtccatgttgacacaaggctgcacatcccagcttggagcgcgtgggacaagaaccactcagagaacaaagagatcaggggttgactccggtagaggagcaattcggatggtacaattgcagatctcaggcaggggttctcaccaagccttcaaggagaaagaagta

SEQ ID NO: 54858 - DNA, 1262 bp, Bovine  19866881060769
  misc_feature (1)..(1): n is a, c, g, or t
ncttcctttctctccttgcctcagctccctacctcattcttgcatacccccaccaggattggggatggttctcaccccttgcctgggttggctggaatctgggcaatgactccttctccaggaaactgctggtgtgggcgtgtgtgtgtaaaactcaggggaagtcagcaaggtaggtagatttgcagaaccagtggcatttcaggctagggaggatggagaactcaaatgggccaattcaccctttccacagatggacaagctgaggcttgcagaaggacatgcaagggcatctgtgctgtaaagggaattagggccgctcagcactgagaccatgtctctaggttcctctaattcttctggaggccttgaatgtccaactaaagccgtggctcaatcttgctgcctcagaagtcactgctgccttttgagttggggagtgtagctaaatgactggatttctttccctttaagctttttgctactggggtggagctgggagcttccagccaatgacatggtcttgccagggtctgccaggcattgcaccatcggggtctggatgctaggctgagccagacagcaggttcccagccttggctgcatgttagagtccctggagggtccaaaaaagaaaggtgctcagcccaccaggctctgggaagccctctctacaggtggtttgaggctccgtggggagatcacaaactccctgtcagagtaaggcttggggaatgggttttctggagcagagcaggctgggagtgtgacttgttacagctgtatttccacgggaacaggatcagggcagggacgggaaacacgtgccccatgccccgtgcccctgctggtccttccctggtgcatggttacagtcacatgccactgacctgtcggaggagcctcaccctgtggctgattctaatgacgccgagggccctgccatctccatttgccttgaattcctaactatcgctgcctccggtatggtcgttagtcactcaacattaatatctcccgcatccgtcaccgcagcgatgacgatcctagacttgcctgccatctcaccggccgagggatgtgaagtgggtccccggggcctggccgccctgccctgagtgggtgggggagaaagggggacaggccagcttgttagatctaattacctggctgcaggcagtgggcctgagcttggcccaccgcgtaatcctctgcctgcccttccgccataacgagcctgcccgccatcagctgccgcgcgg

SEQ ID NO: 54859 - DNA, 784 bp, Bovine  19866881094260
  misc_feature (1)..(1): n is a, c, g, or t
naatgaggcagttcccgagctgtgtgtttctagataagagggtttacatcgactggaaggctggcagtgagcctctggaaggtggtgactggttgggacacgagcactttgtgtcgaaggagagcgcgctggtgtgggagggacaggtgctgtcagcaagaatgccacttccctctagtgacctttaccggagacattttccctgaatgtcaggttcattagacacaggactgggggtagaggagtctctttaaaactgaatgaaagacaggacggacagacagacatcatccaggctggcaacaaccagtccatcaggaggatggggagacatacactgtctatgagctaggttcgtccttcttagacctgggttctcctggttggggccactattctccttcagagtggggttcccctccccagggcaagctgtacccagaaagcaccctcagtccacagagctcaccaactgactgaccaagatccaagccctgggaggcccctgggcttggagccgtgttgcctgcccagccccacccctcggaccctgtcaaggatctacatggctcagaacccactctgtctccaccccaagctggatactcggaacacagaggtaaaccagacttctgccctaccctcaaggagctccaagtttcatgaagaagacacaaatgcacaaatgttaccaaagggtaggctcactgctgggacagcttcaaggtagacatgtgccccagaaaagaatcaagaagcactttctgttagaaggaacatctga

SEQ ID NO: 54860 - DNA, 1115 bp, Bovine  19866881166900
  misc_feature (1)..(1): n is a, c, g, or t
ncttcagtgtccttctctgtaaaaagggacaaaatagtagagcctgtttcatgggttgcagtgaggatgcaaatgagtagggctaaagatatgcacagcacttaagacgctgcctcccacatagcacactccatggacatgcgagctgttattttcaatagctgaggaatctattatcacctggaagtgggtagagtctgcaatgagccccaaagtgtctgcaaactgagccctcggggttcagtccccatctccccagggtcagcagctctcagggtgtcacctcaactctcctgggataacagtgcccaagagtctttgggaggtggagccagtttggtccctgacaccccagttccccttcagctctgggagagcaagcagcttgcctggctccttccagcttgagctctcctggaattcacagaaggtttgaagagagagaattcacacttcactgaaaatgtgtttcaaacaattagcaggtctttaccagaggagcctttgaagtagaagcccagacccatctctgtgaaggatttccccagaattgacaggctggcagacagcaccaccagctcagcccttccctgggtgccaggagctcctgcgagtccctctgtgtggcagctccagtgtcctctgcagcacagaggctgctgctgctataggttgtaccacggggctggactcccactcgtgtcctgtgttaaatccatgggatttttcccttctccagatcttccaacgtataggccagggcaactgaagcctttgactgtgaactcagacctcctgcatccttaaacaatgcctaaaaccatatgtaattatcagttgaataaatgtgtgcattcctccagtgattggccctgtggcctggggccgcccccatctccccatctgcaagctagagacaggtggggtgggaaaggaacgggctaactgccctctagaactctcagctaaacctcggtgtccttggaagggccctggtggcagtggaatgaaggttggatcctaattccgctccctaaacttttagctgcatgaacttgagcaagtcagtgaatgcgtctcagttttcccatctatgggaagggtaaaataatccc

SEQ ID NO: 54861 - DNA, 1903 bp, Bovine  19866881176808
  misc_feature (1)..(1): n is a, c, g, or t
ngtctggaatcttgagattttcctttctcttgaacaattttgtgcttttgaatttggtccttgccaaagcaaaggctggcgcagccagcccagcccctggcacagtgagactcaggcacggtctgcaacgtgctgccactgtctggcagctgagtcccaggagacactcacattcccagcactgggcccaggcacctgtccaggcatctgtcctccagggcccgagtctgttctttttttttctaatctgctttgttctctttctgaagtttccaaggtgtcatagagattaattgagacactgatcagcaaggtggttgctaacagcctcttcccggggctgcctccctgtctgttctgatcagggttctctcttctccctgctggggcccctgaagctctgtgcagcctgtgggttggaagaacaaggctctgctctctgctgcaccagctcctggggccccggcattgcctggggacttgcttctggggctgtttcctggtctcagaggaaggagctggggaacacattggctggctttccctgctgggcatagtaggtggtttatagaaggtaagcagtgcccagtggaaaagggccagggatgggctttctgaggtcctaggcaagggaatggagacaaggagtatgaatgtctcccctcctgtgggtttgttgactcattcattcattccccaagcagtttacaggctacaacctttcacaaggaaccccactgggcactagatgagtcagagagagattaagcaatattcccaggtcttcaggaactcacagctcagaagaagaaacaagaggaggggcataaatcaaagcattttttgatttgtggagtaaaagggtaaaaactgtccatgtgaacagaaagctggggaggttcagagaagagggagtcatggatggctccatgcaagaggcagcatagtctccactcagagctgagctatggaaggaatgtggcaccagtgagggggagaatggccttgggtgggttcccggggatgaggacttgggcttggacaggccaggatgagggagtgaagcagggggccagacaggaggggagctgctgggtttgcttctctatcaccaggactggtcagggattaggtgatgaagggaggcgggggcctggcagaggcagcatcagagaagaccccggatcccgaaccagggtgggagtgcagtcaagccagtggactctgcagccagcctgcctggattggaattgatctcatcacttccgagctgtgtgaccttgggcaagtcccttccctgccccatccctctgtctgatcaactgaacacagggatattaatagcacttacaatatagctctactttaaggcttaaatggcctaaatcatcataggcatattgtaagccctcataaggacaagaaattattattatgcagtgacaaggaagctgttgcagggaggcctttaaaactgagatggaggtatccagaaaaacagcggatgagaggagaggattgcaatcctggtggggggcccaggggagggctcctgatggagtcctggggcccggtggcagttgttttaattgatctggcgatatgccgagctttgtctgtacaactcggggacgcacaagtcaaatactgcaggatcgaccgtgtcgggaggatggccggaggctcccatgctgcccagagaccctgatgaccgatgggctgtcatcaggcggaggagctggagcagggttgctgggaatggggctgcggtggaggggcccaaggggccgtgagcgcccttgctggaggggctgaaggaatgatgatcctgaattccgaggccctggtggggctctctcacttcctggacaggtggagccgtcacacgacccgccccttgcat

SEQ ID NO: 54862 - DNA, 1567 bp, Bovine  19866881194458
  misc_feature (1)..(1): n is a, c, g, or t
natataggacagccccatttgaagctcacagccccttgactccctagtatctccatccccaaactgctccttatccagggccccccactgcagtgactaggaccatcttacctgaatcatttcgggtcagatatctaagcatcaccttcaacttgactctccctcctccccacatctgttccacactcaagtcccccggactcctcttccttgttcagttgctcagtcgtgtccgactcggcgaccccatagactgcagcacgccaggcttccctgtcctcttccttaacgtcattcaagtatgtcctggcacagctgccatcccctgccaggtaacccagaccctggaggctggaatagctcccccaagcgcacttcctctggggaggtggtgagcctctgcttgccagcactgcaagtgaagcatgacgggagaggcatccattgagggaggggacggcagacttggcgtcctctggggaggagaagcaggcatggaacagaactgttgacagactccaggctgctatatcgggaagatttgacaacacacacaaggagagagtgagggcgcgttgacggctggtgagaggcgtgggggctggctggggacgtgccgccaccacccacgcaggaggaagttgggaacagattgcatgggaccggtgccagcctcctgaggagctgtctgctccctctcccctggtgctggtacctgctgagcaactggggagggggttggccaggaacacgggctgtacagggtgtgtcctgagatgggagcctagctctgcacagaggggcctctctgcttcgggcttttggttctctcactccactccattccatcccatcccaaacaatccaatcctaatatcacttgacacctttgtattcccggcctgtctcctccctattccattctcctcacctttcctatctccaaatcctccaccatcttatcccatcccttactcatcagcacaggatgtttcttcaagttttgtttgtttttctctcaaagtggaggagacgacaagagaataaagtttatttgtttatgatggggggggggggatgcttgaggcaatcatcacattcagccccccaggttgacatggaatcaactggttaataactcaagagttgggcacagagtcccagagaatgtggcttggaaacatagccacgactgccccccgcccaggccccttctccaagcccaccctccaggcacaggcacagctgggctatcacaggtgcttcctcttggggtgcctggggtgggtatacgttccctattccttctccccaacttccaccagatgaatcattcccgaaggagccaacaggctgtgtaagttcagcggccctggggacatagtaggattgcacttcttggcccctcacagttgagccagacctgcctgtgaaagcagaaatgtaaatgatttttaattatcagcctgctctcccctctgccctggcccaggtgaaatagaacagtgatcagactcccacatcactgatgagatcttacaaggaaataagaaaatagaaaaacctc

SEQ ID NO: 54863 - DNA, 608 bp, Bovine  19866881538353
  misc_feature (1)..(1): n is a, c, g, or t
ntgtgggggaggcggagggcttggactaagcaggcagggtggggcagggcagggaggaagtaagtttgtccagggaccttctgggaggatctttgcttctagcttatcatccaaggtgtggttaatgtagccacactcaggttcctccctgcctacaaaacagtcccatggctggtgccattggtagggaggctgggcaagaagcacttcatttgaattaaagcaggatacaaggtggccagacagcaagcggaattcactggcgatcaggagagtgaggaaggggagctggttcttcaggggctgtgcagttgctcttcctggcccaaggccccagtgagcctgggcccttccgccccagcatcccagctgggtggtagcatctgcatccctcccccggtcctcctcgttgcaccatttgcagggaaggtgggtgagggcagtgcgggctgcgggaggtgctgcttgatgccgaggacagtagctcggtggggagcagggaccgggctcttggaagccaatctgagcatcttagcatggagggaggcaagggcatccaatcagcgccaatgagcctgcactgggcttatttatgctgcttctctttg

SEQ ID NO: 54864 - DNA, 959 bp, Bovine  19866881652936
  misc_feature (1)..(1): n is a, c, g, or t
nccccccacccccaggcttggaatgactgacccaggacaggacctgaccctaacactaacttgacttcatggcatccgctctaccccaggctggcttccactgtgctccctgggctctccttatattcctcttctccctctgcatttcccttccatctgggatgggtttgccagcaaatggggagggaggagaattcaggagactcgacatctcaggggcttcctctgggaaggaggaaggcagcagggctgtcagaaaagttggctcaaaacttgtcagtgatgacaatgctcctgaaaggtgggaacaagatgagttgcttgctgattgaagaaagggtggagacactgtggactcagcccctgtactgcatcgtctgtccatccaggtgggagtgtggagtcccgctgaggggctcaatatcacggaggtcgccaaaggccgaggccctaatgtcaccgactctctgaccaacaggtctctcatcgtcaccaccgtgctggtaagagctgcagccctgcaggaggccccctgtgagctgggagatgggctggccgttggggctagagggacccctccatcaccccgccccgcatagaccagctgcctgttatggggctgctgagaggctggaagatgagggaggggagctgaaggaagctggaaacactgagggtccctcagaaagcccccagagagaagttgaaacatagcaatactgctcacagtcacaggtcagagacaccagggaggtaactgggctgtctcttcccaaaggtggagcaggccagccttcctgcctggacctgcttggccagcccctgctccagaggcctgcctgttttgtatcccagccccacccactccctgagcccctgatgcctgtgcaggaagctgtgggaaggaaggaagggggtgacctgctctctgcaccaggacctgagtctgtttcttccaa

SEQ ID NO: 54865 - DNA, 830 bp, Bovine  19866881687474
  misc_feature (1)..(1): n is a, c, g, or t
ntcatctttcactgccccttcagttcacttcagtcactcaatcatgtccgactctttgcaaccccatggactgcaacatgccaggcttccctgtccatcaccaactcccagagcttgctcaaactcaggtccattgagtcggtgatgccatccaaccatctcatcctctgttgtccccttctccttctgccctccctaaacagaactgagcattaagtgaggacccattagaaactagtttatacagaagggtggtcccctcccctcccaggaccttgaagcccaggcagcctacagttaattggaggctgagcttgcctccttccttccttccaggcccactgcccctttatgcaaagagaaatttaagatattaaaatggaagtatcccctccctcacccctacccgccctacagagctcataagccctgcctgaaaacacggaggaggaatcttgtcctcaggaagctggtccaacactcacccaccttgaaaaggacaaggtttctttctgttcaattaacctgcacaagagaggcagaggtggtgggggcatcagggagtgaggaatagaaaaaccctgcgtgatttcctccttggactctaagatgagggagagcttgcaattctgcccccaggatccagaagcccttttcttacctgtgataatcgtgagggtgtgttttctttcatttaaactctcccaaacttaatttaaagtttctctctcctttaaataagtcctggctgcagagtgaacagcgatgagctgccaaagggaagtggaaggggagagaggattgcctgtgaggatattgctgctgcttaa

SEQ ID NO: 54866 - DNA, 1753 bp, Bovine  19866880420425
  misc_feature (1)..(1): n is a, c, g, or t
ntccttccaggagtaagcgtcttttaatttatggctgcagtcccatctgcagtgattttggaacccccccaaccccgcccaaatatagtcagcccctgtttccccatctatttgccatgaagtgataggaccagatgacatgatcttagttttctgaatgttgagctttaagccaactttttcatgctcctctttcactttcatcaagaggctctttagttcttcactttctgccataagggtggtgtcatctgcatatctgaggttattgatatttctcccggcaatcttgattccagcttgtgtttcacagcccagcatttctcatgatgtactctgcatataagttaaataagcagggtgacaatatacagctctgatgtactccttttcctatttggaaccagtctgttgttccatgtccagttctaactgttgcttccttatctgcatacagatttctcaagaggcaggtaaggtggtctggtattcccatctctttcagaattttccacaggaggagacgtacaagttcacaaatatggacaaaacagtgtcatagacactgccaccctgggcatctgtatatatggcagtagaggtacagaggaggaaagagttcactggactacggtagaaggggtggaaggaatcctgagaaagaggaagatacaactgaactgagtccacaaagacaaatagcaacttgtcaattgacaaagaaggcaggaaaaatacttatgcttatggtagatggaatagaataatcaggacatggtgtgggattctgggaattgcacgtggttcctcacggctggggtgagagtgtgctgtgtttgtgcagattgggaaggcaggcagagagaggaccccggaagctagatcctggaggcctttttacaacacatacaaacagggtatctaaatattttgaatattccttctccagcaagaaaatacaacaaattaatcccaattgatgtcactagtcactagatgatccacttcaagtacaggaagacaatttcagaaggctctattctaccgttcagaaaagaaaaacatagagccaaaagggaaatacgttctgagttctggcagcctcaagagtcaggtagaatttataagtaggcttaaacaaagaaaatataaggttaaattctgggcaatcaaaaagactatatccctgtagaagtcacaaaagtgctcataaaatttatctgccaagtaaaaacttgaaatacacatgatgtaaattactaataatacttattttttaacattttgaatagaggatcatttatggttgaatacaatctgtgcctaacattataagcacagctggctttttatgaggtttatttagggggttgtgatttcatattcagaacaaaacaaatagcaggcgaggggaaagaagtgtggaacagttgtgcttaattagactgtgagatcccagggggcatctttgtttcctgagctaacactagataacaaaggaatacttgttgacttatatacttcaaatcaatgtaactctatggcctggttatcaactccccttgatgtgtaatggaacccagagaggcaaaataatcaacaatcggtgagcattagcacttgcaagaagtatccccaagtctgccctcccctctaaacacaaacatatttcaaaggttattattctgccaactacctagtgctacatgttaggagggtcacagaactatcatagtaacaaaattagcagcta

SEQ ID NO: 54867 - DNA, 1226 bp, Bovine  19866880451902
  misc_feature (1)..(1): n is a, c, g, or t
ntctttagagactaataatactgtgcagtgaaacaatgctatatctaaaaagaggcattttcaataaattctatatttttgcttaagaataagaaaaaggtggcaagccaagccagaaaaaaagaaaaggtataattgttcaaaccatttgtttgtgccactttcccaaagagctcaattacactggagtaaatattaatcgcacgcttagcattttggaatcctttggtcaataactggtttaatgaatatgtatttatttatatagaattccagactgagccagaaaagtgaatattaaattttttttttttcccggtctgacagtaacctttgaaataaacaaaggcattttattctgcttaaatacagactatggggtacagggttttggttttctttcttctacagtcaaaaagaacggacaaaagtgtacagcttttctcaacacagtgggggaccagcttaagttatgagtttacacgtacgtgcttatttaggctaatttgggtctagaagtttcttctttgcctctcctctccccacaccccaagtaaaataatcagaagatgaaaaggaaggagcagttacatcgtgtagggaaaactccatgggaaaccaaattacagtctctacagaatccccgcaagttcaacttccttttctgtattgattttaagattaaagcactgcagcttcaccctgatccataattctgttccttggtgtttgtgtgtgaatgacaggaattgattctgctcagctacatgtccctgtgctgctatgaagaatcaaaaatcctcatcctgattaagaacacaggatatcctaccacacgtggaacagcaattaataaaaggagagtggactccagccatcctaacaaaggccatttaaaatctgaaacactgcagggaagatgagcacaagcagatggctcagatcactgagaaaaagggcctggttctatttcctattatgctattgataatccactctgggacagttttggggagctcctgcctttctgatggctccatctagctttctggtaaccaaggagaacttgatggtcctctacgggccttcatcactcaactggtaccttggtgcttgcagactttgggaatactgtgttactgtcccaggtcatctcaggtggggtttgttcctcctaattagactatcgacttctcatagtgacactggtcttcttcttttctgaa

SEQ ID NO: 54868 - DNA, 2384 bp, Bovine  19866880552210
  misc_feature (1)..(1): n is a, c, g, or t
ntatgtggataaaaaaattatcactccctttccaacagaacagccttttttaaattctgtaccctccagttattttccttatgcacatatatatttatgcaagactacaggcactaatttgtattctgcttttttcttatatatcctgttttccatatttttgtgtaattttcataattatcattttcatcataaaaacagtacgatcccattacagaaaataagtcacctctaatcaccatcttgatgacacttcctgcttgttttctctaagtacctgtgttaaagtttgcagaggaggttagggatgtttcaatgcttaggcagcctccattgccattttactttctttgatgatgtaaatttttttgtttttgttttcaaaacacctttgaaattgacataactgttctgaacttccattatcccacatattatgctaaatgaacatgcaaggaataacttgaaaagaccttaaggtagttcctatcttccaagaaatacacagtgagttataggatgttgcagaatgttcaaagatggataagaaaagtctcaagaggatgaagagctttccatgggaaaataaaggaaaacatatcctccaacttgtaaaggctcaaggagaggcatactttcagttcagttgctcagttgtgtccaactctttgccaccccatggactgcagcaagccagacctccctgtccatcaccaactcctagagtttactcaaactcatgtccgttgagtcagtgatgccatccaaccacctcatcctctgttgtccccttctcctcccgccttcaatctttcccagcatcagggtcttttccagtgagccagttcttcgcatcaagtggccaaagtacctggagtttcagcttcaacatcagtccttccaatgaatattgaggactgatttcctttagaatggactggttgaatctccttgcaatccaagggactcgcaacagtcttctccagcaccccagttcaaaagcatcaattcttggacgctcaactttcttcgtagcccaactcttacatccatataacctgtttaacatataacatatgttaacatatctcacatccatataacatatatactggaaaagccataactttgactagacagacctttgtcggcaaagtaatgtcctgctttttaatatgctgtctaggttggtcatacttagatgctatcaaatctttacagcctgggcacagagtgaattcaaagacatttacatcaagtgctgatatattggaacaactcctgccctctgggtctatcccacctgtagaatgaaggcattgatcaagcttgtctctgagattatctctaagtccttttacgtgataaccagtctatgactctttgaatgtaataaacctctctaacattgatagttctttatcttttgtgtcctacactccattaagaatatggcaaaagctttggattctctccattaaaaaatgccactgtgcacaaacacataaaatgtttcatgatcaagggaccaagaattttttgccctaagcaaagaaaagaagctgtggaaatgacatagaattcagaaagtatttcacatccaagaagtagcagaaatgatatggttcatttttctctaatgttgtgtaacccagaaagaaaatgagaagacattctggaagacatgtataaaacactttgaaaagttacataaaaacattgaccaaaatgagtttaaaatatttggatgtaatctaattatataatttaggagaccgtagtaaaaatggtgactcttggagctatacatggaagtgctgagttcaggcttctagaatgagagggacaatgggcaagactacagttgtctggctgtttttagaaaacatgtgctaatggactaaatatatcccctagctcctttgtacattattagaagctctatctgtgaagttggttatttgcaattttgttttctatatgttacactaacatttggttttaatacagatgaggccactctttcttctaacattgtctccttctgtgtgaagtgagtggattctcactttaaactgagattatagtggagaagtgatgtagtgttgactataagccattgaacataagttgcattttgtggctctagttaaattgctcaggatttttctgctgtgctaaagtcgatagaagaagaaagctgttttagaaaaagaatatgaagcatctcattttttaaaagatgtggaccctgttcgctttgtgattcagatgcttaaagacgtgtcataaggatgcttcagttttggaaatgcatagtttgaaatgagaaagaagactgtcatcagacagcgcttttcccaagagatttggagtcaaaacta

SEQ ID NO: 54869 - DNA, 944 bp, Bovine  19866880576129
  misc_feature (1)..(1): n is a, c, g, or t
naaaaaaaaaaaaaatatatatgtatgtatatgttaactcctttaaaattgaaaacaggaaaaaaaaggaatagaaatttaaagactatgtacaacatttgtttgtaattgccaagattattgttccaccattaaagggaagagggtttagtttaaacacatttttcacattaagttagtccatattttacccactcccctaaaaatgcctcaagtatttcatgaacttaaaagaaagcattattcatacatttaactgagaaactgattattacatagttgtacctagaaaatgaatgcagattaaaatacgtagtaattcttgattaatttcaagctttatctgaactctaagaagccacaattctaatgctgttattcgatgttccttttacacatttcctgggaattacatttataacagatttcagggcaaaaatggttttactaaaaaagaaaaaaaaaaaaaaaaagaaccaaaatgccagctaacagttccttcaggaagcatttcactgtgggtgttttcacagacatattttggctttgatcaaggaataaaaagcagatgaattaacaaacatatgacacaggtcagaagcaacgcgtgaggggaaaccacttagcattctcattctccacgcacgtgctcttttaagtacgaaggagaacgaactgttggatttggacagttagtgtcaggagaattttctttattgttcagaactcagtaaaaatcatgcatgttttatgtaccaaacacctgtatctcacgtcctgacaggttctaagcatatgaatctaactgtttattcaaaataaaattctcatttttttaagaagttcattaaaaaaggaaaactttgatttttgaaatcacatcattagcgctgggctcatgaaatctctaggccatttggaaaatgtatgtatcagttaacggg

SEQ ID NO: 54870 - DNA, 1033 bp, Bovine  19866880619557
  misc_feature (1)..(1): n is a, c, g, or t
nttcgtatcgattgaggtataaaaaacaacacaccaaaagttagagacaaaggtattataaactgtacgaaaacaatgaaaaatagcattccaaaatgatacacctatcactgttgatcttggaaaccaacttacagaaggcagggaagatacatgaaatttcaactgtttgacagaaaaaatatgacattgttcctctacaaagtagccttgatattaataatttggaaaatagattagcaaagataacacataatacaggactcctaattaaaagacgcttactctttggaaggaaagttatgaccaaactaggtagcatattcaaaagcagagacattattttgccaacaaaggttcgtctagtcaaggctatggtttttcctgtggtcatgtatggatgtgacagttggactgtgaagaaggctgagagccaaagaattgatgcttttgaactgtggtgttggagaagactcttgagagtcccttggactgcagtccattctgaaggagatcagccctgggatttctttggaaggaatgatgctaaagctgaaactctagtactttggccacctcaggcgaagagttgactcattggaaaagactctgatgctgggagggattgggggcaggaggagaaggggacgacagaggatgaaatggctggatggcatcactgactcgatggacgtgagtctgggtgaactccgggagttggtgatggatagggaggcctggtgtgctgcaattcatggggttgcaaagagtcagacacgactgagtgactgaactgaactgaatattggtactcaataaattttgatctgacggatcaaaaatagtgactcagtcacagaacaaaggagctacttatcaacattttctaaatgcatcatataaaatgattgcttcaacctcttcttggaaatatattttacttttgtagttcttcaaagatcggtgaatctgctttttacatgttgtttttcgaaagtctaagataccggcaatggtgctccactccagtact

SEQ ID NO: 54871 - DNA, 1202 bp, Bovine  19866880637123
  misc_feature (1)..(1): n is a, c, g, or t
ncaggctctcagttttccaatttgtctcaatctttgaaccctcaacttgctctgtcagacattattgcacataattgcctgcatctggccccttgttttctaatgctgccctgtgtagatgaaacctgcttcctttccctgaaatttgcttgctcctgcttctctgacatcattcctcttatccccaacctgcagaatactcttgatgtttttctccaccattttgaccatctctttcaaaaatcaaagaacttatctctttagaatctgatttgtgtgctctgaatcttttcagcttaaatttataaatataggaaacttgaatctaataggaacatgaacaccaagaagctgagataactgttctctcctaagaccaactttgtagtcctcattgtacctatttattttttaaatctcttaccttatggcaagtactagaagtgattcactgttctatcactagcacacccaagaatatgatgcttggtagatacttgacagggcttccctgatggctcagatggtaaagaatctacctgcaatgcaggagacctgggtttgatccctgggttgggaatatctcctggaggagggcatagcaactacttcagtattcttacctggagaatcccccatggacacaggaacctggtgagctacagtccacggggttgcaaaaagttggacacgactgagcacctaagcacagcatagatacttgacaagattttttaaattgtttaaattaatttttattggagtatagttgctttacaatgtctggtgtacagcaacatgagttagccatacgccccttcccatttggagtttcttcctattgaggtcagcacagtgcattaagtcgagtccctgtgctatacactatgttctcattagttgtctattttatacatagtagatgtttttaaataaaggactgtattaacaaatacttggggatgaacttagattacatctaaataaactctagagaaactctagaaatgagaaatgtaaatatctaataggtagagcaggatgtcatttgagctgcagagatgcactggaagaattaaatgacccctgcctaacatggtccagaaaggctctatgaccatcacaccactgtcttagttcattcatgctgctataacaaaataccatactggacaacttgtaaacaacagaaatttatttct

SEQ ID NO: 54872 - DNA, 1012 bp, Bovine  19866880657847
  misc_feature (1)..(1): n is a, c, g, or t
ncagagcactgttatttggatgctaaaatccaagcaagaaaattatgtgtataataataatcaaactgtagcccctagcctttactatttaactttgttcagaaaggtataattcaaaattttctaagtaatgctatttcttggagaaataagataaacctaatttcatttataggctaactaaagactgagggtccatttatcattttaaaaatgctagccagcagataagattagtttctgtcattcacagcactgtcaagatgactcaatatgattgcaaagtcgatttttatggccatatttgaacaaataataaatgttcccatacaggcttcagtttgagggtctcaagaatttgatacagaggataaacgataagcacacttctagcaggagattcattttataatctcatcctactcttttctaaagaagatctagaagaagccactaaaatcattaaagcctggataaaaggagtatagaaataaagcttaaaggaagtgagattattgtggctgaagaaaagacagcataaggataatctaataatagttattaaatataggaaagcttattgtataaaggataggtgaagctgctcaagtgagcaactcaagcaaaaatgggaatgaagaaatcacataaaatgaagaaaggaacgtgcccacataagtgtaagcagtagatactgaaagttataaaaaatactcctctgaaaagggatatcagggaacagcaacgaaacagcagcttggatggagtcaatagaattaattaaattctatctggatattcaccataatctactgagattccccacaaaatactgaattaaatggaaataataaactaaatagaaacataaaaatccactttagggaaaaatcttaggccactgagattatgtcagatatacaatttacatacaaagtggattttggaagagttacaaaaaatctgattgccttcttaagtcattaccaaaggcaactaaatatcaaaaaca

SEQ ID NO: 54873 - DNA, 939 bp, Bovine  19866880721784
  misc_feature (1)..(1): n is a, c, g, or t
nagctgtgcattagtaaataaaagcataggtttggaaattatgtttgcaaatttggaagtaaataaaaaggcaatttagcaattggttataaaaatgaagccaggcatggaaaacttattaatgttcttttaatagttttctgaggtaataagaactgtgatggggtaatcagttggagtttccttggtttttaatatgttttcttctcctgcacaccccagcaccatatgttcctaaaaaatttcccattagtggctcattgacaaatgggacagaaaccagtattctaaggctggagtttcaaagaaacaagaaatccaaccacaacatttagatggtatgtgatttaccactgattacataatgacaaaaagtggccatcaggaataaaattgcagctcctgtaagcaattgcattagtgagacaggtgctccataaatgacaacaagtaatggtaacagtaataacaaaaaatgccttatgtttatccaatgccttccttctaaaatactgaaaactaccgatggaaaatggctctctgctcctcccaggtttttggaggttgctggtactcttttttttttttaatctcaattatagagatatttatcaaagaatcataaagcaagatgggattctgagagattatctacagcaaatccaccacctctaaagagctgagtgcccatcgaaatgcctcctgagaattttctggcaaagagtccataaactttcagatccaaagactcataaactttactgagtgatgaactttttccagataaacaactgaaaattcagttatatccatgatgggatctagggaaagtttccttgcttatgaaactatatgataatttcctttcctatgtggaaaacttttaggtcacataaagggaaaaattccctattactaaactatcacaacctacacaga

SEQ ID NO: 54874 - DNA, 1232 bp, Bovine  19866880764587
  misc_feature (1)..(1): n is a, c, g, or t
naaataatcacataatacacttgaatagcaccactacatcaagaaaggggtctctgtgaatacagatgctttgcagcttgacagaaagtggtctgagtcgaaaaagaatttgaaaaccatagccacatgcaagcatttaggaccacctttggtggcaacttggtgttctggagttctttacaaacctctctcgaactgttatacttgttccttgaaactgctttaagtgttagacttgctaaaacataggggtggtaacgactgctctactttctcacaatctgttgggatattgattgaaatatttatgcagtactccgagttctcaggaaaaggggtgttagaaaatgcgacagtgatggcagggcatggaaaattatgtgaaaatataatctccagaaagataagtttgagacagtttgaattactagtcggagcctgtctggcagtcttctgtccttctgtctaaatcttttgtctcagttatcagttctgggtgatgtaagagggtggggtataaggaaagcgttataagattaaacctcttgctggcgtagcattgtccccgaagagtgtcttggctgctggcattggagtggcctatccttccagatggcaggttagccaggagagtctggggccaggagtctccagtcttcactccttgccctgactccatcctgtctgcttgctgagccccttcacagcttcctgtagacctggttatggtctcaccagtcacaagactgacactgtcatctgaaggtcatcataaccttccaaaatcagtcctcatgcaccttgaccatgctgtactggacactgtggactgcctgaaaagattaactcatcactcactctatctgtatttctttctagaagcaactacagattcaggctgcctggctggaacggcagctttctagttgtgtgatgttaaacagtttggtctcttagtatttggtttccccagctatcaaatgggcttccatttccccaactatcaaatgggcttcccaggcacagcgggtaaatgtattcacctgcaaatgcagaagacgaaggtttgatccctgggtggggaaaatcccctgtaggagtgagagagtcatttcctaggcaggttgatagggagtctcggggtccccaaggagagaggggtctggaattctcaaggaagaaaaaaggacaaactttttttctttctccacattccttaggattatatacca

SEQ ID NO: 54875 - DNA, 1491 bp, Bovine  19866880785737
  misc_feature (1)..(1): n is a, c, g, or t
ntgggagaagatcatgttaagatggaagcagggatcagaattatgctccccaaagccaaaaaaaggccaggaccaccagaagatggaagaagcaaggaagggtcctcctttagagcctttgaagggaatgtggcctctggcctctggaactaggagtccatcgatttctatttttttaaaccacccaagtctgtggtaatttgttttacttgccctgggaaatgaacatactagctttaatgatcataaatattgcatgatgtttctgctgctaacaaatgatcagtgggcaaatccaggaaaaagaggaaggaagtgaaacaataccatctcctgctcactctaaggtaataggaagcaggaaacacgagttactagctgggtgagggagcacagagaacaggagtgagtaaacagttagtgatgagaggagatgcaggctgaaatctacaaagaaacaacaggagtggtgaggcgtggtgagaagtcaaaaggctgcgatgttgagagataagctgtgggcaggtagcaggcatcagagtagtcaaggctgaagtccaggcatctgtgacatggaaaaggaaggaggcatgttttacaaccattattccatccaaaccctagaaatgatgtctgtgttcctaggacacatattttattattcttattttatagagcagggaataggtatggagaggtgagaaacttggtcctgatcacagaagtatccactgaaacatctgggatttaaatctatttgtatctgatcccaagtcttatataccaagcttgattcaaagtatccaacagatcctttgttacaaaactgactgaaagaaaggatcccttatttataacttttttgtacttcctctcagggcagtaattgattctatggagtagaaagatgcaggccagcgacaagtgatgctaatactgtctgtatatgttggaatcatctggacagctcataacacctggatgcccagacctcatccctgatctactgaaccatatctctgggatggaatcttacccctgatcaacagaaccaactccctgggtgtgttcagaaagcctttgggtgcttctaatgaaaattgttactgatacccacacacccccaggcagcagtggggagctcagaaggatgaggaagacagaagaatgtagggtttgcaggctgcctctatctcacttctcagaagggctctgacacacactggggcaatgaggaaaatgaaaatgtactttaaatgtttgaatattgtttcaactttttcacttgcacagtttatgggttttttcctcctgtgaatgtgggaatgtaagcctcggctttaggaaagctgtccttgtctcacattgctcaacatgagccaggaaacgtacactcagccctgtgtctggaaagaactttgcaacattcagcaatgtgctagactaggaagcagcttctgctgccgctgcaaatattgtttttacaaattt

SEQ ID NO: 54876 - DNA, 1640 bp, Bovine  19866880804283
  misc_feature (1)..(1): n is a, c, g, or t
ncctggggaaagagtaaaggcgtcagagtgccctgggcagtgttgagccagggtgactaggaggtaattaagaaacctcgtcgggaaagatacaggcagtcagggaagaaatgaatttcctcatagataacatgtcctccctccttggggactcataaaatagggtttctagtatatggaagttttttcctaataagaaatcgaatagtgcaccgggtgatctctgtcattcagcactggttctgtgaatgcgtgaataagggtttgtaaaaatcagtcctgcatgagagaatatgccttagtaggaagttaaaggagtgccttaaattcattaaaagtctgagagctgtaagtttaaccctgaaggcagaaatactgttgagattcaggtgttagagtcaaaccatcaaagttccattcccattgtagttactgagtgttgataagtctcagtttttttcatctgtaaaataggaataatgccattagcttagtggcattgtcagacaatgagccaagttagttagctaaatgacttagaattgtacttgaaacacagtaaagtctgggtatacggtatttgtagagattgttgtgacagaaactgaaaatggatagtttaaatgagttactcttttagatgttctgaacggccttagcatttgggggtgttattgataaagcacactgagatggtgtaaggagaacgtgtggataatctgcccataataggtgtagaatacctgtcctcatatctctgctgggctcagcaactctttccttttcctgtttctttgggctcattcatagtaaactcataggaaaaatggctcctatattgatgtatggaagaactgggagaacatttgctcacacttcaattattaagggctgatttttaagctttcagttcagttcagtcactcagtcgtgtccgactctttgccaccccatggactgcaacatgccaggcctcccccgtccaacaacaactcctggagtttactcaaacttatgtccattgagtcggtgatgccatccaaccgtctcatcctctgtcgtccccttctcctcctgccttcagtctttcccagaatcagggtctttcaaatgagtcagttcttcacatcaggtgcccaaagtattggagtttcagcttcaccatcagtcctttagtgacaaaagtaacatttggtgggacttccatactaatgcatggaatatgccattttcttttctgcctatgcaaagacaagagtgaaattggagactggaagaaatagaagagtatccaaagtatgtaactaaaatagaattatttttaaattctaaatacatatactgaataggtaacaatatgcaatacaaatgcaaaaaaaaaaaaaaaaaaaccccactctactaaactgatgaatgacctgttaaataatggtgcaaatggaatgacatgtgggagatccgtgtgttacaccagctctctaagtggttcccatgcacaccctgaagattgtaacctactagggtcgtggggtctcactgacttcccatttagcacaatattaagtaaagctgcagtcactttcctgttctttttactgtatgagctttctgcaactctgcttcctgagaaaccccctttg

SEQ ID NO: 54877 - DNA, 1029 bp, Bovine  19866880968901
  misc_feature (1)..(1): n is a, c, g, or t
nacaccaggaaatcaattcaggaagaggcaatcaaagaaaaatgatagagcttacatatatatataaacaaatcaaatagccaatctaatctgatgaaaggagatgaccaagaggtcaagtgtaaaaaagggagtttgagaaggtaagttcagagaaggcccgagtctacattttctaacatgccataggtcatgagcatcaaacagaagaccactgcacaaacctaccatctagcctcacactctctaaatgagggcctgcctctccactctgttctacgtaggctctttattcacaggaaacagaagtaaggaaatagactaggacattcatggaataaaaggccttaggtgagcagtaatgataaactgtataaaaagaggattcaggaacatcacgagtactattttagtattaggatctgacatggcactgagaaaaatgtaaagctctgatacagagagaagaaaaagtcaaatatcacagggaactagtaacctttggagaaagtcagtccgtttcactcaccaaggtttctccatagtcaagcacagagtagtacagtcatattcagtaattttttcccactaaatgaatttccattctatctgtttcatgaggtctttgaaattcttgtcactttttgtaaaaagcaatgcttgtgtgtgtttgagtgtgaaactgtttttttatggaaaactttctgcttatttgttactcaagatcctagtaatatttgaaaattcatgagctcacaaaggaatgcacattgaaaattttgacctccagctcttcagataacctcactaggtccagtacaatatagaattttatggctaaagcatttatcaactgcttgtagaattgggagattagtgcaagatccatctcattacttcaggctgccaaataatggtctgttttgctaattgacacctgaacatataattataactggcgaccctacatagcagagcaccttaggtcaaaaaatcagctagcttccagatcccaagggcaaactgagg

SEQ ID NO: 54878 - DNA, 859 bp, Bovine  19866881177981
  misc_feature (1)..(1): n is a, c, g, or t
ncctcagcatcccttgttgcttttttcatgttgcctatacctctgtaagtccctcttcattagtatttcttccgttaatcatctgaatggaattctgtttttcatttaggatcatgaatagatttccctacttagtcactattttcaggttttaattttttttctttcttcgcacaacagtcataggtgtttattttctggcttgttgatggtgggggacagggaggcctggcgtgctgccgtccatggggtcacaaagaattggacacggctgtgtgactgaacaacaacaacaggcttgttgatttcctatcttttctcactagaaattaagttccaaacacataggcaggaggaatgtgctcaggagtttgttggatgaatgtatatgtgggtgggtgggcagatagatggtcacagtgaataggttttgagtgtcttaactgcagagtcagagtgggaagatgagaaagagagagggacaaaaacttgtttacttttatgttatgtctgaccatatcattaatttcttctccattagaaagcctctcagtatgtatatccctcaagtatcatgctagatgctgtacagagcaactttaatacatttagtgtggtgaaaataaaagaaacattgcactacagacagaatctgggacctaaagatactggctcattagacatgacaattttcaacttgagtaacagagacacattcaaactcctaactggttgactgcagtctgggccatgtcagggccccatactgctggctccatggcgtctctgggccgtctaccaacgtgcttatcaagtcactcctaacctcatcaccagccatttgtacatgtcattacac

SEQ ID NO: 54879 - DNA, 1395 bp, Bovine  19866881215507
  misc_feature (1)..(1): n is a, c, g, or t
nctatgcttttatccatggcactgttaagccctgtaatattaaatattttcaagttagtaaaatagtgtcagcatctcaggcatctctcatgcttcatctgctctgaacagcaagtggcatcttgttgcagcttgctgtccagtcccagcatgcattctaaattccaggtgcttgttttgtgacagccatccactccagcaggttgttctcctgccatcctaagcatcctctgggtccttgactcttctctcccacaaaaccttgccagaccccacccagtggcaccaatttgtttctcagagacctcatttcacttgtctcatggatttttttttaggtgagttaaatctacacccattgtttgtgtagtccattcccctacccctgctgttcttaaaggtaaatggcaccccagctactgctaggtttcaagcacgcgtcccacaggtagcaagacttcctacatcaatcttcagtgccacctggctccctgatacgctttcttttttagacgttgctctgttgtcaggagcttccctcccactcctcccaccacctctctggaaaagcttttctgaatatgacaaccatctgaagatgaattatctgctcgaaaagttaatttctgtttctcagcagggagccatgggttcccgctgggtttgaaagtgctgttgtttggttaatggatgagtgtttcttggatccggaacccacactggaactgcagcagagtctggcttcccatttactttaatttcctacttgcagctggcgttggagacctaaatgggcttattcacaggatagtggcttccggttgttagcaccggaaggaagtcaaactgctgcttccctgccatcttcactcacttgggaggatttgattggctttttttttttttttttttttgacagtgaagccacaaaatccttccagaggtagaacaaatggcttaacctaggaaattcatcatggagttttaagagttgaaaaagaatgggggttttgtatgttgtctttggtgtacaggattatgaaaataaaataagatgctaggtaaaaattgctttgagcacttataataatgttgtcactcttttgtatgctaaagctttttaaaaattcaagaaattttgtaacaaattgttgtattatcgtctagaaagcagagccagaaaccaactagaaaattccttagaacacatctgtaatgcttccatcaggttatgaaatcacctctttccataggtcacacagggcaaatattggcaatttcatatggtctgccctatacagaattctggctttttagacagaattctgaaggccaacaacattatagatgcatttttcccttgacaaaaatccaaagcctgtaggccaatgccca

SEQ ID NO: 54880 - DNA, 1015 bp, Bovine  19866881281569
  misc_feature (1)..(1): n is a, c, g, or t
ngctgttcgtgtgtgcttctgagaaagaagagctgactattggatctcctaattcctcttgcttcgcagcggcatctgttcttatcacagtaacaccaggctctcctggctcagtcaatacttgtatattaacaagagacgatcgatagaaaaattaaaaaggaaagtcaaggtaattaggctaaagctgctgcttatgagttttcaataattactttagcttcctcttgttttcccatctccagaaaaatagggcctgattgaaggactgggtcgtgtttgactgaggacatgtcaaaattatacaaagccaggcaggaaataaaattaagccgtatttgtatgagagcagtaaaaggggctttgcctgatggcacgggaagaataggcgttgatttaaatgcacccatgagcagctgtgccattgtggatacctgcttcatgtcatcagtttttgcaccactggcagaagcccactcagaagtactgtgacatgtcatgtatcaaagctccagaagaagagagcagatgaatttctcccagacacaggatctttggggaaattagatgccatcctttacaaaaccacgaaataactcaaaaccctatggctgccatactttggccactacttcgtatgcacgttattgacagggttcacacaccaggctgttgtgagcaagctgtccgcgttaggggaatgagcctaatctttgatttttgagctactttgtcatttttgtgccctgatgctgggagtcctaaataaatcagaaccaccctttttctaattgctccgtgtgagcttgttacatctgcctctttgtgcatgctcagtcgtgtctgactcttggcaatcccacggactgtagcccgccaggctcctctgtccatgcaattttgcagacaagaataatggaatgagttgccttttccttttccagaggatcttcccagcccagggatcgaacccctgtctcttgagtctcctgcattggcaggtgatactttacca

SEQ ID NO: 54881 - DNA, 826 bp, Bovine  19866881323621
  misc_feature (1)..(1): n is a, c, g, or t
nctggaattgtttataggaataagcagttgtcctattttgtcataaacacagattttttttttttctcactacagatacagagagaacatttccttttaactggaaaaaaaaaattccctttcaaagcaagtttccatcattcaaaaagatatctggagctgaaatgccctttacctgctttatttacatgagaaacagggcagaaagagacttgaagctctccaccatctaatttctctaagctacagccattgattctttgtaagtttatttattcaaaacaacagcacaaacaattcttttttcttgggtcagcagcttactgaattaacatcaatcatcaaaggagacggggctgaaaggaagatggaagcccattttctcagagattgatttttttttttaagccaaaacacacaggcataagcaggaggctatttaccattgaaaaggttcaacttgaaagtcacagctgaaaactgggcactcacaggactgtccaggttccttgaaatccaaaagaatttttactcatgtatttctttatgatggcctgtgaagtttgattacttcaccatctaaagcccacctgaacaattcaaaacacggggaggggaggttctgaaggagagggaagtggatcaatgctggtgtttattataatgatttcctaatggctttctctactctctttacttactttgatgtatttaaagtgggaaaagttcatcaaagacctctttgattagaagcttaaatgtatttaaataactatctttggcatgttttagagggattgctccataggtccggcaaaaaattctt

SEQ ID NO: 54882 - DNA, 619 bp, Bovine  19866881355012
  misc_feature (1)..(1): n is a, c, g, or t
natataactgggtcactttgttgtagcacagaagctgacacaacattgtaaagcaattatattccaatcaaaaataaaatataggtattacatatgtacagatttttggagatcccctggttgatggtaatttgaaaataaaacctttggtaaaatagttataaacggcaacattagaatttaggaagtaagatccatgctttagacattcaaagacaataaggatagattgcatacactctttgttttctggtatatcctgcgctactgcttgaggattgggaggctgatctgaataacgttcttcaaaaatcccgtaattagatactctgcatctttcattatgtagatccttctctttgattctcattgtctctctttccatatacacagatgtacctgcgttttgtgtttgccttctcatcgtttacaagaagaggaaatccccagtgtgaaagcacttcacaagattagataatacccttttgacggggttccatctgtgttccattttaactttgaagtgaagtgttttctttcctaatgagattcctttcactgttaaaaattcaatgttttcttacttccaaagagctgattaggagcattgttggaaaaa

SEQ ID NO: 54883 - DNA, 906 bp, Bovine  19866881458789
  misc_feature (1)..(1): n is a, c, g, or t
ntttcctctctgcacagactatgagtttggttcacctcttagatgcctagggacaatcttcctctgtgtccttcctgtctaagaaagggcgttttgcccatttggtgtgattgcttctcattcttgaccagagtgtggagaagaggctggtgagacggccctaatttttctctttctttctcccctcatgtctcatgtcttctgcacagtgggaccctcccagctccaaaagcagatttagaaacatgttgaatgggtcccctcgagtcagagatgacaccatcaacctgactgtgtcattttagacggatgtgtatgctttagggaataaatgatttgtatccgaaaaaaatcatttggctgaaggtgatggaagctgctccatccgtgctgctcagagtggtttcagattcgaggggcaccaaaggcaaataagggactagaaaaaaagaaaaatggggtaatttagagccttctgttactttgtttaggagcaggttaactactaaaaatctcctccaaataattggtcgattttgaaaatacaagaagtatttctgtcagagaacgcttcttctaagacccatgggaaagaataaatagggattctgatgacaggtgtatttatttgttatcagattggtaacagtggttgtctttcagagtcagaccaagggaaccgggatgcccctgggtggagggtttctctgtgagttagatgagatcagaggggatcactctagcatgatgtgggacctggagatcttaaaactataaccatagttaactatctgctctttatttcttcatttctgctcccccccgcccccccgcccaccttctacgcaatctcttcttaaagatttattgtatcttatttgggtcaggcctaaaaacatatatata

SEQ ID NO: 54884 - DNA, 831 bp, Bovine  19866881815449
  misc_feature (1)..(1): n is a, c, g, or t
ncactactttggtcattttatttattgtttcattaaaattctgggtgaccatttaatgttttaaatgagccaagacccttaaaaatgcgcagattgagagcatatgggggtactcttccatattatttagttttctttaagcctaaaattgccctaaaatataaagtaagatgattaattttttaaaaagtgctcaaaaaaagggattagaaaatatacataagtttgacagttattggagaagaaagatcccagatgtgcaagttgatttttttaaaaatccctcttcatttatacatccaagcatcaacagatgtatgatttagcatttgccctgcacctctggccctagggactgtggagtttttgtatatagattccctgctgcagtgaactctgtcattgttatgaacagctgggaatggagtatagctcattaagacaggagatgttatccaagcctcctctggcatcctgaagagtagtgaatatgttttgcttacccacatctaaagtatccatttcgttaccacctagtgttctctttgcttttattgaaaaactctactggccccattgcctctttgaatgatgtgcacagttgctaccagctgttcccttgttatctcttctccctcttctttggctttttattatgtttatggtgaacgttgtggcttttatttcaaaaaataaggccctcgtgtactttgtacatatcacttgtttatgcagtttgaagaatcttaagaacagatttccacaaataaatccctaatgttcagatatccttgctcccttgcggatgaaaagcaactttgctgtggaaag

SEQ ID NO: 54885 - DNA, 1585 bp, Bovine  19866880276003
  misc_feature (1)..(1): n is a, c, g, or t
nattagaggaacatttcatgcaaagatgggctcaataaaggacagaaatggtatggacctaacagaagcagaagatattaagaagagatggcaagaatacacagaagaactgtacaaaaaagatcttcacgacccagataatcacgatggtgtgatcactgacctagagccagacatcctggaatgtgaagtcaagtgggccttggaaagcatcactacaaacaaaactagtggaggtgatggaattccagttgagctattccaaatcctgaaagatgatgctgtgaaagtgctgcactcaatatgccagcaaatttggaaaactcagcagtggccacaggactggaaaaggtcagttttcattccaatcccaaagaaaggcaacgccaaagagtgcttaaactactgcacaattgcactcatctcacatgctagtaaagtaatgctcaaatttaacttagtatatattattaaatatttgaaaaaatctttcactattccaagcagtaacctatttgatggtctaaaacaggtgtcattcctcttttacatgttagctctcagatattaaaaattagcgattacctccccactgcctcccaacctccttctcaagctgtccttccacaggctaaacacacctagctccatttagtgttttctcatcatttccagttttctcagcctcatgattttctaactctcaagctaagtcaagtaattgaaatatgttctaagtattacattactcttactttattctgccctagatatttatcctctattttgttgcatatatcacatttcactgaagattacaagaggctacacttattacgaggagagtaaaaattctaaagcacaagtcactctttgggataatatatgcacttccatttttgcttcagatcttcatatcttacacaatgaattctaaacagcaaatgtaatactatttatactttaaaaattagactggcagattttatctccaaagcattaaatactaaagaagtagccagacctgagaacctagttgtcatcactttattactttgacagtacaaaaatgtcatgagattctttaagttaatttttattggagtatagttgctttataatatttagtttctactgtacagcaaagtgaaaggacagaatatacatatacgtatattccctcttttttgatttccttcccatttaggaaggaaccatagaaacaactgagtagaattccttgtgctatacaataggctctcattagttatctattttatacatagtatcaacagtatcaatcccaatctcccaattcatttctcctcagatgtcatgagattcttaccccaccaactgcctcttttagcataataaattattttacataatttgaggaatgaaaacacgaaatcatctaacagtagttgatatctagactatatatactattctcacatttttactcctctttcctgtttttgtctatacaaaaattttaaaatgccaatgtggatgtgtgcatactaagttgcttcggccatgtctgactctttccgaccctatgggctgtagcccacaaaat

SEQ ID NO: 54886 - DNA, 1629 bp, Bovine  19866880340052
  misc_feature (1)..(1): n is a, c, g, or t
naactgcaagctataggagcacaagggatagaaaaagatgttttaaaaagaccacaaagatgtaatcagataaattgaaaatttaggaaatctacaagatctagcttcttcaatatatgttggcaaaggaacagaaacttgttaaagagtacaagaaacttaaaagattcacgtaaatgcaatgttacagaccttgtttggaccttgacttgcacaaatcagaagagaacttcagaattggggcaatttgaacaaaaaattggctataagatcatatttaggactaattttttattttgttaggtgtgataatggtaatgtgattttgctatagtaagatattttttaaaaatctgtaagactgaaagcatgacatatattcagaaattcaattagtagactgatacggagcaaacagtttgatttatagctagttccttttcaagaaaaaaatgtcatctttctggtagatcttggaatttcaaatcactaaaaacacactgtcacccaactttctactttcaaaggaacataccacctcagctgggtaaatgtcagacaaccaagttttgttactgcttcaggatgtcttttcccatttaaaatgtaaacatattcaccacatacaatactctaaaatgtcacaaatacataattatactatgtctctataaatactgtattagaaaacttactaaattgaagaactgaaggacaagcacgtgatttcatgatcttcttgaagcactgaactgattttcttccctgtagctttgcttatagatgttttcagtttcttagctaatttttttggtgtattagttatagaagatgcttctgtacagcaactatatacttccaccctttatctgaaagtctggccctgcttcattactaaaaacaaggacaatcataatgttagaaatttaacttagaagaaaataaaattacaacaccctctgatgtttttgtaacttctcaaagcagcatttggaacaggtttatgttaatatatattaataagatagaatctccctgagtttatttagtatctaaatgacttgagagggtcactgcaacttctagagctaccagcttctgaagtagggcgattttaactcaatgtaaacaatatattcaggcaaattacttaaagaaaaagaataaaatgccctggtcgttttgttgccaatgctattgttcctttttgttcccttaatataattattttaaggcatttacattatatgtgtgatttcctgaaatgaccattcctcaaaaggaaaagatgtgaaaacaaaaaggaaagaaaattaaacaaaaggcttcttctgctgaaaccttgagttttcgttatctttttcataaagtgcttacagtccactcaacaatgtgcccctccttcctgctccacctttgtacctaataactctaacatttcactacttggttatacaggagaaaacaaacgaatataaagagatatacttcaccaaacattagatgtatctgtaaaaatgcacaatgctacaacaaataaactttgtgcattagcacccagcataaatataaacagtaccaatcttaaaaaagagagagagacttcaaggcatgaactccttgaggtgg

SEQ ID NO: 54887 - DNA, 1480 bp, Bovine  19866880392902
  misc_feature (1)..(1): n is a, c, g, or t
ntaataaatgtgtgctgaatccctttgttcaaagaggctagacagcagtcacctaggaacttcagccaaagagattttggcaccatttcatcttgaaaccctcttccctgcccttcttgccacagtttccctttcttctccttcagtttccctttctggctccttcttctttgctcgctacttttggttgacgagttgaaggaaatatccttggttttctgtcctcacaggacatagctatcccctgccatgattttaactaccaccaacatgcaaacgactttcgtatttttctggtcatctccgacctgtcttttgagcctcaagcccacataactgactgcacgatgggcatgtccacttggatatcccacaggcatctcaaatccaacacgcatacacctgaattcattctctctcacaccccctgctcgccacatcatctgtagtcactcaaactagaactctgggcgtcatcacaagtttctcattttccttcaacttccacttccttccctgttacatgtccaccaagttttggaaattatatctttcaaaacctctaatccacacacccactaccttaagttgcaattctcacatttttcttgaattctttttacagcctctcaatgagttttcctgcctcctgtcttgccatcttcagacccattctcctcacaaacacccaagtgatctttccaaaatgaaactctggtaagtccctatcttccttcaagcctagtgatcaacttcccattgcttatacggtggaataaaaacccattttcagagcctaccaggggttctttgatttgactactatattttattactactattctccctccctctctccaacttatattagaacttagaacttctagaaattctcccaaagaccacgctgttccatacatttccatatatttttttaaatgcaaaagaatttttttcttttgtctttgcatttcattctcacctagataagtgtctatttattaacaaagggctatctctttagccttctctaactttccctctccttaggaaattgactactttctctgatctgccacaggatatctctgtcaggtatctaccacacttatttacatgtctgtctctctgctagactgaaaaaagttcagggtgaggaatgacatcttattagtctttactctcactcctgtgcgcagggcctgccgtaaaacaggcactgattccgtgtttgattagtaagagaagacagcacctcatcatccttcatatcaaccggaattgaaaatccaagaagccacttttgagagcgtcagtcagtttcagtctcagttgctcagtctgagcagcttcgagcagcttcctgagccctccaccaatacagaaagtatccaacctgccaggaggtgtgcgctgcattcactgatcctgctgattggatggccttctcctcccttcgccccagtctcacaccccacaa

SEQ ID NO: 54888 - DNA, 1670 bp, Bovine  19866880570322
  misc_feature (1)..(1): n is a, c, g, or t
ngttacccaaattttgcctgtttcaaaagcgtaaatcacaaaaattttataacaaaagcttattataggtgctacttaataaattaatttcttgagtaatacttggtgaggtttaagtgtaagattttatattcatagtctaagctatgtttaagagaaaatattactatgttagtatatttaataataaataaatattggttttgatggtcagaatccattatggaatacagaggtttatgttatgctaagaaatgaaatttaccaaaattattccttgtcatttctttttcccctccattatagatattcgtataccactaatgtggaaagactctgatcacttcagcaataaagaacgtatgtatgattttgattgtaattgatgtattttctttagtatgtagtaaatttgagataattgggagaaaaagctgcatccacactgaaataaatgtcatttgacggaataagcacaatcttattgataggaacctgtgcaaggatgccaacaggtaatagagaaggaaattgtgaaacaaaaggagatgtttgagtgaagtagtaaaggccacattgtttgaccagaaatattggagattttttttgccttgttctcttccttcagattatttaatgggatataagagaaaaagatttttatcttgatctaatttttcttccccttcagcgttatatagctttatatagtcttaacaaatccatgcatggcttgggtcgtggaaattaacctcaaatgatttgtagctgttagaggcaatgcagaaaagttatgacaatcctttatctttcttgtctattatgatagctttgttcctcatactttaagcctgaatcatattgagcataattagttttatatgaaaaatacaaaatcaagttagtatatttgttattcatttaagaaatatattagtttataaaggaatacatgtgggaattaagtgtatctttctgattactatagagaattaagtttatctgaagagctccattttctcagtaatgaggatttagtcttttaatcacctaatacttaaaaaatatgtatattaaattagaaagtccagcagctatggtttttgtgttcacatctctactttttattgtttttgtagtttcccccctctctatttggtggaaaatgttttgttgttaatgtgtctgctcctaacctcttaaaatagaaaacttatttttattaagtatatttggaagccaaaatgacaggggtaatagtatatatgtagtgctaaatttgctattaattaaagcttaaggagtttcctaggaatacaatttatgagtttggtggttactttagactgctgagaggcctatatttttaactttattttttgatactccgtagtttagttgtatttgagttgggcaagcaattaatatatactgacaaaacagtctcaataaaaagttaaaggactacagtgtacaatgtatgaaaataagaatctattagcaaatatttaggctattttttcaagtagattttaacataatataggcatgactcatcacatgagtcatcgttttaatggttgtttttcttctctaggatcacagcactatgccattttttgtttattcaaactgggagcctgaagtttttgatactgagatggtgattg

SEQ ID NO: 54889 - DNA, 1042 bp, Bovine  19866880639213
  misc_feature (1)..(1): n is a, c, g, or t
nttccctcactatacctgtggttcctaataaatatgtcaggacacactgacataccatgactctttaataggagtgccaccaaatttccattgttctgtaaaatttatttttgcttcaactgaagatatgtattatgttatgtgataggttagatgaaacactgtcagaagttcttgcaataaggttaaggtacagtttgcaaaaataagaggttaaaggaatatcattatgtcaaactggtgacagtttagatatgtactagacagttcagacatggcagtcattagtcacatgtggttactgagctcttgacacgtggctagtccaaactgagatgtgctgtaagtgaacaatacttatcaaattttaaaggcttagtgaaaaaaaagaaaatatctcatttaatattttttatgttgattacatgttgaaatgttaatattttggatagatcatattaaacacaatatgttgccttaaaatgtggtactagaaaaattttaattcctatgtgactcctattatatctctcttggacagtgctggtctggagtcaaatgtttattgaaacatgaaaaacctgtgttagtaactatataaacaaacatggtcaggtcaataaagttctcccacagttgcatggttctacctcatgcgaagagttgactcattggaaaacaccctgatgctgggagggattgggggcaggaggagaaggggacgacagaggatgagatggttggatggcatcaccgactcaatgcacatgagtttgggtgaactccgggagttggtgatggacagggaggcctggtgtgctgcgattcatgggtttgcaaagagtcagacacgactgagtgactgaactgaactgaactgaaaggatgcttgaatagaaatattgttatattgtagtcatgattatcttaaaagcattcacgactcatattgtgtccttgggttggaataattaatactgccaaaatgaccacatgattcaaggctatctacagattcagtgcaatccctatcaaaatacca

SEQ ID NO: 54890 - DNA, 1030 bp, Bovine  19866880644013
  misc_feature (1)..(1): n is a, c, g, or t
ncaatgttcaaaggacaaaagaaccacttaaatgggcttcccttagccaagctgaacaccataaaatagataaataatcatgttgcaactgtctaggaaaaagtactgttcttaatgattcaaaaaagggaaagttaatataaagtgtatgaaagcataattgtaatgcaaggaagattaatataataggtcatatttcatttcttattgattttgtaaattaagggaatataattataagtgaacattttgttttcttctctgaaaaaaatgtatagttaagtcccctctattttctatattagcaggaaagaataaataatgaaaattgagggtaattccaaggaaagtaggtgcttttaagcaaaaggagaccaatcagaactggccatacagagccccacgtccatcagcgccagtgcacacacagcaaccaagtggaagggggcgtgccatcacagcgcgttacaaagagatgacttggccgcctgggctagagaagagcgtccaccacacagactcagtccctgccctctgtggagacgactgtcctgaccagtgctccccagacttttcattttgtgatgcgtgtcgagagtgctagcatttatctaacggcacattaactcgtggcacaccaaaggctgtgtttggtgtcccctctctgccctccccctcccctccctcctgaacactgaggctcccagggactcaggtgacaggggatcgctgtcccagcacctctgtgattcaggtgtagcaatagggattggcacagtgtactggttacaaagttctgctctagatgacccgcagaagtataataaaataccaataaggcatgcattaaataaaataccagtaaggtttatattagctttcagtaatgctaatagaccgaatcagtatacaaaatggcaagacaatgtgttaggtactaccagccgtgccaaattaaaacggtgttttcagaaaaacactaggtttgaaaaaaattaaatcggataaaggcataaaattaaaactccaa

SEQ ID NO: 54891 - DNA, 3110 bp, Bovine  19866880656839
  misc_feature (1)..(1): n is a, c, g, or t
nccatccttacctcatgcaaccttaaaaagctaattgtataaaactaattatataaaagagagagatgagaagactcagagtagaagggagggaatgttgcactctcctcgcaagcccaccaagcttatgccagatccctggcatggagccatctaggaaatgccccaagttcttcaattgcacaagtgggagtcacatttcctcccagtgagttcactggccctgagggcaccatggcaggatggaatcttgcatctagaaggagctggccttcctgtgacacgcccagttaagccaccagctgtgaacaattatccagaaggccaatcaggtgcaggcagctgggtagtgtgggagctggactggaatcttccagaaagctagagactcttggctgcctaaaacttcaattcaatttgtatttatggagccccttttaaaactcagatggatcttattgaagctcctgcatctgagagatgttaggataatatatggaagtggccaagatcagggatggtcctctgagaagctgtgcagaggcacattgaagaaccttcagtctacctgtctcacacctattttttgtaggtagtgggtggaaagagtcagagagactctatgtcctacagaccagttgtctattgtgttttctctgcactcaagagaaaatttttttcttaagaaaggacttcaaattcctttgccttgatgagtcactgactggtgacatactttaattattttaatgcaaatatctctagggagatatagccttgattttttcagtagttttcaaactatgttcctcagaaccatttaagttccacagagtttccacaaagcctgacttaaaaggaaaagtatgccacaaattggcttctatatagtattatcttccatgtattacaaaaatgcttgctttttaaaattctaagctaaagaattgaaggcttaatttgggatatcagccaaaattggatagatattttggagtgatgagaaacattctcaaagacctgaaattcattcttctgttactcactcagtaaggccccagctaagatcacagttcaggttagatcaagaaaaagacattgttctgacacctaatgtcaaagaagccattaaaatcaactaagatcttgtgctaggaagtctgaatacagttttttctagttcgtcctctaccaaagctctggagaaaagccaggatgcagaagtctaatagttaaggacataaaatcagatgtcaaactatgataagagctggatctgaataatttctataattgaatcctcattgttctaggttatgaatgctgtctcttagcctgatctggatttcaggaagcagagaaataccatacactgatttctgctgttagggcatttgttgactggaacccattcatctttcttgttctatctttaagatattagttgacaatgtccatcattcattattgaaaagggaagatagttgtctattaaaatccaactttccatttgtaattacttttgtcaccaggaagaatatgggaagtgaaaaccccaccatcttgttattaagtttattctctgctcacttatcatgctaggtgagagactgagagtggagcaagactcagtccttgcacccaagcagcttacagtctaacagaagagaaagaacctaatgtcattctaaaaaaactgcaagggggtacataaggtggtaagagctaattaatgatcgaaagcctggcatagtttttttaagatgaagcagccgagaaaaagggaccatattcagaaaaagaacattaagcaaaacaaatgaaaagagactcacagcttataaatattctggtgaaatttcagaatacaaggataaaacaaagatctccaaatttttcggagcaaaaatataaaagcaactagaaagtccaggaaaaactaaatgctactaatatataaaaaagtaagtgtagcaaaatcttgtgtcactgaatgatgaaagttttctccttcaggtaggtgaaattttatctttttctttataagtccagtcacaagcttggaaccatggtaaatgatttttatataatcatactattgttaggatattttattgctgtggcagtcagaatgagcgaggttatactgcaagtggcctcaagttgcagatgcttccaacaataaagaaataaaattatttcttgcttacattaaatgttcatcatagttcaggtgaggttcagatgtatgtcaaacattattaatatcatagcagagagaaaagagacatgtgatccacatctcatgacactatgcttaagaatgacagtcatcattttcacccacatttacttgcccaaagccactcttgagttcaatataaggggtctgtatcatcttcccacatggaaaagcaccacaggaatggaaacaaaaatatttggagaatccaaactctcacaggccacctttctggtattccactatacagaacagaattctccttttcccatatgttgaacacactcaccccttctctcaaagaggcaactagaagtcccaaacagtaacttggtcttcacctttacttccaaggcaaaggctggtatctgcagatgatatgagatagtctgcctcgggtctggatatagctccttttgacccaaagctgcaggaataaaaggggaacctatctgcccctcacatacccagtatgcaatggtggagcaaggacagggaatccataataaacactcctatttggaaaggtgaagaatgggagacacagatgtcaccagtttctacatattctacagttcccttggacaggtgttatctgggagaaagatgtatttcttgattaggccttgaatccactccctaggaatagttcctagacattttcttccttagcccctggacttcattttgggggcagactgtcatttccactattctcttcagctacatctaaagaaataattgtagaacatgatatcctggaagctgaaaacttttctcccccttctttcagctcaagcaggaaggatgagggaacagcaaggggttgttgaaagtcttgaacagtatctttcaatctagattagtc

SEQ ID NO: 54892 - DNA, 1749 bp, Bovine  19866880666951
  misc_feature (1)..(1): n is a, c, g, or t
nctacaactgaattccatctccatggcagcaggcagcctctgacgatgtgcaactgtcacaagtgccgaagaacagctttggagatataattctttgctcatcttaaaagctgcatttacttttagtgaagaggtttattatatctcccccactgctattgaccatcacattggagaggggagttgttttcctttatttccctgaatcgagcaactcattggtttcattttggctgggagccaaaacccttgcaagggcaaagacaaacaggaagggggaggggtggaatgggacagaaggtctggcccgtggtggagtcacatgaacttgtacatcaaaagagcagtcctagctttaaaagactgtggcactattcatgaacccggtaactgcccaagaaggaacacaactgcttgttgtcaccaaagataaaaagctgcagctggttccccccacccccaccccaaatcaacttagacccccactgtaaggaaggtggagactttgactccagtcggtctcattaactggtaataaatggcagacacacaaaacaagacagacaaaaggaagttgacagagagggaccctttggagaatgctcttggacctgtcattctcttaattttacaccatttgcttggcaatgagatgccctttccctctgctgctgctaagtcgcttcagtcgtgtctgactctgtgcgaccccatagacggcagcccaccaggctcccccgtccctgggattctccaggcaagaccactggagtgggttgccatttccttctccaatgcgtgaaagtgaagtcgcttggtcgtgtccgactcttagcgatctcatggactgcagcctaccaggttcctccgtccatgggatttttccaggcaagagtactggagtggggtgccattgccttctccaccctttccctctaccttaatggaaatgaatttaatcagataacactagtcctcgaaaagactctagagtctctactctagcaattccccaagtgtgtctatcccctggaatcctaatccatatatgtcaataggtatcgtgtggggacacaatagtcagacatgactgagcaactaagcacaacacagcacatcacgtggggaataaagagacttggcagcttggctctgtgctgttatgttcactctttgtgaccccatgaactacagtccaacaggctcctccatccatggagagggtctttaatcaaaatatcatatcatgtataatatcatatgtgagacgaatcaccagtccaggttcgatgcatgatacaggatgcttggggctggtgcactgggatgacccagagggatggtatggggagggaggtgggaggacagttcaggatggggaacacctgtatacccatgggggattcatgttgatgtatggcaaaacgaatacaatattgtaaagtaattaatctccaattaaaataaataagtttatatttttaaaaaatgttgaaaaatactacatttaaacaatattgagcaagttttatttaccgcaagactccccagaccttgtaacattcctttagagcaaataggagacattatacccatttcccaagcttgaatcacccaattcttcttgattaactcatgaattataagattaacccactgtcagaagcagaaccagaagccaatgacttggcctctccagctctttttatttgcctagaaaaatacagagcatcaaaaaaaaaaaaaaaa

SEQ ID NO: 54893 - DNA, 2121 bp, Bovine  19866880671217
  misc_feature (1)..(1): n is a, c, g, or t
ntttgaaacagtgtatgacaagcatgtccttgggcagtttgttagtatttccaaaagaacacaaatccttcaggctaatatttggttaaagaaagaaagtagaatttaggtctatttgatacaaaacacagtgttcctcctactacaaacctcacccccatcttctttctcatttttgttgcataaagatcaattcctgagtacatgtccatgaatattttaaatttctatcgagatttttaaatcaatattttatatataaaattaaagacaagaaataataggctaggtcagaagcaacaagcagagacagatgggagcagagaaaaactctcctgtaataatctgagcatagcaactctggttagctcactgcattcacgcatttgtgaagcaggagcagaaagtacaagtactttggctattattacacatatagatcacttcgattattttaagtgatgttgcttaatacaatggacagcagctttttaaaacaggcagagctcttttccaagtattgacgtcagcagggccttgtaattgttcctctcagtggctcaactgccactccagtcacagatgtcccctgcacgacagggactgctgctctccacactgcagcacagacacatggaagtcaccctctacttggggttggtgggggtttggtagtgacctctgcctctagcttattagttgtgcgcatcatttccagtaggaggtgtaggatggttgtgggacgaggctcagggtgtgcttaggtagggaatcttttatctcttttatcatttaggtgtaagaaattcagtgctagaaagagacagattggaagccctctctgctgctgctgctaagtcgcttcagtcatgtgcgacctgtgcgaccccatagatccacctcaattcagcactggtactgcccctatccatagtcagagggctgtcttcctaaatagtttggtttttattaacaggtaagaaccaaacaagcccttttccccctcctccaattcattttcccacaagcactaacatgctgctagaaatattaaggttattaaatctggatcaatattttgaacagatcttttggttctttagcaaagagcaagacctaaaggggagggacacggggaagataaattttgataacgactctaaaggagagatagaaaaagggattagaagcagcaaagagtcttgagccagggatagaggtgggattgggtcgggagttcagggcagagataagggaacacagagaaaaatgtagaccagaaataaagatgaagttactaaaaacaatttttcctatctgtcagaagaggtttacctggtccttctaaagttcagtaataagcaaatgactcagtaattagttattctctgtgaacaacccccaatatcacacttcgagtaatgtctgttgaacagcaggaaatcctaaagatgttgggtttcagtgataaagcgaaatgtatcaacactttcaagttgcttgtcttaattttgcctttctttgctccagcaagacttggaaaactataaaactctgtgcccccgcccccggtcatgttcccatgtccataacaatgcttccggaaagaccaaacttgagtcgtgtcccggatgtgaccaagactggagtattatctagtatctgtataaaattctcattttctaagagattgcttattaaaatagctcttgaaactccagaaagtctgattggctttcccgctgcatttgaagacctttgtgcactgactgagatctgtacatgctccgcctttgtgataaatggccatgccctagggtctgggtaagggggaggatgactgtacacacagaacagaaaaaacagaaatgacatcttcatttcctgcaaaaatctttttgtataaactgtgtgaactttactgagtttaaataagtactttcgaagtctgagatgacctggatttctctctgcactgtctagagtaacttccagaaatgtcagtttctcaggtggtggacaagagccaccagctacctcaagaaaaaggagaaggagaattcctcttctacttcatagaagggtctaatatggatgcagataatgaaccatgtaataaag

SEQ ID NO: 54894 - DNA, 942 bp, Bovine  19866880677518
  misc_feature (1)..(1): n is a, c, g, or t
nctttactttagtagtagattcaagtatgtgatcccttaagtaatgaacacagcccaagaaaatatattaaatcaatactctcatttttgtaactgtcccatatcttatatgtcagtatatacatgtaaagatagtcttgtcatcatccattagttacttttctttctaataaattaacaaacccatatattctttgaccttatttaatacttttttgggttatttttttctgagcgttgccttttaattattggagagcatgtaaaaatgttaaagagtaaaatcacagtcataatctattgagggcatttacatcagatactaatctttaaatgccatacatgcattaagttattaaaactacattttaaattatgacactgctgctgccaagtcgcttcagtcgtgtccagctctgtgtgacaccatagacagcagcccaccaggctccaccgttcctgggattctccaggcaagaacactggcatgggttgccatttccttttccagtgcgtgaaagtgaagtcgctcagtcgtgtctgacgcttcgcaaccccatggtctgcagcctaccaggctcctctgtccatgggatcctccaggcaagagtactggagtgggaaattatgacactattctataattattatcctctacttttaaccattttgcttttctttctcagctgtcaccccaaagcttatagctcagagaaagtccattttttccctcccttggaataaaaagaattccaatatattaatactttttttacatcctaagttaacttgaataggccttcatgtaaatattagtcttttatgttaagattgaaaacttttattaggtctttgttactagccctggagtgggatttaaagatgacagaggattactaaattcatgcatttgttcattcttataacaagaatttattgagt

SEQ ID NO: 54895 - DNA, 1106 bp, Bovine  19866880715849
  misc_feature (1)..(1): n is a, c, g, or t
nacagtacaagaaaggagggcagagggaactccaccactggtgttgcctttaccaaacggaacaaaagctttggtgttttctgaccaaaaacctttcttccttcctgtgcccagacactgacttagttctttgcaaagcaagccccacccataagtaaaagacagccaagtatatctccttcccaatgactaaaattcccatatttagggtcaccctacatgattaaggcgtcatctccagaagattccagcccgtgaccgagcatgggctgtcctttcaacctcggctattcattacttcccacatctccctcattctgctccatccccctcattctgctccatccccctagcctccttgccactgttccaacacttcagccttgtatctaactcaggggttttgcgtttgctgtctctcctccccacacctgcactagaatattctttcctggatatacacatggctcacctctcctcttctactaaaatgtcactttgtcagagagactgtcctaaccaccctatttgagacagcagtttccccacccaatttccagcctcccttcttgctttatctctctccataggacttaccattgtctaacaaaccttttgcttatttattttattcatggttgcttcccctactaaaacgctggtccatgagagcaaggatgttgtctgttttgtttgttgttacaatcttaacagtaaaatgtctagaacagggcctggccgtggaagacattcagtgactgttccttgaatgcatgaatgaattgcaagctaactgccgcctaatagagatcaaggccctgagacaaggggcaataggactggtcagttttgaccgtggccttgataaacacctccaggagtagaatctgtaattagagggctccacttttaatacttatttatttggttgccctgagagttgcagtgtacgggatctttagttgtagtatgtgggatctagttccctgactaagaatcgaacccaggtcccttgcactggaagcttggagttttagccactggactaccaggaaagtcccttccacaagtgtcctctcatcaccagaaaattacaatcatgtctt

SEQ ID NO: 54896 - DNA, 905 bp, Bovine  19866880777920
  misc_feature (1)..(1): n is a, c, g, or t
ntctttgtttcaacctgctttcattctcttttcccaaaactaggttacagattcttaactgaaaagttcagactacttagacactgttttccggtattctgcagggtcattttgttgtatggaagttggaatatttgttcctggattttaaataaaggtttttagattataaaatattataataataaaactatatttatgactaatgtgttggtatgttttgtctagctgaaatgtttctggggagccaagctggttcttcatgaataagctgttcattgtacatatacacaccatgatcttgtacctgtaagttttcttaagagcttagctggatcatttttgtttatcacaatgcctctatccaaaggttctttttacatatgttcacactgagaagtcctcattaaaagctcatttggcacttttctcccatcttcctccacaaccatgagtaattttcctacaatgtatttttaaacttgtcagctcttagcaaaaaccatgaacagatttcacagtgtgtatctcagatggtatgtgctatacatcctagtcattataaggctcagaaagtgatcaggatagttaaccgagttgtgtcacaagtagaactactcagccatggtcttttaagaaccatggaattaggaaaatgcaggggattctgtttgttcaggagctgttagagccgttagggagatgactcggtctgttcttatgcttacttgtgttgaaattaatgggttcaccaggttataatgctcctgagaaataactgtgacattcttgattatctatggccattagaaaacataaataaatccccgtatctcaattctgttcagtctgggtcctgaaaacgaattccagagatggcatgcatgcaggaaccaaacacaatc

SEQ ID NO: 54897 - DNA, 1342 bp, Bovine  19866880835703
  misc_feature (1)..(1): n is a, c, g, or t
ngtccactagggcccccaaagtgcagtcgcctactttttccttttgtttctgacctcggctgaatagagacgcggactggggcttttcccgtcgtccagacagaacaacctcttgaggacctgaagccgggcccctccctcactcacctgctgggccgcaggccccgccgcgcggagttcgtgtcccctcaggaggtgccgctccatctccagcgtcacagctagggccgccggcacaactccgaagctaaggtttgaaaagcccgcccctggctggagccgcggaggacgccaaccgccgccacgtctgtaccaagtcccagcgcaggggagggggcgagggggctgagagccgccgtgcgcgcacgcgcagagggtaccccgcgcagcccgtgtctcgagtttgccgagacccgagttcccggcgccggctgggaagtagggagcagctggcccacttaagggagaggttgcggtgtgggcgggcctgggacaggagtgggcggggtcgtggggaaagcaaagcccactgaacgcacctgacgggaagcctggtttaggctggtggtcttcgaggcaagccttttgcgcgcggacccttcggcctgcatctcacccaaggcccgccagagctctcagggtcagctgacccaacgctgcagtccttggactcccacagacaacctcaattccagaaaaccaagtgacactaccctcagcgatcactctctcaaacaacgcagattgtcacccgaggtcacttagaaaccacggccttattaatcaggctggtgagacgtcgtgacaggcatttcacaagcctttttcttttgtccccaatgtttctttgtaattccagatgcccctccccgctgctaagtagtctgttctttcttggaaaaaacccttccattactctttccccaccaacatccaaagtgacaacagaatgaggtattatttccccagactctgatttcttgctgtccctaaagaccaatataaagacccttttaattatattgggaaattaattattgggaattaattataatgccaaaatatggaatctttaaaagtcaaaattgaagtgccaaagatttcaggcctttgtaagttctttaaaaccccactgtcctcttgaaaaagcaacagaagcttctttggcttctaacatgttttttctcctaagggaagaatctatcaaaacaaccttcccaccctcatctcttaaaggcctagggcacttttcattccataagtaaaatgaaacattcaacattttttgtttgcctgagacagtccttgtttgcgtctgttgtcccaatcaatattccacgga

SEQ ID NO: 54898 - DNA, 1599 bp, Bovine  19866880882344
  misc_feature (1)..(1): n is a, c, g, or t
ntaggttaaaccatatgaaattcccagttttgtagatcagaattggtagaatattagcaatttcgtatggtccaacctattatctttgcttagaaaccgattttcttttctggaaatcttagaatcctcagcagatacaaaaattattagaaagtgttcataatggtgtgaaaactaaagcatgacatttagtctttctgcagagagtgcagtagctttatcggtaatttatactgctttatggcagcatttaaaaagtttctaacatttcgatgcagtgtttctttttctatctcgttgtgtaccttttttaaactgtaaatttggtatccagctgggtcgctcactgcttaaaagccaataaagaggcaaggttggtggaaaggaaagtttacttcattttggaggccaacaaagagttggggagggcagttgttgttctttagtccctcagtccttccactcttttgtgacactatgggctgtagcccaccaggctcctccatccatgggatttctcaggcaggaatactagagcggtatccactctagtatttccttcttcaggggatcttcctgacccagggatcaaacctgtgtctcctgcaatggaaggcagattctttacctctgagccaccagagaagccctgggggagggcagactcgtatccaaaggctgacttcaccccagtgacaagtggccaaaagcttttataggcagagggagggggctgcatgcagaaatagcacagtcagctttgacagtcatcttgaaattgtcattggtagtctgaccagtggcatcttgattgttttaaatagttaagcttcacttccagggtaggtttgttctcatttctttgagaccagttcttggagttatggcggcttctgtaatggctactgtctggtcttgtattgacagcttgttctgcctggttggggtttcagtatccataagacagctcatgggatatggcttagaatattatctatagcccttgagaaggaactaaatggcattgactttccttactaactaaattattgatattattgttttgtcctgttttcaagcttttctttgcttctgtattttcttacttctctgattaaacttattgttaagctaaagatgtttcacaggcaaaaaaggcaagctgaggacgtgggggggcagggaccttaagggtcctgctctgtttcacttcgattgtactaattattttttaaaatttgatttctagtgaattggtggtatcttgaggctcttgcatttatcacataggtgttggtggggctgatcaggcgtacttattgagttgtgtgtagcagcagtattttggaatggtacaaaagagatgagaataaggtcattaaagaagttttatgtggaatcacaagaaatacttaaatatacataaaggtgagattatttacatgtaggaaagcacaatacttaatgatttcataggtagcaacaaattaagataattgagttgtggaactccttctgtttggatcgtggagaaaaattgcaaatagtaataggctgtaatctaacaggaatattgagggtcagtaaaaaaattttata

SEQ ID NO: 54899 - DNA, 1538 bp, Bovine  19866880896925
  misc_feature (1)..(1): n is a, c, g, or t
ntggagacacagctggcgaggcagttttgagccaagccttagagaggtctgaatttatcctatggacagattttgagcagaggaacagcatactcagaactgtacttcagaatgtttacttagaaatatttggtccagttgatgttttccccctttttaatttcataaggcaattctgattgttagagagcaaataatggccatcttgaaagactgggctttttttttttttttttttggtccttttctgctttttagtatgtagatttccttaggtaagttcttaacaacagtgtaaatttaagaactcactgtctgaacctcacatattagtctttcattatagaccaatgttattttcccattcaccaaattacttcaatacagcaaatgtagattggttgccaagatatttcaatcagctccacttggctaataaagactatgaatgctgatggataagtgaggccccatcagtgtcccctctagaggctgtgtcattataacctcacctctcattgacatcagctcaagtagatccacattttaggatgcaaagccaagttaactggccaaaaccaatagagacttaatttggaagcaggaaaaaaagaattctacatgaagataaaaagctagagatgaatgtggtcctctttttttgttgtaactcttcagtgagtgctacctgacaatctattcaatttaatataaccccctgggaagcccactttcttcctaagcaggaaaccgtaaaatgtcagaaatacataaaaggcagcttatatctggaagaggaaagacaggtacacttttagaagaaacacctatgagatgaaccctgaaaattaggcagttggcgttgctcatctattaacttttctttattcccagcacaaggactgcagcttagggatctgttgaaaactcctcactcagtattccaaaggagattgtgagcaccgctggtagaaatgaaaatcaaggagcagaagaaggtataatgatcagtcctgatacacacatgggaaggacagtgactgtttcctctcttccctctacttccccctccatcccaggctgagatgcaccacctcacacctgaattctttcacaatcactgctttctcaccatccctgactgtgacagccctctactttgcaatgctccagattttcaagcagctaactaaaggaaaacctaagtacagtggtcaagcctcaagggtagggaaaggggcatggcatttaacaggtgggtcccagacccactcgtctacttcagccagaactaataattttcatctattttgttcactgagcttccacttaagatttcttaataagaaaatggtttcattctgtgttttcactgccaagggcactggtttgatccctggtcaggagagtaagatcctgcaagccatgcggtgcagccaaaagtaagtaagtaaaaaaaataaaataaaaattggacctttcctggtggtccagcagttaagactgtgtgctcccaatgcagggggcccggttcaatc

SEQ ID NO: 54900 - DNA, 605 bp, Bovine  19866880947452
  misc_feature (1)..(1): n is a, c, g, or t
ncccctgaaaggacaagctggggaccctatagagaaagaggtctgctttgtctctcctctgtttcataagtgaaacttgacagcatagattagaaaaataataaaaggccatctcatctgtgttccttatttattacacattatccaggtatctggttgcaaaacatgcactcctactcttctctcattgttaactacatttgaaacagaacacaccgacctgcttcatcagataacatcggcatttcagccagcgctctctttccaggtgacttccaccctctctctccatgacccctcttctcagcccccaaaatgttcaacagggggagatgctttaattagatcacccctcctttcttgatatgactgctcctatatccagtcaaggaaaaatgagggaaaataaaataacatccctttaaaagaagatgggcagactatctggattcaggaagagggtcagaaaatggagtctgaaggaatgtgacacagttaaccaaggtgggcaaggggcagatacctcaggccccttcctctggtgctgttcagtgacccctccccaatctatggaggacacacagcttgtatgagaatgtagttct

SEQ ID NO: 54901 - DNA, 743 bp, Bovine  19866880970280
  misc_feature (1)..(1): n is a, c, g, or t
ntttaaacacttcaaatgaaaacagatttgggaatgtaaaatgtgtatttccacaaatcatgagaaatccaaagtgtaaattatgtaactagaaattaggggttcaaaataaaacagatcctcaccaaaaactcaacctatttatttttggctgtgcagtataattacatatttatacacttcagaatctcgcctaacaattgaacattcagagcggaagcacagaaaccaaactggagctaatacagagttcctttctccttgtagaaaagcttgcccggtcaggcagtgtgggaaactttacaaggctcacactctcttcttattctaaggagaagtaaatggcttgagtgcccttgggcattctttgggaggagtgtggtcacagactttcaaaaagtgggctttttcaccatgaacttttctgttaatcctcttccagtctgtaaatacatgacttcccctgtttcctcagaataaatgctgagctaaaaagctgtttaagcagaggtgcttcagtcatataaagaaaaacaaaacagaacaacaaccaaccaaaaagttatgtaaggccctcagtaaacatagtgaggttgtggggctcctagacaagtcactaaacctttctgcatctcagtttctccaaccatgaaatggagataataacacatgtccttctacctcacaaataattctctcataggatactatttgcctgaggggaccaagagatctcctaggaa

SEQ ID NO: 54902 - DNA, 770 bp, Bovine  19866881007941
  misc_feature (1)..(1): n is a, c, g, or t
ntttcctgcattgcaggcagattctttaccacctgagtcttgaaataacattatttcttttaaagaaggcattgactacacagattgtagcttggctggtaatatggaataccttaaaatctttcatcctccctggttatttcagttagccaggaaatacagcagtggctagacacgagggaccttatgatgagactgtgagtttggacactctcagtgttgggcttgtgcaaagaggaaactaagaggaggaactattcatcagtacccatcctcacccacgcgtctataattaccaacaacggttgcaacgcaacccataaacacgatgtgttggctaaagcccagggtgctatttatagtctctatggacccactaataaccctaacaccctccttgaaacataacccaaattaggagcaggggacaaaggggcagtctcagttgagagaaaaagtagctactcttgtacctccagtttaacactgtccatgtatgaatgaccatcaaaaacatccagccgttctgagagaggtatatctcaaaataaacattttcctgagcaggccagacaagagcacagagccaaaggatttccaactcagacttggaaattatagggtgtaattggaaggcgtgacgggggcacgtcatcgttgtttggacgtttgacctaaactgtgtttgttcaggcacgacaggaagtggtcgaaaagaagtatgacacagtggaaaaagcaggggctgggagtcagtcagacggtccacg

SEQ ID NO: 54903 - DNA, 1639 bp, Bovine  19866881047947
  misc_feature (1)..(1): n is a, c, g, or t
nctgaaaatgtttaccatgtgtccctttacagaagtggtttgctgatccctaacccagccaaattaacatacatagtgaactgtgaccttacctctcttactctacagtgagtggatgtggatcttggagggctgatacaagtgggataaattaagtgtatttttttttttctggagaatcccagggacgagggagcctggtgggctgccgtctatggggtcacacagagttggacacgactgaagtgacttagcatagcatagcatagttgatttaaaatgttgtgttagcttctgtttttaatgtattcatggagaaacaaaaggaccagttttgtgttcttcatgcaagttctcttactgtagtatatactatatgatctctgggtcaagaagatcccctggagaaggaaatgtcaacgcactccagtattctggcctgggaaatcccatggacaggggagcctggtgggctatagcccatgggattacaagagtcggacatgacttagcgactaaaccaccactaccagactagaatgtacagtacacatctatgctttatatacagagaaaacatctctggtcaaggaaactactctaaccaagaaaagcttcatggagtcaaaggacttggttttagttaagaaggggtacaaagcgctccaaggctaggagtgatgtctagtgccaaccacagtgagaacagtgattgtgtaatgacataagcattcgatggtgatgcttactgacctcagagaggaagagtaggcaactaaaatcatattggcagagtcaagaccgactaggacacatgacaaaagcatgtctctaaataagggcttgctatcgagtcaaacagaagccttatctcgtaggtatttaaagttaggttgataagactaaccggctacagcaaggctaagaaggaaattgatgacttaaatgtggaaacttagataatgtaggaaacagaaatatactaaattttaagagctagaatggcacacaaaggaaaaacaaagaaaatgccagagcggtggaatcaagcactgactaaaaaaaagaaaaagaaaaacgaagctggcagctggtaaaaaaaaaacaaaactgcatgaatccagatagaacctacacccacctaatgcatatagttaaaccatgttaagggagagactacaatgaaaaagactccaaaatggcatatacagatacactgtttccaaaagaaactgtgtgtattttaagaattgtttatgtacagagaaaagtctggaaattgttaacaatgctcattctggggaatggaactagaggaagagttcataaattcatttttctatgattacttttctgcaatgagaaagtatgccttgaattttaatttttataaagactgcaaaagcttaaacatttataagaaaaggtaggtggctgttccaagtattcggataaatgggacaaaggtagtaacaaaaccagtcatctttcaagcatgtatgagtgctaggtactgttaagtggagtcgctcagtcgtgtccaactctttgcgaccctatggagtgtagcctaccaggctcctccatccgtccatggaattttccaggcaagagcactggagtgggttgccatttcctt

SEQ ID NO: 54904 - DNA, 1243 bp, Bovine  19866881132245
  misc_feature (1)..(1): n is a, c, g, or t
nttgtgtgtctctgcttgccagtgaacattatgtcataacagagatcattattaacttgttcaagagactaaacaggacagaggagcaaggcagaaaggatacatgtgagccaaggagaagaagagtaacgccctcggcttgtttatccagagacagaagcacacaggatgctagttagcagggcctgcttgtgaaaactcaacagtctctttatatcggtttcactaattatcccacccttaattcgagcgatttcataaaaaagagagtcatttctgtcaacttggagttaactgatttttataaataatcgaattgcattgatactccaaacaagagtttcttctagataaagaatgacaagcaaatgccctacagaatgacaaatgttgcaggtggatctgatagggaccatctttacaaggagaccaagttagctgaatactttcggcttatactgtgaataaggatcctcagaaacaagtccatttttctgatcctcatatgtaatctttataaataaatatttctttgctttacatctgcgtggaaaatttgcctcctacacaagccccaccttccagccaggtccaaatctctcactaccaatgttatcattatccttgggagtccagctgctttgggttatgaggattttttgcaaatacgaaccgaagggagcaaaacataaagcacttccatttttttccttcccatttccccaagttaaataacagtttattctgcaggctttcaaatcactcccacaaaattggcaatccaagacaatcgacacattcatgctaatccacccagaagtaaatacactgtggtaaaactgtgacatttgcaaaggccgtagctccccaattactgaggaattaactagggatataatgagggagggccaagtgtgattcagcccagagggaagtggtcttgccatcctgtttctatcctcaagtgaaaactttctatacatttgagtatttagaagtgtggctcactttgacatctgctttaaataaaattgttacaccatatttttcttggtttcaacctaacagctgccataacactcgtaagaggttactggcatcaaaatatttctcaatttagccactattggaacctgctccaacccttgcagggacatttgtatcatgaaatcatagtccattgggtctaatatttgttggatgttcactgaaagaaaagggggtttagtacatgtagattatg

SEQ ID NO: 54905 - DNA, 1718 bp, Bovine  19866881152976
  misc_feature (1)..(1): n is a, c, g, or t
ncagagcctgtcctaccacaaagcaataatttgtttacattctccactcaccctcaagtatgtgctcttttagaggatgtggcatctttgccttcctctgtcaagcccagaaattgaccccgataatgctcaataaatggttcttgcacaaatccaggagaacttatttttaaaataactttttgttttactaaaacagtaagcgttcacagtggaattagaaagttcagataaatcaaaagcagaaaatgtaaagcacacaaatcccatttgtcagtaacacttaacatcttagtaatttccacaggccactttaaaagtttcgaactttcttcattcatggcaccctcagtgtttcagtcatttctttctggtactttaaaccaatataaattatgttttttttttttttttttgtaattaggtccaaaccacctaatagtagtagttcacacagtgtccaagaggtgttactgtgtttctcttgaaattttaaaatattctgtggggctcttgtgaattcactgcaggatgccttcaaacagtttgggagccactggtctaaactttctaaaagaatcttttaaaagaaaatatatcgttatacttacaaactattttgttaacctataatttctagttataagtaaaaatcaacttccattcttgatagctgcttaccttagttcagttcagttcacgtgctcaatcgtgtccaactctttgtgatcccatggactatagcatgctaggcttccctctccatcacgactcccggaacttattcaaacacatgtccattgagtcagtgatgccatccaaccatctcatcctctgttgtctccttctcctcctgacctcaatctctctcagcatcagggtcttttccaataagtcagttcttcaaattaggtggccaaagtattggagtttcagcttcagcatcagttcttccaatgcatattcagggttgatttcctttaggattgactggtttgatctccttgctgtccaagggactctcaagaatcttcttcaacaccacagtccaaaagcatcaattcttcggtgctcagctttgtatatggtccaactctcatatatacggacctttgtcaacaaagtgatgtctctgctttttaatgtgctatctggatttgtcattgtttttcttcctaggagcaagcgtcttttgatttcatggctgcagtcagcaaccacaggtgatattggagcccaagaaaataaaatctgtcactgtttccacttttcccccatctattcactatgaagtgatgggaccagatgccaggatcttcatttttggagtgttgagttttccaaccagcttttccactctcctctttcaccttcatcaagagactctttggttcctctttgttttctgccattagagtggtattttctgcatatctgaggttgttatttctcctggcaatcttgagtccagcttgtgattcatccagcccagcatttaacttgatgtgctctgcatatcagttaacaaagtgaagtgaaagtctctcagtcatatctgactctttgcgaccctgtgaactgtagcccaccaggctcctctgtccatggaattctccaggccagaatactggagtgggtagctgttcccttctccaggagatcttcccaacacagggatcaaacccatgtctcctacatggcagacagattctttaccg

SEQ ID NO: 54906 - DNA, 861 bp, Bovine  19866881188570
  misc_feature (1)..(1): n is a, c, g, or t
ntatgaatataaaatatttttacaagaataactttcctcaaaaactggaaaatcatcagatgtgttattattcatagacttgatatgagtgtactgtcagaatcaatcctcatcaatgttttgatgaagttagtcatcagtttctagaagaaaagtctttgaactggtaggattttccatctctgaagttaatattaatgttatcagttcacatgctaatcatgttatcaaccagtgtaccaccctcctagcagagaaagtataactatttaattggtcacttgtcctgcacttggcaggacatcaagttcaagaacttttatattatctccaggaatgtcattaaaataacttactaatatagggacaactttttgatttttgtggttagctgaagctgtcatattgctgagacataaaggttttacccagttcttattgttgaatcttttgctatactggagcaaattgtttttcttttacattttatctttggtttgtgctaatggaaatttaagtcaaataccatggaacttagctcagaggtgcagtttaaaagatcagtggccatgattgtgttctgtggcattctatggaattactgcttcttttctgagctatttatcactgaatcatggaagctccagatctgacagataagggctgtttccttaaattgaaagtgcaagaagatagcagatttggtctcaacatttatctaactaccacataagaaacaaaattctatgtgtggattgacacctttttttatacgagagctttccttttgcaagcctccttaaatgttttttttttttttcttcttgacctccacctttacaatcattttgatactaaaat

SEQ ID NO: 54907 - DNA, 835 bp, Bovine  19866881211733
  misc_feature (1)..(1): n is a, c, g, or t
nacaaacaaattgtgtgtaattgtgtgtgtgtgtgtatatgtaagagagaaagcagggtgatggtggaatgaatgccaactgattaagaaatttaggagacctaatcagtcaactgcagtatatgggccttatttggatcctgattcaaaaagctgttaaaaaaatcacaagacagaaatttgaacactgtctggatttttgataacacactatctttatatataactatagattttcttaagtatggcaatagtaatatttacaagtaaaatgatatgattgctagaatttgcttcaaaataatcctatggtggaggtaatattctttctacattttgtcttgaaattttttccaaaaaaaaaaacaaaccataaaatacaactacaaaaatgaactgcctgctttcttacttataatacaaagataagattgcactcacatcttcctcagaaacatgttgtaaagataaatgagttctttgaaagatgtctgggctaaagtcttattaatcaggcatgaagacaaaattgttgatggctaaaaacaagctttagaacttatacatactctaatgacaaagaaggcataccttctacaaacatatggcaaggaatgtttgaaataaagcataaccataagttaaaataagtactgggtgtaattagcattagtgtgatataattattttcaatttatgtcagtgaaattagatgcaaactctgaagaaaaaggttgcttaaaaaattatttttgctgtatttaataaaggaaaatctaaatagttgatagggttcatacattaaaaggactaacataatcagaagaaaatcccg

SEQ ID NO: 54908 - DNA, 769 bp, Bovine  19866881240849
  misc_feature (1)..(1): n is a, c, g, or t
ntggaagtcctgaaggagcaggtattaagtcattaacggaaaaatgtctgagtgcaacatggagtgggtcaccttgttgaaaagtgaggattcttctaagaccacttgcagccctaggattctgtcatatgtgatactgcattattgtaaatattggctgggtaaaactcagtgttgacatgacattgatcttggagattttccccactggcttggactttgtaaaggtttctgtaaggcgtatccacagttatcctcatagaatgcttttgaggcaggcagggatgaggtggtatcagttgcttctcttagcagatgcaggaacagcagtgggggaaatgagagagacacatgtggtggcgttacctcagtcagaatcaggtgcttcccaggaagcatctcaccttgctaaaacgtcgtttcagtgtttaaagagaaggtacattccttgcttacaacatggcttctgaatgcaggccaaccacttcatctggcgttcagttgagtcaacagcagttctgtccgacgctgggagagaaattggcagcattggacttggtaggagatggtgcagtgtgtcaagctcagcaatgtgccctcctcgggcatctttttcctcagccatctttcagatagtgttggtgatatttaactttagcctttcttcttaaggcaaatttaagtcacatacttaagaaggtgattttatcatatttaacaatgaaggtgaggcttatagggttgaaagagtgtctaggggccaaaatct

SEQ ID NO: 54909 - DNA, 1289 bp, Bovine  19866881259522
  misc_feature (1)..(1): n is a, c, g, or t
ntagatggagaaacatggaaacagggagagactttatcttcttgggctccgaaatcactgaagatggtgactacagacatgaaattaaaagacgcttgccccttggaagaaaagctatgaccaacctagacagcatattaaaaagcagagacattactttgccaacaaaggtccgtctagtcaaggctatgttttttccagtagtcatgtatggatgtgatagttggactataaagaaaactgagcactgaagaattgatgcttttgaactgtggtgttggagaagactcttgagagtcccttggactgaaaggagatcacaccagtcaatcctaaaggagatcagtcctgaatattcattggaaggactgatgctgaagctgaaggtcctatactttggccacctgatgcgaagaactgactcatttgaaaagaccttgatgctggaaaagatggagggtgggaagaggagacgacagaggatgagatggttgaatgacattaccaattcgatggaaatgagtttgaggaagctccaggagttggtaatggacagggaagcctggcatgctacagtgtctgacaaagagtcagacacaactgagcgactgaactgaactgaatataaatgcatactttattttattacatatgtatatataatgtttattatatatataaatgtatatgaacataattgggcttccctagtgactcagcagtaaagaatctgcctgccaatgcaagagacatgggttcaatccctgggtctggaagatcccatgcagaaggaaatggcaacccattctagtattcttgcttaagaattcccatggacagaagagcctggtgggctacagtcaatggggtggcgaaagagttacacacgacttagcaactaagcaacaatgacaatagacataaatagacttatgtgtttcacacatatatctattccatttggtagaagaatttggcctcacttattcatttttattcattcatgtgacctatttattgcaaaacaaccattttcatgtttttaatataataaatcatttcaatatgtgaactgatagtattaatatggcaccaatcttcatttcttcacttctaaagggagccagataggtatactcacagtgaatactgagttttctttgtaatcatattttctttatgcctgatacttttgtgtaatttggaagatttcttattaatttgaccaagctcgtctagtctgtctcctttcagtatatagtacttcttggtatattttcaagagaata

SEQ ID NO: 54910 - DNA, 744 bp, Bovine  19866881260640
  misc_feature (1)..(1): n is a, c, g, or t
nttggattttagtctatcagacaaaccgctggtcaattgctgaattagagagaaaggaaatactgactcaacccatttgagcagagagcagcgtgggcagggagggtcaaccttacacatcttttattgcagaatagtttcaaatctcttgagactagatgagtgggagagaatgtattatgcttctgaagtagaagctatctaggaggacaggaaaacaaccctttagtgcagaaaaggattgagagcctgctttccacacaggtcgccatttgaccattttggtatctgtgcagcaactggaggtttcagaaccttaagaatctacagtcattaatacaaaactggaactaatcttagccttggcattttgtctgaagaacagaattggccctgtgatccataagtgactcactgaggaaatacttgggcatgctgcacaacatgagggtaatattttaacaacagacaaacatgtattgcatggggaagaatcataaatgaaaggaaaataaattaaggagtcaagaaaccagagggaggcttcacagcaagaggcagataccattatcctgaaagtgaaacgccagcactttggaaacaaaacatatgtatgctgcaatcatcaatgagctcgaatgagacttaagaaataaccacaccagtttgccttcacttccttttgtgcttgccgcatgccaaatagttgaatataaattttcctaatgggatgtaagaacattt

SEQ ID NO: 54911 - DNA, 750 bp, Bovine  19866881271969
  misc_feature (1)..(1): n is a, c, g, or t
ntgtgatatcttgaaggcagagcctattacttccaatctcttgatgacagaaaatagaaaaaataatagattgaagatttttgagtggccacggatcctgaaatattaggtggcaatttagaattcacaataaacttttcctattcaccttgacatcttatgagaaaaagaaggagatagagagagaaaaggaagttgaagagacatgtaaccatacagcatgaactattactgtaatctgatgtgcttcctcaaaccaattataagaacctttgaaggcaaggtccctctggaactcagtaatgcagacaatttcagatgatttgagatctaatagacctattttgttagcagaagaactattggaaataatattaaaagatgtatttctatttgagagaatcaacctcaataaatgtacttactttgtttaccaaatgaccatttatattgttcctaaaaatttctaacattggtcatcaactccttgagtctatttgaggtaaacatactattctttctccttattttgtgtcatttttattaatacattagcccaacgctgattattactgtgcatcctgtctaaagtgcttagagtagtttattttagtactttgtaccatggcagtcatttaaaaaaaataccagtaatgattacagcggataaaacattcagtagtctttcataaatagaaactgctctaaacatgaacaaaatgtcagtttcatttctttgctaatatcatg

SEQ ID NO: 54912 - DNA, 1540 bp, Bovine  19866881301254
  misc_feature (1)..(1): n is a, c, g, or t
ntttcccctacaatcgggttagggatggtatcatcaccagtatgtgtagtacttttgctggggattctccaacgtagaagcattcttcttctggagagtagtgggtttatattgcaaacctttgcaatcattttgctagcgtgaaggaaaccatcctgaggatggaatcagtacacagaagaggcaagattgaaagaatcacatagtctagagccttggtcaaaccatatggaaagcccagactacagctgcattttcaggtatgggagccaagaagtcgcctttattgtttaaaccactttggtatggattttctcttgctggtgctttagtcacgaaagagtgtctgactcttgtgaccctatggactatatcttgccaggttcctctgtccatgggatttcccaagcagaaatactggagtgggttaccatttctttctgcaggggatcttcctgacccaggtatcaaacctgagtttcctgcattgcaggtggtctcctgcatttcaggcagattctttaccactgagccaccaaggaagccacggatttttctcttacttataaccaaaagtgtcctaattaatttaggtctcaacatctcagactttagtgactaatgtcactagaactcttctcaagaggtggaagagagaagcaatatttaatctatacaacatttcctaacattttctttggatatatttctataaaaccttgagttttgccaagaaaatagccagcattttcctggcttcatcttgagtgtaaaagtgtgtacacattctgatagtactagggaaggctctgcccccagcctctctcctagtttctggtggcctcagaaattccttgacttgcagatagccattttctccctgtattttcatatcattttctctctctgggtgtttgtctttgtttccagatttcccactttaaaaggacactggccatactgaattaaggcccattctgatgacctcattataaacttgattgactctgtatggacctgatttctaaatgaggtcacattctgaagcactgggcattagaacatcaacatatctttattaggggacccaggccattccataacagtgtgggtagagggagttgcttgagagggtatatgtgaaaatgacaagacagcaaacataggaaagttaacaaaaacactctatcaaacacagttttggagtcattcctatgtaagaaggccttactttaatttgtaggaaaatggaaagcacagggttcttgacagaagacatgtttcttggctgagacacggtgatgagttgaaagaatcagagccaggttcctgaaacacagagtctgtgttgcctttattttttttctggcctagatgtttccattacaacaatctctgttttgttaggtcatttttttgagggaatacacacaaagctttgacttatattattctcactgcatccaactgaatgaaatttatgaagctttttgcacagtgtgttcattgtttggattgggataattaagtgtcaggaata

SEQ ID NO: 54913 - DNA, 899 bp, Bovine  19866881311408
  misc_feature (1)..(1): n is a, c, g, or t
natggaggggaggaggaaatgtttgttcctggtgtggtttcagattcccactgcaattaacctttgagaaactaccaattgtcaagctttggcacagtatcagagcagaatagccaccattctctaaaaggctattaatgtacctctccactttcctactacctatctgtgtgagactagatttccttcagctacttcaaccaaaacaacaaatttgcaacagattaaaggcagaactaaggaagttcagctgcctcctgttaagccagacattaaaagtatttccaaaatttcgaaaacaaaaccattcttttcactaaattgtttttgggaaaattgttcttttttgaaatattttcattgtgttaaacaagtaatggatttaatattattatttttatatgaattaataactatcctttttacttcactaaattttaatttttaatatagtaaaccttgatagataaaacctccacagagaaaagtttcttggggtcctcagattttttaggagtgtagggggaactaaagccaaagagtttgagaactgctgccataccatgtacagttcagttcagttcagtcgctcagtcatatccgactctttgcgaccccatggactgaagaacgccaggcctccctgtccatcaccaactcccggagtttactcaaactcctgttcattgagtcagtgataccatccaactatctcatcctcagtcatccccttctcctcctaccttcaaactttcccagcatcagggtcttttcaaaagactcagctctttgcatcatgtggccaaagtattgggagtttcagcttcaacatcagtccttccaatgaatattcaggacggatttcctttaggattgactggtttggatctccatgcagt

SEQ ID NO: 54914 - DNA, 862 bp, Bovine  19866881313891
  misc_feature (1)..(1): n is a, c, g, or t
ncgcatccgagccctactccaaacacacacatttaagaggaatatccttcctttccctggccaagagccacctcggagagcccagagaggtccagagtgatagcaaacggtgacgctaacgtcagtttcaagtcgccatcaccgtacacacttttacatttgagagttcaaaacaaaacaaaacaaacaaaactggccccgacaagaacctttatgcttagttctcaaaacaatttttaaacttttcagcggtccagactctggtcggctgttctgacctctcctatctcctggcgcgccctagcccgccttgggagcgctccgagcctggctggggcctcgtaggaggatggtctcaattgctcaaacctggagagcggccgcctgccacctctttcccgcccccaaagcagccgaggcctgggaccgtgcgcgggactgcctctagggcccggccctgccccagcccgcggccagccaggacagccccagcctcgtgggggcgcgggctaccgagagccacggcgccacgccgtggaggcagcgcggcgctgcaggcggctctcccgccgctcacctgccgcggcgaaccagctcccgcccggccccgcgcgcgcggcggtcagggccccggggcggcggtgagcggcctcagctcctcttctcgcgctccacttctccctcagcccgcctcgaaattggccggccatcttcctgacttaaaacacccagagaaattttgggaaagtttgttgctggcgctgcgcgcacttttccaattggaaattaaaaataaaaggggaaaggaaggaagtcgcggcaagattagcacccttggaagtacccccaccctcgacaaaaa

SEQ ID NO: 54915 - DNA, 1301 bp, Bovine  19866881344897
  misc_feature (1)..(1): n is a, c, g, or t
ntaaaaatatgtagtatttctcacttttgtttctgttctgtttttctagtagattataaaggctccctaataaagcaagaaattaagattttgcagagcgtatttaacaatttttatactatcacatattaaactttattactttcctgatatgttataaaattataatactagatagtacgtttcattttttaggaatataaagaaatattattctgtgttttgctgccttttaaaatgctttttttccccctctctcttttctaagaactgcagcattcaagaaaaaatggatttggaaattcgaatacgagaaggaatatggaaactcctttctttgagcactcaaaaaggccagattttgcaggcagttaagaatctcatggtgtgcaatgctcgaataatggcttacacattggagctgcagaagttagaagagcagattgcaaatcaagctggaaaatggttagtggcattgtttacctttggtttttaatgtacttaaatatttacattaaaaacactgtgtgattcaaccttaaatttaatctaaatgtcaaatcaccaaagtttttaaaaaatatactgaagtagcctctagtatcataaatgttttgacagtagggctcagagtaaacgtactattaaggcagcagtttttactgggcagttttattgttttcattactttaaggttgtaaaatgaagtggttaagaagcaaggagtgaggaaatattttgagaaggatcaagattgatactagagtattaatgtgtacaaatgtaaattttaaaaagctaattacttaaactgttaaaaaggtactatctgagagaaagggaaacttaggtatagaagttgaaatgagtgggcaacaaaattaaagctatgaatagaattaaagatatcaacgggagggaacttaaaaatcagcacgcacattccttttgcatggtgagtgtaagttctagtgaagcaagtcactcaactcatattttaactagtgacagaagctaatgagaggttacttatgatttgctaagtaactcctggtccttgttctctctgtcgatttgtgctgccttttacagtgccaggttttatttggaccttagaattgactcagtgactagatactggcttcctttatcatataaatggttttacattatccatggttaatcattgttaaagctatagcactagttaaaagtttctttttagaccttagtggccattgatttggatgttcacagtactcctccatgaaattcttgaaaagtaagggtaaagtcacaca

SEQ ID NO: 54916 - DNA, 1184 bp, Bovine  19866881346240
  misc_feature (1)..(1): n is a, c, g, or t
ntccatcatcaaagccagcaatggctgatcgagtctttttcttatcaaatcattctgacactgagtctcctacctccatgtttcacttccgagtacccctgtgattacactgagcccaaccagtgattcagaataatctccacttctccgggtcaactgatcagaaatcataattttcacttgctgtttagcacagtatattgaatatactgtctctaggaattaggacatgaacaccttgtgttgtcacttcagtcgtgtccaactctttgcaaccctatgggctgtagcccagcaggctcctctgctcattgaattctccaggcaagagtactgtagtgggttgaagtgccctcttccaggggatattccctgacccagggattgaacctacttctgttaagtctcctacattggcaggcaggttctttaccactagtgccacctgggaagcccatggacacctttgcgaggacattattctgccttccacacccaggctcaactatacatatctctagttcatggtaatacaattacagttattctaagtatgagcttttaaagtagcgaacattgtgacttggtggacagtacacacaattgcatctacaatagcggaggaaagctaaaagcctaatgtcagagaagagatcaaaattgaaaattagccacagaattagcaaatcatagagtctgaggtctcagagaatgggggaaaattctctctaccatttcagtggtgcctgggaatattttgtcttatgacacaaaactttaaacactgtttataaatataaccctgcctgagtcattaagaaaatgttttattcagttttaaaaacaagtggcacaccatattttttaaaagaggattttaaaaaatgaagccataagatatccaggaaaaatctagtgagtattcatctgatttctgaacaagaagcattttctaagcatgaaaacaaagaaatgaaaacagaaagggagtcatattttaatataaatagatactaatatttacatatttaaaacaatgtcaaattaaaagataaataacaagctgtgaaaactatttgtcacaaatatgacattcaataaccttaacagagttcatacaaatcaatgagaaaaatattaaggccacagagaaaaatgggtatgttatgtgtagacagttcata

SEQ ID NO: 54917 - DNA, 1345 bp, Bovine  19866881487358
  misc_feature (1)..(1): n is a, c, g, or t
ntagctctcgaaagtgacaagtggaaacaatggattcagtcttcaaatagttgaattagtgtgttcttgtcctagttttattctagtgtgggtaactggccctgaaaatcagtctaagatagcactccaaattgtgactatgattcgtcagggtataaaagactctagaataatatcaattttctcctttttatcctattcaggaaaagatttctcagtcagtaattgcagtgaacccacaagaaggggtgatggtgagaagaaagaatatcaattaaggagtgatacataaaaccccaaaatataagtaactaatttcacaatcattgtgaatagttactttatctaaaaataataaactatgacatttaaatggcagcttacacaataattgaaaaagtactaatgcaaggattaaagagattccatttttggtagaaatgataataccattaagccaataggatgatggaaaataaaggaaaaccaagaggattatcagcagaagggatctttaatgggaagcaggacaggttgcatcacaggatacctgatgaagccaaaaactcatcaaaatacaattctatcttggaatggactctgataaaggaagctgagatgatggggtggaattgtggattcaagtatggattagtctactgagtaagataatatttgtgatggttatagttaaatgtttctctgcaagtgcttgttttccccaacaaaataactgggtttttttttgttgtttttttttttttactactttagagcagaattttcagttcatgattgttgctaaaactatgtttctggttttagcataaagatatcagcaaccacaaaataaagtcaactctttgaaggttcagttcagttcagttgcacagtcatgtccaactctttgcgaccccatgaactgtagcacgccaggcctccctgtccatcaccaactcctggagttcactcaaactcatgtccattgagtcagtgatgccatccagccatctcatcctctgtcgtccccttctcctcctgcccccaatccctcccagcatcagagtcttttccaatgagtcaactcttcgcatgaggtggccaaagtaatggagtttcagctttagcatcattccttccaaagaacatccaggactgatctcctttgaaggtatatattcacaaaacccaccagactattaagataatgaaactggccccttggaggcagaagacactcaacgttttgacctagaatatccagaaacttcaccaggttagtatgtgcctggcgtggagaggattttgtttttgaataactttttaggtatcccatacaaggatg

SEQ ID NO: 54918 - DNA, 794 bp, Bovine  19866881491939
  misc_feature (1)..(1): n is a, c, g, or t
nactaaagtctttttttaataagatgaaagacattttgatagttaaattgattacacagtcacttttgccttgatgtaggtttggtgacctggcattgccataccataaggaatacaccttggtgttttttcagagccaactgtctgggttttactccttgatttcaacatgttaggtcaatctttaatcgtattttactctgcttgaaacattcgggatacttttcacaggtgtctcattttttttactccgcccaagaaataaagcatataaagctaataggtctgctctcttttagtcaatatgctttattaaataatacagatgtttcagctgttactgggaattcttattaaaaataaatgtccagagactaattccttaaagattataatgcagttgagatggttcagtacacattaaaaataggtatactaattttaggttaggtttccaactatttgtaaaccaggctatttaatttcaatatcctaactgctaatgaaactaaggcaaattgtttggtatatattaaaaatggctgtagtgatattttaacagttcaatacaactttgggggtggtggtgggaaggaaaggtcgctatcccctcaccacaagtgcctacaatgctgccaatccgaagtagttaaacaagttttacagaaaaagcaaagacaagaaaatatttaagtccatagattctttcctccaagaatgaaagttgtttttcttttttctgcactagcttattttccttaggttaaatataaaagcagtatttttggtgcagc

SEQ ID NO: 54919 - DNA, 855 bp, Bovine  19866881822170
  misc_feature (1)..(1): n is a, c, g, or t
nttcttctctgctgggccggatttggagaaaatagcagatttccgagtgttaatgttcaccacgtacagtaatgggtataaagcacagaaggcaagacagattcgtttgacagatccaccactccagtctattgaagctggcatgtactagccttgtaccttgccttgtctaattagctgctgagctgggccctggctcctcactcctgatggaaacttagtgggaaaactcctgtcaccaggcatgatgaagtggtgcttgattgtgctacaagatgtcctgtggctgcagtccagacagtttcgactaatcatcaactttgcagattccaacaccagggcttgtctaccaaggaaggagctttgcaaagtcagcctgaatgatctgcagaaaggacataagaattgctttgttttatatatttttaaaggactgactgcaataggcagcaccatgagtgtacctgagaaacttggggtccactttcatgtcaagactcctcacagcttaataagaagggagcagcaccagcatttgccatctgctaatggccacatccatcaccgccttcaagtcattttataactatgtaactattcagttaactcctcactttcttcccctgaataggagtttacattccctttgcataacatagttgcagctctgtgcctttgaacaaattacttatcctttctgggtctcagtttcccaatcttaaagagcttagaacagtgcctgacgtatcttgggaggtcattaatgttagctgcttatattattatttttatgatatttgaacccatcattctaaaagtaaatggataaaacaacatctgtgataagcatcatct

SEQ ID NO: 54920 - DNA, 1353 bp, Bovine  19866881914400
  misc_feature (1)..(1): n is a, c, g, or t
ntggcaccccctccgtactcttgcctggaaaatcccgtggatggaggagcctggtaggctgcagtccatggggtccctaggggtcggacacgactgatcgacttcactttctcttttcactttcacgcattggagaaggaaatggcaacccactccagtgttcttgcctggagaatcccagggacggaggagcctggtgggctgccgtctctagggtcgcacagagtcacacacgactgaagtgacttagcataacttagcataacaggcaatcagattcttatcaaatttagctttttgaaagggcattttctttgttgttgttattgttttagtacagattcttggaactaggattctgatgagccagatccaaagatggaccagcagagttactggccagtttctgggtcttcacgtcagctccttccaaatgtattgactcccttgcaacccttcagggcaaggaacaagaggggaaagcagtgtcaggcattggacaaacaagttgaaatgggccaaattttagccacaaacataaaagattttacctaaaaatactattgcaatcatctctaagcagactgtgacacaggttagctaagtttgggggaaaaaacaaaaacaaaaaaaaacccatcaaagccttcttttgatgaagctggtaaatttgtctcctcccctggtcaggctggtcaccccagtaagacatacccaagcacacttagccatcccacagagatgagaatctcttctgattgcaccacaggctgataatccggagagtggtaatcagtgagtcagttgccaatctcacagaaatgagacagatgaggactacaggggctggacccaaaactgccttccgtgacctggaagcctaggatctggttgttgatgttgaacttcatgctaccagtcttcacccactggggataaaatggcatggaggaacagaacagggtcagtacacacctggggaacagagatatgacctaaatgttacctggccaccagccataaaagtgtctccgggatttcacaagtgttcacatgcctgggcctacccaaccaggagttgaggcttgcaatagacagagctcccaacatcagcaccaggagacttggctaggaatgctggctctgcttccttattacctgtgtgaccttaggtaagtcgttgagcctctctgggtctcacttggcttctgtggacaatccagaagagaatgtggccttgccaacatcatggggttgtatttcaaggcctaaaggaagtaccatttatgaaaagggcttggaaagggtagagtaccaaataaaatgtcttgttaggctttatgatcactggga

SEQ ID NO: 54921 - DNA, 1439 bp, Bovine  19866880614182
  misc_feature (1)..(1): n is a, c, g, or t
nctgtaaacacacacacacacacacacacacacacacacatacacacacacacacacatacagatcagagggaactttccaaaacaagatatgggtacatctccccactgctgaaaacatcaatggatccattggcttttcagttgccttgctaatctggcctcatctgatctttctacactccctccagccttgccctctctccccctaacccctgccttgttgttgttgcttagtcgctcagttgtgtccagctctttgcaaccccacggaccatagcccgccaggctcctctgtccagggatttcctaggcaagaacactggagtgggttgccatttccttctctaggggatcttcctgacccagggatggaacccatgcctcctgcattggcaggcagattctttaccactgagccaccagagaagcccttactctcacctttactcacaatttgtatgtcatgaacataccaggcacagtcccttctccacacctaactcaaaccaccccatccactggaaataccctctaccccagccctttctgaacaatacccctttatcctgcaaagctcagccaaaaaaaaaaaaaaaaaaaaaaaacctcctactttcatcctaagcaaagagggaagagcttacactactttgcggatccccgtggccgtgtgcgtcctcccaaacagctgtcttattggccccaccaggaattccgggacagggtttctcttgaaatcattgaaggtgaagtgagtctggaagtcgtccgagtactgcatcagagagaactgggaacaggcacctggtgttagactggagcaggcacccctcctcccacttagctatctcccagaaagttctccataaatcctgaaatactccaggctccaaattcctccaaattctgccccatcccagcccttctgcctcaccaggaggacagcgattggccatcagctcccacttctcagcactagaacttagccagagatgacatatgggtttcatgtcccatgccaacccctatcgattactgtgcctactttacagagggctggaagaaggctgaagctgcatccagtcagagcaagacagcaaatcatgaaagaaaatgctgatcaagtggcaatttggcaccatctggacaggaagtaggacaggacccgctataggcaggctgttccctaacctacccatttgcactcaccaaggttttggacttttggaattgactcatcacagttgagacaaacctcttcatccgctcaaagtctactgggtcgatgctaccagagccatcaatcaaaaaggcaatgtcactgtcttgctcagggcaccctgggggaaaaggaaaagaaactgtaagtacaagagactcgggttcatttttttttttttttttaaatcagctgtctgctgagcaatgagaatgaaa

SEQ ID NO: 54922 - DNA, 1593 bp, Bovine  19866880852066
  misc_feature (1)..(1): n is a, c, g, or t
naaaaataacttagtaacaacagccccaaatgtgtacacacagactttagaggcaagtgcctcctttcataactgggagatgcccatgaattccttcactcctctatcagctgactgtggctacaatactgctttctgttgtgtaacaaccacaaattcccagtggagtgcaacaataagaatgcatacaactcctgcatctgcagttgagctgatgtaggcgcagctgggctggctgctttcatctgggcttggctggggtaactggctctgttccacgtgtgcgtcatcctcctctgctccagcagactagccaaggtagatgcttctcatggttacggcaaagacacaagacagcaggcaggaatggaagaggtctctcatggcttaggctggaaactgacacgcggtaactctcaccctattctatgggccgaagcagtccatgtggccaaacccagtgttcaggggcagggaaatggactccgttcttttggtgcaaggagctacagagtcacttggggcaggccatgcgtagagggagaagccacctgtccacctcaataggaagctgggacttccactggaccagtgttctcactggtcccccgcctggaatgaccccccaccagcttctctaaactctatccactctataagtgccggccaacagtccacctcctttcgcaggaaatcttccccactccccggggtgcaccacgtgagctgctccaatcccctggatggaggcctgtggctcccgtctctccggccagctcctaactgcctcctagaagcacatatggaatgtgtctctttcagggcccctgcctctggggctcactcaagcgctggctggtggactggatccctgagaaacggaggtgatgctggtgctcaactttcctcccaggaaggggaggctatgttgattgcctttgatatagctgccagacctgaaatccctggggagctgaaaggtgtgattctgaggtcatcaaatctgaagcaacctgcgatcaccagtagagggcgctgtactttgtcatcttggccccacagcctcgctgcctgtgcatcgtttctcccaacaccttcttcaggttgtacaaagaaactccactctcctgagagcccagaagcagcctatggaggctgagaagcagatcacagcatcacagggtcccatcttgaatctctcgtgcagccacaatacccaaaacttcctcaccaaagaactcttccctctagaaaatctgcctgtgcacagacaaccgtggttgcagatccacaccctggaccttaatttagtttatccaatccacccccaatgacacagttaatgtttcaaaagcaagaaaattaggaaggagagaaaacaaagaagcaagatgaaaccaagagtgtgtaacattgaaattaattatgcatgtgcatgcatgctaagtcacttcagtcctgtgcgactctttgcacccctgatggactgtagcccatcaggctcctctgtgcatggaattctccaggaagaatactggagtgggtagctgtgcccttctccgggggctctttccaacccagggaatcttccca

SEQ ID NO: 54923 - DNA, 1086 bp, Bovine  19866880923986
  misc_feature (1)..(1): n is a, c, g, or t
natcctggacatggcttagctggccccttagctcagggtccacctggctactgtctcatctagaggtttgactggagaagcatcagcttccaagggcattcatattgttggtagaattcattttcttataaccatagaactcttagtggctcctttgaagctaacagcaaagtgagaatgacttctcagagtcactaaagaataaatgtaactctctacccatcaatatctatatagatagatacagatacataaaataatataatgaagggagtagcatgccatcaccctcaccacatgacatagcttaaacaaagaagtgataccccacccacgacctttgccatattttatctgctagaagaaagttataggtccttctacaccaaagaggaaaggactgaccaggacattttaactgggggcaaagatcatgggagtcatctcaggattcagctgccacagtagatttcatctgaaagacccaggactgatagtggtacctggcttatggggttgtctgtacagtcgaaaagcttagaacactgcctggcacactgaaatggcttgatcatcattattatcctcatttgccactatcatgactaagaagctttggccatattttatcgagctcagaggtcattcagtaccttcaagtgatttgggatattgttatgcagagcaaccgctttcctatgtgtccagggatttctccatgcctcacactgagtccacattccctctgatgtcttggaatctttaagctggacctgatggctcagtgccatctcattttctaggtagaaatgtccctgttagagatgggttatgtcaacttttgcctataatctctgagcttctaaattccaaatgctacgttgttatgattcaacaaattcatctcacaacctcttactgcatgcctacagcatgccaagtcctgtgttttctccctctcagctggcttgctccagcctcgatccccagaaattgttctctcgtttgcctgttttaatttggatttggtgtcacttttttctctatttaaaattgagccccatattttagaagcaatatctacaa

SEQ ID NO: 54924 - DNA, 708 bp, Bovine  19866881031961
  misc_feature (1)..(1): n is a, c, g, or t
ngtgtgtgccttatgtacaatgaatactccctcccccacaggaaggcatccgggtttgtagactggctgtgttaactaatgactgcagaaagctactgtcttatgctcaggatcatacccaaaatatctgaccacctgtaggtcaggagcgctgaatgcatgctgggcagattctggagccccccttgctgtggcaggtggtaactttttagttcttggattatagtgggtggaggcctgggagattccgagggtgattgttgactactgtgggaagatttctttatgttaataatcagtatgatcatactgctgctctgagttaaatatcggccttgccattgtagtcatatttaaaaaattctgataagaatgaagtgagcttcctatacgctgatttgcgagcggcggactgtgaagtgggccccacagaggtgaggcgtccagagctgcttgacccagcgctggggactggctgccctgggaacagaacccctgccctggatgcaacattgccacgacagctgtatcacaacctttaagagaactaacatcctgcagaaaacttggtataattagtcattaataaccagaacctggcttccccacggtgcaaattgtttccatattgatctctacctgcattgtcagcacgctggaaagattgaactttaagtgcttaattcagccccattcaaccgataattt

SEQ ID NO: 54925 - DNA, 945 bp, Bovine  19866881103556
  misc_feature (1)..(1): n is a, c, g, or t
ntaagatctagtagaaagatgtaattcccatgagtaatagttatcatgaatattattatgctccctaggagggaagggggggaaggagagaggagatggagatgaggaaatgagtctaacctgagtgtgtgttgttataaatgaaggcaattattccttgcatttgaatactctatattatctgatacatattatatatataatatctgatgatatctcatacctaacatagtaacatatgtaatatgttgtataataatataataacacacaaccttttttatttcatcctcacagtcactttgtaaaaatgacattttcccattattcagctgaggatctcagtgtgtgtatgtgtgctgagtctctagagtcatgtctgactctttgcaacatgatggactctctgtccctgggcttctccggcaagaacagtggagtgggttgccatgtccacctccaggggatcctcctcacccagggatcaaacctgcatctcttaggtcttctgcattggcagccgggttctttaccactgacccatctgggaggctctcagaagcttgcgcaaatcccacccacttttctaaactccaggttcagtgcgtaaactgtaacacagcttttctggcatgaacccaatgcgatggtttacagcctatttctctgaccttttctccccacccgcttcatgccccacagttgacaagtgaattatttggtggacagaatatccacattaactgagagctgctccagagcaatacccttagagctaattttcagaaagttggaaccaactttattctaaaaactccataggggcaaagaaatcttttgattcagagagcacttcaagatctgatatggtttgagcatcttgtggctaagagcatcaacggttcttttaaaattccaagggaaccttcctgcttgtttcgagct

SEQ ID NO: 54926 - DNA, 1206 bp, Bovine  19866881302125
  misc_feature (1)..(1): n is a, c, g, or t
ntgatgatgagtgtattgatcagctgataccaatttgtcccattacagctaacgttaattttattcatttgattcaggggctgtctgcccaggttcctcaactgaaaaagctagtaatttccccatcatcgttaatagggttttggagggctttactgagagatgggtattaaaacccaccacatttcaagtgaatactccccctgactgcttcattttcctttacttgtagatggctttgaaaaatggaggctcttacctttgttcaggcttttgtaagtaaatgttctataaatttgcaattttattccacagtcatgtacaagaattcattttattacagtttgtatctccaggacaagaaaacaagagtcctataggactcttaaaatgcttaaaattcaggtaccttaaaatgctgcaatcagcacaggtgagaagtaaaatcattttaaggaaataggggtttgttgatgcaaaaaagaatcttcaggatgtttcatcttgtcctcatgtcttgagttgatctggctctttcactcttgatcagtgatcattctagatatttaaaatgaaatgagatgttgcccacatcttaaaatcagatatctattcctttaaaaaaaaaaaaccaaacttttttattttgtattggggtatagccaattaacaatgctgtgatgatttcaggtgacagcaaagggactcagacacgtataaacatgtatacatggttttgattgaatagtactcggaagtagagttaaggaactgcaaattagaaatgcttcctaagtgttttaaaggggctgtcaggaaatactatttgatgaaataattttctataacttaaagtgacctatcttctctactgaacactgtagtagattggaaattgtagaatctcggggatgactcatgttcctttttttaataaacaggtcttgctgtctctaagctgaacctcgtcaccttttttgagcaaagaaaggagccctgggatgtgaagaaaaggagacaacagtcatgcacccaggtgggtagggatgaataacgcagattgcgcagggatggtgtctgaggcgaaggagaaactgaggccttaaaatgtggtttgggcggctctgcttcacgggggattccttcgagaagtccaggcctctgtgtcccgctgtcacagaggtccctctcctgctccactcccca

SEQ ID NO: 54927 - DNA, 740 bp, Bovine  19866881660135
  misc_feature (1)..(1): n is a, c, g, or t
ngaaacttctaacggacatctcccagctggacaggtttcctcacataggctttttccttcctgcatataccacaattgtgtcctgattgtgtaattatttgattaatgcacacacacacatacatacacaaaattataaagaccgatatttttagtatttagtacagtgcctagcacatatataccctatgaacatgcagtagttaattaatggcttaattaattaatcagcatgaacagataagagagatagaggcagaaataaggtcatagatggggctaaattccaaagttcatttgtatgtctgctgctgctaagtcacttcagtcgtgtccgactctgtgcgaccccatacactgcagcccaccaggctttccagtccctgggattctccaggcaagaacactggagtgggttgccatttccttctccaatgtaggaaagtaaaaattgaaagtgaagttgctcagtggtatctgactctagcgaccccatggactgcagcccaccagactccttgggattttccaggcaagagtactggagtggggtgccattgccttctcctttgtatgtctacctggaacaaaatagacatggacactgtatgaaaataatggatactgaactctaattctaatgaaattataaccaggcctgggagggtgtgcatctgagacttatgtttaaacaaatattgaaaccaccatggtatttctcttccccagttatccccaaa

SEQ ID NO: 54928 - DNA, 846 bp, Bovine  19866880380632
  misc_feature (1)..(1): n is a, c, g, or t
naaatattgcttgggactacaaaataaaatattatttgggactacaattaaaatattgctatttgaaagaaagaataaaaaagaaactggaagatttggtaatatacttcctgaaaacccaatcaaaataatatgcactattttttttaacctctcttattagggacttaagggggaaaaagcaaatgactattaacaagatataggaaattagtttagatctgattgcataccataactcaaagagtggggcttccctggcagctcagtggtaaagaacatgcctcaaatgagggagacacacattcaatccctgggtcaggaagattcccctggaggaggaaatggcaacccactccagtattcttgctttggaaatccaatggacagaggagcctggtggactagagtccatcgggtcactaaagagtcagacacgatttcgtgactaaacaataaacaacaacagtttaaaaaacacacacacaaattaatttattttcaccttgggaggagtactaatggattgggaggcatgggaagaaaggagatacagttgttcttctgtctcccagacacagccccatttccataccaaaatcccctgaagctcaatttgtatacaaccaacacatatccttccacatactttaaattaactctaggttgtataatatctcatacaatgtaaataatttctaatacaatgtaaatactatgtaaatagttgccagctcacagcaaattcaagttttgcttcatggaactttccaaaaaattttttttcaaatatttttgatccatagtgggttgcatcccaggatacaaaacctacagatatggagg

SEQ ID NO: 54929 - DNA, 3934 bp, Bovine  19866880395842
  misc_feature (1)..(1): n is a, c, g, or t
nattataatgtctcctccacaatatgacaacatccatagggaaaacatggaaataaagtctgccttggtccatttccccccatcttagatccttgagaaagtgattccatcatcctttccctgaagtactagtacatttcccagccacagtgggctccagtgctgtagtcctgtagatttctgccttcagatgcttcccgtaagcagacaatcccttcttctacgccttctggtgattttcagacaaaataatccaacagacaaaaaaaaaacacaaaaaccgaaaaacatcctcatgtagattgtttactcttttcaaagtttactctttttacagtttataaggccattatatccactaattaatttttcatttgagtccacctactcagtgcaaaactgtaatgcccattaaattaagctagaatggtgacagtgtctattcatttggggacataatctcacctggatccttgactaagcatgagtacacattattatttttctcacttttatttgcttccatgggattggtataaagtcgcagatacagaaactgtggagactgttgtgcaagaaactggcaattatgcttctttaaatttacttctggtacaaatctgccagatagaattgtattttgtgtcacctcttttaggctcaaaaatttcctcatttactcttatttgtcctatattgaaaaataagggaaaataccaaccctatcttcctgatattacaatgctcttgttctgtttaacgcaccatgtggatgcacgtgggaactcttctttcagtggtagatgtaatgaatgtactgcttagctgataaaccctggcacagaacagtcaacgaaaaacttctcaggctacatgctttctcatttcactgtgtggaaaacagcaggcaactcccactcaatgaatgctccttattcctcactgaagtaccaccctacagtggctgatgaaggcctattttagggatgggcagatacggagcagaaaagccgactcagacacctgtgatttcaactactgccccatcacacttcgtgcaaaatgcaggtgagctaagtagaatataatttggcataaacttccatgatcaaacacttagatcttgtccttttttttaaagggtgttcatgcagatatcatttacttaaaaacaacagcaacaataaaagaccaaggcttccacatgcccttctgacatggaatagaaatgaatcaacactcctagcaactcccttactcttttgcaagtctgttatacctaccagactgtctacacacaaggcccattcagcacaaaattgccctgagtgctatcatgtgccaccagtgggcagaggctactaagctctccacgccttcagcttcctcaggatgccggctgagctgcaataagtttgaaagactttcctgtgggacctgggtgaccttctctggcgctttgatgttaaatacagctcactggtgtcacggctggaagttaagtgagttaactgtgctgtctggagcaggcccacgaatttatattctctgcacttgcagtttgcagaccttcaacttcaccctgattttgaattattttcctgccaatctccattcccccctgcaaagcatggagaggtaatagataagaaatacaacttcattgtcatatggaacaagccattatagtatctctatggatggcaataaagcgggccctaggagactacatctgccatctgggaagtatagtaggttttactcgtgctcactcgtcacctgaattgcaagagaacccgcaagcaccaatacctacgctataaatgcaggaattgaaccatcaagaagttgaatgtctttaccttggtaggaaaaaactggacacacatgttaggtcatctttccagatcttctccaaatgatttacacagactgcctgagggttaagtacaagtgtggggattaaaagccttttttcaaaaaagttttattcagaaccctattaattccttcgctgctctgaaaaattattttctacttctgtgtcaatgttttcactatgaatggataaggacattataagccctgttatataaccctgctaaggaaatagggccctccacccagcaggaatgtcaacataattgctagctctatatcaaatctgagagaagtggataaattgtatattaataactaacaatggggggatcagttgaagacgctcaactttatttatacaaacatagagcagcattcacacctcagttttggctagaaaaaaagtcaatcaacctattcaagtggaagccaccaatggagcttgctaagttctcccctcccaacccctccttctattgagtggcatgaattttttaaaagttacctttacttgccttagtgtggtggtgatggtttagtcagtaagttatgtcctactcttgcgaccctgtgaactgtagcctgccaggctcctctgtctgtaggatttcacatggcaggaatactggagtgggttgtgatttccttttccagtacctcagtgtaacacttgggtaagacattttttctgccaacactgaaaacaagtatttgtttaatgagtatgtacaccaataccaaaccctcagaagaacatggcacaacatcaagaaacataaatccttggactgatttttactcctgtgggactctttcataaacttttctcttctattgtgttgaacacaaaatatatttatattttgttaaaatgataatcattgttttaattaggggagacttttctgatagtatatctaatgctaagagaaatttcaactgttatgtgatatttggagtggacggtcagtgaaataaatctgttcacaaacacatgaaacctcattctttctaaataaagctaaaactcaataacatactttctgcttaatgctggcaactgcaacttcctggctgaaagaaatagagcgcccaacagtttataaaatgactcaaaagatttctcaaatataataagtgtctttggccaaatagcatttggatgagttaaagatagacaacaacaaaattcagtatgtatattgatacattgtgatcagatttcctttgaaatccccaaagtctcaagattaagaggttaagagagctttgtagttaagagactcacaggctttgaacaacagctcattttttcaatcctcaaaaatgtttggtaccacatctgttaataaggaaacagttcgatgagtcagtgtctgagctctcatcgccttgaaggcagtccaaaatggggatttctggcactttgggccaattttatgagctttaaaaaatatgctgtagttttagaatcactgagctatattttgctattcaaatcaccaactctcagatatgctccctgaagtgtcacagttgatcctctcttcccaaggaaggctcatcccagccaattaaccgtaaaggagaagcagcaggaccaatccagaggaggtcctcaagtcatcctcaacagacgagaagaacgacttcccaccagcaacaggtcattcccactgatccacagaacaagggcttggacaaaacatcaagtacacaatgttggtttgtgtttaattactctccactccttccctgatggcttcctgatgagcttccctgatagctcagttggtaaagaatccagctgcaatacatgagaccccagctcaattcctgggttcgggaagatccactgatgaagggataggctacccactccagtattcttgggcttccctggtggctcagctgataaagatctgcctgtaatgccggagacctgggttcaatccctgggttgggaagatcccctggagaagggaaaggcgacccactccagtattctggcctggagaattccatgccagactttttcagtttcatactctaa

SEQ ID NO: 54930 - DNA, 955 bp, Bovine  19866880602092
  misc_feature (1)..(1): n is a, c, g, or t
natacaaaatttcttttttgagtttagccccgtggtttgattttacattctccaggatttagttgaaaaaaaaaaataccattttcctctgggaaacatttttatgataatacaatagagcccaatttttgttgtttttggaagagggttcagttcagtgctagtgttcatttttcttttatgttaggatttatttataaaatgcttaaggagccctttgaaatcttttggaagtggtacactccctctttttttggtacactctttaaaattatatggtgacaaactgttgattcttttcattgtcagttacttttatttctcctaatgcccatgacactcctgttattaattgtgcatttagggtcatgcattaactcattcaagccacttgggctcctcccgatatacgggtgttcgattcattaaatgatgcattaattgttttcaaatcactagggcctctcttaataacttgctggagcctgcaattaaatagtgtcccagtgcccccaaaatgtatcctcatttaatgactcagtcactcttgaaaagggaatttgttaagtgaccacaattatgctagagttgggaagtaaactgagttacttttctgagttcctttcttatcttttgtctatctgtggccttcccaatagcttgctgaggtatcaactgcaaatatatattaatatcgtaaaagcttgtagttttgcaatttcaaaatctaacacattcctcaaccttaattttaggcatccacagaccagaaaatcaatgaccaagacagatcttacaccttgcagtctgagatgggctccattacagtgccagcaggtagcccatataatggaaagtgttacgtataggcactggactaaatctctatttcagttttttcactgaattctcccaaactatgggctataggtttttatattcacctagatttcac

SEQ ID NO: 54931 - DNA, 1004 bp, Bovine  19866880661679
  misc_feature (1)..(1): n is a, c, g, or t
nattttaaaatttttttatgcatatgttttttctgtagtttttctttcttttttttttttttgagccttcagaggttctttgtaaattgccaatgcatctcttaagtggccactgtctgatttggtttcacttgcttgtatttataaaaggtaaattgagatgttaattcactcaaaactaccccagattctctctctggtggattctttctcacccttctaagactgggagcgctctcccaagtttattcttccaaaggttaaaggtttctaccaggaggagataaatgtatactattaatatatccagatagaaattgctatttgtttcatttaataaatgagtcaaaacaaacacataccaacacattccaaaatgcctggagagctaagcagccacttaactgaattatggagctttggttttgttattatcttgaaagatcataaatgaatatattatgcttgcttgtacatatactttacctctctctacatagcatgagacatgatctcatctaaaagaaactgttactgggaaaatgaaaattattttataatggaaatattgctgggatcccattttattctgtcacatagtaagctgacctcacaataaattcacatacacagcatacacacacacacacaccaactaatcttacattcttggatcgtcatttaactaaactcttatgaagaactgataaattaaagagtctagacaagatttctagggagatagaccacactgcaaatagatcaagtaggtaaaaacccttagagaaatggtagaggaatccgtgagaaactgaaaatgtgtaaaagatatgcataatgagaactggcgcaatgatctgatataatcaacaggagacagaattgattttaattcttctgacaccataacattaagttgaattttttcctgcataattgttcagagtgtctgaaaaagggtattgctatagtacttgctgatgtatatcgaaggctatttgaag

SEQ ID NO: 54932 - DNA, 1492 bp, Bovine  19866880700412
  misc_feature (1)..(1): n is a, c, g, or t
ncctgtggcctgttattctatctctccgtctatttgacattggctgtgggtatgacaggccagggcgaaaactacaggtaggaatgatatgatctcagaatgctgtttatggcttgtgttctgcctaatggtcatgatcttccctgtactgtacctattaaatatcttatatttcgccccttgcctaagtagagggagtctgtttgtgggctgggcaacagcagtggcctcactcactgccaaatgaatttgattgcggggtctctggccagatgtcgttgttgtcctcctgtggacgtccataaaaaattgacccgataagaacctgtctccaaagtttgcccacttcttagactctgtattctatgtgtagtatctggttgcagtacgcctcttcatacttaagctaggtatatcacagaagaggggtggaccaagattgtaagggtggtgcagggctgtgtaggggtgtgatgtatggtcaagccactcaagatggctgttctcttgctgcctgtacatcccctggtcgaccagtccctgctccaagtgtaccctacttatatgaacttgtttgtttcctgtctgagctagtgattgttctcatccttaggccagaatggctccacctgctagtttattaaagagaaacacttgcccttgtgatgttctttaaactgaggggctataaaggacattcccaggctgctggtttccctggtaactgatgaaccaacctgatgtcaattccccctataaatggtagctgccttctctactgagtagtgaatatggctgccatgtcctgtctgccatacacagtgaggtgttgctccaggagtctttatttcagacgtataagatcccctatccagtgtcattaactctggtgccattttcagattcttttttcatctttggggctgggtcactgcaaggcttataggcctgcagggtgctacccagcaacccctaaaaagggtgagggcattacctgacatttcttttcatgtagcaacaatgagtactagcaacatagaccttattcctcggttatttgcaaagataaattcaactcctgcattttgctaaaaaggaaaatgggcaagtactcagcaagcacttagtgaattaataaatgaaatatgttaaggaatatgctgcataatgcctaataggaaacactcagaaaagttctgaaaatgcggatttgttgtggacattgtcaacccaggcttttctgaactgatcaaaatatgtgtgaacctcaagaaatatgttttctaagtgtgggacccagccgaagttgtgcttctgcaaaccccgggtggagactctcactcctagcacagatcgtgggccttgtgttcactgctgaagtgctctgcacacaaaccaccatgtgaccaatattcagccttgaaggcttctcctgcacttccttttctcaccttgcattaatctttgtttttccttttctctaaatttcctc

SEQ ID NO: 54933 - DNA, 1600 bp, Bovine  19866880759684
  misc_feature (1)..(1): n is a, c, g, or t
nagttggacacaacttagtgactaaacgacaatgacaagcttttagtaattgctgatctcacaagttcatgacagcaacaagtccaaagaatataggtggtgtccatttatttaagaataaattcatgggttaatcattaatttctatacatgtatttgaacgtgctatttttattttattttttttgaacgtgctatttttaatcattcaaataatttcatgtttgtagggcacgtgtttgtatcttgaagctattaaataagcaggatgaagatggtgatgactgacaaagtgagatttgtattaatttttccaaaaaattaggccaagtaaattggagtgatagcattttcagtttgtttattgatgccaagtattattaaatattatattaataactttgggaggagttgaaaatttaaaggaaaaaatacatgttgttttatttacatggctatttctaatgatacaggttttcatccaaaatacctgaataaatgaccaaatgacacctggaccttcataagctctgagtcaatggagtcaatgatagttaacattgtattatatacctgaagggtttggcatagcaaaagttccttaaaactagtttcctgaataataacagctccttatctgatttctaataaggaggtggaaatgatttgatatatgttgtttctaatagcaatcgaggcaaatcgcttttgtaatagaatcacatcacaattagatattatgtttcacagaaacattatgatggcttcatttttgttatattgaaatgatcataactagtgtatttactggtgttataagaatggaattagcttttaatgtatcagacatcattctaagtattttgtctgcattgaataagtatgaatgctaaaactaggtgagagtatgacaagaaagaagatgttttgtatgcacagagtatctcctccaaagatacttagtaattagaaaaggaaaaatagtaagtttacagtaaagaaacaaaatctggtagacatcaccttaagcaggtgatcaaagttaacatggctggtaatgagacgtgatgacatcaggtacctcctgatgtatgcatgatgacagacaaaataccattccctgggtattcttttttttttttttcttccacactgtgtatcttgtgggatcttaccccaccagagatggatccctggtcctgggcaatgaaagcctgcatgttaaccactggactgcctgggaagtccctcccctagtattcttgctaaaatagagacctgtatttaaccatgaagcagcagtagacaaacctcaaatcaagatcactgtacagagactggtaaagactcttcaaaatgtcaagttcatgaaagataaagaaagacagaaaatgtgtcatagattggaggaggtgcgactagaagatttgacaaataaatgcagtgtgggtcctatattggattccaaataggaataagggtggtttggggacagttcacaaaaggtgaatatagcatgtagattagttaagagtatcacaccaatggtaatttcttggtgttagaaatcgtaccatgagtatatcgtgttactacttgg

SEQ ID NO: 54934 - DNA, 826 bp, Bovine  19866881115257
  misc_feature (1)..(1): n is a, c, g, or t
nacgcatattcctaacctttgttttccaaagcaagaacatactttctttttaaaagtcatccttgagttcatcgtatttcagtttaatttcatcccatttctccatgttgtgtctttagtagaggacaggcaccattctttacataaatttagagtcataggaagtaatcatacattcgccgttgtctgtgatgactgtaaagtaaatctaaatagataactatctactcaactttttaaagtcacaagtgaggcaaatacttggaggtttcacattaatcttctataattagggctgctaaagtgggatcccacagtcaagcagctgtgtctcaggtgaaataaataaatccagttactcctatttttcatcataggttgtcttatcaaacccatttttaatcatcctttctgatctctctaggaccctatgaagacttaacaagggttaattttagataacctgagtgtaaaacatagtctcatcctgaagttattaaatgataaagcttccacaggactcttttcaaggaaaacattttgtagcacagaaaagttagcaaaatgtagatggaatataatgttccctaagagtaaatacaacgaaaagcagctaggtataagtcttgtggaaaatcttagaagataaaagacttcagacattttggaattgaaatttcctgaacaagttagtattctagtatcctttaaaaattttttttggtgtctgttttcagtaactttatttttgtccatttcttcttactaaattatagcctatgacttaggtggatgattacttcggtgaaatagtcaagatctcaca

SEQ ID NO: 54935 - DNA, 1318 bp, Bovine  19866881133641
  misc_feature (1)..(1): n is a, c, g, or t
nctccgcctataggaagttatattctagttggagagatgtgagtatagataaataaatgcaactaagttcatttttctagacagattcttacacagcattttcaattttaaattgtcaaagatttagaaagaagccaatttctaggtgattgctaggggaaatcacaagactgataattaacttcaatactgcaatcagtttttaagcaaagagattatgtgtctaagggaattcaataaggaaattagcgtgagttttcatatggaggaatttacagagaaaaatatttcatttcaattaacaaaaatatcatgtagcctgatggtaaaatgcacaatgcacacctgaagtacaaagaagagatgtggtttacctggctccaaggctggcaaagactctggtcgatgagaagggtgtgtgcgtgctgagtggctacagtcacatccgactctgtgacactgtggactgtagcccaccagggtcctctgtccataggatcctccaggcaagaacactggagtgggttggcatggtctcctccagggcatcttcccaacccaggaatcgaatccacgtctcatgtctcccacattggcaagccagttctttaccactagtgccacctgagagggtatttaagagcaaaaataggaattatgaaaaaacatgacctacaaaacctagcctaaggagtgtagccgcaacaggaggtaggtagatgttgagaagaaatgctaaaaagagaggaatcaggaaagactgcaataaggatcttgtcttttaggtaaatgatttacaaggagccgggcaggaccgaggcaaggagctcattcaggggaaacacctcgttatcttttccaaattggaaaaccatcacctcaccctcaagattcagatacacagcagcataatgaatggaattttggaaatacaacaaagtgccagaaaagaattaaagattatatttaatatcaccatccagagatgcagactgttacattttgatgtgtcttcttccaaacctttatccgtgtgcacacacgtacatacacttttcatcttgaaagtctgtgttttcctctgcatctggttcccactacatggctgtggatgtgctaacactacactcgggaggagagaccgcctttctgttggcaacacggggtctccttagagttaagctacggaaacctgggtcagctttattcatcctaactgcctccatattcctgggcatgttcccatttaagcactctcccacagctagatccaattaaacagtgacagtttttgcggtcagtgatatttatttcctgc

SEQ ID NO: 54936 - DNA, 1635 bp, Bovine  19866881233188
  misc_feature (1)..(1): n is a, c, g, or t
ngccctctgctaatctttttactattttaatctgcatagtgctctatgaagtgaccattattcttatttctatttaacagacttgaaaattgaagctcagagacaagtctcacagagctctacagtagtggtgcttccgggaactcaaatttcccctcaaatatcactgtgttagaaataaacaccagaaataaacaccccactccagtactcttgcctggaaaatcccatggacagaggagcctggtgggctgcagtccctggggttgagaagagtcggacacgactgagcggtttcactttcacttttcacttttatgcattggagaaggaaatggcaacccactccagtgttcttgcctggggaatcccagggacgggggagcctggtgggctgccgtccattgggttgcacagagtcggacacgactgaagggacttagcagcagcagaaataaacacatgaagtacctgacatacacttgatgttccaaaatagaagatatagaataattatgatttttttgtagtttaaaggttcatttgatctgactgtgttcctggttctccagcagtaaagttcaagagcagaacacaggaaaattttctagctaaataaagctgttgaaaacaggcaatatttagccatgataaatgcattgccaaaagagtctgaagacctttcttctttatagaagtctcacttgcagaaatcaactgattttcatcatttaagttagaaggctggtattaaaaggtctcaactcttcttagaaaattgtggagtttgtttagtcagggcttgactcaattctgacccctgctttgtgttactcagagtagcacagagctttggttccagccatgccatttgagcaaggagcactctcacagaacctgagcattgctctgaatgtggccacagaagcagcatggacctgggcttcacgtacttctgtaaccaaatgaaggatctttttatgtccttggtgggctgtgatttaagctgtgccagcccttcttataaactacagtgtccttccatgataccttcgattcaccccgaagccgatcttcaaaactattacagaaacttaaatcatgcttcatactcatcaaattctacgactctcctttaacttttggacataaattctcccagatggttttgcagttctttagaatgtctgactcaattaaactccaatccttttagcgatgagaagtgaatgcagtttctagttgttaaatgctcatgttcaatttgaatttcaataactatccttttaggtttaggctgtttgtgttttctcacatcagtaagatagggattcagacaatgtgggtgtcttattagagattgctggagaagactcttgagagtctcttggacagcaaggacatcaaaccagtcaattctaaaagaaataaatcctgaatattcattggaaggactgaagctgaagctgaagctccagttctttggccacctgatacgaagagtcaactcactggaaaagactctgatgccaggaaggattgagggcaggaggagaagggggctacagaggatgaaatggttggatggcatcaccaactcagtggacatgagtttgagcaaactctgggagatgg

SEQ ID NO: 54937 - DNA, 1405 bp, Bovine  19866881493351
  misc_feature (1)..(1): n is a, c, g, or t
naattctgaccttagcatctttacccttgagcgtgacccctttgcaggctaccaactcactaggctatgcaacttgcctctcttgcctcagaatataatcccctcttcttaggccttttatttcttccttacctctgatttagggcatagcaaccttgactgtcaaagtcgaaacattaactagtctatagtgggcttccctaatagctcaattggtaaagaatccacctgcaatgcaggagacctgggtttgattcctgggttggggagatcctctggagaacggataggctacccttctataaaaaaaatctatagtacttttccacatatttatgataagagggaactgagattgtgtgatagacccaaatacacagggttttgctttggttttagtccataattttcatctcttaaaacaattcattgatcatgtaataattagcatattcaaatattggtttatgctctctctcatagcgtgctgaagtccatggggtcacaaagagttggacacgactgagtgactgaactgaactgatagctccttgaaaaatagaaataattaaaaggtaagcagtagaatgcaacagtaatatatttgcataatttagcaacctcaaaatgtacaaaataatcacaaactggctctgctataaattaatcatatctatttaaaaattgtacttaaactcaaaaatcctactaaggaaaagagaaaggagcagtgcaggatgtgaaagacactgggaacagctgcataatttaatcctaacacatccgagggattttacacttgttaggcccaagccaacttctgacaaatgactctgtgatgttggaatgaaaatcggggcgcgactcccacggtagaacatgtttagtctagattccttgggacttgttcaggaccactcaggggtaccagagggactccaggtttgtcgtccatgacattttcaccaccctagttcttggaggtgccagcaagttgcatcttattccccagaaatcccttcctgaaccatggttgtacgcttgggggctacgaagccataccagaggatctgcatatcttatagtcaggaaactctaaaagatgccttatgtttgcacaatgtaactgctggaaaaatttaacaactgtctcctaaataacaagagtatgccaaggtaatgtcttcacaggatgtagaggaagttactacatgtgcttcacagtcagaaactgctcagaaatctgaaggattatgtgaggtaatccaatagtgtttccattggaaacagaaagctgaagtccacttttacagttacacacaacacagaggcatttcgctgtctactgcttaattctatctttctcacatgaactgccttggaaatgtcactgtagtctgccaag

SEQ ID NO: 54938 - DNA, 1113 bp, Bovine  19866881661251
  misc_feature (1)..(1): n is a, c, g, or t
ntgaaagtgggtagagttgtaacatgggagctattgaaatttaattcagatgaagttctccatagtaaattccctctcgttatccaatagctgaaataggctgacatcgataactctctaaataggagaagtatttgtgcattatcaatggttacatatagactaactccttgatacggtgctacttgagcaatctgagaaatgtgaagtttatcctttagtgcttagcttcctttcaactttgaatagatggttcaaaatactttctgcatttttagtactaaatatatgtatgtgtgaattctaaaatgtcctaaactgagattaagaatgtgtaactgaacatcatgagaatacatttatttgtaaactgagcttacctgtttgactagtataaaaataacaagggattactaaaggcagatttaatgtttggattacttacagtactatcctagccttttcaccctaataatctcttgggatagtagtcactttaagtgactttaagtcacacacttaattgtacatataataagtttatgattactattctgctaccatattgtatattattctgctaccatattaatccagactcaactattgctgatcagatattaagatattaattatgtttctttttttagctactgtgatttttcaaaatgtcagtgaagtggagttgggatattttaatttaaatattctgtttttttcttaacaacctcctgtttttctaattacaggtttcatatacactggtgaagttgtgcaccgaatgctaacggccacacagtacatagcacctttaatggcaaattttgatcccagtgtatccagaaattcaactgtcagatattttgataatggtatgtgttggttagcctatattttgctgaatgtatacttataaacactgatcatcagattcatattaatatttttgtaatgttgggtttagactggatttgttaactggtgcaaatagcctgaggtaacgaatgttatactgcaccaattaatactataacaagtggataaagtatatggtaaaatgtcactcacgtattcattcattcattgctcatttaacaaacattatttttccag

SEQ ID NO: 54939 - DNA, 1417 bp, Bovine  19866880284664
  misc_feature (1)..(1): n is a, c, g, or t
ngtccgaaccccaagaagtcttagttagcaaagaagcctgcttacagttttgtagataatgtctctctggggctgcgattgccctcttccggctctggctgcctgtcaccggagggggttggtctgtagccggctatctttgttcagtcctttgttccctgcgctggcctggcggtgtcttaggttagggctggctttttgcgtagtagttatcccacagtctggtttgccagcccaagttagttcgctcagatagcgctcggggcattcaggccagatccttactctaagcgatacagcccgcgcctccctgcccagcccccacttgctagtggtgggtgcaggtgtctgcgatgcttctccgctgggggagttaccgttggactcgtaatatgtgggttttaattgtttatttatttttcctccctgttatgttgccctctgtgcttcgaaggcttggcacagaattggcagtgagagtgtttcctggtgtttggaaacttctctctttttaagactcccttcccaggacggagctccgtccctccctcttttgtctctttttttgtcttttatattttttcctacctccttttgaagacaacgggttgcttttctgggtgcctgatgtcctctgccggcattcagaagttgttttgtggaatttactcggcgtaaacgttcatcaaacattcatcaaatgttcttttgatgaatttgtgggggagaaagtggtctccccgtcctgttcctccgccatcttagctcctcctctatttttatttttaaaaagtctcatatcaagaaatgttttgaatccacatgctgtagacatgtaaagaaagaactggtctgagacaacatatgtttgtcaaagctatcagctttctgtcactagttagttcccttgtactcttcacagaccaggaggatgacctaggtcttattcctgcctattcccttgggaaaaccctttctatactacatgggtcatttgcacttaataggatactgaaacatgaaatttggaaaccacatcaagtggctgggtgtctctcctccacacccacagaaacctagatattttggataaatattcattaagcgtttagcatagggtctgctactaagtagacagtcactaaatattagctgaataattggtccttatttaagaaatcttaaacaactgttgagacttctaaaacttatacaagataaatatgttttgcttttgactagatttttggtccaatgggaattatgaaatatgccatctctctggcttgggatgaacaatggaagagaatacggacatttgctgtctccagccttcaccagcggaaagctcaaggaggtaagaaaagaagaggactttcaattagaaacttacggaatgactctagggacaggtaaa

SEQ ID NO: 54940 - DNA, 1476 bp, Bovine  19866880587123
  misc_feature (1)..(1): n is a, c, g, or t
ncttctcgcccgtgtgggtccgccggtgcaccgccaggttggcgttcctgctgaagcgcttgccacactcgcaggtgtacggcttctcgccggtgtgtgtccggcggtgcacctgcaggtgctgccggcggctgaagctcctccagcagtccgcgcactggaagggcttctcgcctgtgtggctgcgctggtggaccgcgaggtggtggcgctggctgaaggtcttccagcactcactgcacacgtgcggccgccggcccaggtgcgtccgctggtgcttcagcaggtactcgcgcagcgcaaagcccttgccgcactccccgcagctgtacgacttctcctcctcgtgcgtccgctggtgtcggaccaggttggagctccgactgaagcctttcccacactcagggcactggaaaggcttccagaaggagctgtgggtctggaggtcatcgggcagcggggcaacgctgtgctggggcaggagcggcccgggcgcgtttcccaccgagctcccggcctgctgctcgcttggtcttcccgactccgggccctggagagcggcctccccacacctctctgcccgcccgcaagcgagctgccccttggggtctgccagctgggtctttgcctccttgtccttgctccccaggcctacaggacaaaggagatacagaccaacgctgaagagatctgaagggaaacttctagccagaacctggcttctaacgtgtcccattaacaactaccaatgacctctgtgcatttcacttgctctgactctaaaaccagacattcctttacttctttccacctgttatggactgaatgtttgggttccctccaaaattcacaggctgaagctctcaggcccctggggctgctgttaggaggtggggcctttggaccctaattaggtgagggtctgggggtggagcccccaggatgggaccacgtcccagaagagcagaagccagggctggctctctgcacacaggggtcatgtgagtgggagccctcgtgatggattaacggccttacaaaaaaggaggaagaaacatgagatctctctctccctccctctgccacatgaggactggcaagaaggcaactgcccgtgaaccaggaagagaggccctcaccagacaacaaatgtgccagcaactggatccgggacttcccagcctccggaactgggagatattaagtgtctgttgttaaagccacccacttggtggtattttgtgacagtagcccaagctcagaccatcttcctgccttctcacggaaccatctgctaaattacaatgccttccctcttaatttcctactaagtcaccctgtgctttccttcaaaatctgactcaatgccatcctctaaggaacacaccttgatttctcccccgctgtgggtctctacagcacatgcattcaattagcactgtttattccacacttacttacacagaccttgttaca

SEQ ID NO: 54941 - DNA, 1692 bp, Bovine  19866880648022
  misc_feature (1)..(1): n is a, c, g, or t
naatgagcccccccccccgccctgccccccggggggctggcgaccacacaggtcccatgacgggatgacacaggactgatctgcctggtcacgcactgtgacctgaaaggcagaccacttcaaatgtccatcctggaaggccgggctcgcagggaggcgagcatcgcagactagcatcccctgtgcttctagctcattttcctcttaaggcttaatgacatttctttaacacagaggcagtggtacacattccagacaagagaaaacatatccttatctgaaatatttacaagccagcctttcacaggacccatcaaatgcggaaattcgaggcctaacaatctgattctgtcctctacataacttataggtctaaaactggccaagttaactcagggcaaaaaaaaagacctgaagacccagaggcctgctcttatttacacatgcccataaggctctgacctctttgaaatgctccagcgatgcctgaaggggtgaaatcccgcatcagtatccagcttggcaactcccctagtttgacttccaggagcttcttctccttcagtggtactgaaaaggacaacacaaaaacacacccagtgaaagggtctcccgggaacacaaacagcatctgtctgtgtcacgtcaaccactcaataatgatgcattcagtaacatcactaaacagaggctgcacataagtaatactacaggtaaacatatcacaccaaatacattatcttaagctagagtctatatatcgcagaacaagatcctgaataacagcctgctaggaataactataaagagagaactaagggccatgaagaagagataaaagtggaggatggatgcctttattttatgaggaagagtggggaaaactgactcagagaagctggcgaatcctgaacaaaggcagagagcctgcaggccgtgggggcacaactcgacctcaggtctggttcccatgctcctgaagccaatctgactcctacctcaagcatcccacctcagaccacagacgtcaaatgacttagtaaaagccattcccgaggccccatgggccccagatcatttcccaatgagaatctggacacaggaagggctcttgttttaggccatactgtattcatatctgggcttaagagtaaaacaggaaagtggccagggagaggctggccctgtgaatgctcataaaaggagggaatggcctctccgctgtcctcttcccagacgtcaactttaaaacattgtttgacaggcgcactcttcagagcaaggagtcaagggcgctgctgcttcttaaagatgaccaagaggagctggatttcaccattccaaggtttcttctccattttcaggatctaaggaaaggcttgggctccttaagaactaaccttgagagttcactgggggagaatcccaccgtgaactcttatcaagggcaagggccatcatcaggcttaatggcacattcacacaaactatgaaaacattcacattatcttgcattctcgttcaggggctgacaagtgccttggcacatcacgggagaaaaaagccaaccattaatttttcttcatattcatgtctctgtggtaatggtttagtcactcagctgtgtctctctctttgcaaccccatggagagtagctccaagagttatgtatctgtactataagaaaagag

SEQ ID NO: 54942 - DNA, 2544 bp, Bovine  19866880694184
  misc_feature (1)..(1): n is a, c, g, or t
nccctccaatgaatctggtcagagctcggccatccagaaagtcagaacaccagtctgaaagagaacccagaatactatcaggtggaacacctcccttgtttgtctcagggttccttcactctagcccaactgagccaccagtccattgactcagggggctggcatggttggaatctcactgaagcctccagaaatgttgcagaaaccagcacttgagaaaccaagcactacacttagagagttggagaactcaggtttattacagcagggccagaggagttgacactccaagctctgagctgcaacaaagcggttagagagtttttatgcacataccggcatgattaaattagtttgcagggccgggtgattgcaaacagcaggacaagggttagtgagataagttccagttcctagtattgtgagtccccactttctgagactatgtgatccatggcctatgtgatccagattttgcaaggagcaagctgagttacagaggcaaaaggagtaggaggctatgtaaaattttaacttttccctttatgagaaggagataatggtgttaatgactggttgtcaagtaaaaaaggtaacaactagtttgattacagatatattttaaaggtacggccattggatccaaaggatttgaagtaaaggttaaggaaagtgagaaactaaggaaaacttttggatttttgtctgaacaatagggttaagtttggtgctatttcagccacaggaaaatatgggacaattagatttactgtttttcttctttcaaatatcctctgggtaaagggtgatagcaggctgaattagttagaggatcttttagggagtctgtaaaatagatgagaacctcacctgaggatttggaactgaaagcattgtcctctacatttaggctggatacaaacatctgagacagcagggaaagattactgctcacattcggctacaataatattcaatatggcaacccactccagtactgttgcctggaaaatctcatggatggaggagtctggtaggctgcagtccatgcggtcgctaagagtcggacacgactgagtgacttcactttcacttctcactttcatgcattggagaaggaaatggcaacccactccagtgttcttgcctggagaatcccagggacgggggagcctggtgggctgccgtctatggggtcgctaagagtcggacacgactgagtgacttcactttcacttctcactttcatgcattggagaaggaaatggcaacccactccagtgttcttgcctggagaatcccagggacgggggagcctggtgggctgccgtctatggggtcgcacagagccggacatgactgaagcgacttagcaacagcagtactattattattatgttttaaaaggaatttgctgattccagtaattaggaagtaggtggagaaatctggctttagttacatttgattccaggagctcaaattatgccaatagttatctctctttctctctctctttctcattcattagtgtttccattctctttttttattcttttttttttttaatggagatttttttctttattgagaaacttaagacttgggtacatcaaataaaaccaatttcttgggggaaaaaaaaattaaaacccacaatagaaaaaaaaaaaaaaagttaacactgtctgggccatagcagaacccagagaatacattctttaaattgaaaaattctaggtgcttcataattgaccttttgatacaaaatgagctaataaatttgcaaatggggttcttggtgttgaggtccataggacaagctaggaagtcttcaaaccttgagctgaattccatgagagtttatttggcttttgaatcggttcatccttgtctttagaggtagcagcagcaacagcgtccaccttctgagcagcttctttcttggcatgataagcctgaaggaccgccacagccttctccaccttggagcagagagactcgggagactccagcatgtgcagcaactccgagctgttgatctccagcagcatcccagttatcttcccagccaggttcgagtgcatcgtctggataagtgggaacagatgttaacccagcatctgcttctgttcctgagcgggggtgggtttgctgtggccagcatggaggcagtcagcggctcctgcccctgaacatggaccgcaggtgggggtgcctgcaggggctggatggcagggtgaggactgcggatgctggaggcatattagtaaggtgcaacagcccaaggagcagtggcagcaacagcagcacgaagcgctaagttctgcacagctgtaggaacacctccagactggcagcttttactcagcccttgctgggcagcaccagccccaccaaagtacatagccaagcagtcagggcactcagaccggactctctgagtggtagtaaggaggccaccagaggctggagcattaccagttggagccagatggcaaagagctggacgaggcccagactggtgtatagcacttggcattc

SEQ ID NO: 54943 - DNA, 1338 bp, Bovine  19866880878769
  misc_feature (1)..(1): n is a, c, g, or t
nctttttcttggctctgtgaggcagacacagtagtggaaatcgctctcagtttgactctaaattacttttacctgatttcccctaggggtttgggagtttcactggaatgtctcatcatctaaactgtgatttttacattgccatgctttacctaaaatgtcttgactttctttttagctctctctgaccaagaactcatggcccagagtattatctttatttttggtggctatgagaccactaagcacttctctttccttcattatatatgaattggccactcaccctgatgtccagcagaagctgcaggaggagattgatgcgactttccccaataaggtgagtgatgatacctggagagaggggggaaggtgaagccttcgcatgattgtcttctctcctcttctcaggaggttttgcccaaagcataagcatcaaatcatttacctccattcccaggtggtgcagtggaaaagaatccaaactaacagtaagcacttatttctctggtgtctgcatttgttgttgttctgtcgctaagtcattttggactctttgcgactccgtggactgtagcacaccaggcctccctgtgcctcactatctcctagagtttgcccaagttcacggtgtctgcatatttatctattgatattggctggacttgctgtggtctgggtgttggctgatctaggctggccttagataagcggttggactgactcagctccacacatgctcctcacgtgtctcaatctccacatgtctgcttctcgaggcagtggtagatgtcatgagcaagaggcctaatcccatgggtgactttcaaaactctggtagcattacatttggtgaatattccagaggttcaaagtgagccacctgaccaacctgagtcagaatgggagggcaccacagagttaatggcgaagggaatggacagaggaaatggtggagaattgggaccattaattcattctactgccctgtgtaaactttagactaggtgaagcctgatgtacaagaaaggatatatggtaggaaacagaggacatgagtatgagacctgactggtttcggacaagtcttatgacctttcaaatcctaggtccttcaaatactttgtagggcctgcagaaattagagataatatttcttctctggtaaaccccatattgggaatcttttgattacaagaagattgaaaggtcactaacagaccaaggctagctaaggcattgcattctctcctttacacccatggctgattcatgtgaatatatggcaaaaaccaccacaatattgtaaagtaattagcctccaattaaaattaaaaa

SEQ ID NO: 54944 - DNA, 1666 bp, Bovine  19866880886132
  misc_feature (1)..(1): n is a, c, g, or t
naggccgacagggggcctgtctcatcagcatctgaaccttcccacacgaggaacacagagggcaaagccttagcccggccttgcaggactcactctgagtggggagcaggaaggaagggatggccccaccttaaacacatccaggcacatcctgaggtccgcgcacagggcggccatcttcagcagggcatggtacgttttcaagttgagttggaagtttctggcctgaagctgctgccgtagcttcagggcgctctgcagtgcggagtccttccagggggactcggcgcacacgttgaacagggctgtgtaggtggcgtctgagggctccaggtcccgcttcttcatctgaggagacagggagaaacttggaggtggctctggggtcagctggatgcatgggacatggggataggaggctagagaggactctgctaagaggcagagccgactgacacacagagctgggctctccaaacccgactcaacctgaggggccctgagagctggccttgctccccagaggcaccaaacaagaaagcatcctccccaaggcactcagcagcccaccctgggcctgaagtgctcttacagcaggccgctgtaactgttcctgccctctggccgcccaggttgccctaactgttaagatctgtgggatagatctgatctgggaaagggcaggaggggtaatcaaaccccagctccaatgtttagtaactgaggggttgtgggcaatcagcttgtcattggaaaaacgggggtgatacggtcacactggaaggctgttaccaaggagaccgtcttgggagagtggcccctggagcggcagccgggagcacagccctgcagcacatctcaggcctccccagccctcctcctgcccggctgacactgcttcgcaagccctcccggtgatgaagcttgagaagctcctggtaaagccaagtgctctctatttcccagagaagggccacctgaccgagggcagcaagcagctgccgcagagcacacagagccctgctctcaggccgtggctgggctcaactccaaatcagcactcgagacaggtaaccttagacacggcacttcatctctccaggcctcagcgtcttcactggagaaacaaagacagtgatcccagcttcgaggatgggggtacgctctgtatgtgttcacatattccacagacgcatactaaggacttaatacaggccaggtactggccactggggttaccaggacaggcaaggcctgtcttcactgagcttactctctggaggggagacacacgacaggcaaataggtaatcaacaacaatgataaagatgtgaaggacactcagtgaagagcagctggaaaaggcaccttcgtgatggataaaacactctggcctaggtaatgtcacctgtgctaagaccacaaaactgaggctggagaggcgaaactggccacccagggtaatgcactagcagggaacacattcaggaccggcatccaactcttctggggcccaaagccccgtgttctaggctgcctggcctgccgcccccctgccccatgctcacgtcgttgtagagcctgaaggccttcttcaggtagccggcccgcccgcagcccccgatcagcactgtgtagttgcactcgaggggctggaggcgctcct

SEQ ID NO: 54945 - DNA, 890 bp, Bovine  19866880913606
  misc_feature (1)..(1): n is a, c, g, or t
ncccgtgcatggctactgagccctcgaaaatgcagccagatcgaccgaggagctgcctctgaaattgtgctgaattaagttaaaatagctgcatctggctggcagctcagtcctgggcagcactgctgggcagtgctgggtgtggctcctgcagggtgagccaactagggggttccctggccctgggaggactagagtcaggcctggggcctccccacctgcttctccttctccatcttggccagcatggtctcccaggccctccaggtcccgcctgaggtcgctcagctccccctgcagcttgcgcctatcagtgctcaatgaggctgacaggccctcctcctcctccagccgctctcgcgtgttggagatctggctctccagccctgtcttggctttcatcattggggtcaggcgctcctccacgaccagcaggttctcacgctcctggtggaggaaagagcgttggccaaaggcagggtcccagcacctacaggggacaacaaatgcaaacaggcctggggccccaagcaaacgtgtcctgggggttggatggagagctgggccatctccaagctccttgccaatgggcgggaccaagcgtcgtccaggagtgcggtcccagaccagccgcagcagcatcaccagcaagccggctaggatgcgacatctcaggccgcacctgtggcctgttcatctgaatctgcatcataacaagatcccaggtgatcaggtgcacctcgaggtgttaggagaggggtctaggagaagtccaggctgtgccgtctggtcctctgaccccgggtgtgacagtgcttccattcacccacggggaggggcctctccacccaaatgactcccagcattggtttagcacttttgtgttaaca

SEQ ID NO: 54946 - DNA, 1227 bp, Bovine  19866880915709
  misc_feature (1)..(1): n is a, c, g, or t
ntggtggggaactgctgttcttatacatcgtttaaggacacttcccaccttgacatctttctttcccaaacaatctagttagacacgagggtgtcttacactgaataaacaatacttctgtgccagttttgtgcggaaaggtctacaactcaaggacctcttcctagacggatttgttaccgcttcctacaaagaatgtttcatgcacatactaaagttcacgcaaaatgtaataaggaagtaaagaacttctgaaacccatagcatccctcacacctccatccccactcccagaatacttccactcctcacctggcgtgaggtcccagcaggctgcctctgaagagaccgcaccacggcggccgcctcctccccgctctgcgggcagtgcttccgcacccaggcttggatctcctggggcaggattgtcaggaactgctccagcaccagcagctccaggatctgctctttcgagtgcacctctggcctcagccatcgacaacaaagttccctgagccggctcagcgcctcttccggtccagccacctcctgataacggaactgcctaaaatgacatcggaaagtttcgggatccggacagtcccagggccggtcggactccccacttccgaaggagtcttcctccactttcactgtccaaagtccatcacctaggcccggaggggcgatcgtgctttgacttgcggtccagctccaactcatccttctctcgctcgtgcgcactttcccggagttccaccttcagctgaggtgacagtaaacccagcaagaagccgcagaacacatcggatctccccaaagaagcggctgccgactgtcgggtcttaaacgagatcccacctccccgggtccctcccagactcctcctacccagaaaccgctaccctacctcagttcagttcagttcagtcgctcagtcgtgtccgactctttgcgacaccctacctgaagctgtcaaatcccgcgacaaaaaattacgaacagcccgagtcggaagtgcgtcaccggctccctgcggtgcccacccctcggggcatttccggggcctctctaggctcctgggaagagtgacgtgcatctctgtggtttgttatctttaaccttttccagaggtactcttggtggctcacacggtaaagaaaccgcctgcaatgcgggagacatgggttcagtcccgggtgggaagatccccggagaagggaacgg

SEQ ID NO: 54947 - DNA, 1446 bp, Bovine  19866880932945
  misc_feature (1)..(1): n is a, c, g, or t
ncctgctgagctgaagcccgtgggccagagccgaggctctccacagaagctaaccagtgctgcagcctgaagggaccgtgagaaagagggcatctggcctgacctcactcatgggcagctgaggggctgtactcacaggccgctaacggcccagtgaccctcctctgcgcctgctgccactccccttcaggggcgcctgcgcacggagctcaccactgcaccccagcaccgttccctagccgctccgagagttctggcgcaaaatgcagtgaggctcaagttaaagtgtcactggagcaacaggaggccgggaaaaaagagggatgaacccctactgcctggcccaccctcccctggcttagcctcccagccacgctggggtggggggtcatcacccgcatttcctgtgtgagggtaggaaccagtaacttgcctggcatggatccctgaccagaggggctccctctcacagagagggccagcagaacacccagccacaggacagaacataaaacctgttgtggtcagctgaactgcttatgctagcatcacactcagttgtcagacaggaggggggcggtggccttaccacttccagcttgcttttggggacccggcagatgcagtttgtcccaaaattggtgtcccgagtctgaatgcaccgcaggcagcacaggttctcatacccctgctttttccattttgcaatcaagtttttatctgcatagccttctttaatacagtactcatacagttctgcaaaaagacggggaaaggccatcagaccacagtgtaacaaagctctccggcccgcagcccatcactgcccaccctgagaaaaagtgttgagtcaacactggccccttttcattttttggaaacagcaaacatcatgatacttgctgaggtttcaagaattatttaaatcggacgccattcaagctggaaaggccaagagaacattcggccagttacctctgcttatggctttccgcttgtagaagaggtcaaagatgtagcgggttttctggtgatggatcctgaagatgggccacagagattccactttcctctttccttcgtgaggttctgtctcagctgtggagaaaacatgggtgtttgctttgttttggagactagggttagtctgcacaggatatagtattgtcatatcactggggatttataactcagctcaacaaacaggattctgtgatctaagccaaaggcaggtacgaggattcggcaacaccacgtgtctgctgtgggtgagagcatgctctgggtacccagtgtacagcagtgaacaagacagatcatagagccaaggtctggggaggaggaggcagaccagcccctggtggtgcagggtaacggccacggagaagaaagaaacatggaagggggtggtgagtctagtgtggaaagccatgtagccggatggga

SEQ ID NO: 54948 - DNA, 2080 bp, Bovine  19866880994770
  misc_feature (1)..(1): n is a, c, g, or t
naaatgtgtctccagttcaagattttggagaaggccacgagcaccagggcaagttggagagaaagcagggaatgcccatgaaagagatactaggacagccctcttcaaagaggatgaacttcagcgaagtcacctatgcccacaaaaagccctccactggagagagaccccataaatgtaacgaatgcgggaagagctttattcagagcgcacatcttatccagcatcagcgaatacacactggggagaaaccatttaggtgcgacgagtgtgggaaaagctacaatcaacgtgtgcacctgactcagcatcagcgggtccacactggggagaagccctacacctgccccttgtgtgggaaagcctttagagtgaggtcccacctggttcagcatcagagtgtgcacagcggggagaggcccttcaagtgtaatgagtgtgggaaaggctttgggagacgttcacaccttgctgggcatctgaggctccactcaagagagaagtcccaccagtgtcatgaatgcggagaagtcttttttcagtacgttagcctcattgaacatcaggtgctccacatgggccagaaaaatgaacagaatggtgtttgcgaggaagcatacagctggaacttaacagtgatcgaagataagaagattgagttgcaagagcagccttataagtgtgacgtgtgtggcaaagcctttcattatagttcagacctcattcagcattacagaactcataccgcagagaaaacctataaatgtgatctgtgtggagaaagcattggccagtgtccccacatcaaacaacatcctaaaagctattccagcctgaaagcccatcagtgtaatgaatgtggcagaggctttgctctgcagtcacatctcaatcaacatcagaggatccacactggtgagaaaccctttcagtgtaaagaatgcggcatgagttttcagttggagttgtagcctctttaaacatctgagaagtcacgagaggacagatcccataaagacctgaagtgtctagaggttcctatcatagaacagctcttacacaattttagagacgcctttctgaagagtaaccctattcctataactaatgtagtcacaacctcaagcatcttcttcagcgtagccatcaaacgtaccacatatgttgagatccttcagttagaaattaggacactggagcatccacagcaagtacagatctgctttcccactgggaaatgctttcatttacatcttcatgtgcgagagtctagatgaaagagaacgatacagtgggtggggggaagccttcagaaggcactcattcttcacgtgaatctaagaacattgacactgggagaagcctcatgaactcagaaataaacttcatttgtagtttctgcattgacagctaatctattcagggaagagcacactgaaagagagaaatttcagcatgatcttggtgttggtatctcagcaacgaaccttagcggtaatgccagccactggaatgctccaggtgtcattcccatcttgagtattttaaaacctttggaaataaattgatttttaaagtatttatatctgggcaaaaacgaggttcagaggctggatggtatgtgttcttactgccttattcagtcaacaaattctccatgaaacacactctacctttttgttttgtctttgattctcctggcaccacagttagctagtagaagagaagttatgtttgtaaattcaagagaaactgttggtctgtcacgtcttagggagaggggagtgggacctttgggtaatagagctgacaggccaggctgtggactggtttttactctgttaccaaacaaatgagggtggctttatccacagaaggagttggaccaaatcgaattgagaattgagttgtggtccaagcagtatgtgtgccaactcccagttgccctgagatggatctcccccataagatagtggataaagaatgagtttcaacttgggttgccactagatttgaaagtaaacattcatagaagcaggggaggtcctggtctggtgtgccctgcctttcggaaagctct

SEQ ID NO: 54949 - DNA, 1372 bp, Bovine  19866881188448
  misc_feature (1)..(1): n is a, c, g, or t
ngcagttgatttggagagtaagacggagaagtgaaagtgaagtcgctcagtcgtgtctgactctctgcgaccccatggactatagcctaccaggctcctccgtccacaggatttttccgggcaagagtactggagtgggtttccattttcttctctaggggatctttccaaccctgggattgaacccaggtctcccacattgcaggcagacactttaccattgaagccaccagggaagacagagaagagtgagagctaattacaggttatggtcctgggaggtcagaaaaataacagtagtgcttacaaagagggaaactaaagggacctttcttccttctttgcccctttctctttctgaaggggggtgatgataaagagtttgcttggtcaggctgtttgttgaacctgtgccccagtacttttcgtactgtctgccatgctgttctcacttccttactgtgacaagaccctcttgcaggcaatgacagtcacctctggagcttggaaaaaagtacagtgtgatggcagaggaagatttgagaatcatctgaaatgtaggtataactaaaatggaagagagcaatagtaagagtaaggatactggacattcaaatacttaagacaaatgatgtagtcagattcactgaagtgaaaacattccaaaagtttagtgataaatattagcagaatcctacgtttagtgattgagaacactggcttctcattgtggtggcttctcttgttgaggtctatggtgcgtggacttccatagttgaggcacacgggctccgtagttacagctcctgggctctagagtgcaggcttagtagttggggtgcaggggcttagttgcttcgcagcgtgtgggatcttcctgggccagggattatcaaaccagtgtctcctgcattggcctccagactctgaaccactggaccactagcgaatttcttccttaattattaatgaggttaaatatttgtgttttttgagtagctgtgttcctctttaatcaaatgctaatatcctttgcccttgtgatacctattggagttgctttcttttttatatcaagttataggatctctttgtataataaatataatttatatggcaaaaaataaagatgaggaaccaaggttcttggattcagaaaggtagtatcttagttacctggttcttgggattcatttaagaaaaaataccaaatttctgagcctcctcctcagatgtagtagcatttgtgagccaagcattttcagttcagttcagtggctcattcagttcagtggctcagtcgtgtctgactctttgtgaccccatggactgcagcatgccaggattctctgtccatcaccaactcatggag

SEQ ID NO: 54950 - DNA, 1094 bp, Bovine  19866881303690
  misc_feature (1)..(1): n is a, c, g, or t
ntttggtgcctgtgctgtttcctgcttctgttgaccaaggacatttaggggagaggaagaaagacatcagcactttttttttcagttaagttagactctctcctcctgccacaaatgttctttactgtgtcatgacagcagcacattcattttaacgtggcgctgttcttaagacagggcctgcccaagtgtttgcttatctctgagggaaaattgattctacatgaggggataaatagcagcccccatctccctccaatatgaggatgtagtggaggtgattgagtagtggaagttggaggctgtggttattgggtaccagcaaaatcgctgcagcaaagactcaaaacagtgcctcctacaagtccatcacttctctgtcattaaactgtctagagggaggcacttccagtccccttttggagccatctgggaccctggttcctgtgctgtttcctgcttctgttttccaaggacatttagagtagaggaagaaagacatcagcatttttttttttttttcaattaagttagactctctcctcctgccacaagtgttcttctttggggagaagtgatcttctctctctgttctcccctggagtgtggctccctgtgtgtctgctctttagctgttcctgccttgggattatttctttatccttagccatctcctgtgctgtttcaggggttgggcccatttaaagacatggccctggctttccctgaggaggagtggaggcacgtaaccccagcccagatagactgctttggggagtatgtggaaccccaggactgcggggtctcacctccaggtaagacatcagaaatgctggctgtctcctctgtattttgtcaaatcaggaagcattaagtgtcctttttccttttctcttttaatggccttgcctgaaaggactttcccgttgaagcgtgacttgtcattttcctcttttcttggcttctttgctccctagtatctctctcctctcttcttttccttttcttcttgatcttatgtaaccaattattctgttaatttagagagagtaaaagaggaaacaaaggaaggacctgtggaaaagcgtttcatt

SEQ ID NO: 54951 - DNA, 1178 bp, Bovine  19866881386057
  misc_feature (1)..(1): n is a, c, g, or t
nctctgagctccaactccctgaaattctgctcaccttggaatcgcttcagcatttccttcatcattggtagccggcacacagtcttcaccgttaggtcttcaaaggaataattcacatcctgattctcacacctaggaaaagcacagaaggctgctcttcttaggagacaaacaggacggccaagaccctcaactcccaccgaaggttccaagcccagagttcagactactctcctattcctcctggtgcaagcaagcaggattcctccccctcggtcccctcacatcagtgcccagactgatccgtggggcccaggcctccttacccctctgcttggcctgtatctttacaatctactcaaccacccataagcagaaaagagctcatacctggtcaacacctctgctggattctgtgaagagaagaaagaaagaagttatgtaccctcgccgtgagatctgttactcaacttggtgagcagctacttttctgtcagttgcttttgtgagcatcacacatgatctcctgctgccaagcccaacagggttaacacagggcagtcttttttcgtgtgagccctctgccgtatttaacaacgttgacccatcctttcctcgaaaccctcctcttcctcctttggcactatgacatgagctgtctcctggctctccgtctacttctccatctacactctttcaatcacagacaagtgttaatgaggatgtggtgggaatataaaatggttcagccactttggaaaaaggcagtttcttaaaaagttaaatataaatataccatcagttcagttcagttcagtcgctcagtcgtgtctgactctttgcgaccccatgaatcgcagcatgccaggcctccctgtccctcaccaactcccggagttcactcagactcacgtccatagagtcagtgatgccatccagccatctcatcctctgtcatccccttctcctcctgcccccaatccctcccagcatcagtcttttccaatgagtcaactcttcgcatgaggtggccaaaggactggagtttcagctttagcatcattccttccaaagaaatcccagggctgatctccttcagaatggactggttgggatctccttgcagtccaaggggatataccatatagcctagcaattctgctcctactacttaacca

SEQ ID NO: 54952 - DNA, 1101 bp, Bovine  19866881416608
  misc_feature (1)..(1): n is a, c, g, or t
ncagagcaatttctctctccggtgtgaggttagagacctacccattggccttgtaggatggaaatgagggatggcagcttagcctatacgggacactgtcaaaagcagaaggaagcagggcgcagagagtgtgcaatgggaggcaggagggaggcaggggtgtacacgacaccgccagggggccggcctggctggcctggacagagtggtgcggggacagtgggtgacgagcaagggagggagcagggctagttcgtggagggccctgcggccaccgtgaggacttggaactgaagctggcgtgaggcggacgtgagtcagtctctgaagactgtggtagtctccgaagactgtggtagtggccggtcagcagatgggggccgaggcccaggccagtgcatttcaggaggggagtcgggtctcctccgccccagacagacctggcgttccttcagtttccgctgcagtgtggaattcagagactgcttgtcctctccttagagttgacagagttgatttccatatccctcctgccggaggaggtttgccctcctgaggaaaagctctgaggctgggctagtgggttggcgtgggagtggagccgggggagaccttgaccctgctgagaccccctcaccccgacccctggccttctcaccctgcagatgagtcaccctccactggcttctcacggacccacccattccttcactccctcgtgcatttattattttctttcttacgtactgagtccctcctggtgccagacgtcacctgggattccagggactcatcagtgaacgaaacggacagaactcccttctctggtgcagcttacagtctacagaccccagaatcgcacaaaacacttgtcctttttagggaaaacgttccttccaaaacttgcccgcaaaaggctgtctcctcctaatgcgtgagtcccatgtgtcaggacgccacatgtgagaactaagaagccagagaccaagcagatggatggggaggataggtcagggtctcccacatcttctgggtgttcctcccgagatccatgctgagaggtggatttcgctgcacacgccctcggggcagccagtggca

SEQ ID NO: 54953 - DNA, 693 bp, Bovine  19866881525589
  misc_feature (1)..(1): n is a, c, g, or t
natggtcctgccagaatgtagtaggcggaggccaatgatgctgcttgacatcctgtgaggcccaggatcaaacagcccaaaacgtcaacagagctgaggctgagaatccaaggagcggagggatgtggtaaagggtagaaagcagcagccatcaggacacagtaagtaggaaaaggcaggaacatcaagaaacaccaaggggatgtggaaaacagaatgaaagcaagggaacaagagaaagtacagaaaaagggtaagtgatgagggtagaaaaaaggagtatctagaatggcctgagagctgtcagaaagcaccagcctgcctctagtagaaatagaatgagctttattgcaggagaaagaggatgagctttgcagacttgaaatccagctggggattatctctggggaacaggggcaacgatcatacccaccaccatcaggggacagtagggatgaacaagcaggagaacacaagccaaactcccggcttggtatccgggtgcaggcggggtctcctggatggtgtcaccaactctacatgacccccaggggccaggtctgctcctcatccacctgggcaggcactacccggaagccttcctagtccccgctctcggcagatccaggatccacggctcttcccactgttccagctgacagatcacctcaggtttgggaaactgaaatccta

SEQ ID NO: 54954 - DNA, 1390 bp, Bovine  19866881548410
  misc_feature (1)..(1): n is a, c, g, or t
naacatccatgcacttacccacaaagaacactcagcaatacttgtttggttaccctatcttctcccacccttcactctatttttaatgcatttcaatcatgtgccttttctttctttgtgtgcaatgtgtgggatcttagttccccaaccagggatcaaacttgcgatccctatagtgggagcgtgggctcttaaccaccggaccaccacactcaccctgacagataaggcattccttcatactcacagatgcatctttgccccgatacttaaattttctcagcctctcttccggagcatccaaagttggcatattgactggaagaagtaaaatacctgtagggaggacagtttcaaagagattttcagggcccagtatgtggttactatgttaaagccatttagactctaagcccttaaaggccccgcagcacaacagggagcagactcaggaggtcaagcatccataggcaccacacaccagctgagtaagtaatgagcatcatgggagttcagaggggaccagcccagggttgcaggggtaagggaaacgtactacttctggggacagtttggcttgaagtttattctgacggctagggtaggctggaaacaaagcacagaacccttccacgtggctgggtccaaggacttctttctgtacagaatatatgtataggatgcggaggagcccgagcaggctatgacatggagatggtcttctccttccacacgggcacatttaggactttatttagcacgacccactcctaattctcgggaaggcttcctccaccaggtcccgcccatggtcgtctctcacccacaccctggcaactgcctccgctctcttctccctgcttctactactgctgtgttccactctgttctcgacacaaagccacacaatctttgaaaaagaaaccgaccgtgtaatttcccccacttttttccccctaccctctactggatgcccactgatcttggaagaaaactcagattcaccaagatggccaccctacacaagctggcctcagcctcctcgccccagcaactctttcctgtgtaagaagccaagtatcctctcaatcggtctgtttcattttctccacagcttttaccatcgcccagtattttctcgtttgtgcatcttcccctccaaactcccaaggacaacaggaccgtgagtgtcttgggtacaattcctcagcccctgcacaatgcctggcatgcagtaatatctgttggatgacagcaatgagcaataagctcacaaaaggagttggcccttcattagaaggaggttattcaaattgggccaacattggactttctacagggcagtatggaatgacctttcttacaagtgtgcagtggatatccatctaag

SEQ ID NO: 54955 - DNA, 996 bp, Bovine  19866881822210
  misc_feature (1)..(1): n is a, c, g, or t
nagggacagagggacctcctaagctgagactggagggggaagggtggggagcaccagtgaggggagcaggcaggagggggtgctaagcacggatggcactctcgccagtggcgggagggggaaggcagggtgtcaagtcccagcagggctggcggaggccagatcacacaaggtgggtgtggagcgcccgcgctgcagatgtgcagggccgtggtaagggagagcccccacaacacaggagcagggacccactgctgagaaaacaaagctctaagtggtcaaccaaaggcctgccgcccgccccctccaaccacaccccaggtgttggcttcctccagaggatgggtggtccttgcccggcctctctgggtgccaccctgggccactggagtggcccgaagagtcgcgtactcacccgggccttctgcttttcagcctggagctgcgcatcaatctcctcagggctcgtgtattgccgggcccggcctttgtggcctccctttctccctgcacaaggaccggaagtttaggaaggcaacaggaaggcagctagctcccttgattgccctgaacttcagactgtgtcccgcttgagctgctctcagcagaggctgccgacctccattgcccctcaccaagaccgcccacccacctgtacctccccctcacctgttcaaagggacaaaagaggggacatgtgatcacctgatgcagccccaaaccgcctgctggatgcggctcccaccaccgaggcctgaggggggatccgggtggggggcaccacagggagggacccgctaagtcccctggtcccttcatccacacgcagaggactcagatgcaatcacgagaaggggtaaccctcacccctgctgtcactacagtgctctttatttgcaatgctctgtcacagccaggggctcattttgagtcccagattaaacctaaggtgcacatcacggctggtcacattttatagacaagggagacttaaag

SEQ ID NO: 54956 - DNA, 1481 bp, Bovine  19866880406879
  misc_feature (1)..(1): n is a, c, g, or t
ngggagcccagttatttgtcctctttgtgtgctaagtcacttcagtagtgtccaactctttgcaatcctatgggctgtagcccgccaggctcctctgtccacgggattctccaagcaagaatactggagtggattgccatgccctcctgtaggggaacttcccaacccagggatcgaacctgcgcctcttacatcttctgcattggcagttgggttctttaccaccagcgccacctggaaagcccagtgtcctctttagctgcccagtaacaagtggcagagcaaacctcctttttactactctgtaccacctctgatattcctttcccacagaggatggtaaagctatggaggaaaagtcatacactggaattctgggactcccagcaagggatatggtaatatctgaattgacacaatcaagtcgtgccggaaggggagttatcttcatggaatatgaatctagcatatggcagagcctgctgaggctggtcaaactatcaactgccaagttacagggaaatgaaaagccatcaaaatagcgtatggaagcatctcaagatgctgtgaaatttggaacataaaagacttagggcacaatgcagagaataaaaatatgatacaagaaaaaatgaatgactgggtacacagttggtgcaaattttcatttcagggccacagcttcaaatgtaggaatgatggatatttgacttagaatggagaacatttttcaaagactgaaaagaatgtgtttagtcagagaccaactcatctggccaaaagggctgtaaatggaaaacagatgggaagggaggaaaaaaaaaaatcacctatataaaatgaaatgagtttccatggatgacatgaaggagggcctgggaaggatttcaacagtgagggaaacagtgaggcaggtgctgagtgattcaatgagaaaacaattgggaaggacatcagaaacaaaacgtaggcagcagatgtccagatagcatacccagaacatagtaagtaaccttgagattacagcacagcgtgacaaacaagacctcacagataccgggagagttggcggggtggaaccggtccatgggaacacagtgatagaagggtgtgctgtacacaaaagacccgttgagaggagacggagcagcattgtaggctgtaataacaatagatgcagaggaatccctgaacacttggatgaagatgaaaggagagaggaacagaagtgaggtttttatggaaactgagctgagacacatgggggaaagccacagaattggcagagcacacacgctggggataacattctggatatttcattcagataaaagcagagtttttcacttgccttcccaacaatttcacatcctagatgctagaggaaggaataaaaataactctgctctgactgattccagccagtgggaagaagccatttatcagagaggaaggattgagaccctgggagaccatgtcat

SEQ ID NO: 54957 - DNA, 2983 bp, Bovine  19866880516938
  misc_feature (1)..(1): n is a, c, g, or t
naaacctctgagatttagattttctgtagtgtccaaggcctagaaaatgtggcagtgggggaaggtagtggtggaaggatgggtgagagagagaaggagagagaggaaaggagtggagagaagcccagagggctgggggtgggaggaaagagaaaggaaagggcaatgacggaaaaggtgctggaaagagcacaggctttacaatcagacaactagcttgttactctgtgaccttgggaaagttacataaacactccaggtcattaatatttgttttccatggtctacgttgggtatgtacaatatctggcatatacaaggtgctcaactgtgtaagcaatgtcattccacatgcacatataggtagtaaaaggaaatcaaataaatttgccagtccagttttcttatctttaataaaggcttatgtgaaccgatacagatgggcacaatcgcaagacattctgtgagcatggcttctatctttgagcaagtagggttctgaataccaaactccaggatttgaccaacttattcatcagtctcaggcaatgccagaataaggcaggcttcctcaggtggaaggagatgcccgctgtgggtggcttctaagaagaggaacagaagcaggagctaggccatgcatgatttctttctcctcctaaactctccccccgagggaagtcagttcacctccccaggggagggatgggtcaggaagctgaagaggccaggtgtgttatgctgatgacatccttccacctggacaaggtcaatcggaaggagctggggcacgagcgtcccaccatccagccagttcccaaagtcagcagcgggacatttgcagaactaggagaattaatgggcctctagaactggcccatttcaatactttgaacaactctctgaataaaaaattgtatcagtttatacattttattgatataaagggtgtgtagcacacgacttataaacaataataaaatatacaatactctttatcttaacttccatatagccagctgattctcactgaatgctttcactcatttttgctgaactcttatatccatagccagcctatggttgcagttcaaccatgatttgataagtggagtaatttccaccatccagataacaatagatataagtaactcataagtgtagaaaacattaaaatttagtaagattatgaaaaagtgatgagttttgagtatttatggcctttgtttttaatgtaagttaattttgtctacacattactaaattttaataatgacagtgttaatagtccaacttgtaaaaagcctacaaatttatcagttggcacaccatccaggaatatcccacagttctaattatgtttttttacaggtgtggcaaattacagtttaatcctcgtttgaggagatatttggttactacacttagggaggggtgggctggctgcagggatgttcaggcaggaagaatggcacccaccagggggcagtgtgattccaagtggtcccttacatagagagccagagcccttcctgcccttactagaggaagaaggatgtcacgagtccgggagactcagggggctgtcttctgggtgctgaccagggttcagttcagttcagtcactcagtcgtgtctgactctttgtagccccatggactgcagcacgccaggcttccctgttcatcactaactcctggagcttgctcgaactcatcatgtccatgaagttggtgatgccatccaaccatctcatcctctgtcatcccctttttgttgaccagggtagcaatcaggaaaccaaaacagaagtcctgaggtgataagagaaggagttgatgctgagagctcagcttctctgtacttctgtgccgaatctcagagacagaggtttgggttaagtagaaaagaataactttattgctttgccaggtcaagggggacacagcaagctaatgccctcaaaactacatgtcccaacttggggaaatagacattttatagtaattgttcaaagagggtgtgatcagctcatagacattcttctgatgggttagtggtgaggtaagtgggagtcagggtcaaacttcaggtcgaactggtcaggggtctacaggcttgtgggcagcatactattaactcctctcacctggaggagttttagtatatacgtagaaaatctcaaagatatcgtcttgtgtgtctgttgatggagaaataggaccttgccccaaggctgctcttgactatttcaccctggtctcacatcccctcctttccataattaacaactgcttgaatctgcctgtgggaactcagggaaggctgtttcctacaatcaaataaatgaagaacacagaaaagccttgtgcccaggagcccaccaagccctgcgctgtgtcagagtgagaggagaagccttctaccccttgcatccatctggcgacagggcaacaaggccccctccagacccttttctggggcagggtttggtggctggaggggtggttgggggggtgggactcactcaagtcagaggatgaacctgggctcaggagctggagcaggacagaacttaattaccccaaatggggctcaggggcctgtagttgagagggtcagggaggagagaccagtactagaagcaaagcagaattttctagtcagttaaacaatttggaaccttggagaactcaagccggatcacaaaaatccagtttccagactgttccctttgctccgtacaaggtctgtggttgagcttttaagcaaaatcaaattacacagcaccacacatctatccacaggggctctggtacgggaagtacgttagatgtgatttttcctcgttccattttttactcttacagtcactttctggaaagcccatttcagtcttaaaggcctctttcaggcgcttggaagtgtaatgtcttggtgacttacttttttcctaactaagataaatccagctgccttaaca

SEQ ID NO: 54958 - DNA, 1702 bp, Bovine  19866880561977
  misc_feature (1)..(1): n is a, c, g, or t
nactgaatgatgagacttcagtagttatctgtagttccttatattggtctttgtagggacatggattttttttttttttttctagctgaatgtgtaattggcactataacccttgggcatcagacaaactaaaaagcttgtgtgttaggggccttccagcacgaaccatctgcagttctgcaataagatcaccaagggccttacatgccaggctaaggagctcagattccatcctgtcaccatagcagatgcaaagaagaaaataaagatctgctggaaaaaatggagtcatgataccagcaactttattaacaattattgtgctgaggcctcttcccaggcttgctgtgtcaaactgtggcccttattactgccatttcctggtatgacagaaaggcaagactgataccatttcagcaaaacatcaatctcaaaataaggatgaacctctgtcagttgcagttgtcctcagggggttgatgtccttgcagctggacaaggcttcatttccctagttgtgtgcttgtccttattaaaagctagcaaataattgctccaaggttttacagtatcatccatccctcactgcttgtgctggaaacttgtgaaataggaggtgaatcacctttgtgagggctgatagaaatctgtgaaatgagggtttatcaccagagaaccctaagaacagctctactctaagaataggttacttcatgtgatcctttcagagtctccagcagggatggctaatggagtttatctgttatgttgactctactggtaacaatttgccctccctccctgaaagcatgtgtagaaaactgttaacttttgaccatgctcagtggagagagggctattttcaattaataatgtctgacaagtacataggaggggaaagaggcaacatatgtgccatgaactagagtcaagcataggttcctacaatggataatcagtttctgcccctgtgatcatatgaaagtgagtcatctaaagataaaatgtttgagtctttcaaggacagtttaggggtgggaagaagaagttagagaaaacgattattgttcctatatttagttaaggtatgtaatgctttgaccttgtaagaaataattgagtttcttcctatctacagtgtcaacattttccattttcgggccctgtaaccttcataaaatcatgagatgttgaacttggactatactttatatcagatgaatctaatagccatatattaaaacattccactcaacagcagcagaataaacattcttcttaagtgcacacagaacattcttcaggatggatcatatgataggtcacacaacaagtcttagcaaatctaagactgaaatcataccaagtatcttttctgaccacaatagtatgaaatcagaaatcaaaaacagaaataaagctggaaaattcacaaatatggaaactaaacaatacattcctgaataagcaatgtgtcgaaaaagcaaatcaaaaatagaaataaaaatatcttgaaacaaatgaaaaaggaaatgcataaatcaaaacctatgggatgcttcaaaaacagtcctgagaaggaggcttacagcaataagtgcctacattaaaaaaataaatcaagtaaaaaaacctcactttatactcaacaactgaaaaataagaacatactaagcctaaaattagcaggagaaagggaaag

SEQ ID NO: 54959 - DNA, 2106 bp, Bovine  19866880643427
  misc_feature (1)..(1): n is a, c, g, or t
naaaattaatgtgtaagaaagcccattctttctgataatacttggggttgaaggggggagatgggggaacattttcttaagatgaaaataattaactgctattttaaatttcttgatccttgaatgtgagacccttctaacatgatttgcgaagctgtacaagtataggcatgagttatttttctgtttacatttttttttggtttattttgggggtaaattggtagctgcctaattactgtttacttcattgttatattgcagtaaaaagttataaaaaccacggttgcatgtttgcttttgatgtatccctttgtggagttagcactttggggccaatgaagaaatgcagcattcactctccctgtcttccccttccctcagcagaaatgtgtttgtcagcaagtcgtgaattccaactgctgccttttttaaaacccacaaaatgctgattcagttcaagattaatgcaaatgtctcaaaactgggtttctgatatttgtaaatgttttttccttattaggtaagaatgtatgaccattaaagttgttaggattcttttgcttttgaaaagagaaggtggacagaactacaatccagcatcttttattgcattggaaagactggcaaaatcttttggaagggttgggagatgcagctggaatagtactttggaaaatatacaatcaagatatctcatggcatattaaaagaaaaatcttaatagcaatgttggcttttatttggatttttttcatctcagcttttttctttggaatctcctttgttggcattgttatttgatcatgaagagggggcaggtgtgtctacttgttttatttttttcagctctcttcctgagtattaaaaagactaaagaaataattttttttctaccatcttatactgagttaagaagatgaatttgcacagattttatcctacataatctcttaatccttagcacagtttggtgatgacttttaagcttttacatcatgcactcataacctatctcttatgaaaataaacaaaattatgattttttttcccatgttaatcatgtagtttaatcttcatgtgtttattccataaacacaacaagacctttggactttgtattaccctgtatgttttataatggattgtgcaaaaatgtctcagaataaaatgaggatttgtaaatatgttcatctttcgaggtagagcaatgagttgggaagagggatggcatttctggtgagataatggagtattcgtttattttcacgatattttatctgctacttaattgcttagagcatagtgaaaactagaaaaggagagaaaaaaccaaccagcagccacctcttcttttctctggaaagtgacagcaggaggtgttcgatcacatggagcttttctccttggacagcaaaactacaaatagtgggattaataatcagcagaagacagctcaggccacgtttggccattctttgcagtgctctgtttatctgtggaaagaatcagccattacaccatgaaagaaataggctttatgtggccttttgctgttatcttttaatttacaaacattttggtaaatctcttaagtggctacatgacttcggaatttttgcgttggaggtattctgtcatctgtttcttgaaatctgttgattgtttagttgctctgtggaagacctgaagaagcttaagtttatacttgttaaattcttactgccgtctagtcaaatatatttttacattgtttaaaaatactgaagtgttccaccatatgattttttttctcctgtactcgatggctaggattctagagaattaattataaaatattttcaatatatccaacatggcatttctcattttttaaaatgattttaccgtatagaatcttagattggaaatggacagtgccccatcactgatccttctgctttctttgttggtggtgaattagggtgtggaatgcccagcactagggtcggttttattgggtctcctgtttgtgttcacagtgcaaacatcaacacagagatgggacacttcctagaatgtatatatcaaagttcatgggggctttagagatgtcagggagttctc

SEQ ID NO: 54960 - DNA, 2740 bp, Bovine  19866880646283
  misc_feature (1)..(1): n is a, c, g, or t
ntggaaaagctggctcaggagcccagctgggctatggcacaaggggaatggtaggaaattgaaatgcgccatgggaacttgaagaattgataattaagaggaggggcccatgatgagaggtttagcaatttggatgccctcagctgagaggaacagaacaccctaaatcaaattagcttaaatggtgaggaaatatgtgagttaacccaccacatgaccagaagtccaggggttagggtatcaccagaggagagctgagagggctctcttacaacccaggggtgctgcgcttcatgatgtgtattggcttcatcctccggctgcaggaattacagaggtcaccttcaaagagtaccttatccagaggaaaacagacactgtctccttaggtctctcattcggagaaaggaaacctttcccacaggccttcccaacagacttcccctcatgcatcagccagaattaggtcacttacccatgcttaaaccagacacagcagaaggcaagaattctcacgactgacatcatctagagtggaataatttcgaggactcaactaagcggccaccacaagcggaaaaggaaggaactcacatgttctttctgagaccctgggtgtttctcaaccatcctctctttcattctctcatccacgctcatccaggtgtgtgctattacgctctccgtactgagaagaaatcagaggctctgcccagggccccatatacgtactgtgctccaaagcccctgctgtttttattactgggcactgcagacttggagtgcagtggaaagacagaagctgtgcccagagagaggatttgcagtgttaaatatcttgtggcaacatttcttttgaagtgttacacgcttggttggcttcaatgaagacctctaggattgaggaccgtgagagcaacagttgaagacatcaaaaaaaaaagagagagagagagagagtcctcaaacaggtagggttccctggggaataattttggaaatagccagtttgattggggagggtgggtcaggtaccagacgctgaggggccccaggacaaaccacacagagtaaacagctggtcagggcggctgggtgaggagccagccttcccgggtaagttggctcagacatcattattttctttgcttcctccttacatcacaccaaatatggaaacagatacctgcctaccatctgtccccaaagagcaacagctccacaaggcattctctggaaggtgggagccagatggggtgatgttttcctctttttcctgggcattcatagaatgggaaatctatgagctggaagcaatatgagtgatcatctagtcattctgaagtgaagaaaaatccagggcagccaagttacttgccctgggatgggaggagagctagacttgagctaagcttcttgtctcccagaccagggctccccctttttttttaggctgtaccagggggcatgtgggatcttatttccccaaccaggaattgaacccgtgccccctgcattgggcatagagtcttaaccactggaccaccagggaagtcccagagaccaatgccctttccggctgaactgtgctgcttcccttcatccagttgaccataaaactgaaagccgaccccctccccaggagaaccccagccctcgtggatctgttgtcttagcataggtgagcaccctcttgtgtccccactgaactgacttttctcagacaaatagtgccagaaaagtctctgtctctctgggtcagccttagagtatagagtttgcaaggactgtatttcacattctactgcacaacgactcctgttttgtgccaacagtgtcccttcccctctaggaacttaatgcagtttttctctttggccatttaatccacactccgaatagatgatgctttcaaactgtggtcctgaagaagactcttgtgagtcccttgaagagcaaggagatcaagcctgtcaatcctaaaagaaatctaacctgaatattcattggaaggactgatgctcaagctctaatattttggtcacctgatgcaaagagctgactcattgggaaaaaaacaaacaaacaaaaaaacaacctgatgctgggaaagactgaaggcaagagaaggggatgacagaggatgagatgttggatgacatcatcaactcaatggacatgagtttgtgcaaactccgggagatggtgaaggacagggaagccaggtgtgctgcagttcatggggttgcaaagagtcagacacaacttagcaactgaacgacaaccatagtaataatataaggccaaaccattaggaattactggagttgaagatgtggaggcagaggtgacctggagtaacagcttctctttatttaggataaacttgtttataattcctaaagagcagatgacaccaaccttatggcagaaagtgaagaagaactaaagagcctcttgatgaaagtgaaagaggagagtgaaaaaattggcttaaagctcaacattcagaaaactaagatcatggcatctggtcccatcacttcacggcaaatagatggggaaacggtggaaacagtggctgattttatatttttgggctccaaaatcactgcagatggtgattgcagccatgaaattaaaagatgtttactacttggaaggaaagttatgaccaacctagacagcatattaaaaagcagagacattactttgtcagcaaagttccgtctagtcaagg

SEQ ID NO: 54961 - DNA, 2374 bp, Bovine  19866880666597
  misc_feature (1)..(1): n is a, c, g, or t
nctcaaacctatgacacccactaactggattataattatttatttgcctgctagactgagctgctctcagagcttgaaaaaccagctggcgtcgctgccagtccgacgtttctcctagccagaggccatcctccaatacaggaagcgcacttttttgcaaggactttgcccacaagcagggcagcagcagctcgtgttgactgccaaggtcagttttcctctctgtccccctgaacccagatcctgggacatccttctcttctagacagcccagccctcttaacttgggcagctaaccagaggcagaaagacttgccaagtcaccgattcgagactgtgattctacagctgggtgcacacacttgccaacagcagagtttctggtgtgtaggtggtgaccagcatggatcctgtgcagtggcaagggatggccaccagccagggaggcaggtgctgggagcagagggtgaccaagggcagagggggacgtgcagcttggtctccgcagctcaaggggcagacctgggagctctcagtaggctgtacaaaacaggcagcgggctgcatttggcccctggactggagcttgctgccctctgctctagacaatcaatgaaacaataaatcaagccctggtatgcagtctttgccaatttattgggtacaaatatccccactatggaggatttcaagctaccaacatgatatcactgaattttgggttgggaagagatatgcagtagcatgtcattagatagtacttctgccataaggatgcaatagacatgaataacttaaggacatagcttatagtaaaatgttgtaaaatgattaggaaaggatgatttttgagtattacctttgttattaatataatttatttagttgtaagtttatagaatttaatatttaataatggtcgttggacagtcagcttgcagaattcctgaaaagtcagcaagtttaggcttggctgcagcataccagtgcccttggttcctctgactacaccaagccatatggaagggaagagagaaaagccacccacgatgagagacctgagaatcagctcttgacatagaagtgttaacctcttccattccttcccctgaagagttctacacctggcatgatgtccggttgttttcttaatcttagaacaagagcaagatttgtttcttgatgatgtgaagggggctctggagccacccctagtggttaaagagtgtggccaacatgaaattgacacagaagcggagcaaagaacaaggacaaaaccaagtccagacaggaagtgtccaagataactgaaggacagggtggagataagagacagaggggtcaacacgtacctcagttgggtactgattgtgtcagacctgtttaagactcagagtcaggatagacttatggttgggccatttctgatcaccacctcagtcaattaggccaggatatgctacattaaggggcttcccaggtggctcagatgataaagaatctgcctgcaatgtaggagactggaagcaattaaaagatgcttggtccttggaagaaaagctataacaaacctagacagtgtattaaaaaccaatgacatcactttgccaacaaaggtacatataggcaaagctatggtttttccaaaagtcatgtatggatgtgagagttggaccataaagaaggctgagtgccaaagaatcgatgccttcaaactatggtgctggagaagactcttgagagtcccttggactgcaaggagatcaaaccagtcaatcctaaaggatatcaaccttgaatattcattggaagaactgatgctgaatctgaagctccaatacttgggccgcctgatgcgaagagccgactcattggaaaaaaccctgatgctgggaaagaatgagggcaagaggagaagagggcaaaagaggatgaaacagttggatggtatcatgtccaccaactcaaaggacatgagtttgagcaaactccagtagatagtgaaggacagggaagcctggcatgctatagtctatggggtcacaaagaattggacatgacttagcaactgaacagtaacagccagtatccttgcctgggaaatcccatggacagaggaacctggtgggctatagtccatagcattgcaaaaagtcagacacgtgtggacaactaacactttcacttcatgctacattaagaaataatcccccaatctcagaagatgcagtgtacatacatcatgagttggtagggagattgaggaagtgttggcaaggctttgcttatcagaatcactaggagaccaggctgatggagcaggctcatctcagataatacccactaagtatcagagggagagagccccggaggt

SEQ ID NO: 54962 - DNA, 1486 bp, Bovine  19866880714064
  misc_feature (1)..(1): n is a, c, g, or t
naaaatgaaacctagtatatttaatatcttatatctagaggtgagagcaaagcttgaattcaagtatctttactgactagcacccacacttgggttggcaaaggtttgactagaaagcaaagcctagagcctgtgagaggcctgggaatgttcactttcattctttcttctgtaaaattgataaagtaattcaaactgttaattttgaagagatcattcctttatgtatttcctagctctaattatggcagtcagttctggttcataaaaatccctaagcactttgtgtacagtctcccagaggataagctttcatttcctgagattcagcatggaaatggaggaagcagagctgtggttcaggtttggggtactgtcccgttcagtgacacttattggataacttagtttctgagtcttgttttcttctgtaaaactaatgttacacaaagaagagtaaataaccctgatctgtggccattttaatttgaatgattgtcttgaataattcaggagataagaatgtacatcagaaaattctcactaatcttcgtaacctcaaaagcataattcttttgtatacaattaaagagggtaggtttttttgtgtttcttagttttggtatatatatttcttaggaacttttgtgcatcagaaacaacttttaatactttttatagagtatatgcagggcacaggttctcagtattatttgataaatcgagtgcccaaggcagttgtaggaaaacttccttctttgagtgttctgttttctctacattgtgtgctgtgctgagttgcttcagtcgtgtctgactctttgcaaccccatggaccgtagcacgccaggctcctctgtccatgggattctccgggcaggaatactcgagtgagttgccatgccttcctccaggggatcttccccacccagggttgaacctgcctctcttacgtctcttgcattggcaggcaggttctctaccactagtaccacctggcaaacccactctctacctgagctagtaggaataatttctgcagtgtaagacttgcaagttggtacaatttgaagattgtcattacttacttcattttatatacatcttagaactcaaatcattttttttcttcacagtgtttgctgtctaaattatgtttgttattgtttaaaaatatccctgtttattttaggacaccctcttgaatttttacggaatcagcctcagtttcaacagatgaggcaaattattcaacagaatccttccctgcttccagcattgctacaacagataggtcgagaaaatcctcagttacttcaggtgactgtttaatcagtttcaaaaatggttaggatgtattacattttgtagaagtcaatgggcactccttcccctctaccaggtgtataaactgttcttccaagctaccctcaggagaatgttatagaggtactgataaaaagagaattgtgggtggggggggggg

SEQ ID NO: 54963 - DNA, 1754 bp, Bovine  19866880724036
  misc_feature (1)..(1): n is a, c, g, or t
ntattttgacccagtagatttaaaattttgaggtttaaaaaaaaatgaattactattctcacagttgctactatttagcatcaaatgcaaataaatagatgagaggttcatggaaacagtttatcctttactttcagttgaagcaggcacctgttttgatgctttgaactgttgctagtttttgatgaatctatataagtgaaagtgagtgtgtagaaagaagaagtaatgatctaacaaaaagctaagtcctgtgtgtgagaatttgaggtagatctgttgcagtggtgattaacttttactttagctaacttgtttgagaatttgatggaggcttttggaccctcgatctgtatatagtttgtccacacttgatagctcctcatttaagggtttgaattgggtggttcgcagtgcctagagggaacatctaatacagcaattattatcctgctgtttagtgtctttcattctctatatgtttgtgattttggcctctaatttactgggaagtggaagtgattactagtaccatctcatatttatatgcagtattttctcctgtattccctttccaaaacctataaagattacataatttgatagctatatgtgagaagtcttataaatcatttttatcaaaatagggtattccaaaaatcttagtgcagttttaagttataacaacttcagaagataatgtcacaaacttagaaaaatcatcacccaaaacttgaagattcttttatacccatttacttttttctttctttcttcctttgggccataccacacagcttgtgggattttagtttcctgaccagggattgaacccatgccctttgcagtgaaagtgtggagtcttaaccactgaactaaaaagtcagatatgtcctaataagatttgtgttgatattttgaaattttaaataattagctttttaatgttagacagtattatatgtaagtttaggatcttgcctgatactttggtgttagatattaatatgtgttgctgtataaacatcatttcatgactttttttaattaataaaattcctttatgtcttacatctacactctctagttgggtagctgttgagtactattaagtataagtaagttaatacttaactcttttttaagtgtcttagtaccattagccacatttcaaggtctcagtagctacttgtaatgggtatttttattggacaacataaatatagaggtgttccaaaatagtaagttctgttgggcagtgctgctgtatataatagcaatatgtatccatccataccacattgaggccatttctgatcttgaatatgtgcagactttgtttgtctttatcctttgctttgaatgaagcagacatctgtttgatgcttttagaaattagacaaggatattgaatagacttataaagtctcttattctgtgtagtatttaactaactttgaatgatgagctattctaaagcttgggaattatgttacagggaattcctggagatcgagaaagtcaggctgtggttgacccccctccagcagctagtactggggctcctcagtcttcagtggctgcagccgcagcaactacgacagcaacaactacaacaacaagttctggaggtaaagtggcatcttttgatggggaagaaatggctatgagtcttcagtgtaaaataatttaacctgaagtacttttgaggtgaggttcattctcagagcatcataattctaaaatctctttta

SEQ ID NO: 54964 - DNA, 1129 bp, Bovine  19866880852304
  misc_feature (1)..(1): n is a, c, g, or t
ncttgcctggataattccatggagagaggagcccggcggggctataatagtccatggggtcacaaaagagtcacagagactgagtcaaacacacacacatacatagtgagcctgtgacctttaagatgtctaatctaacctttccttgggaagactattgactcatccaggtggaaactggctttgacgcacagaaagatggaaggaagagcttggtagattcatggcgccatgatgccttgttcctttgttgggtcgggacgccctgagaaactctccacaccgcaagtctgcccggggacatttagctagaccctccgaagtgaacttcaggccaaccggcaagagatttgcttccaccagggctgtaagatagttctcactccctgactcaatttcctcagctactctagcaataatttccaaagctgagaagaaaaaccagtgtcatggccaaagatgaaaatgtcatgtgagatattaaatgtcatccgagagactgtacgcttaacggccccgaagtgctttcaggcttctgagaggatttcacttcctggccctggagaagctaagtgctgccttctattcctcctcggcattcgaaaagtcataaatagttaactgtgtgagtcgttttttttaaacctccccagagcacctaaaaatagcctctgggggcttgatgcctatttcctcaggtgttcctcttaatctttcaatattggtggtgacgatttactgttactgtcatccacagactctcagagacaaaagcagggaagcaggaaggtggagaggcagagtgtcaggaggctcccttgagaagtagaaccaagcatcaatccactgcacacatccatggatgagagatgttgcctcttcttgccttggtttccctgctagcaaaaggagagggaagtctccatctccccaggtgcagcaagaatctgcccttgaatgggaagcttctacagattcttcagcaaagcgggacctgccagcagccaagtgctattatgacaagtcaagtccacactcattatgtgcctctgcaccgcacgtcacccctgctgtttcctatcttcaggccagagtggggatttcctgccagttttccagccctgtggca

SEQ ID NO: 54965 - DNA, 1910 bp, Bovine  19866880873102
  misc_feature (1)..(1): n is a, c, g, or t
ntgagcgggaatttgccagaaaaaggagatatccagtaagcctgagatgtgctcagattaaaatttcaaaaagttccagccagcaggctatggagtagaaaatgttttgccctcaaatgctgatgcttattggttccctaaagactaaggaccagacagctgagtgtgcactcggttagtaaactgtgaggagagagaagccctttctctaattgtgtacacgttatgaggattaaatacaattatccatggcaagtgtttaacccagtgcctctcctgtagtctgtattcgattgatactaacatcattatcatcatcactgctgttgctttcaattctttaatgacctggaacctttgtttccaagggctctgcatgtgtgctgtagaagctaggcaggatcttccagcatcttcaccaggtccataagccagagtcctgtactgcttatgtttaaaccaggacagtgactatatttctgtctctggccagactgaataactgattttaggataatgaatagaaaccagacatctcttcacatcacttccaccaaaccatgatgagctattgtgtgagttctggggaaggtgctttttttctggctgtggtgggagtgttgaggggggtgaatgggtaaaactttaaaagtgccctctgaacacttgcagagaagcattttgcagagcaatgattctgtttctagaagactcaagaagaattatgcttaaaaaattaaaagatatctacaagggtgaccagtccattctaaaggagatcagccctgggtgttctttggaaggaatgatgctaaagctgaaactctagtactttggccacctcatgcgaagagttgactcattggaaaagactctgatgctgggagggattgggggcaggaggagaaggggatgacagaggatgagatggctggatgggcatcactgacttgatggacatgagtctgagtgaactccaggagttggtgatggacagggaggcctggcatgctgcgattcatggggtcgcagagagtcagacacgactgagcgactgaactgaactgaacaagggtgacacctgctcctctgacatgaaggctttgagaacatgagcaccagcttgacccagctgagctgctggtgaaatcatgaggtccctttggaccatgcctcctctcagaagttgatactaaagttctcctgcctcatgcatcaggcaatcaggtggcagatacttactgagcatttttaggacgagcagactttccaagtggtgctagtggtaaagaacctgcctgtcaatgcaggagatgtaaaagacatgggttcaatccctgggtcaggaagaccccctggagaagggtatggcaacccactccagtatgcttacctggagaaccccatggacagaggagcctggcaggctacagtccatagggtcacaaagagtcagacacaactgaagcgtcttagcacatacccatgcgtggtgggcaggtgtgctcataggcatgcaaacatcataggaagctaaagagcacctcccccaggaagcatgcatctcacactctgtggctctcctctggtccacaacctgccgtatctcactgcattttcacagtagatactattctccatcttatgaagaatcgaaaggctaaaaagctgtctaagcttgtaaggcaaagaagaggacctggcactcaaacccaaatttatttgaccccagagcccatactggaagctaaatctcttctgtgactacacagtatacttgaagaagccaactcctttccctttttgcagggcccagcaagaagaagatcagtagatgtagaaattcagtgaccatctatcaaggacctaccaagggccaaacacatcccattctctctttcctgctgtta

SEQ ID NO: 54966 - DNA, 1213 bp, Bovine  19866880941790
  misc_feature (1)..(1): n is a, c, g, or t
ngacatgagtttgggtaaactccgggagttggtgatggacagggaggcctggcgtgctgcggttcatggggttgcagagtcaggcatgactaagcagctgaactgtgtgtgaactgtgaaagagcaatggactacatttggactcacagagtccaagtcaaaagaatggggagatctgaagggtccccagtcttggattctaaaacttagaaaaatataggggctgctccgccatcctactctcaccccactcagttgaacagttatctagcttgacttggaatcctggatcttggtgatacaagatgaacctatatctaatactcatttatttggcttcactgggtctcagctgcagcacgtgggattgtcaatctttgttgcagcacgcaggatcgtcagtcacagcatgtgaacccttaattaagacatgtggaatctagttccctgaccagggattgaatctaggccccctgcgttgggagcgcagagtctcagccactcgaccaccggggaagtctccaagatgaatccatattgtaggaatttctagaaccaccctctaggcctagtgtaccagaggttggtacccagacaacaggaaaaagtcagtggaagtagtcaacacccaccactgatttgaggagacttgcaaaatgcttttaggaatgcaaactggtgactgtgattgagagcgtgacagaaggacatggatataatcaggactcatctccaacaggaacgctgaagacatgtaatactcctacagttgcagtgtaggagtaggtgctgtagacactcatgcaacgccctgtgtgggtggttagttggaactttgtccagtcctctctcctccccacagctcatcacattttaagggtgcagatccaaagtcgtgttcgtccttcagtccctggtagctccctccaaggcccggactagggtgagacagccaggcgcctagggcacaaaatttaaggaagcacttactccgagttaaattctaagcacctgatgtgcctcaccctatgtcctccaccatcgccctccttaatatccgacatgcaggaggtgagtgatgagtatttgtttgcataatgttcactccactactcgaattcctcaaatgtcttcccattacctgtgagcccagactcttgaatgggccacacagccctctgtgaagggctcctgtcctcaccctgagtatcag

SEQ ID NO: 54967 - DNA, 1783 bp, Bovine  19866880954535
  misc_feature (1)..(1): n is a, c, g, or t
nccatggactgcaacatgccaggcttacctgtccttcattatctaccagagtttgctcaaactcatgtccattgagtcgatgatgccatccaaccatctcatcctttgttgccctcttctcctgccttcaatctttcccagcattagggtcttttccaaggagttggctcttcacatcaggtggccaaagtattagagcttcagcttcagcatcagtccttccaatgaatattcagcattgatttcctttaggattgactcatttaatctccttgctgtccaagggactctcaacagtcttcttcagccccacaatttggaagcattgattctttggcgctcagccttctttatggtccaacacaaatctataattttatttattttttacttctaacacttgcactgtgaaatagatctttctcttgagttacatagggaggaatttggtgtcagttccctgtcattcacctctggaaagcagcgcatcattcataatttttcactcatttgtaagcctgtggatttgggggttggtatcactacttgtattgagaatataaccaggaaaccgggtcttcctgttctcttccatgcaccccactgtgggattaacttgtacagtagcatttgtgagtgatgtggactggagattgtgtaaggaacaaagagggatcgcaccccacattaaacaaccttgggcttggaaccccaagtccatatatctccctcttcctcgcttccttgtctattgcccaaccacaagaagtcctacttttctatcctattgtaccaatggactggtcaccatcctttccctttccccataggtcagctctgcaccacatgctatttccaaatgacaccctggagctcagcaaaagctccggctggctagttcacagacccaccagcttacaaggtgagtcaggaacccccttttacacttgagcatgactcctggtcttttactcttgcatacgtagcattcaccacacattcccacgaagtatggaaatactctatggaggagaatttctgttttctactcatcattggggtgatatgtgactaaagaagatgatgcacttcatactttctggatgaaaacacagtgttacataatggggagcagggagaagcacccccaaagtcactgactgtgctgtggtgtactcttctctgctcaaggcgtgagctgtttgattaagaccttctggctcattcagcagtagctaacacaaggaaacagcttcaaggactggttttctgatattaaatataacttttgaaacccaaattgttcttcttattaagcctgagatcaaaggagaacttcattagccttaggactagaactgtaaatagaaaaggtgctcacgaacacacacattatccttcctgacagattatcttacacatcatggacctcttcatgatgatgggaaaacataatgcatttgaggaaaaatattagcataccgccattaaggggatttgcctgatgtaaatgtaacatgcctctgtatacatttatatatgagaaaacttattttataacaatttcattacctctctccacctcttatgatgaatcattttgaagccctttgcttcgatattttttctaagatttttctcaccaccagacgttcaaaattttttcttgaaggaccccttagaataaactaatactgctatattaagactcttaaatcctttaataattctttggataattcctaaattactctaagaactgtatccttggaaataaatccta

SEQ ID NO: 54968 - DNA, 1183 bp, Bovine  19866880969934
  misc_feature (1)..(1): n is a, c, g, or t
nttatagcaaaaatcccacatgcattttgtatctattcctatcttaattcagatatactcctggactgttcagttagatgagccaagaaattccctttttaatttaaaccactttggatcagttatttattacttgaaagtgaattgcaattcacataattgatcatttctatttctcgtgaaggtatggggaaggtatcaattaggcagctggtagcacattgactctaggggacccctttctgcaatgctagttgtatcagtcaggtttataactttttccaggaagcctcctgttttaagtctgtagagactgtagaaagtcatcacactgaagggtatctgatgaatgggacttaatgttgggcaagagtggacctgatctgtgcaagaggtgttctggatcagactgtgttgtgccacttcaaatccttgtgtttcctcagcctactttttactccagccagttttgcagcaaccagctttgcgcaaacatgctctgacagcatctcacttcatctgcctcatgtcttcctgccctgggacttctctaatgctgtgctgaaagatggctgtggaaatccaatcaggcacatggaacctgaaagggcaaggaagttaaagtcaacgggcatctcttttctaatgagggatgagagctggtggataaatgaggcatattccgtgtggctcctcggaggcgctgagtgggtcaagccccactaacacagcagtgatcgccttgatgatataccctggaataggtgttcactctcggcctcgtttttctgaatcacttcccaaataaactgcttgcgtactagcccttgtctcaggttctgttttggaaggagaatccagaatcaccacagtttgaatgagattcccaaatataatgcaagtttcctccagtgttacgtgcataaatatgcacaatggagcacagcatgggtaatgaccaaaaatttttggctcttgtcccaaactacatgagtctacaaacagttgatctcaaattatttttctccagcttacacaatcaatgtccactgaaggaaaagtccctcagtggtcacattccagtactttcagtgatgccagcgcttgggggacaacagctgtctgctctccaagtgatacccaaggtgcagaccccaactctccagctcccaggggctctgca

SEQ ID NO: 54969 - DNA, 862 bp, Bovine  19866880980007
  misc_feature (1)..(1): n is a, c, g, or t
ncttcttggggagttctgtgacactccagtggccggactccaccctcccactgcagggtggcccaggttcaatccccaccaagatcccacaagccacacatcatggccagaaattaaaaaaaaaaatcaagcaaacaaaaaaacccttcctcattagatccagttctcctcccttgctctcagccaacaggtctagactccccagtctttgagtgtggggcactgttctgcacagaatggtcgaaattttgagctgggccttgcgggatgactagtcagacaagcaagggagaggttgccaagaccggtaggtgtgagaatgctgggttttccaaaaacgatggctcttcccatgtgtctggaccttgcaggtggcctgaggggatgcaaggagggacaagcctaaagaggtaaagagggaccatgcagcaaggaacggatgatgaaaccagcttggagggtccaagatggggtcaaaccagacctctacatctgaggctattttaagcaggatggaaaaaaaacccagaactttctgggtgtttccagctaccccacaactgatatgcagcaagaacaatatttttgttgttgggtgaactcatctgtttctcttcccaattgtaagttccttatggataattctgttttccctagatttacccatctacccttcccattgctagggtgatttcaaatgaagatgatcttttctgaatttgaaagtagaaacacttaggaacatgcaattgtaaagtcagaaaggttttgattattggtatgaaagaaggattcaattagaataagaaaaagcaaaacagaagctgcctctagctggcctgtccgcaacacagcaaaacag

SEQ ID NO: 54970 - DNA, 1008 bp, Bovine  19866881328328
  misc_feature (1)..(1): n is a, c, g, or t
nctcagaaatcacctgggcatcttaaaatgcagattcttaaaattggacaggtctggggtgggggcccaagagtctgcatttctaacaggctcccgggtggggcagagggctgctccttgacctcacttgagttaaactctgcacgtggtcttagccaggcccctctgggtgcaccagcatcagggagacagccccaatagagctgtcgaggttatcatttacagctgatttcttcctctttcactgactggcttttgatcggggttccaatggatggctagcgagagctaattacaatcccagctaattcactgtgtcagttgttattcattaacaaattatgttcctgacaaactgctctagtgtggtaccctaagtactgtaattaaaaccttagaaagttgcatgtgggcctaattgatttccttaatgtattactcagactaaacattccattatttcgtgtcttaatgtttatgaaggggcggaactgccactgccacccaggcagcagatagacaggctctgggttaacagggagccagcctgctctggggacctgtccacttctgcagcaaatgacagagggaactgctctccaccagaaatattcacggataaagggatgaagggtgattggatttgtgtctataattaattagtgtccttggatttccaggctttggggatattatgactccctagtataccgaaggaggaatgaagaggtgctccctgaggctctcagggtcccatgttgtataagcttgcctttttagttcgtgagcatcacaggcagaataggagaggaagtaggagacaatgtctatatcccatctagaggtgtgtgagacgcagacaagtgcaagtgcatgtggcaaatttggaaagctacagacagccaatatctctatggcaagccattgagttagactacaggtattcattcatgcatgtgctcaatggcctctgtttaaaaattgtatttatttgactaatatttattt

SEQ ID NO: 54971 - DNA, 1069 bp, Bovine  19866881794655
  misc_feature (1)..(1): n is a, c, g, or t
nttccaagttctatggccaacctcctgccccaggatgcctcaaacattttggcatctggattagctccaaaagcccatctgggtacagtcccctccctgacctgcctctgaaaaggcagcggatggcacagacctggacccaagcagttggattaggtttccctcttctctttgctctttgatgacccctctcctcttctggcctccgcaaccattccttaagcagcatctccccttccaacgtgcccgcagccttcaggctgatgccctgcaggaggcagagaacacagaggtagggcttcctggctacacaggcccctgagagctgaaggcctgcagagtctcggatgggcccaggcctgcagctgcagtgttccaaacagccccctggaataggttctttcagcttcaaggagaggtcagcatttcgatctcatgttttcacacgtcttaaatggatttcagaggcactggcgcggcctctgctccgctctttaaacaatgtggtgaagccgctgtagcgtagctagaggctgcattcctcctgcattgtgatgtggtttttggaagtcatgcatgcagttagctaaaccaaactaagctgcttcattaatgggagcaaactcaagagggaaactgtgaatagaaacgaggcaagtttgctttccactcctaattcaaaaagccagataattaagtgggcggagaaaggaagtgtcccttctgattccaagagctgactctctctctctctccttttcctttctttaggggggtgtgtgtgtgtgtgttgggggcagggggcctccctagtggctcagtagtaaagaatccgcctgacaatgcaggagatgcaggttcgatccccaggtcagggagatcccctggagaagggaatggcaacccacttcggtattcttgccttaagaatcccatggacagaggagcctggtgggctacagtccatgaggtagcaaaaagctggacgtgactgagtgagtaaacagcaacaacttgggggccggtgaggtcggtattcagggaagttcttgtagaaagtctatggatc

SEQ ID NO: 54972 - DNA, 1340 bp, Bovine  19866880548031
  misc_feature (1)..(1): n is a, c, g, or t
ncactaaatatatgtgaaaataaataaataaatagatgggaaaggattatgtaagtgggtttccaaagcatttttccagtttcatttgctccaatctaagactctgattccttgcactttctactttcactcctctgtgaacagaataataatggcataaaatgttcatcaataaatgtctttccaccacattacatagcaatcatactaactcactgcctccaagtgttttgaaatgttttgactcctaaataatgtgactttaataactttgtagagaaacatattcaattgtgataatggttgagaaagtgatttataaactgcaaagtgttatataagtgagtcatatattttcttcctatcaataacagattacttattgtctttgtgttttccttctcatggaacttaaattccaaagcccatctagaatttggagtaactgtatatattcacagattcaggaataaataacgcacagatatgttcttgaatcacacttcacctttatgcttgtctcatcagaagagagatacacaaggaatgaggccaaacttgagccgaagttagaacacatggatccaaaattcatctgtctcatctgagcttgttattcaattaaacctatattttataatttttaaaactgtaatgcagtaaaatatattctcttaagcttcacaggtagcgcccaaagtgttcatcaggttgtgttttcttgttttacatgtttaccattactctaagaagtttggataaacatatactttaaagagcttatccatcaagtaataataaagcttttatttcaaactttaaaaaaagatcctgccctaatagcctcactttttgaatagaaaagtgcttggtaaatactgtgaagcgctatacaaatgtcaattatttgtgtaatagttaccaagaggcttcctaaccaggagaggtctgggagtgattaaataacaacaaccaaaaaaaggtgaagcatggaaagaacacagtaggtaaggaaataattgactttttggcaagaggtcaggttcatggatatcagttaaaatccaaaagaaagtagttaggctggatgaggaggaggtcagaggcagtcatcaacaggggcaacagcaggcaggtaattctgaagggaaatctaattttagggaagagctgtttgatttcacccctttctgtaatagctgattcgattatcctgtctctaatgtatccaacaaactagctaattctagctgacatttaaatgtgcttaccaggagccagacataatactaatcatcaaattcaatctttacaagtattatgtcattttattctcaaaa

SEQ ID NO: 54973 - DNA, 1816 bp, Bovine  19866880581485
  misc_feature (1)..(1): n is a, c, g, or t
naagtgtgggtctaaagaaatttttgtacttagcagtaacagcagagtgaaatagggaattgtgtgaatatgtgtaagaccaggaaagggaaggaagtgtcaggagactgggaactggtgcacattttaaacacaagagaatatactaataatcaaaacccaaaaacaaaataatttaattggctaaaaaaaacaacacacatttctttgaaatgatcaaaaatacttgtatcaaaaatagatccacatagagcatttcatttagtatgactggactcatagccttcctcttcatgccatttcatattctgcagtttcctggttattatctccagagagcacatttaggtactctgcagagcctgaaaggaaaagagcgaaaacaaaccctgctcactaatttcaagccagggagaaaggctctcttatcagaaggactaactctgtgtcagctgtgaacttcatgaagtttctcatcagagcttttcactttccacgtctttgccctctccttcagcaactctgtggttagtttggcaactcaactgagaaaaggctttcaggtaaccaaagctatcttctaaattaataaagtgtatcacttgagagaaacaggaagttaagacaatgaacccacagtctttttataatgattctgacatcataacactgaagtacaactgatagttttgattttaggacatctatgaaatgagggaaaataaagagcagatacctatttgtgtgtttgttgtgaaactgcatgaaaaatgtaaaaattcttgatagaatattagctgatatttgttgtcaacatcttcattatcctttttgtggattctggagaatgagatgctatacttctggaagttgtagaacgaagaaaaatcttgctgtatcatagaagatttaaaagggagataacagtctttctcatacagatagattttttcagtttccaaatatatatcttgggaaaaaaacgtattttttaagaagaccaggaagatcttcagttaaagaaatatcaccatgttacaatacctgaaattcaatagctagtggagacttcttatattgataaatgatcccatattaagttaaatatagtgttacctgcaaatactttctgcaacatacaacattgtatgttgatggttttcttcgatgtacagaagatttttaaacttgatttagtctcattggtctatttttgcttttgttgactgttcttatattgtcatatccaagaaatcactgccaaagtcaaggtcctgaagctttccccctacattttcttctagaatgtatatagttttaggtctcatgtttaggtttttaatcaattttgagttaaagtttgtatatggtataaggtaaagtccagcttcattcttctgcatctggacatttcgttttcccaacatacaatagaatattattcaatcttaaaaaggaattaaaccctgccactactacaacatggataaaccttggaggactttaggctaagtgatataagccagtctcaaaaagacacatactgtatgattccacttgcaggatgcatctaaagtaatcaaagtcacagaaatgaaaagtagactgttgattaccaaggcctggggagaagaaaatgaagtatattccatggttatagggtttcagttctgcaagataaaatgttctaaatatctgttgtactatgatatgtatatatttaacactactgaatggtatgcctaaaaaaaatgggtaacatcagaaattttaaaaatatttaattttaaattttaaaaataaactttcaaaaata

SEQ ID NO: 54974 - DNA, 980 bp, Bovine  19866880735488
  misc_feature (1)..(1): n is a, c, g, or t
ncccatggtgagtgggaactggtgacggatggagcacttggcagtgatttgctcactgccaactgtgtgtcaatggagatggtgctggcctacccactgtcaacttgcctcagactttatagcactttccttccttggaagagatgactgagatttttactgtacatctctttaattcaaatagaatagggctattcaaatagaagggctacctttttgcacatggccaagtcatttttcttcatgtaaaggcaaatatttcatgcttcacattgagggtgcctgggacttgcagcaccaggaactagaaattattcactccagcgtttatattagttgcccatgtaatgacttaatgtgacagcttgtcaagaatgagatttaatatgcctgttgtatggaagtcatatttcatttgcattttgagacaccggccccagggaaatgggctttatgagttttagcaggaactgttgggcttggttcatccacccaacactcacacagaaaaatcttttacggagcccttctgaaactaaatactaaaactaaaatgaatacttttaagtaaaggaacagttgaccaatagctcttttaaccatacagtgagggtgtgctctctgtcagagcttcagaaaatgtagtggcgttcctctaatttctattgctttcctcttaacttttcatagggatgagtatttgtgctttaaaccaaagacaatattttaaaacataaaaaaacagtctagaagtctatccaataaaaaccttccattttgattatttcctctgaagcaaaagactggatactctgagattcagtaagcaataagaggctttttcatgtatcagagaatgtttattttctcttgtatccaaactacactggaagtattacatggcataataaacccaacagataaaaataagcccctgggaaagcagtcatgttttaaaaataccatggcacaatacaaaa

SEQ ID NO: 54975 - DNA, 2147 bp, Bovine  19866880761562
  misc_feature (1)..(1): n is a, c, g, or t
ngagaccgaacttggatttgaccactccgtattttctactagaaagcaaaaagcaatgaactctcattagaatgtgtgctttagttctctgattagcaattttgactaagtagttcccataaataaagcaattgtttaggtttttcagttacgtatcacttcacaaagacatgattcaaagcatgtttgttcttccctcagtttttctaggatcaaatttacatttcctgtctcagaaacccaacttagtgatcatgcctgtcatcaggcacgtacaacagaaacatctgtacaatagaaatggttatccctagcttgctcttcttcttttcttccccatccttaagtataaaaagcctgggaaagttacttctagagtaggctatttcaacttgaacaatacgtgaaacaaagtatatccacccaaaacactttttgtctaccaagaagacgtgctgcacccagatattcaaaagccagaatactcaggggaaaaaaggtgttttacataggacttgggccatggagattgttgggaaaagaaacaggacaaagacaaggttgtgaaactgtaagggagacaagcaactattttagagagaaacccatcttctctgattactttttttatacttcactttttttaatactttgagaatcctgaatataattttttaaattgagtttatatcttgctaaccaacatttatttccacaaaatagtttcttaattctctaaatagacaaaataatgcaaaatattctcccatatcaaaattacaataatttctatatgctgaggctaaactggacaatgtaatgaggatatgcgaaatatacatgcctattgggtcagtttcacaagagaacgagaagtggctgcgtgtcttcatttccacttctcctctggaggactttcattctccaggctccaatgccacctgtcctcctaactacgctttaaaagacaaatggtgcaagcactgctgtggcatcattatctccatagagattacagaagtgggagctcagtcttctgcatgctcaaaagctacagactgagagggctattaataaatccccccttttttaagttagaagggaactggagcttagccatccaagcacagaaaacttaagagacagaaggatttgtaacaacagcaacaacagatgcaaagttaatgccttgaacttaaaattgttgctgaatgacgttttaaatgtatggtttcaagcaagttgatattaggttttaagtcataatacagttagaaagtgagtttctacctgtaaaagtgtgttttagaaataaatttggcatatatatttctaaaatctcaaaatttctagctgaaagacagttcttttttcaggtgggaagatgattctcacatttcagagattctagagaaagttcttccatagtagacagaatggaacggaaagaaggaacaatagaaattgatggtattaaaagtggacgataatgtgcaggtaacagaatgcccaaggaaactcacagtgggtgtatgcattgcattaactgagtaggtcaatagaaataaaaataagtggagtactgacaaaaagatattcaaaatcacagatttgtcctaaatcatccaagacacaaaagctatttccttctcaactgacccctacacacacacacacacatacacactctctctctctctctctctcacacattcacacacacacatacttcatataatttgtctttgaaaaaggaatcacctcagttgccatctgtttacaatgttccatgttctcttaaacaagtagatccatgcatcacacatttacttcactatttaagactaacaaccacagaaaggggtagatggcctagaaatgtaaataatttgttaataataggcatatgaaaagtggattctctaggcttatctaacatgtttacctcatatttcatggaggcatggatttattgaatcatgtgttgatgacaatttctggaagaagttaccatattctataatggaagcctaacaatgaataatgaaatactaggaaataaaccatacctgtttatcctctttcaaaacctagagggatgggatgggttgggagatgagcgggaggttcaagagggaggagagaat

SEQ ID NO: 54976 - DNA, 2133 bp, Bovine  19866880768078
  misc_feature (1)..(1): n is a, c, g, or t
ncagtccgtggggtcgctaagagtcggacacgactgagcaacttccctttcacttttcactttcatgcattggagaaggaaatggcaacccactccagtgttcttgcctggagaatcccagggacagggaagcctggtgggctgccgtctatggggtcacacagagtcggacacgactgaagcgacttagcagcagaagcagcagcagaatcagttaggttcaagacggtagaagacttgactttccagttgaccttgagcctaattatatgctcactgtaatgcatgagctaaatgacactcataggcactgtgacagttctgaggccaaacataaaaggccaaaatgtgagtggtggtccagttcctggaagtgtccaccccttccccaaaatagttggcataatcctcccactctttagcctgtgaaattacctagcccatgaaaactaaccaccccacatttcaggcctctcacctgctgaaatggtccacatctgtctgtggagtttttctcctagggctgttctcacttttagagacaccacattctatctataaaatgtgtatctctctcaaaaaatccacttcttacctatcacttttttctcactaaattctttctgtaatgagaaataaaaaacctgagcttcattaagttctgagaccagggatatgatttcagttaaaagacatggattcaagttcattcaatttgagttatgcagtttcagaaccagcacacaaatgaacctctagagcagtgaatgcaccttttcatattgtgtgatatctggaaaagtgaggacctctagaaaatgtattatgttaagaggtctttgacttacatttttttttaaacttttattttgtattggggtatagtcgattaacaatgttgtgatagtttcaggtatgactttcatttcaaagctattttttgcttttcaacaattaaatcaaatctggccatgcttccccaggaaaaaagagttgcctccaaactctctttgtaaagatgacatgccttatgtattttgattgccttgctaagaaaagcatattgaaaagtaaaagaaaagaattttagcgaggaaaatattcctttatgattctaataaataaattttcatccaattactttagctatagcatttatgttaatagttatttatagcttctgtcagtaaatgatgaactttatgcttgtgcctttctgtgactttttggaaagtaaatccagaatcaaatataaaatataagatatactaaaattttaaaataaattaattatacaaagcatgtatgtgcatgtatatgtgttatttttatctgttttcaggcaacgcattttatcaaggatgactggtattcttgtttaaaccatgcaattcctctactaaattaaaatgggcaaatactattcccattttacaaataggggatgggtgatcctgcagtattaaatggctagaaagagatgaggctgtggtcaaaattcagcccctctgagtgatttttcagtattctgtcttatgcacatttctttcttgcttatctttttcagttttgggcatagtcacccaaggagaggaccaggcacaaaaccaagaacagaaagggtctgcaaaggcataatgcgagccctggatgagcaataatttttatttggatctgagaattagaaatctggctgaaaaagctggatgaattataaaagttgaaaaaaactagatggcaaattaatattcatccagaagaaactttattgactaattacttaaatttcaaaaaggttaatttgtgttgcagcagctttacagttattttctgaagagcggaaggactagccctgtaatgtttgaactgcacacttggttttcagagagggttgtgtgcagggccttagagtaggaccatgggtcagcatttccatgacatcgtgaaagaacttgagcttcaagaagcttttgtgaggtcagtggagggctctcctgggaccaaatcctgacctatgatcagaataacccagtgttctcttgaaatgagatttctaacaggaattaaccagggcctctttttcctctttttaaaagcaaactgcactgttattctttctttatgggaaattat

SEQ ID NO: 54977 - DNA, 751 bp, Bovine  19866880791688
  misc_feature (1)..(1): n is a, c, g, or t
nctgctttatgtgggcagaactcaagaaaggctggttacaaagtcagtactgataaattctacagatataaagttacatgaatggactagaactctctcattccactcacaaatacatctaagttaactctaactttgtaagtttttttatacgcatataggtatagttaaatcatattggaatgcttaatttatcacactgaatgaattctccactgtcacctctagaaggagtgtcgtctgaatgatctaaatttacagtgagatcaaaatagtataatactcttgaatgtttcacactataaacttcatactcaacacatgcaattctttcaaacgtacaggtaaattattctggttgttttgtttcattgggtatttttcttacagcacttcttttacatttactttttaaaattaggaaaaaaagatgaagatggagacaattttcactcaagtatataagtgggaagcatatggcttccttgactatttttgctgaagtatttataagcttgtaggtccaggatatttgaaaactccaattggtagctcgggaaattcatggtctctcatacaaaaggtggattagattttatttggtccaatcatttggcttccctgacggctcagtggtaaagtattcacttgtaatgcaagagatgtggatttaatccctgggtcaggaagataccctggagaaggaaatggcgacccattccaggattcttgcctggaaaatcccatgaca

SEQ ID NO: 54978 - DNA, 972 bp, Bovine  19866880867729
  misc_feature (1)..(1): n is a, c, g, or t
nagtcttctccaacaccacagtttaaaaacatcaaattcttctgcactcatctttctctgtagtccaactctgacatccatacatgactactggaaaaaacatagccttgactagacagacctttgttgacaaagttaggtctctgctttttaatatgctgtctaggttggtcataactttcctccaaggagcaagcatcttaatttcatggctgcagtcaccctacctgccttaattcacctgcatagaatttataaattctatgcatgatagcataagcttaggttatttgagaaaatgggcttgttctcttaaataatgcattaaatttgttaaatccagcatacacaactattttgaaagtatacgtttggggccaaatccttatgattaaaaagtcacaatggaatatgtttaatacgagctctttaacattgggggggatggcatttttctaagacagtagaaagagggcatttttctaagacagtagaaagaggaaatttttctacatcaaataaaaataaatgtgggggacatatttgtttccatattgaaataatcacactcgatggggttgaaactaaaaattcatactatcactgaattgatgtttattgatgaaagtagaaaatatttctttctatagcttaattttggacaagtctgtcattgtcatgagagtataagctgtacttcaaatagtttatgtttccttaattttagctgcataaaatccatttattaacaaaaaaaatgtacttactgattcaggacaggagtgtaggcagttttatcctcatcaataatagtgaccatcagtgtaataagctggggccaaaaatccaaattcttggtggttggtccctgatcttcccgaggaatgtcctgtttcttactctgctcagaaggtcaggcaacatgcaaaataaaaggttaaacggcagactttagttagaaatcactgtcaa

SEQ ID NO: 54979 - DNA, 1066 bp, Bovine  19866880983854
  misc_feature (1)..(1): n is a, c, g, or t
nacttcatttgcatttttgtcttaccagcttgtgactgccttgttggttcaggtcaactgcattttttccgaaggaagaatttaaatgtgggtaaaaacagacctctgtatttctacttgtatcttatttttgatttcacaataggggactccttcgtagacttgactgtactataacctgtctaagctttgattttttcatcaataaaatgaaggagttggataaaaccatctctcaatatttcactcaatttcaattctcaaagtcttatttcagcagtacttccttcctacagcaccttgttcatcagactaatcttggcctcattattcagaatggaactttttcaatatataagtattactgctatgtttcctcctgggcacaaaggatatgatgtcactaatgttaatcactgtaataatacaactgccattttgaatatgcttaacaggtaacaaaagctctatatacattatctcaagaaatatatcaatcctatgaagtgtgcattatcccagtttttcatattagaaaagcgaaagttcagaatttaaacaaatggccccaaatgcaagctaaagtcacaccattaataagccatcctattttcagaacctcaggacatgtttttacactccagttcacagggcagaactgtcaggttagtgggaggcatggatgagttcatctatgacatatatgcatttttcaaaatctgcacataaattctccatgaactcatttcctcctgccaaagaaagccccttataaagaaagataagtttgtaattttcataccattttcatggtcaaatgaaaacatgcacaggtagattcaaaatagtatttctagaaccaatgatacagaacatcaataataaaaatggaatctttgcgttcaggtagctggcaacaaaattaattactgttgaaaatttagacattcatattttacattctagaaggaaagaaacaaaatatttgtgagcatagttttacttacagctcataaatattgaggagaggtaaaataagcaatatatatatatatatgtatagcag

SEQ ID NO: 54980 - DNA, 961 bp, Bovine  19866881171751
  misc_feature (1)..(1): n is a, c, g, or t
ntaatttcagcctaatgatcggggtgtgggggagcttcccagagaggaagaaactgcaaaaatacatctattttaagtgtgagcagggcacagggtgccccagtttaggtcatttgaatgaacactgatgctttccttcgaagtaaagatgaaaggaggcaagaaacccctaagtatctgagaaataacatatttggaaggtgaaaagcagggtcaggtaagcttcatgtctagtttccattttatttcctgttgtttgtacccacttccagctcggcagagtaagcatttattttgccaaccctacctctcccagttttaaattttaattcttttacttccttattctgatttcagttcttttggaagggataagtaagatgtcccaaacaccctagtatattcaatctgctggaaagttatgagtgtaccagatgtttgagaagataataaagattgggtcaagacaggtggggagtaagaggaaagaataagacaagtggaggaaggtggagctataatacatctgtctacctggatcttgccctgttttttttttaacatttattctcaatgatttctatttacccattaaattccactggggatggcagctaaaggttttagaccttagagaatagcttgacagctgatttgtattaccagcctgtgaaatctgtttgatggataaaatttgactctatctcatagaagtagagttttaccatatgctttgtgtgctgtgcttgctaatgtgaaatagactgtcatatgttggaaagcctttggctaagggttgaatctcaaaggcttacatgatgaaagagatcttgatgaactgaagctttaccatgctgttgtccaaatatcaatatggacaattcaagtaatgaataatgcactttaatacagaacgcactggaaacatacagaaagttttaccaatgtgcagtccctggca

SEQ ID NO: 54981 - DNA, 1097 bp, Bovine  19866881231437
  misc_feature (1)..(1): n is a, c, g, or t
nttgaaaaaatatgtcttaatttctcctgcataaatacttaggaatgtaattgctagaccttagtataagtgtcagtttaagtctaccagaaactaccagatagttcttaaagtgattatattctttaacattatcttctttaatgcatacaaattctagttacttttcatcttctcttgaatttggtatgtaaccagtcttttaaaattttatccattctcatctgtatgaaatgaaatggtatctcatttttggtttttaatttgcatttcctgatatttaatgttatagaacacattcccttacccctattggccagctttcttgcctggaaaatcccatggacagaagaacctagtgcgctacagtccatagggtcgcaaagagtcggacacacagcaacttaacatgcgcgcatacattgaccagttagaaatcagtatgaaatcatcactgattactaaccctttgtgttgctttgaaggatatgctcttgccattatagatcaaaagcaataaaatgagcaaaataagctagcaagtgcataatcatctataaagaatactttgtgaacagatatttaattgagacactcaaggttcagagctctttagatttcattaattagacatgtggacatctaatcaatgtaccaatttgccagcaatactcataatttcttgttatagatatattcaatgtaattttagcatgaggcatatttgtggttgaaatattaaagcaactcttggagaaatacaataatatataataaatttgaaccttgcttttatagaatgtgtaataattacttcagccaggagggtattaaatttgtattaagaacaggataaatccatttccctgccaccgtactaacatttaggtcaaattctgtttatggttgaacagattagtaatagttcatcaaatattggtacattttttattgcttttttcccaataaaaattaaacaactattaaatgttgggtacccttatacattccattagggaagatagatgcaaaaatgagaggttatattacctcatgctattgcaataatacatgtaacacagtgtagtgtagtgtat

SEQ ID NO: 54982 - DNA, 1280 bp, Bovine  19866881305762
  misc_feature (1)..(1): n is a, c, g, or t
ntgctgtgagtatgtagccatgagactaacatgacgaaagcaatgttttaaaaagactggtctggcagtgcggttcctgatggattagaggatggatcaaggagaccgagagatggtcggacagactgttgaagtaattctggaatccttaacgagggtcttgactgaggtggtttttactactttctttggcaacaccttcattccactttgtgaacgctggtaaagctcccaattcaaactgctataatattttaaagagtaaatggtctcattgtcaaggagaacctttgtattctactaaattactctctcctttcctaggcattgacctcttgccactctgcaatgctctttagcactttaaagcaggctttttcaaatctctgttcttttgaaacatggtttcagaagtgctgactacctcattattcatttttacattatttttcaaaagctaatgtcattttaagtttttaaagacataaaggggatgtgaaagagtcaccattctggtagtaaaggggattgcaggttatagtttcaatgattaaaactatttttcataacaaaacaaccaaatggtcctaggttttagtataatgagatggagaagtgaaaagctaaaatgcagctgttaaatgtgcttctgaaaatttcttaactttagtcttatgaggacaacgccaggtgtcggggattaatttctaacaattcaattattatatgtatcttccagggctcatttccttcacagattgtttaatcaaagagacaacagtattttctaaagcttgcaattccctacaccaggaacctttcttacccctctgttaacatcatctgcactgagattaaactcataacatcacatgctacacaaaagaaaacaagtaaaatatatagcccctaaagtcacttgtaactaagcaattgttatgatatgaaaataatgttcatttaattaaaattcataccacatagggtctcgatttagagtgttagtttttaaacacctaaaccaggcttctgtggctcaaagctatagtagatatgaaattgtatatatcaacattttttttggtttaaagctaattttataagtaatctctctgtaaagactcaacattcacttatacatagtttataaagtacaattatttgtaagttaatgaaacactaggttcttgtaatatgctttacttgaaggccattaaatacaaatacccaatagcaaagaactacatttctcaaagctaaagccgcatagcctcatgttc

SEQ ID NO: 54983 - DNA, 729 bp, Bovine  19866880348890
  misc_feature (1)..(1): n is a, c, g, or t
naagaacccctgtgcggcccttctaagaggggaagggttggtgtgtttgaagaactaaaagaagtcagtgttgtcaaccccaggagcaagcaaaagcagagtgtgacttgagattggagagacaagtaggaactacattattcagtctttgatggactttgagcaatggaagcctgggccaaatgtcattttggcccttgaataggttagagagtatgagaacttgttggggatctgggttaggagtctacttgagtggtctgggttagagatgattctggtttgaaagagggcattggcagtggagataaaaaaattctgaggaggttaactggatgaaattgctgaaagatcctatgaaggtaggaggaaaagaatatactgaaatgaattccctgtttctggcttgagatattctaataggctccattttgatgtcttcaaactgtttaatttgcctaaaatatccattagctgtcatatactgaacactttactcaacaacatttactctacttttccccatcctcctagtaattacaaattaaggattagctcccttttatagaagaagaactggggactaaaaaggttaaataattgccttggaacctgttgtgagtaactgtcagttttgggactcagttctcattagtctgcttctgactcctgtcatccttccatggcagtatcttgcactctggcttattatttatttacaatcctcat

SEQ ID NO: 54984 - DNA, 1400 bp, Bovine  19866880464108
  misc_feature (1)..(1): n is a, c, g, or t
ncgggctgaaggcccacagtctgcagcctgacgccctgggtgtagagaatggctaccgtgtgtacgcttgtggtatatatgcagagaacttctggaaggagacaggtcacagtggctgattctacgcagggttcagagatggacatggcaggaaattcatttttttatttgtaaataacgtggagctagtggtaaagaagccgcctgccaatgaaggagatgtaagaggcacaggttcaatccctgggtcagggagatcccctggagaaggaaatggcaacccacttcaatattcttgcctgggaaatcccacggacagaggagcctggcgggccacagtccatggagttgcaatgagtcagacgtgactgaagcacatagcacacatgaatgaattaacagagtgctgtcttaaagttaattcttaaacaagaaacgaggctgtgtgtggggtgacgagcccatgctcagaagttagagaccatggctggaatcctaactcttcctcacctgctgtggacccaacaggcaagttatttgccatctctgagccccagcatcacagggataacatcagtattggcttcacaggcagttgggaggcttccacgggttaataagccttttgcacagcaccaggcacctggaaagtgctggctattattatcctcattaagagtcattcatggggaagagccttcctccgaagggaagcctgaaacataactgcggctgtaaaattcccctcgagagtccgcccagtcccacagcaagtcatccgactgtccacataatggatgccttgtgacgtaaggaagctcatttgtattagcaaccacattccacaaagatgcctcctggagccacgtctgcacgtcctgtttggcggggaaggaggccagtttcccagcccggggtctgtccctgagtgtcacgtggggtggactgtggcctgcatccatgagatcactcagtgcccatttattaaatgcctactgtgtgccagggcatgcaggtagacacccctttgcaccatgccctagaggctgcaggtacaagcatgggcttcttttaaattagctgatgagggacttccctggctgtccagtggctagggctccaagcttctactgcaggggacaggggctctatccctggttggggaactaagatcccacagaacagccaaaaacaaacaaactgatggaatcagagcaaagatagatgcactggtggtgtgctcccacaatcctgtgcttttcctatgtgtttattcattcaacaaatacatactgacctccgaagagccaggcattattctaggtacttggtcttaaccaggccccttgttttgcagctgcttccctctgaactttagacctgtcaggaagagaccttgc

SEQ ID NO: 54985 - DNA, 1963 bp, Bovine  19866880494970
  misc_feature (1)..(1): n is a, c, g, or t
natggagtaggacacaactgaacagcaacaacacaatgaatctcaagtacttaatggctgaagtagtcacataatagatgagatggccgtggccgtggcggtgatggtggccactttcattcattagcctttattgcatgtcagaagttaggcatcctttagtcgccaacctataagataataataaacactcactgctgctgttaggattgtttattcctcagatatgagtgttcacctttcgcccagctccgagctagcagggtgcctggactgtgctctgaaaacagctgagacctgggccagacattttatgggagaatagaggagtttgttcagtgtgtattggaagcccaacagctttcagtctcccagtcccctttccatctagtccccgggcctttcagcgagctctagcctccaacacataggctgcccttgacctctgtggccagaacgcatggatgccctctctgctcagcccatcagccgagtcccaaattagacctgacagtgtgatttattctctgggatggagccgggagggcagagccccagtgggtgattccaagggaaggttgtcagcccgaattagcccaggcccttcatgcagccttgctgtttcagcttccactagctaatagggttttccagggtgttgctggctttggagcggcctcctccccactcccaggggccaagccttggctgtgatccctaaggggctgcgtttgatgagggccccgaggcaggctctgtctgaagggagtgggggctctgggtcctttcatctgctgcagcaggcactgaaagtggcgatgccccagcgagagttattcagtctccccctctcatcctttcagtgagttcagtactggcagctgaagccacctccctgctcctcacctcccagtctgtaatcacagttgtctctgccttcattcatccacggagaatgccagtgagagacaagattcggctgcaagagcaaattaaccctgagatcctagaggttgcatgcaacaaatgttgacttcttactcatgacccaagtcaggtctgctggggtctttacctcgaacctcaggaacccaggattggtggggggagcgtggggggtgtgagaggctcccatgtcttgaacagtgggaacatgcagactccaaggtcaccactgcagggcacgggaactagagggtcacacagcagagcttagatgccaaggccagagtaacacagtccacctctgcacacccggaactagctgcatggccttgcctaactgcaaggggccgggatgtgggtgctcatgggtattcagtgagcagtaaatatccgccactgtaggcagatgtggtgtttaataaacacctactgtgtgccagttctcgtaagggggctctgaagatacaaaggggcccttgccttcttggggcccatggttccatggaggaaacacaacctcagtaagtaatcactgaatgatccaagttattacctctgcactacgtgtcctgatgggggaactaggagagcctgtccaggggagatctgtcccgttcagagaggtcagaggatgtctctcatacagactgccatttgaggggaggcctgaggacgtgtggctccccaggtggctcagtggtaaggaacccgcctgtcaatgcaggatacgtgggttcaatctccaggtcaggaagatccccctggaggaggaaatggcagcccgctgcagtgtccttgcctggagaatcccatggacagaggagcctggcaggatacagtccacagggtcacacagagtcagacacaactgagcatgcacacgcatgtatggaaggctgtgtagaccttcatggatcagggcacatgcccagtaaaggaaacagcatcagcgagttctggacgtgggaaggagcttgacttggaaggaacggaaggcggccagcctaacggcaggatc

SEQ ID NO: 54986 - DNA, 1392 bp, Bovine  19866880582169
  misc_feature (1)..(1): n is a, c, g, or t
naagtagatccaatgtgagatagggcaaggatcatgccatgatttgatttggtgttgagaattaaatttggaggatgatgcctctcttggtcaggttgaactgctgcaacaaactactttagcctgggtggtttaaaccacagtcatttatttctcacagttctgaagctggggaaacctgagaggtgccagcatgtgtggttctggtaagagccctctacctggcttgcagatgactgccttccctctgtagtctcacatggcagagagaggaagctctggtatctcttcttttccctttttttttttggtggctatgctggttatgcagacttctcttgttgtggatcacaggctcaggagttgcaacacgaagctagttgctctaaggcatgtgggatcttagttccccacgcatgcgtgctaagtcacttcagtctgtacgacattttgcgaccccatggactgtagccccccaggcttctctgtccgtgggattctccaggcaagaatactcaagttggttaccattttctcctccaggggatcttcctagggatagaatccgcctgtcttacatctcctgcattggcaggtgggttctttacaactagcaccgccagggaggcccttagttcctccaccagggatcaaacccgctactcaacaattagacatttagccacttctatatggcttccccagagaaggcaacggcaccccgctccagtactcttgcctggaaaatcccatgaacggaggagcctggaaggctgcagtctatggggtcgctgtgggtcggacacggctgagcgacttcactttctctttccactttcatgcattggagaaggaaatggcaacccactccagtgttcttgcctggagaatcccagggatgggggagcctggtgggctgctgtctatggggtcgcacagagtcggacacgactgaagtgacttagcagcagcagcataggatcatataaccatggagaaacatgtggaaagatacatacagtgcttgattgttcccatgggtgaaggactgtgagagaatgctggcatggggatgcagtagagaggaactccccaaaaaagggactggagacatttttaaatgacttgaaaaaaaattgtaaaaataattatccccattaagtgagttctctcaatccactagacacagtgctaactaactaggtcactccattgcactttaaactgctcacttaatgcaggtgctattaattattcccattttccagatagggaaactgaggcccagagaagccaagtgctgtggccgagaacttgggcagtgctgggagcactattatgcaagagggtcaattccaaaacccactgcacttggagctcagaggacagagt

SEQ ID NO: 54987 - DNA, 985 bp, Bovine  19866880605923
  misc_feature (1)..(1): n is a, c, g, or t
ngctttgccacagtcgttgcattcaaagggtttctctcctgtatgtgtcctctgatgatttatgagacttgacctctcccctgaaggctttcctacattcactgcattcataaggtttttctcctgtatgagttctctgatgtctaattagttctgatttttcaaagaaagctttttgacaaagactgcatccatacggtttctctcctgtatgaattctctggtgagtattgagctgtgacttctgggagaaggctttttcacagtccctgcatgcataaggtttttctcctgtatgggttctctgatgtgttgcaaggcttgacttttcaccaaaggctttcccacattcactgcattcatagggtttctctcctgtgtgtgtcctctgatgtgatatgagatgtgacttctgacaaaaggctttcccacactcactgcacacatacggtttttctcctgtatgaattctctggtgattagtgaggcttaatttttcactgaaagctttcccacattcaccgcactcgtagggtttttcacctgtatgagttctctgatgcctgacaagctgggatttcctactgaaagccttcccacacttagtgcatacaaagggtttctctcctgtgtgtgtcatctgatgtgataagaggtgagatttctgggaaaaggctttcccacactggatgcatccatgaggcttctctcctgtatgggttctctgatggttaattagactagacctctctctgaaggctttcccacattcactgcattcatagggtttctctccagtatgaattgtttgatgtctaattagctctgatttctcaaagaaggcttttctacaatcgctacatccatagggttttgttcctgtgtgggtcctgtgatgtgtgacaagctgtgacttcctgctgaaggcttttccacattctctgcattcaaaaggtttctctcctgtatgaatcctttgatgatt

SEQ ID NO: 54988 - DNA, 946 bp, Bovine  19866880680907
  misc_feature (1)..(1): n is a, c, g, or t
natatgtggagggaaaaaaatccccacacattggaattgggagtacaaaaccctttaactctggacctgagtttacttaataaatctcagagctttgagatttaatctctatgctttgaggaattctatttcccacactcctctctgggttctgaggctcatagatatgaaaatccctttaaattataaacaatgggaaaaaattctagttatgcctatttagggaacataacgggttaaaattaacatcagataaaagtcagttaaaaagggaaaaagtgaaaaaatattctttgaaacgaaaagctatacaaactaccctgttactgatgagtcaaatgagaaactgacctgcaatctacaaaatcattggaagaaacaatagtgaaatacttcagattgaaacctgtggaatgaggttacctcagtgccgattaaaaaaggcaaaaacttaagttctactttcagtaaggtcaaaagtttggataaaaatgatcacaaaagggaagaacaaaactccagaactggggaggaagggctagtctaaatcactgatgaaggacttccctggttgtcccctggctaagaatccaccttgtaatgccagtttgatccctggtcagggaactaagatcgcacatggcatggagcaactaagccagagtgctgaaactattgagcccgagtggaacaaccagagtcctagcactgcaatgaaagatccatcatgccgcaactaagatctgatacagccaaataaataaatactaaaaaaaatcactgatgagtcaaattattacaaatttaatttccaatgaatgatgatgactgaaacagtggttagaggtaaactttttagcccgaaagtaatctatgacttagaaattaaggcagaaaaccaagacgctagcggtcaactttcagatcagaaaaccaacaaaatagg

SEQ ID NO: 54989 - DNA, 2049 bp, Bovine  19866880791080
  misc_feature (1)..(1): n is a, c, g, or t
ncatcactaccaccaccaccagctcggaggtatctgtcccagggatttctggatcgagctctttgcccaaattcagactcttcacttctcaaaatctcgggcacactagaccagagccactcccactgccattctgtgagctggcccaaaccaatcctgctctctccaaaaacagccctgtctatagcggcgcaccctcccaccgccggggccgcaaagccggtgtagctcctatctgagaatcccaatagagtatcaccccgcagccctatcccccacgtactttactccgagccgctcccacacccactcggctcaggcccagcccgtgactaccctggtttcagctccaggaagcggacaccggcagaagcttgagtgggggaacttagatcccaccgctgaagcgcgcacagtctggccacccggctgcaggatcgtctttgctagaatcctcgggcgtgtccaagcccgtgtgtagatctcattgaccctcagcggaggaacttgtgaaccccgcagtccgggcaccttaacaatgggctcctaacgttggctgtgtatgaagaggtgcaaacggccgaggcaccttacttgggagaaacttacgcctccctcttctctatcccaagactacactcccgagaaccctcagcggccacttccgccgtcccttccgctcgccccttagcgtgtggaattgacgtagcaggaacatttccggttggtggattccgcccattaggtttgttggtggcgactggaccttgccattcaggtatttcctacacttctgctcttggttcccgagcttcatcctcaggattggcagcgtgcactccgagttccgtgagttccctacagtcacggcctcgtccattcaggacgtttctctgcttctcactgttttactcacgagggcacaggcagcgtctgaactcgggagctctcatgtaggcacctcaagaccatccattttcctttcattccaactcacggggatagagacaaaccccttactctgctgctgggggacatgggtttcactgtctggccagagcttggggctgaacttgaggggctcggtcaccctcggccctttctccagggcgctggatgggaatgggtttgtgctggtgatttctgtgacactcccaaccctcagtagtgagcctctggagcagacccagcctgcacatgggaagggttttccaactagacatgctctcatttcttttcacatcctcagatttgccttctgagatttgcccttcttaggaagagcactcaggagattaggaaaatgaccacggagctcctgaaagccaaaaaagaggtgagaatatgtgtaaaattgcatcttggctgccgagagaatgaatacattccattttcttgcgttggaggctgctttattggtagttgggcaaagctcactttcctggtcctggaggagtggcttattaatacgaggagtccctcaacattttctgccccatgcatgcttcagtcattttctaattaagttaattgtgaacagctcacatggggcataaatacaaatacagggacgtccaggcttaattgtgcagtgataaggatgcttttgaactgtggtgttggagaagactcttgagaatcccttggactgcaaggagatccaaccagtccattctaaaggagatcagccctgggtgttctttggaaggaatgatgctaaagctgaaactccagtactttggccacctcatgtgaagagttgactcattggaaaagactctgatgctgggagggattgggggcaggaggaaaaggggacgacagaggatgagatggctggatggcatcaccgactcgatggacatgagtttgagtgaactctgggagttggtgatggacagggaggccttgtgtgccgcgattcatggggtcgaaaagagtcggacacgactgagtgactgaactgaactgaaccgaaggatgaaaggcagggacaacatagtagtctgtggcctgaagggctaaggaggacttctaggagtagggctg

SEQ ID NO: 54990 - DNA, 1495 bp, Bovine  19866880899677
  misc_feature (1)..(1): n is a, c, g, or t
ncgtatggatgtgagttggactataaagaaagctgagtaccgaagaattgatgcttttgaactgtggtgttggagaaaactcttgagagtcccttggactgtaaggagatcaaaccagtgaatcctaaaggaaatcagtcctgaatattcatttgtaggactgatgctgaagctcccaatactttggccacctgatgcaaagaactgattcattggaaaagaccctgatgctgggaaagattgaaagcaggagaaggggatgagagaggataatatagttggatggcatcacagactcgatggacatgagtctgagcaagctccgggagttggtgatggacagggaagcctggtgtgctgcagtatggggttgcaaagagttggacatgactgagcgactgaactgaactgattcagaggaaagaagtttcagtactataaatatttgagttcatttgtggcagaagccagcacaatattgtaaagcaattatcctccaataaaaaattagaaaaaaattgaaaggcattaatataaaacagctgtggtataggaagaagtgaaccttcatattcactgagctcttacctgacacataaaaataaccactatctgaattcccatttaaaaattcagaagccaaagaaagatttgtttatatactttgacacttcttctgtcccaatatgagtatccttgtcttgatatgttacaacattaacattttacattatgcatgagtggtcttttccccttagtttgaaaccaacccaaatgcaggtgatattttttcctaaatttgtttctttgctggtttcaaatagggaggaactcatgtttaaaataaaaaatgaaaaattttaaagctctcttcaaatagatgctgtatacttctgatttgtatatgctaattaacatgaggtggtaagcaaaatatcttaattcaggtttggtttatgtatcattattaaagataactttctataaatgttatatctgatcaaaaataagaatccatataggtccaggttttctctatccacttgattattttagagaaacaggaaaatacagacaagaaataataattttaaaaaactacaacacaattttgacaaccagattcattactactgtcatatttgctttgtcttttattaaagaaatattacagataaatataacaactgccttcacttcctaaaaggcaatgtcatatatgtatccatgatcaacacacagtactgttctttgcattgttttattaaatttatagaaatgttttatttcattgtacattttgctttttctgtcagtattatggagtgtaattatgtcaaatttgtatctttaaatattatgttctatcatagaaataaccatattgtatcactctatccctctattaatggaaatgtatgtattctatttagaggaatacaaaccatgatccagttaacacaaagatatatgtatctctgtgacatatgtgggt

SEQ ID NO: 54991 - DNA, 1207 bp, Bovine  19866881023732
  misc_feature (1)..(1): n is a, c, g, or t
naatgatttctggctgaattcccccaaagcaagatccagcccagggccctggggttcaggatgtgtgactctctggaggggacataccagaggagagggaaggcctttctcccaagtccagaccatcgctctttagccctccccccacagcctgagcctacacagtcccagtacctcctcctggacactctgggctggttctctaccacctactctgcccagttactgatccagtcccgccatgtgagtcatgccaaacacctggcaagagtccaggagtgcccttccctctgcaagttatctgtgatttcaaaactggtggcaccaagatgcagaaagccaaagaatgactaatgccacccccaggtactgtcctaggaggaagaggcagcatcttgtcaggcttaacagcaagatgggtatggggctatgagtgagcagggggtttacacacactggtgtcacggacactgttgggccagtcaatgaaagagatgtgcgggtgcagaaagggggtcccgacctctgaccaccaatccctgaggcaagaaagtgttcatcgtgtactactctttgcgaccccatggactgtagcccaccaggctcctctgtctatgggattctccaggcaagaatactggagtggggagccactcctttctccaggggatcttcccaatccagggatcgaacccagtctcccgcattgcaggtattttctttactgtctgaactatcagggaagccccaaagaaaggatgggtcaagttccttgggccctggaaaggaagctgttaggctgaagctcccaaaactgtcaacattcacccattctttctgacccacaaaaaaggcagtttcatatggttcaatcaaatgtaggccaggaaatgactcaaataatgcagtgccaaggaactggtcaccaacaagaaacagggatggtggtggcctctgtggaagggaaccgggtgctctatttttgttcctttggttccatgcacatgtggccactaataaaaacttaatgaaatgtttaaaaatatttatttatgtatttacttggctgtgtcaggtcttagttgcagcatgcgggatcttagttccctggccaaggatggaacctgcatcccctgaattgcaaggcggattcttaaaccctggacccccaaggaagtcccttaatggaatttaataactcaacacg

SEQ ID NO: 54992 - DNA, 778 bp, Bovine  19866881089292
  misc_feature (1)..(1): n is a, c, g, or t
nacaggtgagaaaccctatgtatgtaatgaatgtggaaaagctttctctcaaagaacttcccttattgtacacatgagaggtcatacaggtgagaaaccttatgaatgtaacaaatgtggaaaagccttctcccaaagttcctcccttacaatacatatacgaggtcatacaggtgagaaaccctttgactgtagtaaatgtggaaaagccttttcccaaatctcatctcttacacttcatatgagaaaacatacaggtgagaagccttatcattgtaatgagtgtggtaaggccttcagccaaaagtcacaccttgttagacaccagagaattcatacttattagaaatagaaactttatgaatcttgtgagtatggaaaaagacttcagaaggaatttgcatttccttgcacattacataatgggatctagagcagaaaactgtgaatgtgggaaagcctttttaagaagccacacatttgtgaaacagaattcttaccaaggggacaaaatgtatgagaaagctgattatcaaaaaccttcagtagacatcttacctaatgatatttatccagcattctcactaaaatctgaaacaagatatttgctatcaggttatcaacatgatacttgagctcctagccattgcagaaaaagaaatactcttaacctttttatactagaataataataattagaaaatatgttgatataaaatatttatgaataaacatgataatgaattacaagacatatatatgtagttaaatattttga

SEQ ID NO: 54993 - DNA, 1475 bp, Bovine  19866881141548
  misc_feature (1)..(1): n is a, c, g, or t
ncccccgtgtggcgggccgcccggggctccgccgtgtcctccacgtcgcactcgctgagggtgatctcgctgctgctgcggttccgcagcgggaggaaggcccggccgggggaccggggccacccatcctggaactccacatccttagaccgcctcctggcgagtcggtgcaaggctttggaccctgaggaagccggggtaggggtaccggccgggggctgtccgttctgttgtacgcttctcatggcatgggccgcctttgtggccttcgtgccatctgcgtccagggaggggctggggttgttctgttctctcagggcctcccgcttgggcggccagtcggccacgcgggcgcgcacgcccatcttgggcatggcgggggtggtggggctggggcgggtgggggcactgaccgtgctctcgcccacgggttggggcacgctgccgttctgcacccagaatcccaagggagcgtagtcccctgtgtgcggcccgggcaggacatcggccgccctggccccacagccggctgccaggtccacaccatcactggggatgggccgataggtggtcatagtccacgggcgctggagtgctgctggcccctgaaagctgtagactaactttatggggtcccctggccctcagccattgttcagggccaccagtcctaggatgaaggatgctggcccctgaagcctgatgggaaggttgtgagcctgtggagtccaattctccaccatcgctgtggacagcagtgcctggacagcctctcaaggcaggcgctgtcccgtggcctccagactgagtgggtcagcggggcagagcgagcagcagttgtgtgtgaaggctggtgggctgcaggaccgccttccctgccatgctgaaaagggagaaaagacagaagtgagatgtgaggttcctgctgccacagaatgacttattttttcaactttacttattaaaaaaaaaccaaaaacaacttttattatggaaattttcaaaggtacccagaagcagagagaagagcatgattagccaccctaccagcttcaacaccattatttctcattccttccatctgttccccaactcctccatggtgtttttgacaggactgctcttgtttactcactcaactgtgtccgattctttgcgaccccattgactgtagcccgtcaggctcctctgtccatcgtatttcccagtcaacaatactggattgggttgacatttccttccagaggatcttcccaacccagggactgaacctaagtctcctgcattggcaggtgaattctttaccactgagccaccagggaagccctttgacaggatattttagagtaaatcccagacatcaggccatgtcacctattgggcttcaaaaaaaataaccacgatacctttatcataggggcttctctggtagctcagatggtaaagaatctgccttcaatgcaggataactgggt

SEQ ID NO: 54994 - DNA, 836 bp, Bovine  19866881269165
  misc_feature (1)..(1): n is a, c, g, or t
nattcttgtgaggatgaccccacccataggttggtagagaagggaatggtgtcataaaaacataggcctggccaattaagtcactgcaccccctcttccagagccctaacctcagggatggctcaaggtgaccctggcaccaaagccagctgatcaggtccacagatgagtctcaggacgtgagctgggataacaggaaaatccccagggctgctaagctggttggatatatacctggagctgccccagagcccatctgacaataaaaccaacagaggactgcagagccaggagatggaaggaaacggggtcccagcaaccctgaggtcgttacacacagaatgtcccagactgcaagttcaaacatttcctctcatatgtaagcaggctgacctgaatttctacttgttcacacaaccgaatgactctcaactgacacagaagggaaggcgtgagtacagttcttgacaattcccacagctcactaccaagacacttcagaaagcacaaaataaaattagaaacagctactatacatagaatcatcaaatacagaaaaacacacactctgtaaaaactcagaaataatctcttgggtggttgcagtccctaaagctggtctatgaaatactaatgattttgattttcaacgtgcttggaagggcaggagggaaccagaagcacctagaacaccttcctttatcaccaggctttccattaaaaaaattcttgggatgatcaggaagcccctgcctgtaaaattgtaatcagtgcctttttaactacatcggaaattgcttttctgccactcatttcccgcctttctttctctagag

SEQ ID NO: 54995 - DNA, 1941 bp, Bovine  19866881289335
  misc_feature (1)..(1): n is a, c, g, or t
nccatggccttggcgctccaggaccctcaccacattctcacacatggcaatcagggagccgttggggccattcagcatgatgtcatggatgaactcgtcaccaggcagggcgaccatgtgagctatttggagacccctgccgctgcgctcaatggtccaggtgaccactgcccccaggatgcccgacagaagcatcttcattcctgggtcatagcagaggcaggtgatgttaaagcgacagggtactacccccagggatttgaatgaccgaaggtggtccccaaagagccgcaggagcaggtcaccacagtagaccacaaggatatgaaaggaacctgtgtggaccatggactggatgggtggcagccgatctgtcatggagaacgttctcttctccaccatgtcctcagtcttgctcttcatccatactacagcctgagagagaataagatggaaactatctaggataggtagcagaagaggaaagggcataatagtcagctattttttcttgctaaggagaagttggaagatcctagagtgactttacccactagtttgaggaagtagaaatactgtaaaatcaggaaaccgaggactctttccctaaccctggcctactttaggagaagaataaaatctagtcaacatggagatggtaactggagaaaggatgaaggaggactcctgggtccagatcatgttcactcaaggggtatatcttcctggattaatctagggtcagaagttacatgggcatggccctcacttagaatgggctaaggagaagaaagactggggagttttacctgtatttcttttgtgcttgttgtcacccaagagagggaagaaaagaagtgggcatcactgaagtagtagcatataagcggcatgttttgaggatggcgagactctttgaacaggatctgggaccggtcactcaacacaactacatcagtcttcaggtcatctaaattttgctgggaagtggcatggcattaaactcagagaccagaaacacatatacaataaatatattctcacgccaagtcacaatctaaaccattgtcaaagttctgcctcagccccaaggaccactcctgtgacccccacacatgcagtttatcacctgtgggacacctgcactacacaagcgtgggacaaaaccctcaacacaagggtgagccaaaccactgtagggcctatgtggcgtcaggggaaactgatattccttccaatgtgaagttagctatacctgtccttgaacactttcccttctgtctaatagggtacatatgtcatgaaagaaacatttaacagattatcaaggcaagtacactgccatatgcccacatgtaaagtaacagggtgtcccaaaagtcagtgcagctttattaaagcctaaaattgcactaagtaagacttttaggacatgctacctggcctttaaatttgacagaggacaataacctatctctacacacacacatacacacatatgtataaatgatcccatggtgatcaagcatgtgctatgaaacatgcacctggcatccttctacaaagagccaagccacagcaaacctgacgttggcaaatgttttctgatgccttcttccttcttgtctagaaaaatctctctttccagagggtgagttcttctgacagtgctccaaagtgttcacctctcactatcaaaatgtcccagcgagaggtctctaggctcacttggaagttgatggcccacttcctgctatggggatagttgtccttatgattttccctgcctgcttcctctttccatagatgatctatgtgcctctaaaaggctcataactgttctgacagataggggccaataacatgtctgtcctacatatacattaccttgcttttctgtatcatgtcacttagaaggtatttaaagtccttccacagggg

SEQ ID NO: 54996 - DNA, 3065 bp, Bovine  19866881306594
  misc_feature (1)..(1): n is a, c, g, or t
nttgatacagagcccctatttgagttccctgagacacacagcaaattcccattggctatctattttacatatggtaacataagtttccatgttactctctccatacatcttcaccctctcctccccctcttccctgtgtccataagtctgttctctatgtctgtttctctattgctgtcttgcaaataaattcatcagtaccatctttctagattctatatatatgtgttagtacatgatatttatctttctctttctgacttacttcactctgtataataggctctaggttcatccacctcattagaactgactcaaatatgttcctttttatggctgagtgtaatattccattgtgtatacgtaccacgacttctttatccaatcatctgtcagtggacatttaggttgcttccatgttctagctattgtaaacagtgctgcaatgaacattggggtgcatgcgtctttttcagtgtgagtttcctcagggtatatgtctaagagtgggattgctaggtcataactgagacatttatatggcttccctgcctgacatgacacattaagacttcggcatgctgaatattcacatctaggagactataatacagttgacccttgaacattggggtaataggggccaataccacccctctattgcaaacctgtgtataactttacagttggccctccatacccgcagttccccatccacagattcgaccaacctcagatcatatagtactgtgcgtgtatgctaagtcacttcagtcatgtccaactctttgtgtccctatggattgtagcctgccaggcttttctgtctattggattctccaggcaagaatactagaatagtttgccatgccctcctccaggggatctttctgacccagggatcaaacccacatctcttccacctacactggcaggtgggttcttcattagcaccacccgggaagcccacagtactgtagtacacatttattattttttaacccgtgtatacatggacccatgcggtttaaactcatgttgttcaagggtcaaccgtataaacaactgaactgtaatcttacaacttctgtaaaaagtcagccattatttttcccaaattcatttatgccagttctttccccttcaagaaactaaaagacagccatttcagtcaatcaaaactaggttcagtgctttgctagttctgactatagatgcacactgcattgtttcagagtagacagtgagaaaatagtaaagattgatgggaaacataaaaattcatgaaggactctgcacacagattgctttacaagtatctttagattcttgttctactttaaataaattgaaactggaacttatagcctatgcactatacatgtgattaaatcaagaaaaaattggcccagcactgaaacaaggacaaactaaacatcaaaagacatatacaaaatatttagctactcaaaataaaccaaatactagtttgtagtctattgaatcaaagggctttattctagtaaatgatgctgatgcaaaagcaaaatattagcccatcttagagcaatgtaaaaggagaaatgttatttccattggcaggataacaactttaattaaaaagaaaataaggagctaattacctggtcataaagttaatttgtttcctgagatgatgtcttcaataactttgctgatacaagatgatatgaatgtataatatttatgacagaagcacttttagtcacattaacaccaggggtaatgtatccagagatctgtaaatgttaaaaccttataaccacagaactgtacttctgaaagtcaaaactgattaaatactaagtaatccatactgaattccaaataattttcacattctgctaatttcatcaaagaatcagaagcaatggaaagaaaaatgatattctcccctttaccacgttatccaaccacttaagttcatattcttatcatatgcattggttttccttcataaattggctcctacttctactcatttgctgaaagtcactgcttacagaaatcaccctctctcttgatgccatcagttttcctctttgaaatcattctcttcagcctttacacaggtcctaatacctcacatcttaagatactttccctgtaccccatgtgtctgcttttatggcaaaattcctctttagtgttacatacgtttattttcaccactgtctcactttcttttccttttatctcccactaactttaaaagaaaccaaaattttattacagagtatttctaacatacacaaaagtagaagagtaatattaaatgtacaagttatctatggaccagcctcaacaacatcaaccaagcccaatactgacctatgcagacccttatccactggtctcctcacattgtctgaagcaagtcccataatatatcttgtaatcacttcaggatttatctctaaaaggatttaaaaaataattgtaataccattacccaaacctgaaaaaatgaacagtaactctttgtcattgttgttgttcagttgctaaactgtccaactctttgcgaacccatgaactatagcacaccaggcttccctgtccttcaccatctcccggagtttgctgaaactcatgtcaaccatctcatgctcttctgcctccttctcctcttgcgttcagtctttcccagcatcagggtcttttccaatgagttgggtctttgcctcaggtggtcaaagtactggagcttcagcatcagcccttccaatgaatattcagggttgatttcctttaggattgactggttggatctccctgctgtccaagggactctcaagagtcttccccagcaccacagttcaaaagcatcaattcttcagccctcagctttctttatagtccaactctcacatccatccatgactactggaaaaacaacagctttgactagacagacctttgttggcaaagtaatgtctctattttctaatatgctgtctaggttggtcatagctttccttccaaggagcaagcatcttttaatttcaggctgcagttacaatcag

SEQ ID NO: 54997 - DNA, 707 bp, Bovine  19866881529025
  misc_feature (1)..(1): n is a, c, g, or t
nctcttcccaaacttagagctaggatacttaccaatctttcttacctgtcagccctttgtataataaaaccctctacccatgcattatctcttatccccatgagctgaccatattccaaactttaactgaagctgactctgctgggtcatgctctgtggaaccagcattaaatcagccatggtttctgtctcttgttctcaggtcaaacagacatcaagagatgggctctaaaactgctgttacaacatccaggatactgtggaagaagtgttcaagtatacttgggaagtatattggaatcatatcaattctctaatttcaacctacttaagtactctcttcatcaagttacatgagagaccttccaaaatctaccatccccagtagggaaaaccagagtccctgaaaacaggccagcaacaattcttcttcaggtggaatggagatactgacccttatcattagtctcatgaacactcccatcacacatagatgtctctgttttagtgttagccaatggctgacttattactgaagctacagccctggatgggacttccattgtctcgtgcagtgtgactactggctaaaggtttcactgcttgtacacacaaagtttctctcctgaatgtgtcctctgatgtctgatgaggtttgatttccaactaaagcttcacccacacttactaaaaatgttaaggcttct

SEQ ID NO: 54998 - DNA, 1390 bp, Bovine  19866880421496
  misc_feature (1)..(1): n is a, c, g, or t
ncttttcctccagcttcagaacttggctgttcactggagtaccccatggcctttatgaggtttcagaaagcccctctctccagccctccatgacaataacaagttcacgtagacatgcattattattacagggctaattactgtgcctcaagatagcacccaaagagttgcaatatgctacttctaattaagccctggaacaacttcagctagttaaataaagatattgctcaaaatgactggggaaaaaaaaaaagatgccacgctgaaagaatatgaaagctgaacaaaaactttttaatgaactgacagctgagcaagagcagtgctgagagagattctataatttagactataaattttttaaaaagccaggacaaagaaacaaataacatggcatatcagggcaaagctgaagggatgatcaaacaaaagcatcattgatgctgtcaacaaaggcgagccactcaggctacaggtatcaaaggccacatcacctttacagaaccatcattatatcctacgcttcacacttgatgggattgaaatcttagcgatgccccaagtccacttgaagataagtcaactaaccagacaaaaagaaacatacacagaggctaactttttggaaagaatattttcctgtctgttgtaattcatgagttatttctaacacatatcaagctaagggagataaatacgaaaatcacattagaagcttctgcagaacaatctgctttcagtcaatgattatgaaagatatcgcagctcagccaggcgatcgcacagcaggatgcctactagatggggagtgaggggcttcagcctggctcaagggaactgacaagcaagtcctgtctaccaggagaggggacatgagatggggaaggggttgcaagtgggctccgctctgcatccctggtgaccctgtccacactgggcaccactggcattgcactcaaggacagaaaagccctccagtctgttcccgaatggacctgtttattcgccactggctgcaatgcctaattggcatctggcacatcacagatgttcactaggtattagccacgggaaaagaagggcatgatgaatatgggtggcgcacggacggatgggtgggtgggtggatggctgatggatggataagctggctgacccacgtcagagcgaaactgtttacttcagactggaacgcgaacatagcccaaacccacaggcttccaactgagatcacagacctggtttcaggacctaatgaagctcaggttcctgatgtctcatcacatcagaattcagtgagagacaaagtgataggtaagaagtagatttgttcagagagaaacacattccacaaacaagagtgtgggccatcgcagaggcgagtgtg

SEQ ID NO: 54999 - DNA, 4438 bp, Bovine  19866880501039
  misc_feature (1)..(1): n is a, c, g, or t
ncaagctgctgcctgctcctcgagttaatttaaggggaaatggacatagagcatcctttttctccatcccccccctggggggtagccgtgaagagtcaagagcgggtgagtttggctccccaggcacttgtgtgtgtcctggactggaagaaaacctgagatgtctgacttctccaattcttgatagtgtcagcagggctcagtgggctgcggagcagaggcctctgtttttcattctctttgcatcagatcacagtcattggggctccgtgcagctctgtctgactcacgctctgccactgtggatacatcgtgccaccctcgggcactggagcttcctgggctgggaagtgacggtggagatgcccccactgccagggggctccttggagccaccaaatgtgcgtggaaattggggcaagcccagggcagccagctcgctggggtgtgggaaggctgtcatcagtgggcctgggtgggacagacagcgtccccagaacaatacatcaagtctgatagccccaaggaggacacagcgttgttcagaggaagctgaaggtcaggcgcgcccccttgcaggccaggtggagcaggcaggtcacttttcacttctgggcacgggtttacatacacgaccccagctgtgccttcagagagtagaagaaccaggacccaagacagccatcctcctccccggacacatctccacgtgactcctggcgagtcccatccagccagcatgtccagaattgcgttgtttccacagcctcctgctctgtccttcccagactcagccggcgagctgggcaccttggctctggctggacgtgcccttcccgcccgctcccatctgctgggtctggggcagccgcctctcagcaagctccggggacttcctctgccctcacagaccttcagctgttttcactctggctgcggaaacagccttccggtgtgtcttctctccacctcgcccccaccctaacctgatttccaagtacccgagccaccttagggaaacctgagaccccgtgactgctcatcctgtgcacctaggtcaccgttgcctcttccttccatggatgttccagacccatcacgtatacctgccccctccctgtcctgtccaaacccctctggaccaacttctgagggtctctacacatgttcaccagagcacttctggctcatgttgatcgtagcgccttttctcagttccctcactcatcgagggataggctgtgttgacgtcagcgtcttctgtggtgcctttaatactgtgacaggctcagcacagaatctcggtttactgaaataaactgatgacctaaacccatatcccatcaattccattctcggcagaatgctgctgctttgttccctagttataatactcattagaagggacatacggggacttccctgccagttcagtggttaatatttcaccttccaatgcaggcaatgcgggtttgatccctggtcggagagctaggatctatcacacgttcctcttgggtcaaaaacaccaaaatgtaaaacggaagcaatattgtaacaaattcaatactttagaaatggtctacatcaaaaaatctttaaaaaatgaacatatatacatagaatgtgcccatgttatatacctgttatgtgtacatggatctcattctgatcgtttccaatattaaggctatgaacatagaaatgattcattataatgaacctcttttgccaccactctcgcacacagtaggtgcatgataaaagtttacagaatcactgtaagatttaaaataccagaaataaatgggcattcagtaatattaatccccgaactataagatctatccctttttcatgatatcctatggcaaagaaattatgggtataaaaagcaaaacattggctggctagctataaattatactctgaaatagctaaaattatagttggactgtgacctttctgaatacatcctgttacgtgtcctgcccacacgggagaatagtcattccttttaggcttggctgaagccccaccattggtatctttcttatctgtgacttcctctggagtagaaagactgatttaccacccatgctgcagctaagagctcaaatctgagggctggccaggtgcacagggatgagggaactgtgtttgagcctcccataatttcgagccacagtgaggtcaaagcagaaagactaaatactgtttgtaacctctacccataataatttcttgggtaagaaagggaccagatcactaacgagtggtatcaagcgtaactgaggccacactcctagcaagtcatcaagatcagagattatatttagaaggggtggataagtattaaatgtggactgccaatctgctgctgttcctggcctcaacaaagagcacacatttttaattaaaaaaaaaaaaaaaaaagaacaaacatctttaggcaggacatggatggtaagggcagttaaaaggagagaacacaggactctccaaaatcatttgcagtgagtcctgcaggtgccagggttgaagcgcccagccaggtgacctgagtcaggtcagcccgaggtcttggccatcaccgtcttctgttctggatcccgaggatggacagtctgctgctcagggaagaatgctttcttggggtcacagtgcttgagctaacatgcaaagcaacccagctcctcaaagcctcccgagttgaagatactctcaggagctccccatgttctgacatgagcagagagagccaagatatggacccatgacagctctcagcagacagaccagaggaacattagcttccggtgtatgtcctgtggtgtcagcagtgaccagcctgaagccccaagctctccactgcctccccagagatgtgatgtctatgggaccagtaccttcagggaggctgatgggggaagaagttttcagttgagggacccctgccaactccaggtggcttctcctgtcattgagtcacccaggaactttacatggtcattgctttaaggaccggatgctatatctaccccaaaggaaaatttccacggtcgtctaaaaaatgaattacactgatttgctcatgacactaacaacgtaaccccttcacactgttttggacatagatgactacctcattaatattgacttttgagggtcttaagaggagggctggcagtataattagcctttctctgctgaataaatgttaactaattgctttacaaataatatgttgagatgagaaatcagttttcaattttacagctgtactcagttacacattagaatttttgatacgaaaggttagtaaaatgtcactaaagatcttcaaacctaatccttacatactggggaaaaagaaatagaattctaatagaacagacaaagcttggattactgggttggggaattttcagggagaattttgaggtctgttaaatcacttttttttccctctcacttttaatttactttattaaaacatatttccttacatcagagcaacatcacctaaggtattatattctccagggaaatctgttctgttatctcttcccgccccatcactcactgtaaattctaggcaagagcactaagtattagacaaaaggctaatttcctccacatcagttcatgttgtttaagaagttaatatgcacaagtggtggtaattgaagcagggctggaagccacttccactaagagataatcactaaaggacaaagacggcaaagattccactccaagtgggctctggacaggccagcactggccccagttctgcatacaaatgcagttacctctcttaacaataagacttcattagtctccagacgcccagtcctgctgcctgccctgacgggctgccaccctcaccagctccctttttgcagtgctctgggatcagtgacacttccaggcacatttcatgtgggatctttgcagcttcaggtttatgttcttatagatgatgcaatgaatttccatcgatgatttgagaaaatgcaaaccgttaattctgtgaaatccttgtttcagtctcataaaatgagagtatttttctcgtctttcctgaaatcctccagtctctttggagaagaccttgtggaatctgggagcctctttgataagcaattaaagattgcagcacagtggagagttccccagctgctgtaaggatgaatgctatgtgccagccacaagccctccccttccatccttggaaatgctctggctgtttatccccctggatccctctggttgtttctatccctctagcttgggagatgggagaggtgttctagcatctagacccgctctaatgtggtgcccctccaaggtggtcccgtctcctgagtccaccatccccccgccggagcatcctggtttccttcggctccctgtcctctgcctttcctcactg

SEQ ID NO: 55000 - DNA, 1981 bp, Bovine  19866880779198
  misc_feature (1)..(1): n is a, c, g, or t
nactctttttgttgttacctgtctttgagaagcaatcaaaataaagaaatgaaattttcatttaaaaatagtcttctagtttctgttgactcaagactgtgtgtgaggaaaagttttaacaatgaagcacaaaaaacactcagctcccaccccagatcactgcaacacagcgttgctggctgccctgggggtacctccgattgtagaggaaattgtaggaacacgggaaacgagaaggggtaagtacctgacacatatccaagacacacctaaaggggaaattgcagtaaacaaatcttataacatggaactctgctgaaccagtggtttgtcttcatgtcccaaaaaaaaatatggcagaaagaagaaggggccgacgggtagaccacataaatcagcaaagtgattgtcaagggggatggagccacagtgctgctcccctgaaggacgcattgatgggaacacatcacaagagccatgacccaccaggaaccaaccagatgatccgcctgacaaatagcagcaagaatagtatttttttttaacttaaaatgaatcatttaaaagaaaaataatgaaaggacttggcagtcacctaatttctcagtcatagcacctctgtacttaatcttgagtggtgaccctataaaatgtgtaatgccacaatgtgtatttcctggaattctatgaaaatctcattttccaaaattaattgcactttagttacattttatttaatcagatgatgagaagtgctgctcttccttaatcacattggagagaagacaatttatgcttcaaaaaaaattagcaagtctaactaagaatcaatcactgtatctacaggttacacaggcaggaatgaaagctgcttgattttaataagatatgccttttatagccttctctttcctttaccgcgcccctaattcaatgtaccatattggatgtgtaggatttcccaagggaaaaataattctccttgaattataaaactgtcacattcacagttcatagagaataatactgctcagcttctcatcaaaattgttctgcctggcactggattctaaagtttacagtgtaacttataaactgatttgggaatatcacagaaaagccatgggctgaagaagggaaattcaaggactgaccctccctcccaggacaactctggttatggtttcgtcactaagtcatgtctgactcttgtgaccccataaactgttgcctgccaggctccactgtccatgggattctccaggcaagaatactagagggggttgccattcccttctcccacaggacaactctatccctgcgtaaattcctgaaaaaactcagatgtgactttgcgtgcatgctaagttgcttcagtcacgtccgaccctttgtgaccctgtggagcatagcccaccaggcccctctgtccatgggattccccaggcacggatgtgaacttccccctccccagctcccatattaactacataccagtgttaactacttgagagcttttaaaattcaacatctagtccaagatttcatccatacacacacgaaagtaatttattccatcataaagttctgaaaaatggctttaatgaaactttgaaattatttgatataatggagctgatcattttttaaactcaattatgaatttattttttcatactttctaatgctctagcactagccaacttgtttctcagtaaaattcttcctgggcatatttaagggctgatctcttctcaggtctcagcctgggctacttggcatgcaggttggaacaccaaacctaaatgagggctttaagtaccctttccatcagcccagtagacaggtctggagaatagctacagaaaccattttacaaagtcacaaattagcattggcttcagctacactcaccaatgtcaggtcaacccccctgctggctgctttatccctctctctccactgctttgcagcaggaacc

SEQ ID NO: 55001 - DNA, 1048 bp, Bovine  19866881003313
  misc_feature (1)..(1): n is a, c, g, or t
natatgtgcgtaaagaaagtaaaatccctggaggaatataaggtccaaactcaactggaacttaagaccaacacaacttaagaacctcccccacggtccattagtccagtagttcggactcacctcttccactgcagggggcatgggctcaatccctggtcaggaaactaagatcctacaagctgtacagccagaaaagaaaaagaacaacacgtgtctgcctgcatcacactcatttcagattaattttctgccatcagctttgattggccttctgcttgtcttctgatcatcatctaataagacaaaacgggagataaatcagcgtcctagtttggggcactaagagattgtagtaacatgttctagcagcccattggagtttatttccttccatttcatgacagccgaggcattaaatagtcttacatcatcaggctgtcccctgccttctctgtgaccactcctgtggctttgaaaatccaatatgagacatcattctttatggcaacctccatagctgcaagcaaagcaattttagagaacacttttccgagaatagtttctacatactcggcgtctgttacaaattactccctggttttgacaacacttgtaaaatacggagtttaagtaatacaaatgagttgtcaaattttcatgatgtaaacagtcagaaaagttgtttcctatcaacaaatccataataagcagccataaagctaaacgattggacttccctggcgatccagtgggttaagactccaggattccaatgtaggggcagtgggtttgatccttggtctgggaactaagatcccacatgtctcataacatggccaaaaagaaaaaaaaattacttaaaaattatatatttaagaaagagtcaactacttatttgctacccagccattcctgctaactgggcactcggtggttggcagagaccttgagaccatttccttcatttcccagagtaaattcccaggggcagtggtgtttgggctacaacataccccatccacaggaaatcccaggtccagctctc

SEQ ID NO: 55002 - DNA, 1684 bp, Bovine  19866881005548
  misc_feature (1)..(1): n is a, c, g, or t
nccttcctggtgcctgacacgtaggtgtaaaatattcgtgagcgcctcttatgggggagttatggattttgttttagattctacatacatatgagatcatccagtgtttatccttctgtctgacttatgccacttagcatagtgccctcgaggtccatccatgttgtcacaaatgacaggatttccttctatctcacggctgagtgacattcttttgtaatatgcaccacatcttctttatccacgcatccttgaacctcgtttcagggatgtgtgttgcagtcatttttttcttagtgacttctcccccaccctactgaatagtagcttttgttggttgacattaaaattttttgtctgataaaattttttaaaaattctttgaggtgacttccctggtggtccagtggttacgcatcctccttccgatgcaagggacacaggttcaatccctggtcggggaactaaggtcccacatgctgcaaggccaaaactagaaaagcctgcccactgcaccaaagagtcagcacagccatcaacatgaatgaataaataaaattttaaaatctctgaggattcttgcagaaagaaagtcagtggacttcctgttggtcaatttgtcataacaagcatggtgaccatacagatagttaggctcagtgtttttcctatatggaagctccaggaaatgcagtttttgacatgaaatcatcttgaagattgaacatggaatgacatcattatgtgtcaagctcctcttttctagacccaagatcggaaataaagttgagaaatattttgtctccatcttcagcttgacagtggaatactttaaaaaatcacatatgtaatacatttgtaggtctataaagaaatgataatattgttgatataatttctccgtagactcgaaatgttaggactatgacagcctctctgcatttttgtttgtataagatgctttcatgtgtcacgtggtatgttttcacggaatcgtgtgcatttgtgcacgactcttggatgctatgtggggaagtcacttatcctcagagatgctgagtttagtgtcgctgtccaacacagagtaggtgctgaacgaacagtgactaactgcccgactgaaaagaatgaatgtcagtaggaagtgttattacaaggtcagctgataaagcacatgacctactccatagtggttcttttccaggaatgaaactccattacccttgttatttttaggtccacaaataaataaataaataactccagatgcaggtatgcaataaacaaatgaagcctcttattcttttgaggctgtattagctagtgcatttccttaattgaaatttgttctcagtgtatcataaaactgtgcacgggagacctgtgtttgtactgagccagccactgactgcaggtcaggcagctgcagggggttgcttgctgtctgctggagcttgctgtttcttcttaacctttccagcaagacttcagaggagggtttttacttaatactgtacctgtcaaattcccaaagctgcaagaaaattgaaaatacaaattatattgtaaagtgaaatattttgtgtgattctacagtgtggttgatttaggaagagaatgaactctgacagccctgctcttttcagttcagggattctaaggttccaaaacaaaagcccccgca

SEQ ID NO: 55003 - DNA, 2205 bp, Bovine  19866881075938
  misc_feature (1)..(1): n is a, c, g, or t
naagccagcctgggagactctactgcacacctgtgtcttaatgtgtggtgaccctggcctccctgggagatgctccactccaaccgctgtcttcactgccacatactcgccctgcgagctggtgtctgggcctgttttcacatctcataaggacaccagtcacaggatgaggccccaccctactccagtgtgacatgcaaactcgatcacatcttcaaagatgctatttccaataattcacggacccaccctactccagtgtgacgtctgaactcgatcacatcttcaaagatactatttccaaatgatgttatattcacaggtcccaagggataggaagtcaaggtaccgtgccagggacataattcatcctgataggtgctgaggcaggctgcacgctaccttccccaagctcctctgcatcatgtgatgctttgtgagtgaaactttatgaaactttacgagtgaagcaatcaccagacttctgtcactgtcaggtccattttctcgtctctcacgagtagggcttcgcattccttccccaggccaaaaaaggcaggaaattgctgacaaatgtgtccaaagtgatgctctgctcgctgcaggctctggatcttgcgccatcaacccagagaagtttgtgaggtgtttctcttgaaatcaacccatagcggcttttacgcatcttcatcagattgaacggagcctgactctgagcagatcatcagcttccgtgctccccggggcaggaggcaatctcgggtgcgagacagttgatggcacagttggggaggagaggaacgctgaggggaaatgctttccagttgacaatggtcaaagcaattgcttggctcactcaaggagagctgaaggatacaccagtaaatttaaaaagaaaggaaaactcctgattaactcaaccatgagagataatttaatgaacagatttcattttagttaatgaatgatttattgaaaatgcaagcaaatttacccttagctacaattatcactagataatttcaaaagggaatgtactgtctaattagtcacagtcttaaactaaccttaaacaaagggatttcatctctgaaacatttgattagctgacttgtgctttttgatactaattatcatgcaggtattatttgtatggccattaggttttaaggtcacagaacatggtgtcattaagtatacataagcaaagactaaaatgatggtgttcataactaggcataaatgtgatgtgaataacagtttttaaattcacactgattcacacttaagtgattatctcccttacagataggttatcagacaaggtgggaataattacttttccaatatgatgtttggtgagataattaagtagtgtttgtctcccctcaagataaaataaacaaaaccttgaaatgaataatcttcagatcacgaagcacagaaggcatctcaacaggtcatgatggtggcattggaatcttgctgcaaaaggatgctcagaactgccatcactttattctaaaaatgctttctgcctcctcctgtctcatggaactgactttcattgcaagggtttcttaagctaatggtagaagagtttggttttcagtgttccaagatgctgaagtcttactacagagagttactaacatttattactataaaagtgatgtaacatgatggagaggcgcttcctttctctgagaaacatcattctgttgttgcattagaagaactcggtgagaacacaccccatctgaggcttccttcttcagcatcagttacccaggttggtccttctcttccttctccttccctgctcagtggcccctcccagatctaaccacacccctggtcccgaattagggctcattattctcatgacctatcgcctctctgccttccaccaggataacctacgacttgcttctcggctccagggctatacttgcatgatcctactggtcagtgcgtcctacctgtaggcgtctcaaaccacgcgtgcgtacatgctcgtgcagtcccctcagtcgtgtctgactctgcgactgcagggacgatagccctccaggctcctctttccatgggattctccaggcaagaatactggagtgggttgccatgctctcctccaggggatcttcctgacccagggatcgaacccacatctcttatgcctcctgcactgccaggcagcgtcac

SEQ ID NO: 55004 - DNA, 1658 bp, Bovine  19866881260193
  misc_feature (1)..(1): n is a, c, g, or t
ntatggattgttacagttctgaatatagttccctgcactatatagtagatccttcttgtttatctgttttatgtatagaggtgtgggtatgtaaatcccagtcttctaattccctttggtaagtgtatgttttctatattgtaaatttatttctcttcactcctccaagttttcttattccatctgtaaaataaagggaaagggtttagcctgtactttcttgttctgtctccatttccagccggtgatcttctctccagaaatgaccacccctttaaattggaccatgaacaccaagacaaacttcggataggctgaaaggtcaaacgccatcctcagctggcactggggcatgttttttttaaagtgtatacagacatggatgtttaaaagaagtccgctgagtgtgtaatatggtagtcagtcctttagaagtgctttgtctttgtattttaaactaatcagagctccaaaattactataccagttgtgcagcttttgcctagctcatgatttttgacactgtggtaagtttagtggagcaaagtctcattcacaccccactcatgcataatttgggataattaaggcagtgctgggccgccattcaccttttccagcaggaaaatgaagctttaccagatgaatccgtattgcgagtgggattaggtccctgatggtgggcgtatacctccccagagaatagcatcttttttcggtatggcagtgtacatcagtcctcaactcttctttccacctgatttctaccaaggactttagaagtgataaattctaggtcctcctacagctcagaagttctgagttcttgccagtatcatgctggcaagaaactgggacattagtttcctttgaaaacttgaaagtgatagcaatttcatttttgaaaaagttgcccttctttactcagactgtctcttagccccctgcttcctgtccccgctccagagtttgattgatacttgcttttgtattataattgctagttaatgtctaaccatcgagaagttcttccctgcagctctgttccactgataagaaaatgttgcatcatctggagtgttgggttgggtagtcgtggccctctgggttatctggcccagctgactcttgcctctcactgagttgagcatgcatattcttgctggaaggaaccctgagtaggtccttaccattccatatcatcattcacacagagtctgtctccaccagcctgtcttcctcgctaggctgttacaaatcagctttatttattctgtgtttgaatttggagttccctacccaataatttaatatttttaaaatgacactgttggtctctgatttgtcgtgagcgaggatggagttagccagcctgcaatttgctgctctccccttcaccctcccagcatctactcattagctcataattgttttcataaccttctcggagtctggtgtgatcttactttcggccctctgtgacccctccaaggtagttaaatgggggttttgctctctctatgaattaaacatgtcatctctatttgaaatgttcctgaacccacggtgctatattttagcaaagtaaatactattttcagagaatttgcaatccatccatttatatttccttttattaggagatataatgatctgat

SEQ ID NO: 55005 - DNA, 708 bp, Bovine  19866881294296
  misc_feature (1)..(1): n is a, c, g, or t
ncggctgtgtcctgggaggtagggatgaggagccggtgacaggcagcatctgccttttcatgaaggcctcacagggagatctaagataccagagccctggggggtaggagagggtgctgcgaaatgtcagagaaaggtcacggaaggctttcttcctggccccatatccgagtggctcagtgtctctgagaccttgaagatggggcctgagacgagactgacaactgcgtgtctctaccatcccccgccccccaagaaaactggtgaaaaggtcaggaaaaggaaaaaaaaagaggtctctgactgtgcctgctatcagaagcaaagttccaacaaagttaaaagcatctcgggaggagcatggctggcaagtggaaatgattctggggtagcgaactgtgatcacgggcactggattgactttcccgcatgcttctcctgccccgtccctcagccctgttttctccagaagatcttaaattccaaggaaaattctcttctcgtgtttccccgggggcttgtggatggagtgtttggttttagatttcagaaaagaatcctgctctcaaccagcatcccccagagggggccctcctccacctcggcttcggggcacaggacagaggcacaggagaccccgctgccaagttgttcgtcttttaagtgacgtggtgatttacagtaagttcagatctcctagcatgtaag

SEQ ID NO: 55006 - DNA, 705 bp, Bovine  19866881380512
  misc_feature (1)..(1): n is a, c, g, or t
naaagcacacctgctgctggtgtccacggagatgtgaaacacctggagccgtcactttctgggacacctccagacacgctgagcatcgctgcttcctccacggttcctttttccctagcgtgccctgtgcctgcatctcacctctcacgccttctttgtgttgactcctcacctcactgcttgggcttgacaaaccctttggctatttatagtaggagttcatgacacgatcaacacactaactgaacttcatagtgaggatgtatgcttcctgttcatactcagtaaagcagagtggaataatttgaattctttatgatggatatgattataaatgatatccctatttacacatataaaaggctaaatggaagatgattagtgaatcctgttttccgtttttcctaaggtgatttcttaatcttccaaacagattcctatgatacagagaagaaaaggaataagcccattagaagttacttaacatttttacaaagctgtttaaggctttagaactgagtaatttttgtccctttattatgttttgacataggagaaaaaaagtatagacatccatttcttctgtacgttgttaacctggtgacagtgtttttagatgttttactgatgacaatatccagttactggcacttgtcataagcagaatggtgagtctttagatttaacaaatattttccctctttt

SEQ ID NO: 55007 - DNA, 1085 bp, Bovine  19866880379104
  misc_feature (1)..(1): n is a, c, g, or t
ngatgcgttttgaactgtggtgttggagaagactcttgagagtcccttggactgcaaggagatccaaccagtccattctgaaggagatcagccctgggatttctttggagggaatgatgctaaagctgaaactccagtactttggccatctcatgcgaagagttgactcattggaaaagactctgatgctgggagggattgggggcaggaggagaaggggatgacaggatgagatggctggatggcatcactgactcaatggatgtgcgtctgagtgaactccgggagttggtgatggacagggaggcctggcgtgctgcgattcatggggtcgcaaagagttggacacgactgagcgatgacagaacaaggcaaaagcaggcatttccttggatgctctgatacattagcaagggcttagctgagtattcaaaggattctattaaacagtctttacaaatcagctttatttgctaaagtgatcaaatgatgatcttccaagtgaaatggacactgcatttcattaattcagcaccctctttaaggaggaagtttaagcctgaagaggtccagtgatcttctaggtccctgcgaatgattggaacatgaaccagccttcagactggagtccatagaatttttcataattctatgaaatcaagttaaaaacaaacatcaaaggcaaaacttcagagaaaaggttttgcataaagaaagcttacacttgcgatggtgtatgtacatttttttctcttcttggttataggaatttgaggatggggctaagggagactatgtaagagaaggggaattacagggtggggtgaatgagggaaccacttctctttctgaggcaggtggcccctcaaccattgcatgttgtgttggactttgtaatacagtgtatccctaaggagagagcttgcctgtgaatccttgcaatctaagaaaaggcattagcaaatacaagataaagcacaaaagcttatttttcaaaaggtttaacttttgagctgaaagataaaagatgacgatatccatttctactgggtatacaagtcttggtaacgggaaagcccaaggag

SEQ ID NO: 55008 - DNA, 1471 bp, Bovine  19866880436345
  misc_feature (1)..(1): n is a, c, g, or t
nttattttttgtcatttgcactagctttgcttgtttcactgggtatccatccatagagctcttcatactggtgtcttgaaagtggcatctcctgagcttgagtcttgaaggtaagataattaatgatgatccaaaactatttaaagtctttatataagtgattttcattctttgtatcccactaatttattgttgtatccctggtatggaaggcgctatgactaaacgtaattttctctgctacctatttaacctatttaagaaaaaagatttttacaagtatgttttacatcaagaccaaccatatagctttatgcccatttaatcctctataattattgcttccaacacaatgacagaatagattggtatcagaaatagaaaaacttcagattgccaggaggagtcccctaaaaggaatatttattttggggtttatgatgaaaatgacatgattttaaatgccatcaactcagatctctaaacccaggtaattatttgtattacttgaaataatccagaagaatttttggactcttgtaattctagaattagaagtgattttactgggcatttggcccaactatttcaatgatatagccacaaatatgagagatcacttgtcagagatgagacaaattcatatcttttgatcaaagatcactaataattccttctaccatgctgctttttccaactgtctcttgtcctcaatttaatggttattctaaaacaaaatggataacaagttcatttttatctagttatgaatgaggatatatctgagcaactctctgcttctattgtttacttttaacatgtaatctgaaaaaatccatttaatatatgtgatttctaagttgttatgtctatttactcattactattttctaaatctttaattttgattctatacattatgcatctttttcaagtagaatctcattttgtagttataagggtaactaaagttcactgttattattggtttctcataaacagtatttacagtaacaatttattaaactcctcaaaatctgttggcacaatttttccacccttttccaactaaatattattgactaatgtatataatattttcatttattatattcttcccagttggttgcaaagccctctatcattacctcccagttgacagcaattcagtctcatccaagcaaaagaactgccaagtaatattatacaaataaaatttcaggttaaaacaaactcagatccattttatatgtgcaaataagttatgcatgttactatttttctcttaaaaatattatattgtatgagatcaaagcatagtggcctccattaaaatgtttttaatttactacctatttaaaatcacagctcaattcttatctcatgattacctttcctactcaaccagttatttccataacacttatcgcgcctggcgcattacaacagcgctcgactatcacatccaggg

SEQ ID NO: 55009 - DNA, 855 bp, Bovine  19866880543222
  misc_feature (1)..(1): n is a, c, g, or t
nattccatggactgaatagtccatggagtcacaaagagtcggacacgactgagcgactttcactttcactttctcaggcaagaatactggagtgggttgccctttccttcccaggggatcttcctgacccagggattgaacctgagtctcctgaactgcaggcagattctttactgctcagtcacggggaagcctggacttgcctggggagaatttacatatgcctttttgaacttctaatagagtctctcttctgagtaaccatttaaaagaagattaaatttaattaggctgtatctttttcctgtgacatgctgccttcaaagcccactttattacatccgtctaccccagcagagtactaatgctggctgacacagggcaccttcaagatgcaggaggaaggacagagatatttgcacactcactttatcctctgggagtatattggaaagggctgacatgcgacacctatgccagtccagcaacatgcctgagtaattattactcagggaccaattgacaggctgaaggagtcacctgacacccccacccccgacctcagccacctgccctaggtaggagctcagagccaccttgagttctatcatccatttacaccctatctatttcttttctaacactctatcattctctgaatttattaataacaactgcacctcaatagtagttggtatgaactcacttaaggagaagcatctgttttatcctgaaacctaggcatgatctaatttatgaacttttcagtctcattcactcttgagacagtgttcacacatatactgtgaatagtattcattcaaacagaagcagtgtcgaggctttaaaaggatt

SEQ ID NO: 55010 - DNA, 2543 bp, Bovine  19866880571784
  misc_feature (1)..(1): n is a, c, g, or t
ntggaagtggaaaagattctgatgctggaagggattgggggcaggaagagaaggggacgatggaggatgagatggctggatggcatcactgactcgatggacgtgcgtctgagtgaactccgggagttggtgatggacaggggaggcctggcgtgctgcggttcatggggtcgcagagagtcggacacgactgagcgactgaactgatctgaactgaggacaacatgatcactggctactagtaacaggtggttttcttttgacacagaacttaaaagtttttaattattattttgaaattttcagtttcctaatgaacacagggaaaatgggcagcacagggctagtattctggaaaaagactagaagttcttaaacaaaacaacacaataggtgactacagggagacagcattatttaagtgttaaaactacctatcattcaaatgaatgtttttattcaaagtaacctccactagaagctgttatttcagtgacaactttgttctaagtattttgaaaatgtcagtcttggaattaattttgtacacaataccagctgtgcaagaaatcaggcactatagctttgcatgtcctatgttcttggttctttagtcactcagtcgtgtctgactcttgtgatcccatggaccgtgacctgccaagctcctctgtccacaggatttcccaggcaagaatactggagtgtgtcaccattttctcctcctggggatcttcctgacccagggaccaaactcacatctccccatctcctgcattgcttgtgaattctttaccactgagccaccagggaaggcttgcacattctatgtaacagctcaaattccgtggcctccccccaaaatagcaaaataaatgttatttacttagaatatttgctgcctcctcatgtcattgataaagccatgcaactaaaccgaagagcttttagaaattttaaacttgtactgagaactattaatttcaatacataatcataggcttaaatttttgcatcatcatgtgctaaacagaccatgtgaatggtcatgaaccaaatcactaatccactctgatttcaccattgatttggttacatgaggtactctgtatcaccagataaacatgtaggaagaaaagttgcctacatagcgcaggtgagatgtcacaaaccagttaatatattttggtcctcgattgccactttataccagctcaatattagtgcaaattctgcagccagctaaggactatcacgcactcctgacactgctgtttacaatttcaagaatgatcatgtccctccacttaggaagacaaacattttaggagcaaaactccttaaattataatctccaatctaaacaaaacctctcatttcttatcatgctgaatagaattattcctccttaaaaattgttgaaatattggctgatggagtatagcagcatggcgggttttttaaaggaaaaaaaaaaaaaaacaagcaaatgccaataataagtagtgaaataaaaggacataattcctgtcttacaaatatttatactgtttctataatggataatggcaatatagagtataataatcctccaaagtcatcaccatattgccttcattattgttttcaataaaacatcttgctttcaaagggatggtgggaaatgtgactaaaaatgtttgtaggttaattgcatagattacgtgtctactgtgtgctctattagcatcagttcagttcagtccagtcgctcagtcgtgtccgactcttcacgaccccataaatcgcagcacgccaggcctccctgtccatcaccaagtcccagagttcactcagactcatgttcatcgagtcagtgatgccatccagccatctcatcctccatcatccccttctcctcctgcccccaatccctcccagcatcagagtcttttccaatgagtcaactcttcgcatgagcataaaagtagttaatatttctagagaacttactatgatctggacactatgtttcacctgtaaagaaagcactaccagccctatttcaaagaagagtaggcaggagctcagagaggctagtaacttgcttttggtttcatccctaagaagttagtaaagccaaaatttaaatctaggtctaactccagtttgcattcttactatttctgagagttctgactaatcctagttgttgaaatttttagtaggaaaactctcagtctcttgaggctgaaataaactgttgtaaatgacaatatctgtcagctagagaaacacagtttaaaaccatgtttaaatctgagactaaattccatgtcctatttatcatttcaacaacaattaaacaaatttctttccctgatggattaacaccagtgtggcatatgatatatttggaatccaccacccagtctcaaatggccagaaaacagcagcagctttcatgtcatttctaagcaaaagttgaaagccaaaaaaaaatcactggcaaaattcactctggtgagactttcaattttattctcccctgaggttcaaacaaa

SEQ ID NO: 55011 - DNA, 2049 bp, Bovine  19866880593861
  misc_feature (1)..(1): n is a, c, g, or t
natgtcagatcacagggttaagcctaggtcccccaaggctaggtgagaagatgctataggtacaaggaagggctgccttaagacaagccgtaaccttctatcaaagggtctccgtaacttactagcccttcctgccttaagacaagccgtaaccttctatcaaagggtctccgtaacttactagcccttcctgccttaagacaagccgtaaccttctatcaaagggtctccgtaacttactagcccttcctgccttaagacaagccgtaaccttctatcaaagggtctccgtaacttactagcccttcctgccttaagacaagccgtaaccttctatcaaagggtctccgtaacttactagcccttccttccagtctgcttcttaggctctcaatgggccacattctgttagaagccactaatgttgtccacccaactcagccttctgggagcagagaacagggcagagaaaagtagagagctgacagggaggggcaaagggattgattcagcaagcagaatcttacataatgttcctagatttttaccaggttttctagtaaacaaatgtgctgctagagttttgctaaattaagaatttacattacaaaggcccatggcaacccagtgatagatttcactaaacagaaaacagtaattaagattagtagacattaagaagttaataatgaatcaaagcatgccttttaatgcactgatcaattgtgtattgtttaaccagtgcataagaattgtttattcacctgcacatttcttaggagcttgacaaagttttaaagaactttgtcgaaaacctcttccagggaaaaaaaatttaaagacagctaaatcttctttccttattctaaattagtaacattatattaattcatttacttatcactcaagatacattaatataagtctactacttattcagtattgagtccttgaactttaggagttcagctagtcaataaactctaatggaatgccaaccactatgaacaaattaaattcacttaaaaatacactgagttaataaaactttcaaaatgtaagttcttttaaatcatttacccttcacaggaaactatgccatttcccttctttctgtttattgctgttgtgatccgtgctgaaaaatcagcatttcaaggatcagctatgtgtatggctttactttttaaaaaatatattgaattatttggtctgcaaaacatcaaaaggttggaatatccatcaaattgcagatttcttaaggtcagaaattatgttctctattccactggcaattttatgcttccttattcagggtcacaaacagagcagttactaagttcatatagttgcagatctcaaatttaagctcagttcttaatctctgtgctagactgactgaactgagtcatgccttattttttctgcacatgtgaaaatatcaagcattccactgccaaatatttatgattttatctaccctcttaaaatgttaatatttctaccttccatagtattctgctagtgaatcactgctgttaaattaaattagatgatctcacatttttacatactttaatggcgagaaatattcccaactcaacagctttaaaacaatatggctacatcatctgcaatcctgagagtctgtacagttcagttcagttgctcagttgtgtctgacctttgcgaccccatgaatcacagcataccaggcctccctgtctactatattaagaacagagctcaaacttaataatccacactcacaactgaggtctgaaaaggaaagctgcggtgaaattctagggatatatctaaaaacaagtgagtcatttaatattattatgatacagactcctaatgtggcaagttgcctctgcctgagaactataatttgtaccactcagaaaaaatgggaagtcatttttgacagttctttttttttttttttttttttaagcagaaagctcttttccatctgcttctagctttctactgggtggcttaaaaagttccttcgggattttctgtaacatcttacgggaa

SEQ ID NO: 55012 - DNA, 1283 bp, Bovine  19866880756829
  misc_feature (1)..(1): n is a, c, g, or t
natataaattataagtataaatgtagatataaatatgtgcagtttaaatatcatgattcttatgatatttccatttcagaaactcaagttataaacgaatcacattctttgatttcaatcatgatattgagtcatcacaatataggtatagtcaagtctcaacttggatttccactctttgttcttttaagaagcaggaaatcttataatccctgaaaaggacacaccctttactgctactgacagcataactacaatctaattaatgtcagtgttcagtagattcattgttagaggccctgtacttcatatcaggaataagcttattaaagaaattttccaaatagtagttacaaattaaatcattgctgtatggaagggagggtgaaatccttttctctcagttcagttgctaagtcatgtctgactctttgcgacctcatgggctgcagcatgccaggcttccctgtccatcaccaactcctggaccttactcaaactcatctccatagagttggtgatgccatccaatcatctcatcctcggtcatccccttctcctcctgccttcaatctttctcagcatcagggtcttttctgatgagtcatttcttcacattaggtggccaaagtattggagttcatcttcagcatcagtccttcccatgaataatcaggactgatttcctgtagtatggactggttggatctccttgcagtccaagagactctcaagagtctactccaacaccacagttcaaagcatcaattcttcagcactcagctttctttacagtccaactctcacatccatacatgaccactggaaaaaccatagctttgactagacattttattcacacattttatctgttaaacaaaacaagtaataaactgtgaattcaaacctagttaattcagtcatgagttatatgaaaatctcattgtgaaattcagggccaaaattcaccaaagtaatttctataaaatgtctaactcactttagcaggtgtcacaaagtactataaataaattgcaaaatcaaaaactagtaatgtaaaattatttcactgaaattagattattttaaaatttgcttagtaaggtatttgaattagttttttaacgcaaattctctttccacttgaacatcccgcaaaacgcatataaatgatatatgaagtcgtataacctaccatatatagctcttagatgagaacatgcactttggaagaaccaacccaattcattgacctcttcaatctatgcttttcccatgtgcat

SEQ ID NO: 55013 - DNA, 536 bp, Bovine  19866880793753
  misc_feature (1)..(1): n is a, c, g, or t
ntttctacctaatggaatgttatacctcttcctattgtcaatttcctcttatgtgtgcctataaattcatgtagttttcctcagagaggttttgcgtattcttattaagtttatgctaagaattttgtatttgtattgattgtcaaaggattacttttatgttatattttctgtttatacttactatatttgattgatggctttttaaatatttatttataactgactgacttcactgaattccctgggtagttataattcaaggacattataattcaagtcttctctttgtgtgaagaatgctgtgtgtagcagctaaatcttcattccggtttaggatgggattaagagacagggtagaggggataaactatcctcaatttcacctttagagttaaaaaatgtgctatcccttttagttaaagagtctatacttcatttttggagtcaaatattgtcatgactaattataaaaagttttaggtaagaaggtgactaagaaaatataatgttgttgttcagttgctcagtcatgt

SEQ ID NO: 55014 - DNA, 1355 bp, Bovine  19866880989887
  misc_feature (1)..(1): n is a, c, g, or t
nctgtgattcttcttacatgctagactgtagtctctacccactacggggttttgtgaaacttccccttgcttcccccaaggaatcatataaagattgttcaccagtgttgtatgtcattccatgtgacgtctgcttacttctccagctttatgcttttatacctcccacaaacaccacttgaggtcctgtagtagagaagaacaaacttgattccatactggatctgttccttattcctaactctaacccttgtgttctgttgcctgtgcttagtcatgctggtccagctccttttgtaaaagaatgttacctaaagcctgaaactacagaatggccccattctcaaggctctaatctttaaaggaataacacttttccattcatatagagataaaaagttgcagacagagaataacataggaaccccatgacctgacccatgtagacagctgcaagaacaaaggattcctgaaataaggagtgtgcaacaaccagccacactccctcccctttttgtataaaataagcctgaattctaacctaggtaaagatgattctttggaacactaacctgccactttcccggtctatttgctttccagataaagtcgctcttcctttccccagcagcttgtcttttgatttactggcctgtcccgtggtgagaagcacaagcttggagcctaacatggtctctgtgcactctgtacaatttcttcctccatggcattacacacattgcacccactagctagaatgctttccacagtctccacccctcccataccccctttgcctgggtaacctttaacgccaggttgattcattacccctccaggatctcatctctattctctttaggtgggatttggttttactcttaaaggctcccataagccccccatgcatgcctctatccagcccttataacactgtcttaaatttgtttatgggtctctttttcactgttaattagttgagaaaaacagtacacaacagtcaactatggcacacagtagttgcttttctatgttgcataaatttaattattccattaaactacataatattgtacatctatgcaaagactagtttctaacaaagggatggaaataatttaacagcaaattggaatattgagaaactgtgatagaaacatatgtcaccagtgagagaaatcttaacgcatgttataaaacatcacaactcattctgttatttataacctggaaaatccatctaagataggaaatggtgtataaaacaacccagggttgcaatggtaaatttctagtttaaaagtagaaattacctttgcattggtatgatgcaggtaagactcatattgctcaat

SEQ ID NO: 55015 - DNA, 350 bp, Bovine  19866881142449
  misc_feature (1)..(1): n is a, c, g, or t
ncatatgatgtatagaggctccttgcatgggcactaagaaaataccaagtaaccaaaagattaatgtggactgtgtttacttcaagatcatgagtataaattgatttatacagtctgaattcaaggacgaataacattctcagagtaaaaatctgatgaataataatattgtgaagcagcttgatttatacaacactaataaaaagtccttgcactgcattggtaaaataggttttataataccaattgtcagtgtttcaattgaacatatattttttttaattttcaggcaggagatttcatttccttgaaaaattcaagaagtttagcattttgaaattgataaattt

SEQ ID NO: 55016 - DNA, 857 bp, Bovine  19866881174274
  misc_feature (1)..(1): n is a, c, g, or t
ngcattctttctgcaaggaatgtctccttccactcgtcccaatcatacgcattcatcaaaacccatcttaaacaccgtattttccaagaaacctgtacctatcccttcaaaagaggccactgtccctctttttcacttcatcagacatggttggtacttcttcatggcctttcttaggtagatcatatattacagtcttcagtttattcgtccctttactatattatataatactgtaaaattatggatttcttcttaatatcaactctgtgtgtgcacgcacaatctcagtcatgtccgactctctgaggccccatggactgtagcccacctggctcctctgtccacggcattttccaggtaagagtactggagtggagtgccatttcctattccagctgatcttcccaacccacggatcgaatctacatcttttgtgtctcctgcattggcaggtggattctttaccactaacatcacctgggaagcccaatatcaagtgtagcaactacaaaccctggtgcataactgtaactcaataaatactgttaatattattttaactaacatctaggcagggaagaaatatttgcatgatctatggaacaaggaaaagggtaaacggtccagatatgtctctagatgttctcccaggcggccagcatcactggcgttcccacgatatgttttacagagataactagaaatgttcagcttatattgaatatttatcatgggcctacttactcaatttgctcatgtgtcagagaaaaatcattcactatattctcaaggtatatgaagaatgtttaataaatatcactgcagaaatatagaaatgtccatttcaatattct

SEQ ID NO: 55017 - DNA, 1086 bp, Bovine  19866881186504
  misc_feature (1)..(1): n is a, c, g, or t
ntaagagcatataacatttaagtatttataaaagacaccttgggaatactctaagaatgaaaacaatattactttttaatgttaaaaagatcacaaaacaatattactataatctgtgcatatatacactatatgctattttctagcaactattacattagaaagctagaaagcatttaagaagacttgtctttcatagaaaattacatcctttaaatgccaaaatgcaagacaaaagatttcaagtcaacttttaatgttttgtcatgcaattttgcttcagcatatttggacaatttttaaattgcgttgttttaccatgactttaatcatattaacagtttcgtatgtcctataagcaataggcatataaaatcataaaatattattaacaaatgcctttactctggcttactacaaatcaataaggataaaaacatacatactaagaatttaagactgcatcatttgaactgaatgtaaataacatggttatggaccatttatgaaccactctgatcgatcccaggaccttaaaggtctttgggcatttttcccaaaccaaatttctcctcttctaaattatcattggtataaggtgtgatgactttcaggcatcaattcatacaaattgaaagcaggcaaagtattaattaaacttgacactctgattatttaaaccttctattaaagctgattaatcatagcatgttgatagcctgctcttcagtaatgacagatgatatcaaggcttactgactttctccaagtccactatttccaactcttcagaacagaaggaataaatgaagtgagaagaacactggaacaagtctaatagacagactgactaatctcagacccccaaggtcaaactaaagcaatccatttcttggctttcatcaacacaagacatgatttatccatctgaaagcaggattacaaacattatacatctcaatgatatgttctttgcaccatgtaactttttgaacaatgatagattgcacagtccccagaaaagtaatgtcatgaagcaaaaactcattatattttcaaataaaaacatttgacttttaagaacaa

SEQ ID NO: 55018 - DNA, 630 bp, Bovine  19866881225134
  misc_feature (1)..(1): n is a, c, g, or t
ntagtgaaagaacaaaaaacatagggagttaacgaactccagaagagtggctacttttgaagagaaaagagaggggaagagttacaggaatgaggctctgctgggattgttaatgttttatttctttcaaataaaacaaaatgtgagctccagaaaacatggcaaaacaacctctgttaagttcaaattgtgcacgctgtgtttgttatattattttccaagttttccgtgtgtttaaatgatttcatcaataaaatgtaatggaatcagatgacaaaaatctgacatttcaaagttcatgtaaaatcccagtaagcaccatcatctccaggaagaattcacaacacacaccagtaagggaatcactggaatctttagtatggtaggatgtgtctagtcttgcttgtaattattttacttaactaagtctaaattgtgactcaaaagagatctggggaagaatacttatcctcctattaacatacattttttatcagtcatcagggaatgtctgaaagccctcttttgtaacagatggttgaggctatattaaacctaaacaaactaaaatcattcataaatgagcaatttcaaaacacctagagtaattaagatcttcagctttctgca

SEQ ID NO: 55019 - DNA, 754 bp, Bovine  19866881260489
  misc_feature (1)..(1): n is a, c, g, or t
ntctccaagcttaggcctgaattcttgcctaggagtgactaaacaacaacaggcaagtgcacataggtggaagagtgcagattttagagcctatgttatatcttgattgggatgatggggcttcagtgaagaaagaccagtattccgtggccccgagagcacatcctctgctgtcaaatgggttcaagttcatggtcttgaaaactgtacttttcctgtcttcaaatgttctcatgagtccttctctcttcagttcaaaggagaaattaaaagggattctaagtgtttattcttcatcctagatgttgggcagatgcctaatttccactgcttccttacctcctgaagagtttcaggctttttgcttctgccaaaatggagcaaacatacagcttggtactttgaagtctgagttaaagcaaaactaaatggaccatgtttatctgatcaattaaggcattgcctacatccttaaaactgatgtttctcatttaggcggcattctatacaatcctcaggaaattaacaacagaaattgagtttggggaatgggggtcattatacaaagaaatgcaggaagagtgtgggagaatttgactccactccaacataagcttcataaactgactcggctccagtataaactaaaaaatgtctttgtagaagtgggcctgtagaaaatattaatgacagtccccaaaatagaattttgatttaaaactcccattatgtaaagtgatctactagatttaag

SEQ ID NO: 55020 - DNA, 1046 bp, Bovine  19866881308209
  misc_feature (1)..(1): n is a, c, g, or t
natacacacacacacactcacacacacacaaaacctttaaagctaccaaatctttttctctaccacataacaattatgagataactttaaataaatcaatcatatttcgctttgttttgttatccttagactaacttgagtacttataattataataaaagttgagcaatcaatagaacttattcatatttacaaaaatacatgtcatctggctctgtctggagggaatctataccctagttcaatcttaattccttataacatatccataaatctccaaacagctaatcatgaaaatattaatgaaatgagcacatgctttatttataagtcttggcttactaggcccttattacattgccagagagaaggaatattaaaataaatgatatctgtgttcagcactgaaaataaatcaaaagagtcacaatgtcacttataatagattccagtcaagtgtcactttgttgccttaaactgaattaacattttcaacaattctagaatactttcagataactataaatgactaaatggaataattaaaaaccctaaatatatgaagtactgaaagataatgctttatattgtatacataaagcaatatccttactaatttttagattattcagaattatatatcagggatttacacactgaaccataagtttaaaattgactaaaccatgtgctttatatttataaaaatcatcaatataacttgtgctgtgcttactctctcagtcatatctgactctttccaaacccgttgattgtagcccgccaggatcctctgtccatggaattcccaggcaagaatactggagtggattgccactcccttctccaggggatcttcccacccagagactgaacctgtgtctcctgtattacaggcagatcctttactgtctgaggcactggggaagcccgtaacatatggaagtgctttataaaaacataattgatttcttttttaccttgtttgttaggggaactattgacttaaaaaaaaataatactgcggaagcagaatccttcacaga

SEQ ID NO: 55021 - DNA, 712 bp, Bovine  19866881320009
  misc_feature (1)..(1): n is a, c, g, or t
ngtttacagaagaaaaagtacagtcctctaagtgaactgacaaattctgcaaatgttaaatgacattcagacttgtttatataaaaactacattcacaaataactaataattacccttttcatcagtatattcatatttcaacacagctccatcccctaaaatttactcagtaaattttagctcagtaaccaaaatgagtctagatacaaacatgctaatttcttatgctgctttaccagcaggtaacttgattaatttgaaatggaaatacatctgcaatctacctcttcttttttcttcacaccacctaattttgaaggcacagagtaaattaaaggtcactcagtgacgcatatctaaaatcctcaatttaatcctgaacacctactttctgagagattccatcaattatgttctgggcgccatgatcgttaaagtgtactggagtcctgaatccattgaagtgttttaaaattcagccggtataacccttcctgcaagtgtttcattgctttttccccaaagtgtgagctctctggggagctgacacaaagtatctgctccacacttcagaaagggagtaccagttgccagagttgaaattgctgctgggattacaacaaactcccaaaccaccccggagcagaaataaacagatcgtctcatatgttaaaatagtgagatgagactgaagcgcctgaaactcgtaca

SEQ ID NO: 55022 - DNA, 710 bp, Bovine  19866881320756
  misc_feature (1)..(1): n is a, c, g, or t
ntgttgccctgttagcattgaagaacctaacttttaccgtaacacttctttggggaagaatgttgctagctaggaaacaaaatgcaggtataaatagtagtataaggtctaatgatatcaaataccaagctaataaaaggcagtagcttaagtctatgttaaaggactagcttctaaatgagtttgtacagcacagtagagatgcaaaatgtacataaagttgtttgtttttttatatttagtaacactgacattatttattaataattttaccagaactctccctgaacttttcactagactttaaaaaattaatgatggtaaagtaagtaaattaaaatgaatgagaagaacaaaagaggatttctaaactcaccagcaagaacacatttgctcctctggatatatttttacttctttctctcttcccccaggcacccagtataaaaagagcatgaatttgaagtccagaagctatggcttcaaatcgcagcttaataacatggaaacatatacactgctgctgctgctgctgagtcacttcagtcgtgtccgactctgtgcgaccccatagatggcagcccaccaggatgccctgtccctaagattctccaggcaagaacactggagtgggttgccatttccttctccaatgcatggaagtgaaaagcgaaagtgaagtcgtcttagtcatgtccgaccctcagcga

SEQ ID NO: 55023 - DNA, 788 bp, Bovine  19866881394782
  misc_feature (1)..(1): n is a, c, g, or t
natcagcatcctgtcccattcttctcagaaatattttgaagtagtacttgttgggcttcctttccagctggcatgggacctgggcacatgacctattccagacagacagttcattctctctctcatcagaaacccacatacattccttaagtccttggtttgagtgagctccatctttccagttggtgccaacagatttatgtgttttttcatgtttggcagattctatgaagattgccttccaaattccaaggtttgtttccagaactgtggcttggcaggaaaactaatgcataatcttcaggtgtaggttttttgaggttttctgttggatattaatactataggtttagaggcaacctgcaattttataaaataactttcctcaggtgccatgttttaagcccttatacttgccaactgtaaagggggaattggtactggggaggcagagataaagctattaaactctctgacccatatgtgctatatgtggtcagtcatgtctgactctgcgagcccatggactgtagcccgccaggctcctcagttcatagggagtctccaggcaagaatactggagtaggttgccatgtcctcctccaggggatcttcccaacccagggatggaacctaggtctcagcattgcaggtggattttttaccatttgagccaccagggaagctcctttgacccatattccccactaaaagttgccttctacctgcctttacttttccatatgatttatcatgtgcatttgacacttccaccaaagcagaagatg

SEQ ID NO: 55024 - DNA, 2792 bp, Bovine  19866880246975
  misc_feature (1)..(1): n is a, c, g, or t
ncagggtgacaatatacagccttgacgaactccttttcctatttggaacaagtctgttgttccatgtccagttctaactgttgcttcctgacctgcatacaggtttctcaagaggcaggtcaggtggtctggtattcccatctctttcagaattttccacagtttattgtgatccacatagtcaaaggctttggcatagtcaataaagcagaaatagacgtttttctggaactcttttgcttttttgatgatccagcagatgttggcaatttgatctctggttcctctgccttttctaaagccttgtgaagcaatagatattcaatactgagaattttcagactttatatcatgaatgagaactgcctagtttatacagccatgagttcaggaactgaatggttctgactctgggtttctcatgaggttcagctgaatgttgcccggggttgtggttttcataaggtttgactatagctggagaatctgcttccaaggtggctccctgataggatggataagcaagcttgtgatctttgttggctgaagatttcagttcctcactatgtgagcctcttcacaggttagcttgactctcttcttgagatgattttcactaagcaagtaatccaagatatcaaggaaaacgtctttcatgattagctctggatatcatctatcatcacttctctaacatccagcaggtcacacatgtcatccttttcaactttggagggactacacaagagcatgaataccaagagatgatgatcaatgagaaagggcaaaaaataatcaaataaataatagaagaaaattccaaagatgagaaactcatgagattctagattaaagggctcttcaagtttgtaacacattggctttaaagagacccttgtcatgaaatttccaaccacaacatcaaagagaaaatctcacaagattctggaaaggaagaaaaaagtatgtcacatataaacatttagaaacagaatgacttcaaaatccacaacctcaaacttgttagacaaattataatgatatcatgttttaaaattctattaaaatattttaaacatagaattttatatccaagacaaaccatcaatcaagtttttgtgtagaacagagacatttttagatatccaagcttaaaaaattgtctcccacacaccctttctcagaaactttgggaaaacagaagatccaggaaacaagggattcaatacaaggaagaggagaaggaaatccccaaaatgatggagaaaggaattccaagaacaacagctatgtgccaagtccagagggcaaagagaacttctgacttgaacagatcagaaaacttagaatattattccatgaaaatattcagtctatagacctcaaaatgtgtttgaacacagtaataagagatttacacagctggaagagagtttgaagttgagtttataaaaaagtaaaataataggaaaataaaagaagtattaattccagagaaaagaaaatactatgtaaagaaagataaagcaatcaaagtttactatatgtctcaactggaactggcatttaaaagtcacagagaatgtaaacacagaatagtgatcaaaacaaattatgatgtaactgtattgggaggagaaaagaatgaaaagtgtgatgatcggacaggccaggggttaaaaaaaaatgctaaatcctcatcttccattgtgggaaatcaatacctagaactggaaaatcaataaacagcagtattagaaatgtgggcgtaaataccaaatgaatcaactaaatttgtttgagactagttgcctctaggaagcagcaatttgtggaaggtatggggtataggtgctaactttcataataaattttgtataactagtgtaatcttccaaatatgttcatgtaaatttagtcaaaataaaactaaatagaaaggattctgagaagatgacagagtagggagcaccaggaatctgtctccccacctggacaataattgcacaggcagaatctgcctaaggcaactattttggaactctggagtctattgaaggcatacaacttccaggaaaaagttgaacattaaattgctgttatccctaggcttggaagatcccctgtagtagtgcatggcaacccactccagtactcttgcctggagaatcccacggacagaggagcctggtgggctatggtccataggatcacaaagagtcgaacacaactgaagtaacttagcacagcatgcataaattgttaatttcagtcaagttcaactcttatggctggtgcagtgacctgtcccccaccctcagtcctaaggcaggcagcagagcacgtattccagaagagacctacatacagtttgtgagaaccagtgtgagaaaaaaagaccccgtcctccaagtatcacagttctgtgtcccatagttgactgctgcttctgatcatagacatgcagacgaagaggctgccagccattgttgctgcatctcccccataagttgcaagtccctcttcctcctattgaaatgacttccaaaaaacttaaagggctgatgtattcttttacctcccttccatttttctcttttccccttttgtaagccagagatgttaaagactatcatattaaaaagcaactttgtaaatggggaaagttagacagtgaccacacatgctcagatgaggtgaaggctcaaaagagaactgaaaggaccttaagcttatacctaaggcagatacccggcacacagtcagccttcaatagttaaaaaaaataaaca

SEQ ID NO: 55025 - DNA, 1480 bp, Bovine  19866880389679
  misc_feature (1)..(1): n is a, c, g, or t
ntttggagccccatacctgcccctagtgggcacctgtctgtacctcctcccccatactgcacagccttagctgaagcagcccagcatctccgtcactgacctcttcttgagcatggcgagatggggtgtggcgggggggagccccaggggcgctgcccccacggcctctgcgtgccggtcttcaccaggccacttcgtgggccccagctgtagtggtgggtcagggggccactgggtgttggaaatgccccccatggaggagaggggggtgtaggtctgaccacagcactgcagcagggacaccctgctcccaccgtcaaagaaggcgaaggacacacgccgctgctcaggctccgtcttcttgctttccagctgctgctgatacttgtccaggaggaaggtgctgtgagaggccatcggagccagtggctggaagatgtttgacatggtgctgaagcagtgctggggggccgactggggggtctccggcaggaggctctcctcagggcagatggggctaagctggaagtcctctccgtccatggggatgtaaggtgccagggtctccaaatccagctcgttaaagtcagtctagaagacacagagcaggggcaaagcagctcagcagtgggcgctgcctcaaggacgctgtctcatcttagcccctcatacccccgctcccacccgaggcattcctcctgcacagcctggcagcgccaaggtcttgggggcccaagagaggaaaacacagatgtgtcttcaaagtgtggaaggtcttctgacaagtgctaccagccttcctgcgcgtctccttccactcagtcattcttccacacaccccactggtgtcgaccccacctcttccttcctgcctactctgatgagcacgatggctcctgggggccaagggcagctttgtcctcatctcccgcccgtgcccagggtgtatctgtggacagctcgtagggtaaccgtggcccagtgctctctgtgggaccttcattcagatcaacaaggactcagagatggcccccaggttccctgtatgggcaccatagggaattctcacaagcagatgcagcaaaacaaacatttcacccctcgctgggggaggtagcttattaatggttacaatgacatgaaacggttaaagagaagcagcagccagttacccactttctcttttcaaggaataaatcttagagttcagagaagaaagtgcagggttgaagtagggaaagattgcagaataaagacacaaactgaggaggcaaggcagaaatttggatgaataacccagagtaagacaaatagggattaatacatttcctttgggttttgtgacatacttaccatccacccacaccctagcctgtttacacaggttttacaagactgtttggccttatgtaatatgtttctgaaaagttatatgtaaataaaaatttgtcagatgtcattttaaaatgtgtttaacata

SEQ ID NO: 55026 - DNA, 1587 bp, Bovine  19866880523010
  misc_feature (1)..(1): n is a, c, g, or t
naaacctatatgcaggtcaaaaagcgacaattagaactggacatggaacaacagactagttccaaataggaaaaggagtacatcaaggctgtatattgtcaccctgcgtatttaacttctatgcagactacatcatgagaaacgctgggatggatgaaggacaagctggaatcaagactgccaggagaaatatcaataacctcggatatgcagatgacaccactcttatggcagaaagggaagaggaactaaaaagcctcttgatgaaagtgaaagaggagagtgaaaaagttggcttaaagctcagcattcagaaaactaagaccatgacatctggtcccatcacttcatgggaaatagatggggaaacagtggctgactttattttggggggctccaaaatcactgaagatggtgattgcagccatgaaattaaaagacacttactccttggaaggaaagttatgaccaacctagataccatattcaaaagcagagacattactttgccaacaaaggtctgtctagtcacggctatggtttttcctgtggtcatgtatggatgtgagagttggactgtgaagaaatctgagccccgaagaattgatgcttttgaactgtggtgttggagaaaactcttgagagtcccttggactgaaagagatccaaccagtccatcctaaaggagatcagtcctgggtgttcattggaaggactgatgctaaagttgaaactccaatactttggccacctgatgcgaagatttgattcattggaaaagaccctgatgctgggagggattaggggcaggaggagaaggggatgacagaggacgagatggctggatggcatggacatgagtctgagtaaactccgggagttggtgatggacagggaggcctggtgtgctgcaattcatggggtggcaaagagtcggacacgactgagagactgaattgaactgaactgaagtagctattaaattttctaatagcattttttgattaattgtgattagttgtcatggtacaagtccagacaaaatattctgtaatatttagaatctatggtcacaagaacatttttaaataaattcatttttatatacatagctttgttggagagaagtatgattgggtgaataaaagatattctatcataaaaatgtattaggataaaattctgttggggaagtagaaggaaacataaattcaaggagaaaaaagagacgaaatttttccaactgttaagggagaatttcatgtattttttaaaaggattatgctgggtatccaatcactatactatttcatttagaaacatttttcagagtactgtaacagttttatctttaaatgtcaatatttgcatacaccagaaagtacaccctatgtaactatttaaactatggaaaaattttgaacatttcctcctaaaaatgtgcaaaggggtacacagattttccggaaaaaaaatggagtccacaagaaaaacgtttagagcaccagggtcacagagcttagctcttgtctgcaaggggatggccttcagtgaatgccaaatcagcacctttaaggatttcctaag

SEQ ID NO: 55027 - DNA, 1155 bp, Bovine  19866880525229
  misc_feature (1)..(1): n is a, c, g, or t
ngtaaagtcctatgtggtacccacaatctacctaaaacacaggtctggcacataggacaagtgaccaatcaatgggttacaatggataatctttcagttcatatttttaaacaggcacatatgaagtaagttgtaattacaatctacaacactatcattcctcaaatacaccatctctaaagctattttttaaagtatttctaaaaaactacacctaatatatacagcagaaatttctatcatttttaagagtctccatttgaatggctcttttcattcaaaactatgtattgagagcccctactataaaccaagcaattaaggggcaaactaagattcttttttagataaatttcaataacacaaactttaaaaaatgtgttgcaatataatttttggagaggtatgtgatctgagagatctcaagggaaaactgacttatctgcagatcagaaaacctagaaacacttagaacaacccacaaccattaggattactgactctttcagataaaaatgaagataaaacccaggcaattctaaatttcacacaaactactttttattatgttttgtttatcatgcttaccatagatttacatttgcatgactgatacaattcatctttcaaaaccgacttacttccaaacttcacctggttttagatgattgtgtgtattttcttctgaacctggttttaacgctgtgtttcccagatgcacataaagtagatgctgccgtcttgtgtaagaatacacgagcagatgagtctactcatcggggtaatttctctgcttggttgtaactcagagttggttggtccagaattggttgtactctgctctgagccatgattactctaccactctcctgtgactaagaacacagatttaggaagagctatttgtgggagaggtccacagtctccaggctggaacttcttgttaaagtgacgatgtaaggtccctgccaggaccatgcaaatgagttttacctcagccagcactctcctctatcacatggaagtcctactggcatatcattttcagtatcactgccctacaatgaacccaccttttaaatcgcaaaccactttctatcagttaagtattagtatttttcccacgccgaagtatgtaactcacattcatataaa

SEQ ID NO: 55028 - DNA, 2207 bp, Bovine  19866880566862
  misc_feature (1)..(1): n is a, c, g, or t
naaaaactgctttgagcgatatttaaagatatatgaaaaggctggtggtattttaagtgtgaaaaagcaggaatcaaaactgtagcatgattacaactttgaaaaacatacatatgtataatgtgtaagaaaaaaattggtacaaaattgtcaaaatgttaatctgttggctctaggtagtgatggtgaatatttttagaaatttacttctttatactttattctgttttccttcaatttataaaaaaaggttgctttgttttattgaagttatatatacaaatggcttaagttttaaagagtcaacagttctataagatcctgttatggaaaaacaaaagattcctctccacttctctgtagaaaagtccttccactcccccaaggcaagcactttcaattcttagcagtttattttggtaaaagaaatcctctgttgccttcacactgtgaatgatgaggctttagctctctttcagagtatcttccacgtcccatccacccatccccaggagcaacacggtcattttcgtttgattattgacccatcgttatatccttactgctgtgttagcacagctgagccatgtaatgtactataattacttttccttctttgtgctactttttgtttccctggaattactaattattttgcttcttcccttgctaagttttcattgtatgtctgtctcatcctgaacttgcctttccaggcattccagtgtatcaagtcttctgtccgtctcttctgggagacttttgccatgagcctgctgttctgcttcagactgggctagttgcctccagctgctgcacagctgtcatcctgggattttcctacgtcattattgggattccctttggctctatcttatgtattacattcttatttttacttttcttatctgcatagtctagttcctcattttggtagagcatctattttattagtttcctgagaaaaggtgcgttgtaggcaaattttttgttgcctgtgtgtttgaatgtgtttttatttccatcatacttgattgacattttgaaaatagattagaaatcatttttttcttcagaactttaaaggcattactccattgtcttccactttcagtttctgctgtcagaaagtctgatcccaatctggatctggattcattgtcaagaacctggttttcctctctggagtttcacactcatggtctttgggttagggtccagccaactgttgtgagccctttcactccagagattcgtgtccttctgttctgagaaattttcctggtttatttctttgatttcttcacttccagttaatctcttctgttacactagaacttccaggttttagatattggagctttggggtggttctctgaaagtcgctcagtcgtgtctgactctttgtgaccccatggactacccatccatggaattctccaggccaaaatactggagtgggtagccttcccttctccaggggatcttctcaacccagggatccagcagattccttaccagctgagccacaagggaagcctgatatgaggatagataaagtttcttcccctgagaagctcatttgctggcttaataagaaaataacatatattctttcttcaacgttcagtttaaatgctacttctccagttgttcatttagaatttcccccattctcctgtgttcccacactggtctgatcttgactgcagtctttcttagggaaaatgaacagaacttcatggttgactggatgtgggcttcagtccatctttttgtccatgggatctttccattagcaggacttccatggcattgtgttacaaagtgggtgatgggggtgaggagacactggttccctgtgttgaggaggaggaggatgggacctccagaggaggctgtggaaatttctgatcattgctatgggccagagagatagctgactttaagataatatagtctcccagtctgcaactaggggcaaggaaaggaaccagatgaaattttagaatcatttcagcctcaccatttatataggctggaggtggagccacacttagccacagattctttcccatgcaatattttccataaatttaaatcttgttgctatacaaagtacagtggggatgcctcttgcttggtataacagctcagtttctgggtattttctatgtaaattaaccctctcatagtaataggatcat

SEQ ID NO: 55029 - DNA, 1351 bp, Bovine  19866880579892
  misc_feature (1)..(1): n is a, c, g, or t
nactcaggttcctattcttgcttttccactgcccctgtgctgcccctttggaggagggtttagctcaagaggcaagtgctgattctgtgttgagtgctccctcctccagacagatggccccaggcagaggccccaggaaaccagggaaggaaaccctcgagtttgagaaacttgtgctttgagattatccccttttttcagaccagcaggagtttttacagagaaattttacggggattaaacagctacatacttaaaaaaaattaatttatttattttaattggaggctaattactgtgcaatattgtggtggttttcgccataaagaaagtagaagagaaacattcagcaaacctctggagggagaatgtcttttttaaacctggaatcatcgatgaaatcacaaatgaaagattagcaggtttgactacagagaaattacattttctgcatttaacaaaaagactgaaaaggggcatatgggaagaagtactgacaacaaataggggagataaaagattattgtctctttttatttatttatactctgcctccttcctaaaaagtcttgaggaggaaatatttcaaaaagagtacatgcaaaatgatagtttaaaaataagcacagggctggacttctctgatgaaccagttaagaatctgtcatccaatgcaggggacatgagtctgatcccttagttcccgtaatggaactaagattctgtcacggggcgactcagcctatatgttacaactaagatctgatgcagccaagaaaaaataaagaaagggccttatatacaaatacccaaggagcataaagaagcaatttacataaagcaaattatgactatagtaaatgtgtttatagaaaaatgtccaacccagctaatcaccaaaggaacacaaagttacatagaaaaaaatctcaactaacacccggtactcatgcagagataacaattacgctttataattcgtaagggaaatatggtggcagatgctcagaactataaacatatttgttttcttcaacaaagtaatcttactattggagatttatgctaaagattctaaaatatggaaaacagtacatgaaggtatccactgcagcatcaaaaacacactcaaaagagctgaaaattgaaaatgacctaaatgtcttaaagcagagaagtgcttaactaaagcctgacctatccaataaaatataatgcagcttttatcaaagttcacagaggcttatggtaaaaaaaaaatgcctacaacaaaatgttaagtttaaaaagcaggctatagaatcatagcattcacaatatataattcatgggatgagtatttctatgtatg

SEQ ID NO: 55030 - DNA, 1460 bp, Bovine  19866880585485
  misc_feature (1)..(1): n is a, c, g, or t
nttcttaaaaggccagataataaatactttcagctttgcaatgccatatggtctctgttgcaatgatctaactcagccattgtggtgtggaggcagccatagaccagacataaatcagatgaatgttgtgggtccaataaagctttatttacaaaaacaggccactggccagagggccatggttgccaaccctggacctagtgtttcccacggacaaaatcacacatgagcaaaactgaaacttgcattacgctcacattgttccctcatatcccagtctttagggaacagattcgtattttcaaaacaaacattatggcagaagtgactgaactttatagggttgctatgaaggataagtgatctggtgcctgtaaggccctgattgagttgctgatggctggtggtcaatcggtgtcagtgattatcattaactgtggtagaggattgttgctgggatcgtatttgcttacagatgtaatgtccttagaacagtgcttggaatgcagttaaaaaaaagctaccattttcatcaaatctaatacatacttttttattgtggtaaaatacacagggggcttcccttgtggctcagcagtaaagaatccgcctgccaatgcaggagatgcgggttccatacctaggtctggaagatcccctggaaaaggaaatggcaacccactccagtattcttgccggataaatcccatggacagaggagtctggtgggttacagtccatagggctgcaaagagtccaacacaactgagcacattgcctgtactccctcaacagtcaacgtccagtacctgacagccctgccgcactgcagacttctacctaaaaggctttctttcacacaactgtaagttccctgcacctagaaagttaatgctacgaggatacagccctaagcaatgacaatgagaactagaggataaatatcacactaattgctaacctatctaagcattaaaattcagccttacccacagtcacattagattattgtctaatgtcttacttcaggttaattaatgaagagctttttataatagagaacaaatgtctccctgtagatgtaatttcaaatagggccctcagtttaaaaactctacataccacaatattttaagtctccacaacagagttttacttaggaacatgttagtttaatagcaaagattcagcaatttgatattcagtgaggatatgttaaccctggcagaaaagggcatagtaaattacttaactaatcctaaaatgtggagatcaagtctcttctcagtgatagctgataaagaagaaacaatcccaatatccttaaccaattgatggagttggaaatttttacacaactctttaaatgttaagcatatcctaaaacagagcaaaaattaatttagtgactgattgtcatctataggtgtaaaattctagaaacctcatagccattttca

SEQ ID NO: 55031 - DNA, 1820 bp, Bovine  19866880649579
  misc_feature (1)..(1): n is a, c, g, or t
ncagctaaaggaacagtctcccactggcttggctttaagagtctcctttaaaccagatcgtcccctgtgcggtaccatctttgttgctccctgaaaatacacatttctcattaagtcgatttacctcctgcgaacttcctttccttctctgagatgctgcaaagattgtctaggcagtactctccctctctgggaagcaatgaactcagcttccttcacctgatcagcaagttattttggcagcatttctgagctggcaatgacagcattctttatcagaatgtgtcttaaactctcatctgggagatcccagattattaaaaattaattaaaaacaacctctacacttgtatttgccactgattttgtcaaacattactgattggatcatggttgttctttgttcttgttcctacagcctcttactcccatgaaagacagtggtgactagtgggctggggtcttgacttttctggaaaacagctctaagggggtctagcatgtgtttgtgttcgttttcaacgaactatccttctatgttcctcctgccagtgccccaggtccacacaaatatcggtgctcctgtcaaagaacatgttagttgcttagtcgtgtctgaccccatggactgcagcctgccaggcacctctgtccatgggattctccaggcaagaatactggagtgggttgccatgccctcctccaggggaatcttcccgacctagggactgaacccaggtctcctgcatcaaagacagattctttaccatctgagccaccaagaaagcccaaataacagtttgaccccaacaggatctgaacacgcaatcaacaggcagcaatactgcctcagatagttccctggagtccagcaacctgggggcaggcttagcaaaggattggagagagaagagggaggagaggttttccttattttgttaggattcctcttatcagctctgcttttctatggctgccctagggctgactctggggaatgccagactggggcaaatcacagggtgtcctcaggccgcctccatccaaaggacacacacagctctctccaagtgacatccggttctggtgaccagcaagggcagccaaagggtaaccaaaaggagtctgtgtaaactgagtaaactgccaaagccacccccatctcccttcatctatctccttgtctctaggagctcaggtcagaccctagagcagcagccaaggtgaggaattctgcctcccaagcaaggaatggagctgcatttggaacctggagaagaggacatctagggcttccctggtggctcagatggtgaagaaactgcctgcagtacaggagacctgggttcaatccctgggtcgggaagatcccccggagaagggaatggctacctaccccagtattcttgcctggaattccatggacagagcagtctggtgggctacagtccatggggtctcaaagagtcggacaggacggacccactaactaacactgaagaggattacggcgggggcgggggcgcaggaaggctgccttcaacagacgcccccttgtggctgcagagacaaaggcccagcagcctgagctccacttcacaaaaacttcccgcaggttacagttgtccagaagcacgaagtagtgtctcctgacactgaaggtggtcaagctcactcccagggttacgtatcaggcaggggctgcggaagaaggtgtgcaccttctagctcttaggggtctatactcaaaagcttgctctgactctccggtcttctggaatcttcggtctgtgccatgcactgtcacttaaataaccctg

SEQ ID NO: 55032 - DNA, 3259 bp, Bovine  19866880669695
  misc_feature (1)..(1): n is a, c, g, or t
ncatagccctgtaggtctagagatctgagggtgctgaatcaaagggcaaattcccactgcatcaggatggcagcagccctagaccctggaccctcatcttcacagatgaggggagaacaggccaggcagggaaagaggcatacccagggtcagaccatttttcaggagtcctggaaggttccttagtctcttgatgctatcagattttctcacatctcaggatatgggagaaatacaactcaaatgtggaaatcactcttggcaagagcccataatcttggggacagctgcgggtgagggcagttaaaagcccttgataggcttgagagcaagtgagagacctccacttagagtcggctaagactccctctcagttgcagtcaaatcactccaacaggcagtgatgtgccaagtgattataatgctgtgcttgttaataccttaatggtctgtacgttatacttttcaaaggtctttctattgagataatcattgcaaaaatgactttcaaagcataaaaaatatgctttttaatttgtcttttttaaaagtattttttattgagggaaaattgctttgtgatgttgtgttagtttctgctgtacaacaacacaaatcagccataattatacccacatcatcgccctcttgtgcctccctctccccccccatcctactcctctgggtcagcacagagtaccaggctgtgttatgtagcaatttctcaccagctatctatttttacaaatgcttattaaaacacttttacaatgcatggttttagggaattccctggaggtccagcagttaagactgtacttccactgcagggaggatgggttcgatccctgcttggggaattaagatcctgcaagctgtgcatcacagacaaaaaatacatttttttttttttaattaaaaaataaaaggcatggttttattgaaatcctagctcatttcaaacttataataatagtactcttagaaagcaggtaatgtgtgtaacccccacttaggtatgggaaacattaccttcctaggtcacacaagtcagaaaagatctagaacagtctctcagtcctagaggtttctgagagctcctctgaacctcctgtggaggtcagctttgtcagggacacagaagaagtcaaaggcggccctgggggcatttacaatctgtttggcaagacaaagggtaagaaatatggaatgcttgtggtcatcccctgacactaattttggaggcaaaggaattcaagtgggtgaaagtttgtccctttccaaaataaacacatcctctgcctggacccagaagatctaactccaggagaattaagtgacgtcattcccctcgtgacatctagatccatacaggtgacccagaatctcaaggcttgtgtttatctgagcatggaaaatggttcaaatgtgcacaagtggatggtctgggaaagaaagaatcgactttcgtggtcatctcagactccttgctgccggggcactctggtcaccaggattttccaagaccccacgctggccagcagctgccatgaccacaccagtaccacgtgtgcccatgacctgtcaccaaaatgacccaagtgggaaaacagcttgcttggagtttaacagtggcaaaaactgtcatttttaaaggtaattttagtttggaaaggaaaaaaaaaaaaaagaaaaccccagagaggagtaggcatggtgacagtgtcattgcagattagccagcttagatctccctcctttcccctccggaggcctgtctggagctgtgggaggcagatgctagactcaaattctagctctagctagattagggtaaacgtcacctcctgggctgtggggtgtctttggacgttccttgaggctgcttcccagggactgcccaagcccccagacagcccctgtgtctgggctgcctgccctggggtccgtggttccccgccacctgcgggccttggaggataaaggctctgtccacctggctccagagggggcccttcctgggctgctcagacccacagtggagggggagggaagaaccccagctaccccaccaggtgactccaaaagatgttctttgactacacctgtccaagaacaccagagttcaggttttagggaatggtatagccacataacaggaaaggagtaggccaaggaatagctcagctgcctctttgtgcaaaggacacaactcccagtgattggtacaaactgccaaaaagcatggatgcctctctccctacaaacagtggagcactgaatagcctttcacagtgaccagactcagaaacctagaatctatgatgacaaagggcaagaagggagaggatgaaagcccccatcaaattattagggggaagcaggcttcaccatcaaaatgagaacatgagatgagcatcacacactcatccacagagcctgatggaagctatttagaacacagcaagttgtccccttctggtctcccactctggaccccaggaggcatttgttaccctcaggcatggtacagtccaaaaagaaatatattctagagcaagctgggcacatttgcagatgactgatttcctgagatgcagagggcattttcagtctctgaggtcattcttacaaaggataaccatggtaccatccacccaccctttggtgcttatgctagagtcaactggaagataataggtgtgccctgggcatcttccttaggttcaaataacccaagagaagcaggcactgctcttgtggccccaaggcagccctaagtccatcacgtcatgactaagatatcatggtgtcctcaacttctcagcaccagcctgggcctgacccctttctcccatacgtttatacagctccagattcagttctggaaggagccgattcaccagtactgctctgtacaccctaattattcctacctcctcatttaactccagctgttcaccccactggaatgcccaaaacccatctgcttatctaaattctacctaatcttcaagacctagctcttaatgctcctcccttaaacctctaactattcacagtacacaagatctacttacccttattcacactcaattactatcaatcttccagtttgctcagtgttttgtctgagctctttttaacttcataacaagacagcaacatcgtaaagatgggggtgaggacaacctttaacatcaaccatcttgcatgattttaaacaaatcagtttaggaattctctgactcaccaacta

SEQ ID NO: 55033 - DNA, 1126 bp, Bovine  19866880702713
  misc_feature (1)..(1): n is a, c, g, or t
naaatgtgtttttaaaaaagctcaaggccaaggtctgccatgataatgtcttcaacagatcaagtcaagtagaaaggaagggctgagcttctgtttcagcctaaatctgactatagttttctggaaaaattcatcctgacatccatggcttgtgaaattcaaaccagtttagaatctgcagacttaacatatttttacccaggacctgattaaagcaaataccttcctcaaaaacacaagcaaaattagtcacgggaatgaacgtgtgagggagttgtatttggtgtcattgctcatcttttccactcctgtggctgggaaccaacttgcgcctttgttgtcgagagatgaagctgattcccgaagccacacccagcacctgatttgagctgaggagcgatgggctggacgtagagctgctgactccaaggaggcaacggtgccagggagtgtagcgtcttggcgattagagaggggagaactctggacaaagttattaggactctatgaacacttgccttataaactgaagtcatctgtggttttgccccaaggtctcctgagtttattggagcctttactacctctgagagagagaggaaaaaaaaagagcttgcatttcaccttctcgtaaactgtaaatgtcaacagcttgtatatcctgaacagggacccagtgttactcaggactgccacgggggagaagtgctccagagggcacacggtctggcccaagctgctacccaagaatccttcacagcccaacctccgatgggacttttctataaagaaataataggcacttgtgaaagaaagtgaaaatataaaaaggagaaaggaaaattcatccatcattccaccatgcgtgtgtgctaagtcgcttcagttgtgtccgactctttgcgaccctatggacagtatcccaccaagctcctctgtccatgggattctccaggcaagaacagtggagtgggctgccatgccctcctccagggtacttctctataaagaaataataggcgcttgtgaaaacagaaagtaaaaatatgaaagggagaaaggaaaagtcatccatcatttcaccactcaaaccttataagaggcctttcagactttcggaaacatt

SEQ ID NO: 55034 - DNA, 1850 bp, Bovine  19866880754117
  misc_feature (1)..(1): n is a, c, g, or t
ngatggcaaagacttggacacgacttagcaactgaccaccaccaacaccaagatatcaaacttttacactccaaaatattccacctatatgcaaactaccaagctaattacacgttaccttaccaactcataagctgatggcccatggtgcgttatatactgatactttgtattagatttaatttcatatatctgaaataagggattaagacacaatttcctatgtacacttttcagtgattttgattgtcctccaatctagaaattatgacactattgaatgaaattaagtttcataagatggtaacttgagtacaaatgaatctctatttcccagcaatcactgagatggccaagagaatataaaagaaacctttattaatactataaccttgggaatggtatcagtgacatcacacatgccaaacctccagggatttctataacatataagtaggtgaagaactattacagggaagggccaacctaccagacttactgaatgtaaaacaactcatttgttagggaaacacaacatctaatagaaaccacaaagaatggacttaaaaagtaggcagttaagtgcaaggcatacaatctagctccctcagtggcctttggaaagtgagacacgtatcagagattcactacctaggaatttattttaaagagaaaactggacaaactaagaaaaatttaaggagaaaactggacaaaactgccaggatgtatgttttatgataattatggtaattaataatagtgaaaactgtaaataatctaaatatccattcataagaaattcatatatgattttacacaaataatacagtattacacccatgcaacttgttgctgacatggaacgagttccacaatatactgctgaaggggaaagaaacagattaaaaatagtatgtgtactatgaataggtatagagagagagagctgcaaagattgtcaccaaaacacaaatgggagctgcctctgggtggctggatatttgataatttttacttactttttataattattagtactgctgaagttttctaaataaatgtatactgtctttgtaatcaagagaaaaattctcattctggaaaaagaaagtatatttattttttaatactaagcttgatttaggagaaattatcttgataattggaaacatccattaagatacagattaaaagatctttatcataacgtttataacagtataatagtaaaaattattattagcaataacttaaatgatcaatagcgaatttgttaaattttagaataactatctaatgatttactacaaagccattaaaaattacgacaaagatgtattcatcactagctcagtgaccttggaaatatcatatgtcctctaggtatcagttttctcatctgtaaaatgcagataaaagaatacttacggtgcttcacctagcttaatagccataccctattgtgatagaaaatgaaaaatctgatatttataagtttcctctaatttcacaaacacttatttcaaaatcaactttgctctatgttaaacagtgctggaagacagaaacaggctaatctggatacctgtagcactgaggccccaataagtcccccagattacagtgacagagggaaccgacatccctacttaactgaacaatgaaacaatttatatatacactcgttggcgtcatcagttttaccctcactgtacaaacatttactttgctgctttaaggaattgaaaccaacctgccatggtcttccccaatccagtggaataggaaaggctccaagccatattcctacaaaactagaaattgtaggatcgaagactgttctccca

SEQ ID NO: 55035 - DNA, 2451 bp, Bovine  19866880763758
  misc_feature (1)..(1): n is a, c, g, or t
ntggagcaagacagccaccaattgctctggacatttattctgcctaattagtacctaaaggagagtttatctttcccaggagttccagcaaaagtcctaagtctgagactcactggtcaggcttgggtcatgtgtccacaccagaacctatcatttggccaaaagatggaatgttctgattggccaggtctgggtctggggcccaccctcaattggaagccagcccactggaaatttacaaagactgatgaacagggagttccacaaaagaaaatcaatggggaatgaacactgggtacacgtagcaaatgtcactgaaatcatgctataaactgacctgtctggggtctatcctactaacttatcatacacgtttagatatgcctgaatcctagtagtagacatacctaggctgaagccaagacccctgctatgtgtgataaattaatttatgagattctagaagtttatatccaagatattactgttcctaaggagggtttgtaattgaacatgaacaaatccttagtccaagaatttttgccctgatagttgaattacaggcttccatagcaggacagtggagaaaatattttttaattcaagaggccttttggagggacttcccttttggtctggtgcctccgactccatgctcccaatgtagggggcctgggttcaattcctggtaagggaattagagcccacatgctgcaattaagagttctcatgccacaactaaagatcctgcatgttgcaactgagacctagtgcggccaaataaatatttaaaaaaaaattttttttaaaagaggtcttctagagactgatgcgaagtaagtagttacacatcctatagttacacatataggatctgaatgtctttgacatcagttcatagtattttcatttcatagtattttatccatgccacggttgagtggaatcaggtgggggaggtggtagagggcccaggagttatagacaaggcacctggatggaggggagagacctggctgtagcagcacaatatagctcttctctgagattcccccccctccctccttttctcccctcctccttccttattcctttgttgccatggcaactgatgatatgccctcatcctcttcccctctctggctggatccagtccccaggctccatctctctgtctcaccaacctcacagggctgttgccagcctctctccacatccctaagcgagggcacccagctttgccctctgcctgcaacgcactctcttgcctcatttctccaccccaggcccaagccttgccccttctttaatcctgtccaggcttgagtcaaattcccattttccttcaagttgtatgaaaattagatttttcccattctaacttgatttgaaatgcataaagagatctgtctcttgaaacacctcaaggtgaggcaatttgtgaagggaagaaacatcttttagtgctgcttctctgcttaatgcagggctagagtgaatcacattctatttttgtaactaggtgtattttctgtttaaagaattcccccagcacatctctgagtgaaacagaagactatatcataagggaaatcacatctcaagttcaaaggttgtgagttggtgggcctgcagacttttgttaggtccagagagtgcctaaaaagatggagtcaacagttaaaaatcagcaggtgtcacttaaaaagactggattcctggctgcccttaaactagacacagggtgaaaatgggcaggagggtgggagtggggtgggggctgcctcttttgcactgattcttcctttcttgttagctccacctggccagctcccctctttcacctgccccacccgagccagtgagtgaggactgacatgcgtgtcccctctcagagatatttccctccacaacctttagtgggaggaagggagagaatgggcagaataaaagggcagatttttcagttgagtacctttgaagcctctacccctaggtgtgcacaatatagagagatacagcggacctcacaatagcatttgaaatacagtaacatcactcctcacatttattatcaaagcagctctgaatctcattgacatccaaacagacgagatagatttctcagcattctttaaagccactttcagctctgtgttatacttggtccctgctcaggaagctcaggcaactcctgaacctgtctgagtctcattcttattggcagagtgaggatggttatagtactgtctcacagggtggctatgggatgagatgagttgacatggacgggaaagaatatacagtagctacagggcaagtgcgtgagcccttccctcctctccaagacatcttcacagaaggtttgagctcagagtcttctctcaagccgtctactgcatccttttgttcatcgacttgttcattcatttgctcctcaagcattgaccg

SEQ ID NO: 55036 - DNA, 867 bp, Bovine  19866880779379
  misc_feature (1)..(1): n is a, c, g, or t
ncctgggtcgggaagatctgctggagaagggaaaggctacccactccagtattctggcctggagaattccagggactgtatagtccatgcggtcgcaaagagttggacacaactgagcaactttcactttcactttacttcatcacacttaaagacaagggtgggaaaaccatattctcaagagttttaggattcccattcctgtcttagatgaaggggaattgtgcattatgtatctatattttatatttaaaatacgtatatattggggggattttgttgatttttaatgcgatagcattttcccctttggctggctaaagtacctatgaataaatatattaatacggtatattatcatatttaataaaactaatagaatttttttcattcataatcatcactttgactccacatgcaaaaaacttttgtggtaggtaatagagatcaaaagtgctgtcggccacatgaaaaagtggtacactgaagccttgtgggtttgatttgagacaaatgctgacaccacactcagagaccattttaaactgtgtgggcagggctggcaagtactggccaaggatggctactaacctggagtcagagtggaccacaagttggaaaacctaaggatgcatgttgtcactttttgaaactaaaggctggtgagccctgttaatccagaatatgatacacatgaattgcagagtaacttttccctgtatgccagtaatcgctgagcttcattcctggcaccctctctgcgtgggttgcaggagatagaagttggcatttgcctaggagaaggacatggccatgagaagagtgtatatacatggagtgcaggaggtttctgagttctatttataa

SEQ ID NO: 55037 - DNA, 3440 bp, Bovine  19866880840054
  misc_feature (1)..(1): n is a, c, g, or t
nggaaaggatgctcttacacctgactttcccgaggacagggctgagcacccagtaagtgacacttgctgacagatggcctgacttcgtgcccagcatagggcagacatgtggcaggagtgtgatagctgcattgtgggcgagtgaattgtctgtgtgcccagcactgagtcagagattagtgatcccctcaggaggcctgatgctcccacgagagaggaaaaggggaaaggcagggtcatcttcagccaggtgatgtgcctggggccccagccccttgggtaaagtgctccctccggccccgcagcttcaaccctcagctccaagctgacagcaagctggccaggttccgtccgaagtccccaggaggataggcaggtgctgcgggagcaaatggttccacagaggaaagaggccccgttgtttccaggtccccgcggggctggcctgctggcttcctggtcccccagccattgtgactttagtcccaagatgctctgtttccattcgtgggctctgtgtgcccctctccctccctcctggagtccagctggccagctgttgcagccaatttcaccacctcctggaagcaagtgtactgggcacggatggaaaccagtttggctgtgctggaactgttaaaaacaggaaactttaagcagaacaatttcctctgggcctagctaacccaaatcaggttgtcttgggatgactccagattttgaagtcagtgttgccactgagatcaaagaaattgaagagaagaaaaatcttctcactaggccaggaatcacaggactggcctctgctgtctggagaaggcgctcacctgtctggtgtgatttttaacagtgctgaaaatctctccttatgtcccccaaataggtcaccacttgccaaaacatgttgattttcccagcattgctaagccacttcagtcgtgtccgactctctgcgatcccatagatggcagcccaccaggctcccccatccctgggtttctccaggcaagaacactggagtgggttgccatttacttctccaatgccatttacttctccaaagtgaaaagtgaaagtgaagtcgctcagtcgtgtctgactcttagcgaccccatggaccaggcttctccatccatgagattttccaggcaagagtactagagtggggtgccattgccttctctgtttcccagcattagggtgtcttataggactttaagttaaggcagtgatggtctccacctgtggtcaccagcattcacatcatatgagaatttgttagaaaagcagattctcagcccccaacctgcatgcgtgcatgctcgctcagtcgtgtctgactctgtgaccccattgactgtagcccacaggactcctctgtccatgggatatcccaggcaagaatactaaaatgggttgccatttcctccttcaggggatcttcccaactcagggactgaacctgtgtctcctgcattggcagggggattctttaccactgagccacctgggaagccctgcccccaacctgagacctactggatcaggaacgctgggcacagggcccatccagggctggctctatgactctgtgactctgcggtcccatggggacttccaccattagaagggccctgggcatggtttgatgtttcagtgagagatcccacattttcactttgctctggtctcagaaatccttgttttagcaagtcctccagtggtcctggtgcttgctccattttgacagcactaggtaaagtcgtggtctcttctgaagcccctgtttaaatttaagtgttaaccaggagtgtgaacattggccacggcaccacccacacctagaactttgcttcattatcatcagttcggctaaccagttggttggcagggaccctaagcggggatcaggtatgggcatgtgtatggtaaaaaggccattcccagtctcccatcccataggctagctgcctgaatcagggtatgaagaggaaagaatttccctcattttgttctaccattttagcaaaacagagggaagtcactaggataacactctgtatggcccagctcttggctctgaagggtggcctgtccctggacagcatcagtgaccccggcacattcactgatgctgtgtcctgaaggtggctggtccccagggatgccactgaagccccttggtaggaacatctcctaatttggatttgttcttctggaggaataacagtgtatggcccagagcttaaatttagtggctgaagggaaaagagaaccaaataaatccagtgcccttgcaggaaggcccttgaacttgattgcacagcatccacatgtctcttgccaagtggcccataaattcagttgcattttatattccctccaatagtctgtttgaatgacttcttttttagttaagtgaatattaactttcgtgacaaattattctatgatcctcttgttctgtaaattaaggtaagcatacttggcttgatgtttgtagtttttataagtaaatgtatgtttggagttaaataatgagctaggagaaccagggctgaactaaagtctgtggtctgagcaataacaaccaagggtctggggcctgagagctttattcgctggggccagagttgaggctatattttgcagacagcagaggtctacttgataggccagggccccccagagtggttggggagtggatgccttcctcggttgcccctagcaaccacctccacagcctgccactaacacagcagcctcctcctgtggcttcacacctctgatcctcactgtctccaaatcaccttgcgtgccattgccggacaaatctccccaaagcaatggtctgagatgccgctcctccaggccactggactcatgaacccagtcgatgagcctggggcacagaccctccttcttctgccgggtggacctgttctcatccccagagagttccttccaggctctgcctcctccgtgctttccagtgtctgcccaagccagtaggcccagaaagccctactttcatttaacagagtgagatacttgatcttcctgagtctcttcaaatgcctttctttcaacagttgtctctgaccacttcaaagtgaccccctcttcctgtgaacccttcagcactgactgtctatattcctcttaggcacccacctctgtcaccctgaattttttacttagatttgtggcttagtgtaccacccagcccccattcaggttctgagcaatttgaagacactgacagtgttgtagaaggagccagagagggagagaattcatgctagttggcatgttttaggcattctccatacttacctaacccttacaagaggtgggcattataatctctgtttggctgacgaggaaactgatattcaacgaggttttcacttactctttgttacgtcagttagagccat

SEQ ID NO: 55038 - DNA, 948 bp, Bovine  19866880848393
  misc_feature (1)..(1): n is a, c, g, or t
ntgcggggctgacttaccggctgtgcatgatacgcacgccgtcagggttcaccgtgagcgcctccttgtacagctgcttggcctcctccaaactgcccttcatctcggccagccggccccgcatgtagagcaccgaatgcgaggtgggaaagaggcccgctgcctcctggatgcagaagtctgcttccttgaggtgctgctgctccatgaacagctcggctgtgaaaccagaagggcaggtgaggcggcgggagaagtcagaggcggtggccccctcccacatctgaccgtccgcccccggagttcaggagccgggcttgggtgatggcaccagccccctggaacagcacaggatgggctcactctggggcacggccgtagcaccaggcagtggtttctgagtgctcaccctgcggcaggttcatgccatgtgctgcacggagaccaactctgccgacacgcccaaaaccctacagaaccatcacttctgttacccacttcggggaggaggaaacaggcgcagagaggccgaggaactctcctaaggccacagggagagagagcaatggagccagggttcacactgggctgtctgacatcagagcctggcagtgggggcatgagttggggtcccctgcagctaagtctttgctcgggtcctgttcatcacttgttcatctgctccccatgtgtctggggacagggtggggggcagatgaggtggctccccagggatgccaatggactgaagagctaactctgcctgcatcatcaggacgaggagagctacatgctgctgccaaagatgggactggaaggaagtcccgagggtgcctgcgaaggggcaaggctgggactcagagaagctagaaagccaccagtacatactgagagttgactgtggaccctgggccaggcaagcatcttctcataggtctgggagggagg

SEQ ID NO: 55039 - DNA, 1227 bp, Bovine  19866880886354
  misc_feature (1)..(1): n is a, c, g, or t
ntgtttttgtatttttaaaagtatgtgtgtattttattgttatttttaaaaagctgatgccttgattgcagtcttgtgaaaggccctgagcaggagaaaccagctaagctgtacctgtatttctgacagaaagaaactgtaaggtaataaattttgttgtaagctctgttttggaatatttgttacacaggaacatggaactaacacagtagactaaacccagtcccttctggaagtagagcacatgcggtgaaacacttgcctctgggaggctgcagctgggtggatgcagcacatgcgttgggtggatgcagcacatgcattgagtggattcagcacatgcattgggtggatgcagcacatgcgttgagtggatgcagcacacgcattcggtggatgcagcaaagtcaggatggtttggtttttttagcaaatgtcctcacctgcgccactttattttgtttcaactcttttctagccagatgaccttatctctgaagactttattcaaaatgggctttctttacgaattcattttgttttcttttctagcagtgagtttttttcaaccctatcttttatctgaaaattgcagtttgaaagtgatttagttaagaatcatcccagattccagtttattactctatacaattattttctgtccttgactgctttgctccattgtctgccttcttctacctttctttagagcttttcttaattctttcagcgcttggatggagcataagaatctacttgagtaagccctcctattattctcccatttcaacattttttcttttctttttctccctggaactacattttttatattatagtcattgctctgaaagcttgtgcatgacttccttttatttctcatttaattaagaaagaaggaataaatcctcctgtaagagatagaccatcagatcagatcagatcagatcagtcgctcagtcgtgtctgtctctttgccaccccatgaatcgcagcacgccaggcctccctgtccatcaccaactcccggagttcactcagactcatgtccatgagtcagtgatgccatccagccatctcatcctctgtcatccccttctcctcctgcccccaaatccctcccagcatcagggtcttttccaatgagtcaatgcttcgcatgaggtggccaaagtcctggagtttcagctttagcatcattccttccaaagaaatcccaggtctgat

SEQ ID NO: 55040 - DNA, 1610 bp, Bovine  19866880889284
  misc_feature (1)..(1): n is a, c, g, or t
nagttagacaggctaggtttggggctgcaggatgacttttggggcacttttcctgtttgtgagtcccctcctccattaaaaatagtaaaaattatattttacgattgtatagaaagtatagaggtataaagaagaatatatgaaggttgtatattaaaacatttccttcaacctaaatttttcttcttactctgattttaaaagaatgttttaaacattttcacaggctcctaaatatcccaagcccattgtgcttgcacctgcatttggtctgggcctgcctctttgctcttgtctttctgatctgtaaaatggggttgttggattaaacgatgatgacattcaagaacgtgacgcatggtgatcatcgatgttggtttcttttcttcattttcatggatttgattttctattttactgatcatgctgcatgtggttttcattttgagtcaccttcaaattctcttgggaagtaggtggagtataatttataaataaaaattccttttcactgcctcagcacttagcacaatgcctggctttatagtcttgatccttatttgttgactgtgctggtaaacagctcgctcccttcccagcctccacccaccatcccgtcccaccccaggcctgacagacactaaaatcatccttccttccttccccctcgaaattcttctttccttagtagtctgtactcggtgggctgttgaagagtggggaagccacccactaaacggctgacctttgaactaggtcatcttcccatggccccttagtgtagaggggcctcacaaccctcgctccagcactgaggaagctctggctcagaggacgtgaggaatctgctcaaaaagtaacgggacaggatgtgaacccaagcctatctgaccgtgacttggtgtgatgtgttacgccttcatgatttgcagttttcagacaactacttggaaaagtaactagaatgtcttaccagtgctgagggagaggttttagacgatttgacgctgctcaagtcacacctgtagggaagcacctaagttgctttaggtgtgcactaacttttgtcattgtcacctgggccattcatcacgttgacagtttgcactgaaacccccttcctaaatattagagaggggtgaggccagaagtaagaggggatggtcatgagtcaccaagaccgagatgagggttttaaatggtgtgtagagggtacagactgaacaccgtttcatgctagccagacttcagagtgcttactatctgctgggcatggggacattaagatggtatcagagcatcagcgagtgagtgtgtgaggccctgagagcaaacagcacctggcataaacatccgctctcacagaacccagcacgtggcacgctgggcacctcctgccctgcgtgctggggagatgggcatgaataaaacatcctcccactgattccagagaagacaaagcaaagattgccctgtgatgggataaaatctgcaagtaaaaaccaagaagcatgttcaagtttatttatgtcctattacacaagctcctccattctccacccccaccctaccccctcaatctgtcacagtcagggatctggggctccaag

SEQ ID NO: 55041 - DNA, 1033 bp, Bovine  19866880935242
  misc_feature (1)..(1): n is a, c, g, or t
nctgaaggtattttcaagtcataatgacccggtcctgggccttcacgctgtagaaaaaaaaaagtttttgtttcataaataatgatagctgatatattttgatgttctacttgtcttttacgaataaacatatgaatcagtgtgatatggtagaaaaatccccggactgggacatggaagatcgtgttaaggtgtgccctggcaccaggcactgtgaaatgggaataatacctgcttttcctgctttacctgccttgtggatgactgtgaagactgcaggggaaaagacatgtggaagtctcccctctccctgcctggataccctcgcctctcccaggccccgtgcccacaccagcaggtctcactccattcttatccctctgctgatggtaacttactgctctgggctgttagttttataaaacacacttattccttaacacaaatgcagcatatgttctcttagtcccccaaaaaagtattcatagcaattcactgccctacatagaatgccatgcgattaacataagtagatgaacacaattttaaaaagacaaacagctcaatagaaaagttagcaaaaggcaacttacagagaggaaatgcagtgaggaaactgcgagtgaggtgggcggagctctaatgtcattaataacaaactcactggaaaagaccctgatactgggaaagactgagggcaggaggagaaggggacgacagaggatgagatggttgatggcatcattgactcgatggacatgggtttgggtggactccgggagttggtgatggacaaggaggcctggcgtgctgcagttcatggggttgcagagtcggacacgactgagcaactgaactgaactgaagttctaattaaaagaacaatgagatatacttttgttggggtcaggaaagaaagaaagagataaaggaaggaaaaaaggaagaagggacggggaagccaaaaccttttacgggggtaggggtatgggggtgggtggagcccagggcacgcacagcttggcttgcagga

SEQ ID NO: 55042 - DNA, 974 bp, Bovine  19866880937951
  misc_feature (1)..(1): n is a, c, g, or t
nctaattttgtgtttgacaaattgagctgtgaaaagaagaaagccataccatctgcagtgaaagctagagctggacccgggtgtccccttgggctcctgttacaaggtagttaagcatgagcacaaagggggcgactcaaacttcagggctaaccactctcattactaatgagtaattacagcaaatatttacaggcctccttcctacctttacgacttcctgttgctgaagcactttggagtattgagaaagatcctggaaagtacgtcatacccagttgcaggaaagaatgtctttaactttaagtgcacgcactctgtttatgaattccatgtggaaacaacagaaaattgtgcttgggagggtctgttcaagggcccattcttcagaacttgaaaacaaaatttgaaaaatcaattctggacggtcaaatgtatggagagtggaacacgtgatgtttctgcagaatgttctagaaagaataggagtgtgcaagcaaagcacaagtcgcttgataactactttttaaagaacatgtgacctctgcactgtttttctgaatgaagataatcaagcttaattaagtacatcacagtatgtaaagtatgccatgtggggaattcaggaagctagaagaatatcattcactccatcaggatttcagaataaaccacaataaggcctccttcctctgtacttggtttaagaagcactccagtgaaattgctctcttcggtgtctgtaaactacatacccttgtgtttctctcctgtgtttccaagagttctcagatgctattttagaatggcagccttcactccagcactggctgaggttgatgaagctaattttggtgcccagggtagagagagagaagtcctctctggagctgaaagggctttctggtgcctgggttcaagagctgcatggtgttactggacacaccacgtttcacctttagaacctttatttg

SEQ ID NO: 55043 - DNA, 804 bp, Bovine  19866880948301
  misc_feature (1)..(1): n is a, c, g, or t
ntgttctgacttcacttggatattcaaagaaaattgtttatttcaacccagcaaggctccaaattgtgcgactcagctactttaggctgtgagctgtacctcatcaagtcctcctctctcaccaaggccttattttctttaacctctgctttcaaatccgttctaatctggatttgccactctcttgaaggactttgctgaaagctactttaaaaaggaagaaaaaaaggcaacgctctcaagtgttctgtattgttcctgagatttctccaataatacaactttggttagcgtgtgggttttttccaagtgacagctgtctagcaagtgacagcagttcaactctttactacttaacatgttggtcaccaactttccaatatggaatagagaggcttcaccactggctaccttattacttcagttagccaatcccacattttattattggtttttgtgttctacttctagtaacaagttatttgcctgttaggaatgggttcagctacaagttctagaacactcctctataaatggcttaaacaaatgtctcatggactaaaatggggcaagggaggtcaataaggaacttctcacagtagtttaagtagcggatgatggtttcctgggtgttagttatacctcagtaaagctgggggcaagggggaatgtagctcctagaatctggcttgaataactaaatggatggcagtgacatttgctaaactgggaaaaacagagaggtacatgtttgggggtgaaaatatttcagtgggccaagttaagtttgggatcctagttaga

SEQ ID NO: 55044 - DNA, 1636 bp, Bovine  19866880963881
  misc_feature (1)..(1): n is a, c, g, or t
ntgatgccatccagccatctcatcctctgtctccccttatcctcctgccctaaatccctcccagcatcagggtcttttccaatgagtcaatgcttctcatgaggtggccaaagtcctggagtttcagctttagcatcattccttccaaagaaatcccaggtctgatctccttcggaatggactggttggatctccttgcagtccaagggaccgtatgaccacatttagttgggagaacaatatttgcattaatttttgcagaattttcagaatgcttagttctttgagcaacataaggaatcccagatttaggaggcctgatattagaggaatgctcttccctcccctcccccaacttctcagaaaatggcaactcctcagctatataggagaattcagaaagataagtggaaaggaaagatttttgaataccattttccttgtttactgagttggtgtgagatacaaggggacttaaggatttattttgaaagaataaaaattatagactctctaagttacaaataataacaataataacaaaacaaaacaaaaaatacatgatttttccttccaaagtatttgagacgcactctatatgaggaaaatggccttagaagaacatagcaatatatatcttctaccataaaaaacagacatgagattgtgtgaaataagagatcaaaaaagctggcaacctatccggcaaggttttgacttgctctaagtgtttcacccctttctacggtcctgacgttataaacatattcttcgacaatcaaaccgcagcagtaacaacaacaaagacaaatgcacaaaagatttgttaaactttattttgtttgtttgttttattagcacatggcctcagagaagctaactaaagattccaccgtccaactctgtggtgttgctcctcagggcaaggctgacattagatacaggtatttgaaaatgaaagagactcctttccaacccagaagaaattattcaggaatctgggagacagcatatgatgttgtgccaggtgccaccagtctttctcaataaaacatccctagtgaaaaaacgtggaggccagaaagggctggtgagggaaaacatgacgaggagggctggcagcagcatgcccgcaaggaattcaatgtcagggagagcatacagggagacaccgtaaatgtgcttttctcaccaagctccttttcgttttagagttgggaaaactgaggtgcgggcataatcaccaaaggcatacagctagctgctgacagagctggctgtctctactctatcacactgcttcttcacttccctcatttctgttctgaactgcccttgttaattggcactaaagtctctgcacctagagtttcagacatgtttggaaacttcctttaaatgtgttgatcgactgagcactgaattatttgtgaaagcaagaactccctccaggatgaggtattcagagatcagtcatgatatgttccattcttccaggctctctacattttcacacaggaggcatcagtttcttgagagtgcacagccccccaaaagccgttgcaaaggtatctgtggagaaaacaaggcaaaatcccatgggtccagctaccctccacaatcatccttaggatga

SEQ ID NO: 55045 - DNA, 1317 bp, Bovine  19866880968798
  misc_feature (1)..(1): n is a, c, g, or t
naaatggacggaatagacaaatttcaactcctaaaaatgaactgcttgaatgaccaagacaccgcagtccaagtctgcccccatcggatgatatcctttggctctaggataatatttagaatatagagaaacagatgaatggcttatccttcaagtcatcctccttgaacattatttctttaaaacaagcttctgataagaatagagctgcagagtttggagttatcaaggcaaaagtctgaggtttaagataatccattgttcccattaagggaagactgaatatgctttggccacaaaccaagtggaaggtggggccaatgtcctcttttgccaagttaaggagcctaatcaggactggagccagcatgaaaatccactgaacctccatctagaagggggccaagaaaagcagcaaagtttcccacaggaattagttctacatcttctccaacctgtggcaaagtcccaagagctgtacatcatagaaatcagccactggcaagttagcctagaaaatgttcaaagcagccattacctactggccattaagtccacaaaacatttaataaaatgcccagggtgcttagaatcttaatacaagttcacagctttaaaaaaaaaaacaaacaaaaaacactgcattgagccaaaaaaatgagttacatgctgttatctttacaagtcacaaaatgagagggctagcgtaagaaagagggagaagagcacaccaatgttaaaagagaaagaaagaaaaggtttggatatcactgtgcattattgtctttgaaaatagatacttgtccccacaaagtcttctgatgacgtgaaaagaaagttctaaggaatttctatttgtttgacccgctcccactgtccacagctcactcagctcacccagtaaaccctgagggtctgtttcactttttccttcccacacaagcatcacactgacagtgtggcctttccaaaccaccactggaaacttcaactgaattgatcatatatcaggccaatcttgatgccagaaacctgtgacattgtccctgccaggaatgacaaccctcatctgccaagctggactcattgcctgggcaagtgaagggacaaaattttcacttcactccatctggagcaacaaattcaggacacaattgaaactagccttaagcgttaagcatcttaagagggaaggattagtttatacacttatctgattctcattgatacctagtattgtgtacacagtgggagctcaataattgctctcattcgatgaatacttaatttattccaggtgctgtgcttgaagcttta

SEQ ID NO: 55046 - DNA, 730 bp, Bovine  19866881014934
  misc_feature (1)..(1): n is a, c, g, or t
ncatatgcctcaggacctgctctgatgagaaaaccacttctggtattgttgccgccaacaaattctagacagtcagtgtatacagtggtcacttctgcaccaggaactcaattacaccacaaccagcaccaccacccaccctatgtgccacttcctgtattcagcactgagttgtgggccaagcaccaaagctgcaagagtgcgctctgtatttaactgtagtcactccagctcttgagtctgacaaggaaagcaggagtctgtaacagcttccacaagagtgatctttttcttcccaccaaaacttacaaagtggaagattccccaaattcaaaatgcgcatataacactcagtgaccacaggatccactatggaaaaaaaatcatcaacaatcttggatggttttctggcactgttagaactgaagcctggaataaaatcattaatttcatttctggaagatggatctatgatctggcctcctttgaaccttacaggaggtggccactcccagatcatagaagtattctgtaccagcagcctctaagaagtgtccttttctatgatttagcaatagtggcaatgccatctgttataatgactggtctcctgacctaggatgcagcaaaagatggttagaaatgaagatgggaaaacattattaagggtgcttgagctaaaattctcagaggctgggatttactttctgagtttctagtatgtaacaag

SEQ ID NO: 55047 - DNA, 1454 bp, Bovine  19866881016889
  misc_feature (1)..(1): n is a, c, g, or t
ncttcttggctgtgaggaaagaagagctaaggaaatgaaaatgtctgataatccacgtgaggcaagtagaggttatagagatagccaacagtgttttctctttgggaaagtttaacagacatcttattattccttcttggagacaaaagtagagaggagcgcaggccagtgaacaggcaaggtctcagggaaaacagctcatcttagcaggaggcctccttggccctattacctttcggccatcagtttctcttgatcatcttcctgttctgctccaggcctcccctttcctcaccctgggacagcctacatgctctgctcctgcctggaaaggacccagagtggagaggctgagtcctaggaaagtcagcacattctggaaaccacgtctccccctctgctgttgtctagcacccagatgacaatccccaaaccagtgtcagtagccaactgtaggtctccgcttttggacacggcctaatcatccaggaatgatttctggaagtgcccttattaaggaaaagaaatgtaatatgtaacttgactgaaaaaaatccaggaaactccaacactctatcgagttcttacgacattttctttcccccataatccttggccaagttcaaaggtgagcactttcccagaggctcattaggaataatgtttatttcatacatttggaggttgcaaagtttgattccatcttgcttatttggggaaaaaataactttttttatgaaaggaaaggaggggggaatggggaatgagacaagggtacaactggggagagaagaaaggtgcccggggtgcagcctggaaggcagacctgacttctgaaccgttctcatctctggttttctctgaagggttataacagcaagtcaccgccccttccacccttctagacctcctgaccccatctgtcctctctaccttggtgggtgcctatgttgaggtgtgttttgatggcaaataggatacatccttgtgccttcacagagggtgctatataaacgaaatgtacagatgtgtcgtgaggatttgtggtctgctcatctgaagccaggatgccccgaactggcctatcaagccaggccgtccctgaccacttgggtgatgagcagggattctcagtgaccagttgttggctgggggggtgttcatgtttgtgtctcctctgtcctttctatctggcttcctttccgcgcatctaactggctttgccacctcccatgtttgcttagcgaggagcagtgggggaggggtcactgtgggggaatggacgtacctggtatctccacccaccgtatctgctgacctgacctggcctctactcatcctcccaggtccgctcaagcccccagctgaagccttccagcaggaggtgcccctagtttcctggacggggtaaccttgctgtctttatcagtcttcggcaccatcaatatgccaag

SEQ ID NO: 55048 - DNA, 3009 bp, Bovine  19866881068891
  misc_feature (1)..(1): n is a, c, g, or t
nctgtgccccctgtctgtccccccacgtctgccctcggtaacgggggggcgagtgggcagctcagtgccctgcacaggcttacttctcatgtggctcattttgttactgcttcttaaaatggccatgaaattttatcttcacattttccaccatcctcaaacagttactggaggtctttttacatactaggaatctgtgtgtccttaatattaattatatctgcagtaggacaaaacaaacaaaaaaaaccctcagtcttgtttgtgtaggcaccatcctcagaactttccgtgcacgagctcttttaatcctcataagcatccataagataagccctgttattatccccatttccctgatgggagagctgaagcatagaaaggcgagatgccaaaggtcaaataggtagtatggcctatggccgaggctcagattcaaatggggcaaaatgccttcggagcctttactcttaaccagtgatccacaccaccttaccttacctaagatgtctataaataccattccggacctgtggcaagtactctataaatgataactgcttttgctgtatttataactattataattacttttctctttcgtgactcatcacttgttttgaccctgacatgcagacaacgattgaagatctgaagggcaggcttggaagccctggaagctctttatttttcattggttttcctccgtgctgtgtggggttttctccagttgcaaggaccgggagctgctctctacttgcagtgcacaggcttctcattgcttctcttgttgtggagcacaggctctagggaaagcgggtttcactagttgcagcaggcaggctcagtagttttggcttctgggttctagaacacaggctcaatagttgtggcacacaggcccaggctgctccagggcatgtgggatcttcctggaccagagattgaaccgtgtcccctgcattggcaggcagattcttaaccactagaccaccagggaagccctccatgtcccactcttaacaggtggcagtaattcagtaattactgtaaccttcggactcgattgtgcagaagaacctgttagaagctcttcctccataacttttgaagagccatctccaaatcaagatgcacaaaacagcttctggctctactgatcttttgaaattgtaatcacaggaaggagagaatggaggggagaataaagaatagctatgatcattgcaatactagtacggtacatctttatagggccctttctctgatgagtcctaagctttcacagtcatcacaccattggcctctgcactgtgaactttgaagggcttcttgagttttcccagggctctaaaacacaattgcatgaacatatatcactaaggagagaggcaagccatgttggcggttgcacatcattgtgtgtatggtggccatgcaaggcgtgccattcacagcatctatgattttcaggtagaaatgaaatgaaatgttagtcactcagtcatgtccaactcttgtgactccatggactgtagcccactaggctcctctgtccatggaattctccagacaagaatactggaatgcggtgccaagtgccatgcccttctctaggggattttccccacccagggatcaaactcaggtctcccgcattgcaggcaagttctttaccatctgagccaacagggaagctctttcaggtagagattgggtgcaatctgtcaccaatagtccggtctcaagaagagtgacagggccctatgagccctctggactcaagacaggtgtggaatggactagaatgttacctacttctaagtggtcttttttaatttccccgaattttttaagactaccagttagcaaaaaaaaaaaaaaaaaaaaagactaccagttagcttgaccaccttagactgtttccagagatcacttgtacatcagaaaaacttatctgtcatgaccatcagaacctttgcatgttcctaggaggcacattccgtgtccctccccgccacttggaaaaattcttcggttttaaagttacaagtaacttctatgtgagataatgactctgggaagcagttccttttctcatgtggaaagctatttcagaaaagaagatacgtcagtaaggaaaacaactctattaaatatgtatatattgattttgccatgcccctgtctggtttactttcccaattctacaaaaccaaggaagtggattgttagaaatctctccttatatttctccagtgactttctgcatcccatctccatggtaccatccaattaaaaaaaaaaaaaaaatcaaacctgagaggttagtgctaggaatcataacagattaatgattttatcagaggagactatgcactaaaatacatgagtgaggaaatgagtccattttctgcagtcacagtagtaatgttggaggttaactaaccctgcttgtggtgctggttgctctcaattgctggggatgcagccaatatgagagtcttttagaagttcatcgattctgtaacagctttagttgactcttctggtctcactttcagtctgagtctccttgcttatgacctatcactgtgtggaatcagtggttccctataaataaggggacacatggcctcaatctattccaaagcattttatacatactttaaaaatacatcaaagtgtatgtttggttttggtggggggggggggttatgtaataatcattgaaatcactatgctgggtatctagtcggacagttctctctctctctcaatgctgtatttgtattaacaaactgtgtgttttcacctctcttctcagctatttgtaaggcatcctcagacaaccactttgaattgttgcattgctttttcttggggatggttttggtcaccacctcctgtacaaagttgcaaacctgcatccatagttcttcaggtactctgtctaccagatataactccttaagtcgatttgtcactgccactgtataatcacaatgg

SEQ ID NO: 55049 - DNA, 1383 bp, Bovine  19866881135011
  misc_feature (1)..(1): n is a, c, g, or t
nttctgagatttgactgtttggtacatttgaggtcatttcctgctaggttttttgaaaagcctaaatgtgtctcctctctttgcaaatagaaggaactaacatacagagaaggaaaaggcaacccactccagtgttcttgcctggagaatcccagggatgggggagcctggtaggctgccgtctgtggggttgcacagagtcggacacgactgaagcgacttagcagcagcagcaacttacagagggcgcttccctggtggcttggttgtaaagaatctatctgcaatgcaagagagttggttcaatccctgggtcaggaagatcccctggagaaggaaatggctccccactccagtattcttgcctgggaaatcccatggacagaggagcctggtgggctatagtccatggggtcacaaaagagttgaacatgacttagtgactaaacagcaaaagacacagagaggtatagacccatcctcatgccaagtctaaaaattcagtattaagtttaaaattacttgcctgcttgatttcttgaccaaccctcaacttgtaccaggtttcaaggaatcagaagcaacatgataatgttgtctcaaaatgtttatgttacagatagcatcatttcaaatacatttttctttacatctctgatcatatcctatggcttttgtcctaacaacggaatgattgagttccgttgttaggacaacgaatcccgattatgcccaagtgtgaaccagatgtttggggtttttttcccccatcttgaaatattcctcagaaaagaaggtatcacttattgtcaggtgcttatgaatacttattagcatcactctttaaattatttttaatagcaaacagtcattggaagaagatccctaagtctcctgcttctcaagcctggttggagacttcgtggagtttaagaaaatcctgaagatcggtcccacctgagaccgatcataacagaatcttgggaaggggtggtgctaggcactggtcttttttaaaagcttcccagttgtttctgtgagcggtagggctgagtgtctcgggctgagtgtctctgcccttgaaatgacctcaatccttgctaattttgtatacttatgaacgtcaccactcagagtcagtgtccaaggagctaaaaaaactgaagttggattttgtcatttttcttgcgggcatgtctcttcttatccacccatgctcaggaaactagcaagttcagtcacactgaggtgtcagtgactgatagcaatcaagcgttagttagcctgttggcaggacagcccttgtgagttgggggccttctgtatccacccaggtagtggttgcctctcctaagtctggattcctgaggagtactctagccc

SEQ ID NO: 55050 - DNA, 878 bp, Bovine  19866881158919
  misc_feature (1)..(1): n is a, c, g, or t
nttgtggcctttgattattagttttattccttccttagtgccttgttttaaaggctgttgggcaaatttgcatagaggtttaggtgggtcaatctgaactgaacaccatgcatttagttacagtagaatgtaagtggaattgtttgcccacaagagaactgcagtctatgtttgatttaccaccaaaagtactggtaaatcaatattcacattaaccaggacctcattatgaacagggaggtcctcggggactgaaaggaagaggccatcaggagagcatttaatgtggcaattccattcacacagtaaatcccttgctgttaagttaatgagtataatgtcacaaaggagaaaagaacattccttggttaaaagtacagggtgatggttaagtgctggggcctagggaaggtgtgagaattatcagatagattcctgaccacatagtttgttgaatccaaggagagggttgttccagcaggtccctggcttatgatgatgcaacttcttccacctttaagacggtaggaaagtgatattcattgggtggaatccatacttcaaattttgaattttgatctttttaccagtctagcaaaatgcagtaagatcctcactagtgatgctgggcaggcagcaagtggcagctcccagcagccacgtgatcacaaggggacacaaccagtacccttacaaccactctatacctggacaaccattctgtttttcattttcagtattcagtaagttataaaagatactcaatactttattataaaatagtctttgtgttagataattttacacatagtctagtgtaaattctgagcatgtttaagggcagcaaggctataatggaaggtttacaaaatgcattt

SEQ ID NO: 55051 - DNA, 1425 bp, Bovine  19866881175456
  misc_feature (1)..(1): n is a, c, g, or t
ntggtgttggagaagactcttgagagtcccttgggactgcaaggagtatccaaccagtccattctaaaggagatcagtcctaggtgttctttcgaaggactgatgctgaagctccaatactttggccacctgatgcaaagagttgactcactggaaaagactctgatgctggagggattgggggcaggaggagaaggggacgacagaggatgagaaaggctggatggcatcactgactcaatggacatgagtttgagcaaactccggtagttggtgatggacagggaggcctggcatgctgcgattcatggggtcgcaaagagtcggacatgactgagcgactgaactgaactgaaattgaggagttgatcatgcagaccactgatttccttttcaccctaattcctggcatcatctcgggaattttgcatccacgcaaatagctagcatcccagtctccaggtccttcacattctcagctccagggaccttcacctcctatccacattgggctgcccattcccttggtcccacctcctatattacaaccacccaaaaccacttcatccttacagtcttaaccttaataatccactctcacatctttgatttctctagctctcactcaggtcctcccactacacctactctctgacctcatcttgacctctgagctcctaactctacctggctctccacttctgtcagcagctcctgacctcacttcctcccactctacatagtttcgcttccattgttctcgctccagcgctatcatctgcttggctttctatcacatctatcccataaactcctaaacctgggttaacctaaatctctgccttctttaccatggctactttcaggactgctagagaagagctcagtgcaatgaagaagtgtgctccacaaattcccagcatcagctgcaccctcaccactcgcagccactcaacttctcccactcccctcaaggtttctaacctttgtgtttttcctcaacttccatcctcagttcccttctcttttagttgaccctaattcttatctcagagagatataaactgaaatctctcaactttttgcccctccactgccactacctagaaaactgtctcggtctacctttcacatggcccttcttcagaaaacaagacattccggatgttcagatatatccattatcatcaacttcctcaaggccttggctccattaggaacaatttcccttctgtacttgtcagcctatgaattccttgttttttcttcctgtaaacaagctcatgcttctcctttaaaaaaaaattctcccaatcaatcccttccctctcacgtcactaagcagtcatacagtataccttccttccaagcttataggacagtctccagtttctcacttccaatccactcctcaatacagacaat

SEQ ID NO: 55052 - DNA, 992 bp, Bovine  19866881267809
  misc_feature (1)..(1): n is a, c, g, or t
nccagtcccgctgcccacgtgtgtctccccggccccggcatctggatcctggccctcatgggagtcctctgtgacgggagagggtagtggcaggtatggggaaggcacgaaagggggcattatctctttaaaggacagtaattagtaattccagctgacggccacgctgcgttgttttaatgaagagttctatttttatagaaaacacataattgagtggaaaaagcaggctattatctgagtcaccacagccacacctttggaaagtcttaactcctcagccaggaggccagagcctgcacacagcgtgggcttcagtgggaagtgggtctcttcccagaaaacggggcctgagtctgaagacccaagttcaaatcccagcttcccttcctctagccctgggacccccggccagtcatttcagcttctcagagctccagtttcaaatctgtaaaatgggacaacagtatcgctaccccctcggggctttaggagaaaagaaggcatacgcaaagcctcgccttcctaaagggttcagcccttcctcactacttacccagccccggttatgcacaaccacttacgtttgcgctctctgcctctctttcctcatctggaaaatgggagttaacaacagtttctacacctcccaggttgcgaggaaagtgagtgaatgcgtggaaggtgtcaaaagcagtgcctggcacacagccaagcacgaggtgtgttgctattttattattatttgaagtgcttggggttcaagcacagcagggttgttcagtgaatcagctggctggtcagggttgttcagcgaatcagctggctggggttctagtccctgctttgccactcatcagctatctgacctggagagaccagctaactctccagttagtttctttagagtaggagggtaagaccgaaaactcaacaaatcaaaccaagacaatgacaaaacagggtagggggatgtgagagcactctgaggg

SEQ ID NO: 55053 - DNA, 741 bp, Bovine  19866881308437
  misc_feature (1)..(1): n is a, c, g, or t
ncatcgaatgccaatcttgtgatcatctattgctcctgcaagtcattttagtaaaaagcttagatttagtggatatcttttgtctctcttctttttgttttatattaagagttgaattaagggtagaactccaggcctcactctataaatgaaatgtacactcagtctgtatactgaatcaatctgtatactgaaatggaataaaacagaattaattatgctgacttggaacctctcaggaagctgcttgggttgggagactcccaagggaattacgcaagggacaacagtatttcactcacctgcctttagagtcgggtgggatgtggtcagctgtagagctcttcttctgctgagcagaggtacaagtttgggtcagaattaaatggctcaagccaatagaggagagacagattctatcctctttcacttgcagttgtgaagctgtctttaaataaatattaagcacatatttttctatatgtgtttgaagcaatacaaagttgtcccattaaggcatctgtctgtcttggcccagccttgtttatcagtgtcattttacttatcaaagggaatggaccactccttgaacagtcacagaaaccacagtggaactcaggaaacttaaccagtcttgcatcctatcattcacatcccattgctaaataacaattcattccatttgtttattaatgacaattatctgcattgctcaaatgacttcctcatccaaattaaata

SEQ ID NO: 55054 - DNA, 1330 bp, Bovine  19866881370248
  misc_feature (1)..(1): n is a, c, g, or t
ntctgcttctgtacttatctgattatgaggagataacagatgactttgttctaaagtgctgagaaaactccctggtcttacaggccggggcatggggctataggcaccgtgcgggtcccagaccacctcttcatctctgcctggcatgacagcaagggcacatgggcaatagagtgaccacaagccaggggcctggcccatgagtgcaacaagagcctgggagacagactattcctggggagacgcgtcgtctcaatgtggtgtccaagaacccagctttcaggttccagctccctcttgagtctcccagcctccagcctccctccagctcaccctcctttcccagtccctgcaacactttctggaacatgcattttttccccctcctcctaatatttttatgtgtgtcacattttcctttcatatccctcaaggtacctgctgcaaagcaggtcacacagcaatcccttcatattcatttgctcaaaatccttttactcaccataaaagtcaaactcaaaatgcctcctagctttgcagtgtcccagtatgcttatctaagctctattttctttgaaatgtcaatatgcttatctaagctctattttcttcttttaaatatcctcaaagaaaaaggaaacatataaataattagaatgcttgctcaatatcaattaactagatctttagatatacatatgtatatgtatttagttcagttcagttcagtcgctcagttgtgtccgactctttgcgaccccatgaactgcagcacgccaggccgccctgtccattaccaactcccagagtccacccaaacccatgtccattgagtcagtattaattaagcccatatattttcagagtatatatgcatatctttatacacatgttcacctgtgaagttagatgaaataggaatgtaaaactgcatagtgtcttgcctgacaaaaatagagttgggacacaaattcaagttaactatcatttgcctagaaatttctctcaacatattcttctatccctttcctgattttccttatagaaaacagagtaagacacacagagggctgccagtggaacctttcacagcacctatcttgccagggaggtgctctaccatcctttaatccatttccttcttagagtgtggtggccagaactgatggcttgatccttgtctctgtgttctgagcaatgctaagggcagccagtttctacttggtggaaaccctcaaaccactgtctaagatagtgtcagtgatttatcacttatggagtaactgtgataacacagtgatgctctgacagctttaccaatccagtctaa

SEQ ID NO: 55055 - DNA, 931 bp, Bovine  19866881905247
  misc_feature (1)..(1): n is a, c, g, or t
nactgagcttatagtctatgtgagactctccagagaacacaagatgtgtgacacacaatttctgtctttttggactcacagtttatttggggagaaaaaaattcacctgcaaaaaaagctataatccaaggcagtataagatggctttgtacacctttttttattaactctgtctcaagtaagaaaaactacttctgctgctatatcagaagagcaatatagaagagaagacagttaagcttgggcttaagggacagttaaatttcattaagcagagaaatgagggagggcagttcaagcaagtgatggcaggagccaaggtgcagaggctgaaacatggtgctatttgtgtgactggacagatggtttctgtgggcaggctaggagacaagactacagacctgtttctaccatggcatgtaggggcaattttttatttcaatcgctacactgaatgaatgaaaagggcttcccgggtggctcagcggtaaagaatctgcctgcagtgcaggagcctcaggagatgagggttcaatctctgggtcaggaagatcccctgggggagggcatggcaacccactccagtattcttgcctggagaatcccctagacagatgagcctggcatgctacagtccatagcatgtagcatggactgtaaaaagagtcggacacaacctgaagtgacttagcacacatgcatgaatgaaataaggaagattggtaaaaagaaccccagaatggaaatcaggagaccagacatcagctttgtcaccaattacctggactccctcaaacaagtcactgtgggagctgaactgtcctcagctgtcaaacagaggtattctgactcatctctacatgctcctacgagttacaaggacaaaatgaacaatcagagggaaaactctcgaaaaaggaaactgctgtgc

SEQ ID NO: 55056 - DNA, 1180 bp, Bovine  19866880424854
  misc_feature (1)..(1): n is a, c, g, or t
nacttcacctttgtggtcttccttccaaacgcataccctagtctaagcatgagaaaaatatcagccaagaccagagcacggggctgtacaaaataacctgccctcaaaaccatcaaggtcacacacaacaaggagagtctgaagaagcagcagagatcagaagaggccgaggaggtgtgaccgttaaatgtaaggaggtttcctggaggggaccctgggacagaaaaagaacttggggcaggggggaaaccccaataacccatagaatctcactgatagtggtggacggatgccgctgacttcattgagacaaatgactacagctttgtcagctgccaacaagaaggggacaggtgtgggggggtggatgctctctgcacccttgcgattgctctgcatatgcacagctcttctgagcaaaaagcttatattcacagtaaataaagatgcagagatgcctggcaatcctaacagaagctgggcttcgctcaccacccattcgatggatttggggatttggctggaccactccagctcaagtaaaccagggtctccgagcctggggcctgaaacttggacgtccacaaggtcccgatgagtgtcccatgccgtttgggggtaaaaccactcaccagggtgagacaggaatcaagtccgaagggctgccgtggaggcacatggaattctaaacaagtactggcatcctcgacgaacgagaaaggaccgcactgaatgcgtttcctccccggcccgccagacctctaaaggtctcattgttgcatctcctccggcagctacacccccagcccagggagtgctgtacggctgtggaaatcaggtggtgggaggggttcaaatttctgctcagtgtgaaaatgcaaagtgacctgggctagcgaggaaaagagcaggtgtcctctttcgtccagctgggggtcactgtcccctaaggggccccctggccggcccttcctgccacaccgaggtctcggacttgactggcttgagctcccagagggggacctcaggagcactaacactgcagcaggccccgggaagacctgagctccgagccccgagtttctcggcgaagaggggagccatttccgactggggagggctggccccaagccagcaagtccccagatgccttgcaatgcacacctgagcggggtaagag

SEQ ID NO: 55057 - DNA, 3978 bp, Bovine  19866880426614
  misc_feature (1)..(1): n is a, c, g, or t
ntcatatttttggatcctaagatccgccaaaagcagaatctgagcactctccaaagcaccgtgcctttggattgagaacaaaaccgcagacaacactttttcattttttccctcttgaaaagtcccaaagcccagattacaagaaaaccttggctttccaagcccgtgcctctcggggtagcagacacaccccgctgtcctcaggcaggactggatctggacatcccgacgcccatggcccactttctgcacacactggccggagtggctctgggcaatgctgagtggatggctggccaggatgggttcttttcaaagacagaaaacacctggagagaagagagaagtgggctccagggaggcgagccctggggagccactgccaccccccaggatgttctggggccgctccattttaattccctcccatctgaaggcagcctctgcacagaagtgcttggtgcattctacatgtgaccgctgggcactctcctgcctctgctcagagcgcttctctggtgggaggggcaggattcggcaggtcctggctccaaggcagggatgagaactggctagagtgagccaaggttctcacctggaccctgcagagcccgacagggctgccttggctccccgacaggtttcctttctggcttagggctttcttcctggatgattttctatctgctgtgtcggaaggagggggatgtttcaggtggggcacctccacgcgcccggatgcccacgtttggaggtgacgcaggccagcaggtgtgtgtgcaggaaggcgcgtgcagctgctgcgcccacatcaaaggcgtgaggcccagtgtgggagtccactggagcgggcgctattcttggcccaggcactgactggctgtgatacgatgcctgccgctatcttgctgcaccatctgcaaaacggggcaagatcaaactttcctggttccacaaaactcatgggcaaaccacctcactggtcaggaacctggcctgtctactgggccctggggccagaccctcctattgcctccctgaggttttctgagcatccatctggcactgtcttcatgccatctcttgctgttgcactaagtcatgtctgaccctttgcactgcaacatgccaggcttccctgtccttcactctctcctggagtttgctccagttcatgtcctctgagccagtgatgccatccaaccatctcatcctctgcttcccccttctcctcctaccctatctttcccagcatcagggtcttttccagtgagtcagctcttcgcatcaggtggccaagtattggagcttcagcttcaatctgtcctcccaatgaatattcagggttgattttctttaggattgactggtttgatctccttgcagtccaaggaactctcaagagtcttttccaacaccacagttcgaaagcatcagttcttcagcactcagccttctttatggaccaagtctcacatccctacatgacgattagaaaaaccatagctttgactatgtagagaggaggtgatcccactaggagaagtgctcctggtttctagtgaaagcaaacctgtggctctcacagctcctgtctggcctcccaggtgcccttcccaacccccagttgggtcttgccagtgtcctgctcgactcctactaagaaccgatgggcagagacatccaggtctccttctgtcccactcactctgacttgatgtatacttgccagccgcatgtggcagctccgagttcctcggtcaggccaggtctttttcaagtcccagggcctttgcaaatgctgtttcctcatctgtcctttccctccaaccagctcagcaaacttctcttcatccttcagaacccagtgctgagatcattctcatcggggagccttccctgatccctgtactcccccatcctcaggctccacatcagggggtgtggggcaccccaaggcctgctcctcatcatctctcagggcagactggctggagtgcatctctacttgggagagcaggagtgaaagtgcctcatccaactttactcccaggctcccccctctcagagggaggtctggagtccctgtcccaggaaacccggggtagaaaggttggaagcaggaaggacagctgtcaggaggctggaggcgggtggagatgacttcagatttacatcagtttggggcttgagaggaaggatcacggggagttcaacacaagccagtcagactgtggttcagctgttccctgctctctgtgtatgctccctgctctgtgtgtgctccctgctctgtgtgtgtgctccctgctctgtgtgtgtgctccctgctctgtgtgtgctccctgctctgtgtgtgtgctccctgctctctgtgtgtgctccttgctttgtgtgtgctccctgttctgtgtaagtgctccctgctctgtgtgtgtgctccctgctctctgtgtgtgctccctgctctctgtgtgctccctgctctctgtgtgtgctccctgctctgtgtgagtgctccctgctctctgtgtgtgctccctgctctgtgtgtgtgctcagcccctgctggtgtctccaggagcccagggagtgttctctgaaggtgaggagggtgctggcggcggggggcggggtgcctgcagggccctcactaaacttcaagcacaagcctgcccagtgggggcttagctggagaagcaggagtgaagggaagggcctgcctgtgacctcacgccagggcgcctatgcctgcattgagctgctgccttcaggaagccgaggaggccgtgagaaaggagaggccctcttgaacagcagataaagacggggagggaggcgctggcagcccatccgattcctgcccggggctgatgactggtgacattcagatagctccctgggtctggtttttcctgttcctgaagtttccgcagtatgcagggctaggtcagaagtggctgctggggagtgttgctcatgtgcatgggtgtgtgtatatgtgtgtgtgtgtgcatgtatacgtgcatgtgtgtgtgcgcgtgtgtgtacatgtgtgtgagtatgcgcgtgctgtctctgtttagggaaacaggaaattcaggattcatatcagcaccacatcccaggctgccttgcttcctagaaaggaagggcagataacacggggcctgaccagaaggaaggggctcgtggcctggctttgtcccagggcagcgtctggcccctgggtgtccgctttcttttcttctagaggaggctcaagtacttgcctggaagaagccaagtagggagcagccttggctcaagaaagctctgagtcttgccggggctgcacgttatggtcacctctctcccgggccatcagtgagagggccaggagggtggctctgaagggagcagatgacagaggacgcggaggggctgggaaggtggagccctccagcgtggagggtcaggaccttggagctggagtctcagggtccagagttcaaggcagggggagctgggagccagtggtgggggcaggggcctgctattgccttcacagcccaggaaagaggcctcaggccttgactggctggtccagcatccatggcgctcacctgctgaactccccagcttcccagctggtgaccttccttcaaggagtcccagataccctgccctggatctgggcctgggcacctgaggaggctggcactctgcccactcacctgggccaccccttagagcagggccccattgtaagcacgcctggacctggtgtgggctccttggagcttcaccccggagctcagccttcaggtctccctgcaggcccgccctgcctccagggtccctctgatccctgacctcggtgccccggggaaggggcctgggcacaggctagaacagctcacactgcagagtctctgtgcattgatcccctccccccaccctagcttgttacatttttaaaaatagctaatgaggaaa

SEQ ID NO: 55058 - DNA, 3260 bp, Bovine  19866880435643
  misc_feature (1)..(1): n is a, c, g, or t
nttgtaaagcaattatattcccataagaaaaaaaatgtttaaggtatctaattcaaggtcatagggttgctaacttgaaattcgcctagtgtatctttttaaccccatggactcagcactctagtcttccttgtcctgcactatctctcacaatttgctcagactcatgtccattgagtcagtgatgccatcccaccatctcgtcttctgtcatgccctactcctcctgccttcaatctttcccagcatctgggtcctttccggtgagtaggctcttcacattgggtggccaaaatattggagcttcagcttcagcatcagtccttccaatgagtattcagatttgacttcttttaggattaacttgtttgatctccttgcagtccaagggactctcaagagttgtctccagcaacacagtttgaaagcatcaattcttcaacactcagccttctttatggtccaactctcacatccatatatcatgactggaaaaatcatagctttgactatatggacctttgctggcaaagtgatgatgtctctgctttttaatatgctgtctaggtttgtcataggttttcttccagggagcaagagccttttagtttcatgactgcttcactttaccaggcctcacagcgacagaaagacaacatccctctcagagtctctttaaaatgctcccaactaacaatccagccattctctcagacttgcttctggtttgtactaattaacacatttctgtgcctttaataaaggacttaagttgtgagatcctgcatttattgaaacatggtttcatgtgtgccgcggtccctctctttctgaaatcttcccaaatgctttgcaaaaatcacagccaagcccaggcactccactcaccaggaaggtgaagacagagtgagtgatcttctgttattttgattcacaggtgccttaagctcagtccctgggtttaaagtgaaagttgctcagttgtgtccaactctttgcgaccccatggactatacagtccatggaattccccaggccagaatactggagtgggtagcctttcccttctccagaggatcttcccaacccagggatcgaacccaggtctcccacattgcagacagattctttaccagctgagccaccagggaagcacaagaatactggagtgggtagcctaaccctgctccagtggatcttcctgacccaggaattgaactggagtctcctgcattgcaggcagattctttaccaactgagctaacagggaatctccctggattaagcaccaattaactcctgtgacatgaattcagccccttcctgccccgaacctctgtttcctttactcttaaaatggagagaacagcagtgtgtgttttagaccacgggctgggaggattctgtgaaatcttgtattcacagcacctaacacaggtcttggggcatcacagcacctcgcggttgatttcctcctccatcctgtctcacctgattaggaaaacaaggtttcacatgatccaggggcctacctgctgcctgtaacttacacagaattatcatatcttcccatacataaatatacataagacgagtggtgtaacattattagcataatgaatattctaattatgtctctaacattaaaactgccaccaaacattaatccctggggaataccaattgccaaggaggtagttaccaacccttttggggtgtgctgtgaggattgaacttgtgaaatcaaggagccatcccactttccgaaacacaggaggaaatctgctacaacagaataccagcaacatacacagggcccctttgctaacacagcgtggccataccatttctcttctcatagaatattactgtggggacagaagaaatgagtgcggagaatttaatccagaccatggatggaggatttacatgggctggaggctggcttatgcatttccccacgtttctcaaatagttcaatgaaggtgtttagtagcacactcccattctgtgcttgggggtctgaggtgcagcgaagttaagtcatggttagtgcatgctcagccactaagtcatgtctgactcttgtgactccatggactgtagccccccaagctcctctgtccatgggattctccaggtaagaatactggagtgggttgccatttccttctctaggggatcctcccaacccaggatcgaacccgagtctcctaaactggaaagtcgattctttagcactaagccatcagttcagttcagtcactcagttgtgtctgactcttttcgaccccatggactgcagcacgccaggttccctgtccaaagccaattcccggagtttactcaaactcatgcccattgagtcggtgatgccatccaaccatctcatcctctgtcaccccccttctcttcctgccctcaatctcttccagcatcaggatcttttccagtgagccagttcttcgcatcaggtggccaaagtattggagtttgagcttcagcatcagtccttccaattcaggactgatttcctttaggactgatttccacacagaagaaccatcagggaagcctctaaactataatgaaaacaagagctgccacttctgagtgtttcctctgggctacatttccagagccatttgcacaagttatcatcactgttactatgccggcatgcacatcagcactgctgctgctgctgctgctgtgtcgcttcagtcatgtccgactctgtgcaaccccatagacggcagcccaccaggctcccccgtccctgggattctccgtgcaagaacactggagtgggttgccatttccttctctaatgcatgaaaatgaaaagtgaaagtgaagtcgctcagtcgtgtccaattcttagcaaccccatggactgtagcccaccaggctcctccatccatgggatttttctggcgagagtactggagtggggtgccttctctagtactcagcaaatgtcctacaagagaacagcagtggaaccggaacctcccccaggtcatcactccctcagggcagacagaaatgccaagaaacactcccccattgtccaggctcccacagctccctatcaggaagctgtgattcaaaacccatttgagcaaactctgagagatagatagtggaggacagaggaacctggtacactccagtccatggggtcgcaaagagtcggacatgacttagcaactgaacaaccaccgtcagctaccacacaccagctacctacacactgt

SEQ ID NO: 55059 - DNA, 7745 bp, Bovine  19866880459099
  misc_feature (1)..(1): n is a, c, g, or t
nctggagagggctgagtggtgatagaatccggatcgtggtgagagcctatcaagaggatgagctgaagggaggcactgaggtctggaggagcagcgggtgccaccagattagagtgaaaccttcccacaccacctgtggtcagatctctgctcacagccactgcacaccaggtgaccagaccctacggctccctcttcaggggccagctcactctccagttcacttgagagcaagaggatggcttttgtccttccctagggaaaagtgcttagtatgaaacatgtgcatccagacacgatcttccgtaggaagtagaggatgttttctagactgagaatagctatagaagtttgggttggtgggtctgattagctctgttctctccaccttctctctttgcttctctaattggtgaatggtgtggtcagggaggaaaggggcctgggagtgccctcccacccctggaaatgtgactgaactgagcctgaagcctctggtgttcttctctaagaagaacttggttgtcattgcagagctgaggtgtggactccaggcccggactgtagaagtaaaaggtggagcctgtcctgggaaatgcaggcaggcaagtcacacatttgagtaacagaggctctctgctcattctgattctccaaacatcttgtccaacccagcagaagaccatgaggagctcaactcctgaatgtagagccttgtgggccctgtgtcttctccgtgtgggttctttgtgtgcatttcgcatgccctgggtgagttgttcaggaggctctattcccgaaatagctgctgctgctgtggtgtgggtaggacaagggcgtggggaaggctgaccccctagtgtcagcagcctgggggagagtgtgggcaggaaggccaccacggtgagtggctgggagtggccctacagacctggctctaccacttgccaatcacaggaccagggcacagaagttagcaggcagcaaatgagcagatttaggatggatgagaagtcaggattctggggaccagacctgattagatctgcagtgcggagagttactctccgagttcagatacagcaacaaagagaggggaatggtccttgctccctgccttgctgactgtaaaaagccagtagcggaaagcctaccacagtgttttgaaatctgcaaagttcttcccaaggacaaccttcagattctccctaaataggccagaaatagaaggctctgggcctctcctactgcttcagtggacggagcctgtgttccagctgctcctgcaggcgatcgttaatgcagatggactcctccaggtgctggcgcaggttacagatttcaccaagatgctcctctagcaggtcagcccctgtagccacctagcaggacaggaggaggtggggatggagcactctggtcactaatggggcccacattgggggtggggctcggccagccaaatccctaactatcaccatcctctctcccacagatatccagaagtttacctgagcttgcctgaagagcatactggcttcaaacacaggaccggtgatgctaagcaagccccagtggcctcctcccatacaggggtctgtgtcagggagttggaatacatgtacagtgacctgggcaactggtaggtgtaaggggttccccattgtctagaaaaataactgaagcttgtggaactcggtgtagaccctagacaggtgtgacctttgcctgagttgacttgagggtactagggaggagctcaattaaccttaacacctctccttgcactgacccttgactgaacattgcttagcaaggaacactgcccttcctccacccttagagagaaggcccaaagtaaaagtgggtatctcatggacttccctggtgacccagtgattaagaacatgcctgccaatgcaggggacaggagtttgatacccagaccaggaagattccacaggctgcagggcaacaaagcccgtgcgttcaccacagctagagacgctcgtgtgctctagggtcctggctccgtaacaaaagggggccccacaatgagaagcctgcgcacggtaaccagaggggaacctccacgtgctgcaactagagaaagttcctgcacagcagtgaagacccagcacagccaaaaataagaaataaatacattttaaaaagttagtacctcatgtcaactcatcctgtgtggttcatgattggtactcaacaattccctcaaatcacttttattatggaaggaagaaagctcactcaacttttccaaagagatctgtgatgtggtctttgtttaagaggagcaaaaatgattgtactcatgtctgctgtttaatgtttcaactaaccatcccttgcctcatcaaggccattgcctttggttgctaaagttttgaatagtttccatctccagtccttccagcaggtaatccaggtgaatctgcttttccaaaggagattggcctagtctatgtcctgttatttgcaaacagaccttaaaatgcctcttcttagctcttcttcccccaacatcctaacttaccctgatttggaaatgccagttcagtctcagtcacagttacctactactccataaatggctgcccctgggtttgcataaaaacatctctagtgtgacattatctttgtctgtatggcactgaagtaggaatccgacagctgattagagagttggaaaaagcaccccaaagaaaaggaaaaaagatgcaggaaagagcagtgggtggggtgctgatgaccgactccgtcaaatgcctcattttgcctggacacagccttctgagaatcccagttctctcctgttggaactgggctgcatcccagcattcacctgtgtggctgcacctctccaccaggtggagaccagggagctaggagtgtgagttgggtttgtactcagggcacatttaaagggtgaggatctgtgtagcgacaaccccactttctgtaattactctggatgatggaagaatgttctgcaaatgttggcacctggcattcgggaaggctctgagagtgggctgtgaggggaccagggagcagggactgagaaggatgtgactatgagagcacagaggcagtcactgactctcacagccctgctccgccccgaggcccagggtggggaggatgaggcgtgcactcggaaggacttggcactgccgggggcttcgctttacctcactctgtgagcaggggctagaggagaaatggaagaggaggccctggtagaaaagaggggggtcctaaatgagacttcatttcacaggctgacctactcggctttgtgtttacctgtgggtttggagtgaagctggcacatggaggagcctgaggataggtctccagttatgctcacttcctgaggtctcatcacataccactggccactgctgcccagttctgtcctggaagagagtggggctgggcagggttgggcaccatactgcaaaggagacatttcccttgagaagccaccttgacaagggacttgctttacttaagtggagtcatgcttgttgctgctaggatttcaaggtcttcattctaggccctttgtttaatgttggggctttttccttcatgaaaatctccctggaatttttgtcttaaatgcagtttcttgagtcttatccccaagtttataacaggccctgttgtgtctctggtgtagattttctatactgtgcagccagcacccagggattggggcctgtctccggtatgatatcacagtcaatcatccaaggttagtactatttctctattttacacgctacattcttctccactatacacgagatccatgtgctcaaagagggcaatgaaatcaccatggaaagcagacttggtattttggtggagttgaaatgtgcaccttggacttctgtcaccagggctgtgctttcattgttttcacatggacacagggtaggatcgatggagacagggtaaggagtagaagacttcagtaagagccagtgattcctggtaaccagtgttgatctgcttgacaagtacttactgaatgttccctgtggcaggctttgaagaggctctggggaggagggctgactaaggcacagagggtgcctggctctcaggaatatggcctctagcacaggagccagatattttacagagaatcacatctaatttttaaataaagactgtgatgtatttaatattcatgcatttcttggtcccattgtgtccaccaagggggaaaacagagtataaatataggattattggaaagagattgggcttccctggtgactcagatggtaaagaatccacctgcaatgcaggagacctgaattcagtccctgggtcaggaagatatgctggagaagggaatgccgagtctaaatataggactattgacagagataaaatttggggcgggggagatgtctgtcaagtgttttttattttaggaagggaaataagaagtaagtttgatcaaatgtcccctgaaatttagccgtgggttcctggtgcttttggatacaaacgcttgtagtcaaggtttgtgtggcagctctgctgcataagggcgtgggaatttcggcgaaatctccatgtctctctgggcctcagtttcctcatctgtaagataaggttattcaaaatctccaaattcctttcctgctgactttttcctgagtgcaggagagactgagatgcatggtaagtgtgcactgggatctgcagccaagacctcaccttggttccttctctgtgtgtctcccataggagcctcaactgggcccacacactggaaacacagaaaggagagaggggatggaagaaaggaaatcagcaggttcggaggatgagaaaacccaaagaaaagcgaggtaatggtcgaggagctgtttgccaagggaggtgaggacaaggacaagtggagcttggaaagttcagtaggaattgaggaacgcacagcatcatctaagttctcaaggagcaacctgagctgagcaggaaggaccaggagagtaatttagtccccagcgaacttgtgcacctgccgaggagatccacacgatggatccagttggtttatactgctgggagcaccaatcccaggaggaggatgaggtttatactgctgggagcaccgatcccagcaggaagatgatgggaccttgaggctctgcacgagacccccagcttgaaacttggacgtgcccacatgtggatgtcctccaagtaagggtgtatgtaataaggtggataaatggtgtttggagaaacattagagatcttcattcttatcaggggccaggataatgggactcatttctgaagcagagatggtaataatattcttctccatttacaattttgaggctttacacacatcctctcttaactatgtgttgagtgcttaatgtgcagacaaggaagagcatgtacactgttccattttataaatttgttaaaaagacaaattcatgtaaactggctgcttggggctaagtgctgagggagtgatgtgctgcagaggggaacaaggagagttgtgaccaatggaaacaccctgcgtcgtgatggtagctgtggtttccatagtgtatacatctatcaaacgcatgtagttctatagttttaaatagtgccgtcaagaggagtcatataaaaatctaccacatttctccataccagcaggattagggaatgaaattcaataaaacataatagagataaacatccatgatcatttaatgctcaagaatacagactaatgactcctgaaaactactgctgagagaattaaagaagacctaaataaatagaaatatatgttatattcgtagattggaagacaatatttttagaatgtcaaatccttgttattctcaatagtattgcacctggcatggggggggggtgtatattttgcagggtaattataacatgtaaatggaaatcaaagtatctcaattagccaagacacactgaaggagaattaagttggaggatttactctactagatttcaaaactcaggttaaaacacagtgattaagacaatatactggtttaagtaagcagaacacaaattgatgaatgaaagaggagagagtgagtaagtgaccatatccagttttttaataaagtcaccaatatgcatcacggggtaatgatagacttttctgcaaaatattctgttgtgaaaaacagtatcaagtgagaaattattactacatttgggaagtttttggtagaaatgcagtataggtgaaggaaacagctactgggaggaatctgacacaagagtgaactggaaaatgtgggatggggtttcgcaggagaagggatgctacccaggggtggctccagcccttacagcaagggggtcttggcctgttagagaccctctctgtgcctccgtttcttcacctgcaaagcagcagagagttatgtttttggcaccagtccattttgaacactagaagtaccataaaggaaataatcatcccctcgaatcatgagggaggccaaagaaatcagtaggtaacaataagtgcacacctgaggacctttaacaaatagattccaggtcccatctgaactcactgaatcacagttgctacagtgaggactgtgcacttgtttgggtactaactctcccaggtgattcttacagtgatcagcttggggacagaacaactgagctgcataccttttaccccaaacacagaaggaggacagagcagaagcacaagggtgtttccaatcccatgactaaagcagagaactattggaagactctagcattgaaggactaggcccatctgaccccattttactcttgtccagtgtacagcagagacacaagtccttggggacacatgcctgtggcacccgactatccaccttgaggaaagtgagagccccaattttaaattcagtctggtttgagtgaaagctaaatttcacccttgtttgctcattgatgggaccaatcttctccaagctgccactttctaaaaaataaatcgtattgctataaatacaaacttcagcaaagatgtttgttagaaaattttattaacactcaagccacctaacaagaaaccagaaagttagcaagagcattcagtttcaggagagtttggcccaatagagcacagtcactgagagacaagatccttgagttgaagggaagtgatcctttctgtcctgggtcgtcctgctaacttcagtgggctgggcaagcagctgcccattctaacagatgggattctcagggggcgctagcggtaaagaacccgcctgctaatgtaggccatgcaagggacagggttttgatccctggctcaggaagattccctggaggaagaaatggcaacccactccagtattcttgcctgggaaatcccatgaacagaggaggctggagggctacagtccataggatcacaaagagtgggacatgactgaagcaacttagcacagctcgcattctaacagatgggctgctcttgcctccagatggcgactggtgtcctgaaacacataagcactcaggaagcctttagaagggcccagccatcacttctgctattgctcagtgcacaaaaatggtttagttgagaaaaggtagggctctaggaataaagtcaggtcacaaagaagtatgaaatgggacaaaggcaggataaaaacaataggtttctcctacctacaaaatgcaaagca

SEQ ID NO: 55060 - DNA, 974 bp, Bovine  19866880598974
  misc_feature (1)..(1): n is a, c, g, or t
nctttacgaccccatagactgtagcccaccagcctcctctgtcccggaattctccaggcaagagtactggagtgggttgccattcccttctccaggggatcaccacaggcctcctctatgtcaggaagattctctattgtctgagaatctgagtcaccagggaagccctacagtagttcaaacatggaaacgagagcccgaaaccaaacagagcaccctacaccataggaaattcaaactggagaaaataagaattctgctttcaaaagcatttactaaaagaaaaggaaagggtggagaaaagtgtgttcaaaagttgcaaggaggctaattagaaatacactactcagtgcacaaaagagcagggagtttggatgtgaaaattaaagatttgaatgtgaaagtttcaagtaaacaaaagattaattactatatgcattggcttttgccttttaaagagacaactaccatgcctgcaggcttctctgtgattccctgtataaaggataactcaaaagtatgcattttccttaatgagatttttttcatataaggaaatgcaattggtaaaaatttaacttacgacacctttctaggcagcacactagccattgctgaaactcagtaaaattgtgtttgaatctaagttcacatttggtgcatttatgctttgtatgtttaacacactttataaataatgattcatgctcactaaattgatataaaatactcttccatccactatatcaataagagacctagatgcattagagaaggaatctgtcagagcagggtctggaaatcttaaattctcagaagccattcccaaacccatgaggccacctaccctgtactttgaagacaaagtagacccatctaattctgtgataccagaactgtaatggtgcctggcatggagctggcactcaataaatatatactcaaggaagggatggcagacaggagggtgggtg

SEQ ID NO: 55061 - DNA, 1207 bp, Bovine  19866880603877
  misc_feature (1)..(1): n is a, c, g, or t
ntgtctattcttacattttgaagagtcttaaaagtattgtacattgaaatgccaaaattacaaacctctactgaataaataatttcaggaaaaaattgatctctacctgatctctaatggtatatttaatctttttgacaaatctgaatccttcaataggttttttaatataaatgtgcataatatgcttactgtactataaaataaactataagcctgcagaggtaatgatatttttattttacatattaaaacattttagaaaaactgatttttaagtactgttttcaaatatttaaatattttcaaatatcaaagccttaattaccatattttagtttttcatgttaaagttagaaacacacaactttgaaacatttaaaattctttctctgttctacattcgtataaaatactgaaaacagcattatgagtttaaatgagaaaatattttaaaaatcaattttatcctattgaaagcaaaagaaaagttattaaaaaagctaccaaggaaaaaattacagccacttagtgtacataaaaatggtctaaaggctcagatgtaccagctgtttaagtgccaaataccacaactgatttttcttaagctttccatacaaaacctgctgcagttagcagacacaatcaaaactgaataaagcattgatttggggttttacataagttggttagaagtctgccttttttaaatggaattaagataaattccattctctcaaaaaatgtctgctataacattcccattgatacccaataaatgattctaaatattcatttgaaaatgaataaattatatctggaaataaaaataaaattagttcacttctgtctttctaatatttcagaccagttgtctagctctgtagtcacagacagcctgctggcttccagaaataggaagctgtagctccagtagctacagctgtgtggtcttaggtaactcccactccctgcctcccagagttacgggtattaaacgaaataatctaggtaaatccatatattgagggctcaagtaatagcactagctagtgcttttattagcatgtgcccagcatgtaataaactctataaatatttaatgaatgaacacaatcaaaacgttcagcataacaaaaacagagtccagctaagtcaaaaggcctttctaacaataccgacaacagccagtaaacagaaacagaag

SEQ ID NO: 55062 - DNA, 1290 bp, Bovine  19866880624940
  misc_feature (1)..(1): n is a, c, g, or t
ngtcgcacagagttggacatgactgaagtgacgcagcagcacagggacttccttagggcccactgtttaagattctgccttccagtgcgtggggaatgggtttgatccctggtcggggggctaaggtcccaaattctgtagggtacagccaaaaattaaaaaaaaaaaaaaaaaaacttactacaaagctgccacagaacactgtggcactgaccataaggagagacataatggaatagaattgagagtccagacgtaaaaataagttctcacatctacagccagttaagctgtagaaaggttgccaagtccattcattgaggggaagaatagtctacaagaaatgatattggaacagctagatttccacatgtgaaagaatgaagttggacccttatttcacaccatgtgcaaaaattaacaggaatgggtcaatgtactttttcccaaggttttttccaatcagaaaggataattaaagtgaaaattattttaaaagaatagagttctttgggagcaatacttttttgtgtgtagttttttcactctgcagattatttattaagcaaaagtgatatgatggctctatgtgctaagcattcgaaatatacaaccaaacttgtctttagctttaatggagtttatcttctagcagggtagataagcattaataaaattatttcactcttgaataacaacatgctgattgtgatatgtatatgcaaggaagcatatgtggtttgagctttgtagtagaggaatacagtgtagtttcacggaggactccctgaagagggggagctgagtggagagacagaggatgagtaggaattaacctggttaagaccaggaaggggagagtgtggccagctcctgacgtgttctaggggttttgattgtctccagatagtaacgggcttaattttatcattttattttttgtttctgaccctttggctacagtgctgagtggcggttttctgtctctttgtttcatctgtgttccaggatgcccatggtgctcgctctgtgcacagagagaatttagcaaatgtgcactcactgatcaaagtaataaaattctgaggcagtgaagagttttccgtttttaaatttttaaagaaaatgtatcttaatttttaacctcttatgattaaataatgacattatcaagcagctacttttagacaaaatatggtaaataacaccttgatatgatgatcttagacctatttatattttgatttaaaatagaatttttttccatgtaatttaaaaccttattttgaa

SEQ ID NO: 55063 - DNA, 1186 bp, Bovine  19866880754917
  misc_feature (1)..(1): n is a, c, g, or t
ntgcagagctagagcttgtccaaaaatatccccgaggagccagtggccagagcgtcaccctgctctggctgtctgtggatggacccctgggtctgctttggggtgcaaagatgtttggtcccctctcactgggcctcttggcctggcgtcccccccgggctgtgggaggatgttactggacgctaactgcaggcccccactctcaggtctgctagcctccccgtctctctcttccacacttccagcacctacaggctctccctgtgagtggaggatattgaacgtggtgcccagcatggagactgaagtcagaccttgaattagggctctgtccttcataagctcacgacccagcgcaaggtgggctaattcctcgagcctcagtttacccatctgtaagatgggggtgtgatccgacccatctcctaggatgtctgtgagcattaagctggataatgtatggaaagatctgtgtgctgcctggccattgatccctctgtcatgatgtatttgagagggtctgtcccctgaattggccgagaagctttgagagtgtttgcaagtgttgagtctgcacactgtatgcagagcggtgcttctttgcttcttgtgctcagtggggccctttactcccgggagtgggttgttttgcaggagggaccctggataagaaatgcgcgtgggccttcgcagccttgactttgacagggtagcccaaggccggctgttatttcatcactgaccctgccagccaggaccgttgcccttgctgctgctgaaggcagagcctggaactcccagtcaggggtttttctctgcttcctcctccttcctggccacttcttcccctccctccggggccgcgggccctcccggtctggccgcccgtgcgcctcccgtggtcgtgaccccacagctgtgtcccacagtgttatcgggggcccgcagtcctccgtggcccccggggtgccccgtgagcaggcgtggggctgtggcctgacggctcgacttcctgtcgcagggtctctctgctgtggctctgtggagccctacagtttatctgtggtcagtgctcgcacccatttcctgccagctgctactggtttttcagtcagctctgccagctccgggaactggggaaggaccgggctgcgtattcactggccccgggcctgcggggatgctg

SEQ ID NO: 55064 - DNA, 1093 bp, Bovine  19866880845543
  misc_feature (1)..(1): n is a, c, g, or t
naaaaaccaacggggagggggaaggggggaatcacaaactgtatccggctacagagagttcagagtgacgtgggggaggaatcaaactttcccaatctacctagctccctgctcgacaaatgacaatgccaggagtgaaattaaaagggaaggaacacaatgcccttttcatttcacttcaagggcaacttctttgggtttgtggtagcatttgccaacccctcacctaggattctccccagggacataggagactttgcaagcctctcaaaagagcttacaaaacggctttagaaatggggctaacctttttcaaggtgagaagtctggcttcgttttttatctcagggagaaaagggagccgcaggaagcaagactagaaatacaccacaaagaacaccaacaccaaactgagttagtaattctgaacacccaggaatacgtctgtgcttcgttcattcaaccagccttggttagactattacctaccagacgctggggggtatttgctgggatgtaaatatgagtaaatccggatctgtgtccttgaggagctcacaggggaaagacagaccctaagcaaacaattatgttaccagcagtacaccagggataagagccatggtattggaaccagctggtccactctggggtttgaggacaaggggattttgctggagggagaaggatggagactggataagaagaagcgattgaaagttcagaaatgggaactccagccacatctaaaggcacacccctgccctccttagtgccgtcttagaacctgcctcctgtcactgcagaacagtgcaaaggttaatgagaaaacgtgagatgccatcttgagaacttctaggaaagatcttagagtcctgacatttgagagctcttttgtattagacagatttttgctcctaatcaacaggattccatctggcaccatttttattgctgatcaagatcaactgttgtattttttttaagtatacctatctcctaaaagatcttcaaatacatctccgtgttttaatcaattaaggagtatttactgaacactccattgtgccatatcctgttgccatctataaat

SEQ ID NO: 55065 - DNA, 1923 bp, Bovine  19866880891847
  misc_feature (1)..(1): n is a, c, g, or t
ntatcatatggtatcacttatatgtggactctaagaaaaactggtacaaatgaacctatttatagaacaaaaatagagtcacagatgtaagaaaaaaagcttattgttactagggaggaaaagaggggagggatgaattgggagactgggattcacatatacacactactatatataaaatagataactaatgaggtcctaggcttccctggtggctcagatggtaaagaatctgcctgcaacacaggaaacctgagttccatccctgggttgggaagatcttctggaaaagggaatggcgaaccacttcagtattcttgcctggagaattccatgaaccaaggagcctggtaggctacagtccatgtggtcacaaagagtcaggcatgactgagcaactttcataataaggacctactatatagcacaggaaactcaatataatgtagtgacctatatgggaaaagaatctaaaaaaagagtggagatacatatatatatatatttatatatatatgtatatggctgattcactttgctgtacagcagaaactaacacaacattgcaaatcaactatactccaataaaaattttttaaaaaaaagttaagcacattagccttttcatctgtatttccatatctctatcagtttaagagaggttgaaagaagttcaagcacacacatgcacacacatacacacacacacacacagagtctctgatttcccaagacttgatttttcatcacaatccctggttcataagtgctaaagatgttccacttggtatgttggaacccattatttcccagtgagacttgctgtctgttttgataggagcaatttatcaccctggtggaatcaggctgccgtttggaaggcagggctgggatttatgaatctcttttcactgggatgaatttaattccccagagtggaagtggtattaaaagatttggccctgctgcacctgtggcatttgagacggtggcttccggagtgagtggcagcttggccaggaaacccctgccctctcacacccacatcaacactgcactagaaacgtcttcacccttccaagcacagagaaagccccatctagggcatgaaatccaattatgctggatataaaacaatagttttaattaacaatgatggacatcccaggtggctcagggataaagaaacctgcctgccaatgcaggagtggtaagagatgcagatttgatccctgggtcggggaagatcccctggaggagaaaatggcaatccactccagtatgtttactgggataatcccatggacagaggagcctggtggactacagtccatggggacgcaaagagtcagacatgactgagcatgcatgcaagagttaacaatgaatttaaaacattaaaattgatttagagtgtgttttcattctatttttggtgtgcctaagtgttaaaattattattcactgaagatactttttcaaagtatccacttttaagctctgaaccaagttcttgctctactggggccaggttctacttccagtttatggtccagtgtccccatatgtgttgtggtccaggtaagacatgatgctgcccactggaaccagcggggaagctttaaacgctgtggatgccggactccgccctcaggaagtatgagacaatgtctggggcacagcctgaaaaccaagagtttttaaccttcccaggtgattctaaggtataattaagctatatataattattattaagtatataatataatgagctttatattttggaaacaagcataacagaatttcaaattagacatcctccttatgattggtcatctattttatatgaaccaactttgacttccaaaatcatttcatggatcaacttggtaactgacagatatgccttagtgttcacggaca

SEQ ID NO: 55066 - DNA, 1440 bp, Bovine  19866880893009
  misc_feature (1)..(1): n is a, c, g, or t
ngcagccctttcagacacagcccagggtcccgtgtggctctgacagcagtgtcgggggccggatggctctggccccagctgcccgtgatgcttgagagctgtggccaccccagaggaagtgacttgcctgctgagctcaggggaagtcctgtgctcagtccttaatcagggggagagggagggactgaagggcgggcacaactgaggaccccagacggcaactgaagccttcctggagggcagtggctcagggctgctccctcagtttctgcagaggcagaaactcacgcccagagaggggaagtgacccatctgaggtcacacagcaaggcagagacacagcttagcagactccccagggccactgtggtgtgaccctggagtctgtgcctaggggctgcccttccagcctccctggagcctgtgttctctacggggtcgtctcaactttcgtcttcctccccttcttcatcctgcctgcagcccctgcagtgtggtctccgtgctccccctggacagagctgagacaacccggggccccagggtcctgtgcaatccatcctcctcaaacctttggatgtgtgtgatgcatgtctacacagatgtgtgcccgtgtgtgcctgtgtgtgtgtgtgtgtgcctcgcaggcacatacaatgtagatgtgtgtgcaggcgtgtcatgagcgtgcacatgtgtgatgcatgtacagtgtctgtgtgcatgtttaagcggacacaatggtgactgggccccaggagtgtgtgaaccgtccaggagcaggggtggccagcaggtgcccagtctcccctgagccagtccttcccctagcagagcctggaactccggaataggaaaccactgttttcctgccggctgtttgcccttattaattcaggtagcaattacccactctgaatatttggcgactaattagttttccccgtggagatggcagaacgaggaatgctttactctgacctgatccactttctggggttcctgagggaggaggcacgggaggatgaggggatgggcagagggtgagagaagcctgcctcgcgtctggatgtttctggagctgcctggatctttgctacaagcctacagggtgacaaaaaataacccatccagttttgggttttgttcttgctttcgtgtcgcctggcccgttccgctgtaggtgcagctccctggcgttggcctgatggtgctggtggcagtgtcacaacgaaaggccggggctgctcacctagctggcgtcacctcatttgggcgctatgccctctgtatccacaaggtgaccaggggctctgcgtgcagggacagcgtgctgggccagaggacggcgctcctgtcggggccaggaggcacacagttcagggtggtgggtcggagaaggggccaggggcccatagtccgcgctggctctgtgcggga

SEQ ID NO: 55067 - DNA, 886 bp, Bovine  19866880998411
  misc_feature (1)..(1): n is a, c, g, or t
naagtagcattgtaacacagcactttcttttatccatctctaaactaaggcataaaagggcaattttaggatacaaatagtaagaaacctatttccacctgagctttcccatctcagcagagaactcatctttgatagcctaaatacaaaatgcgtcgctgtccacagagcccatctcccatgcccttgagtgagcaggtaaaagtgcaggtcaccttcttgatggttgcacagtactgaggcagcatgctctggtccagcccttcaatttgtttcagtttctcacaaaccgcatccacgttcatcgaattcagtggtattgtgcctgaggctgggcctgatccctaggtaagtcgtgggaaaacacatgtataaacagcatttaatgtcagatatatgcagtcatgtgacagagaaacacttatgaagttacactataaagtacttcaattaaagatacattttcaaacttaagtaaaaacagtgaatgtgtgcagcatgggacatgccattagagaacagatttagctactgtttaccttaaagagtatcttttattagagcagatatagcctgatcaaaaccacttttctaagaagacataagttccatgagccaacccaaggccaacttcaagaaagcctaacctcaaacctcaagagagaaaggtgtagcccttaataacagaaagacaggggcttaaaaaaagaaaaggaatagggggaattactgatgcctataacatacaaaaaaatataaaaggtaaacctatgagataattttaaaagtgctaacactcagcagctttaaatgtcttcacagattaccttaatagtctacaacagctcaagttttcagatctgatcatattttatatccaagagat

SEQ ID NO: 55068 - DNA, 746 bp, Bovine  19866881846775
  misc_feature (1)..(1): n is a, c, g, or t
nggaagaggtaaaattaagtcaagttctatagatgtaacgctgaaaactgcaaaagaaagttcctttgcaatgaagttattctcactctgctactcaatcctaccacctacctgtctgtgatgtatccacaacaaagccaatgaaacatgagacctcatgtttctatcctgacagtgatgcccaaggggtaatggcttaccctgaataagccattcattcagttaatgggaatattgggggagcttttccaacagatttttgatgtgtgtgaatggaattgttggttcatttcaaacggactccaagaattgagcagatctttccctgctggatgtcatgacggcagaaagtcacctaaaaagaatcctcaacatgcaaattcattttaaattgagcagcgtagttttacattttgaagataatcagattaaccaaaaggaactgagagagaaaaccaatatcaggcttggagtggaaaaaaagctcgaaaaataaaaccatgagaaagctgagtcattttttacctaatttcaaggccctggtgggaagtccccagcataagcatggggtgggctgggggcatcgcacagttctctttttctcagagccaaccactcgcatccagccctgtagtgacgggcttccctgagctgagctgatggccctgtgactcgaaatggaagacatggcctttcttttgatgtctgtggcatgcagtatgggagctgcattaaactgaccaaaa

SEQ ID NO: 55069 - DNA, 2683 bp, Bovine  19866880432850
  misc_feature (1)..(1): n is a, c, g, or t
natattatatgtcttttttaaagaataatcatcacatttaccattgctgatggtgttgtttaaaatagatagtattatgaaggatgccctgatattcagtatggaataatctttaaaatattggttagaagtatacatgtgaattatataggctcagtgtgtataagaaatgaataggttggggaaggataccaatcattagaaataaagtctccaaaaattactattagtatatattatgttcattaatgacaatattaacatgaataataaaccgtctattgggaaatagtcagagaattggggtataggaaatttgcttaaaaaatgatttatccactattcaaaatggccattgtgagaaagtctaccaataataaatgctagagagggtgtggagaaaaagaaactctcttatacagttggtgggaatgcagtatggaggttccttaaaaactaaaaatacaactatcatatgacctagcaatcccactattggttatacattcagggaaaactataattcaaaaagatatatgcaccccaatgttcatagcagcactatttgcaatagtcaaaacatggaagcagcctaaatgtccactgacagataaatggataaagaagctgtggtacatattatacaatggaatgttgctgctgctgctaagtcacttcagttgtgtccaactctgtgtgaccccatagatggcagcccactaggctcctccatccctgggcttctccaggcaagaacactggagtgggttgccatttccttctccaatgcagaaaagtgaaaagtgaaagtgaagtcgctcagtcatgtccaactcttagcggaccccatggattgcagcctaccaggctcctccatccatggtatttcccagacgagagtactggagtggggttccattgccttctccaaagtggaatgttattcagccatattaaaaaaaaagaatgaaacaatgcaatctgcagcaacatggatggacataaagattatcatactaaacaaagtcagacagagaaagacaaatatgatgtcatttatatgtggaatctaaaaagaaaaatagatacaaattaacttctttacaaaacagaaacaggaccacagacataaaaaacaaacttatggttaccaaaaaggaaagtaggtgtacatttcgctgtacacataaaactaacacaacattctaaatcaactattacttcaataaaaaaaataaaaattaaaaaattttaaactatatacctctaaaatataaggaaaaggtaaaataaagatagcagccaatgtccccttttctaattattcatattatttttatgacacctaactacctagtatttaatatttttccttcataaagtttttttttttctttataaattgtatcagaaatgcagccatgtaactctgactatccctgaggaatgctctagcaaaaaataagaacatattactgtgactatacagtattaaatgttgcaatttgatttcatcaaattgaagttgtacttgaaattgtaattgaaattacagttatgattatgtaactgtaaaataaacttacaaaacagacttgctttaacaatttgaaaataacttttatatacataatataggttattatggattcttgaaaaactaaaatggttgaagaaggaatcactattttgaagtaaaaaatcatattgacaacctgaaaatataaatatcaaccaaaatttgactaaattggatcaaactgtgattactggaattgaaagcattttattctattagaaatttacatacaatattctgttttacagggcttcccttgtggctcagctggtaaatattccacctgcaatacaggagacctgggttcgatccctgggttgggaagatctcctggagaagggataggctacccactccagtattctgacctggagaagtccatggactgcatagtccatggggtcacaaagagtcagacacaactgtagtgacttgcactttcacttttctgttctacaagtagattcaaaaaatagttaaagcatgtgtatgagtaggcaattaccttaatttttctaaattatagtaaaaatggcttatcctgtttacttttataattattagagagaaatgtaattttgaactctggtgacaacaatctatcatcttgtatcttctagtctggtacccagataatgatttttgtatttttctcttatttttggtgcattttcagggtaaaaagttgaattaataatattctgtttttgttctataatctaaaattaaaacaatttaataagacaatttgataggtgtcaagttccaatttatttacctgaacggtctttattcacccagttttctcataaagaaatgcaaaaacaaaatccccaagtagtgttttataaagagtaattaatttattactttcttctataaaatttattagacagtcttattcgccatcctgtgattttttgctaatgctaacaccactatttaagaattgttgagtagaaagcagataattagttcccatttcatctattaaaaaggacttgaatttaacttctaagttatcacattactgtcacatttacttttaattaagcattttatgctaattctgatttcatagcttgttgttattagcatacaaat

SEQ ID NO: 55070 - DNA, 1067 bp, Bovine  19866880810344
  misc_feature (1)..(1): n is a, c, g, or t
ntttgagaaaatgtgagaatagaaataggaaaagatgccagtatgaataactgcatgagatgggcagtgtatgaacagtggaatataattagtttgaattttgaagtgagtcagatattcatgtgggaatgataaagtcttataaaaatttaaaaaatcataactgacaagtgaaatatttataatgcagtattgtaatatgtaaaattaaatacatgaatagaatatgattcctgggtagagatgttgatcttttttaaaataaacacaatagaagtgtttagattatgtaatttccctatttttttgatactaaagtaaatactgttctaacaaatcagtgaattaaaaaaataagtaaggcagaaacaggtcaataatcatacatttagaaatgaaacttaagtgtattatgtttccctgagttcttagaaaatttctaaactatttcagaaggaactaaaagtggattatgtaattttctaacatgaggtgaagcgatgatcagccaacactttctctaggcttctaggagtcaccattgcaattagtttgtcccagtgccctgaaatctttctcaagatgctactactgtgtccaaatatgtgcactcaaaggaaaaaagtcttgcttctccagacttacttttaactttgttgataagtcattttcagaacccatacctagtatactcctttgactaccagcagtgtgtaccagtacagaggaggttctagctcttagtaggaaggtagggacatctctgcaatgcctgagaattcacagggctctgcagagccaacacttttaggaacattcttctctatgacctgagtgcatatttttttttaattttattttatttttaaactttacataattgtattagtttagccaaatatcaaaatgaatctgccacaggtatacatgtgttccccatcctgaaccctcctccctcctccctccccataccatccttctgggtcgtcccagtgcactagccccaagcatccagtatcgtgtatcgaacctggactggcaactcgtttcttacatgatattttaca

SEQ ID NO: 55071 - DNA, 1360 bp, Bovine  19866881182056
  misc_feature (1)..(1): n is a, c, g, or t
nttgttggcaagcggtctctgcttttaggtttcttctttttaggtctctgctgtctaggtttgtcttagcttttttccaggagtaagagtcttttaattttgtgcctgcagtcaccatctacagtgattttggaacccaaaagaataaaactgtcactttttctccatctatttgccataaagtgatgggattggatgccatgatcttagttttttgaaccagctttttcactctcctctttcactttcctcaagaggctctttagttcctcttcactttctgccattagagtgatgtcatctagatatctgaggttgttgatatttctcccagcaatcttgatttccagtttgtgattcatccagcctggcatttcgcatgatatactctgcttataagttaaacaatagaaataacaccatccaataattacatgataagcaagtaggatatgtctgagtgtacagaaaactttaaacagtatttgatagaaatgtacaaatcagtaaaatcagtagttttaaaatatacaatggaaatgaactttcctgggatattaataggatgaagattgtagaaaacattctcacactttatattttttaaaatcttaaaatgtgcacatggtaacaaagtaaagctgggaagtacatatataaatatccaatataacaatgctttttaagtgttactgtaaaaagacattgggtcaaagctgttgaaaatgtaaaattaaaaaatatagatataaataaaacttctatttgaataattaccttgacattcttaattaatatgaaatatgtattggcaggataaattgtatatcctttatgttgctaataagaaataacatatgttataatcatattctcattatttgtgtccagcaaaattctttctctaagcttttctaatgtagagctcttatcattctgaccttcagttttgtttttggtcagtcatgatggtttatgcactcttacagcattttagttattcataccctcctaagaatgatcacacagggatgagatggagattatgatcatttcagtccttttcaggagagcatagttcacgaccaaacaaatggttaggtcaggtcatggccatggccttcctatctgcctcaggaacacttcaggttactttcatttcaggcagttacttattcatttattcattacttcattcaaaatttatccaatccctactggtgacagtgcagaataatataaagtgattattctttagaattcaggcaaacttgactaaactcttgcctctggtgccaactggctatctggttttgtaaaagccacagaaatgttcttatctttgtttcccattctatag

SEQ ID NO: 55072 - DNA, 1044 bp, Bovine  19866881410739
  misc_feature (1)..(1): n is a, c, g, or t
nataatatcctgtatgtagcaggtggttaaggagcaaatgaattactgacagatttctaattataatacacttttagtctttcatgataaacaacagatgtgtgtttatgaaaatacattattgtagaatcaggtcaatggagtttaaatgaaaaagccttaatttatctgtactcccatgtgaattcaaggggctggcctatttaaaagagccacgatttaatgtaacatgagttcaaaggagatttatttaaatagaccaatgaatacctttttcactaattgtccagatagaaggaagataatttcagagtgcaaacagacatgggagaaagtaacaaatcacaacaaaacagagaagatacaaaaaagggtattataaaatgatgaaaagctaaatcaaaccaatctagttcctaaatattgatagtatattgaagcctttcactaattttctttctaggatttatttagtatgttaaatatattttgtatcatcaattatatgaatttcaatcttttgataaagaaggaaaatagcatttgagtgcaaatcaagtacctgaaataatttgaacattgaagtatttcttgtatgtaagtttgaaaaattaaaagggtgaatttggagttcagagagtggtagcagatccattttaccattaagtagctgtgaaacacagcagtttcaaaaactatctacatatactttcaaacccaataatgagccatggaaaggaagcaatatttaaaatcatcacatgccttatttctttcttctatattctttatattattatatgtgtgtgtgtatatatatatacaaaacacacacacatatcattgtcatcatcattcagttgctctgtcgtgtctgactctttacaaccccatggtctgtagcccaccaggctcctctgtccatgagattttccagacaagcatactggtgtgggctgccatttccttctccaggatatatacataaaatatgtgtatataatatgtatatgtaatatatgcatataatatgtataatatatg

SEQ ID NO: 55073 - DNA, 2138 bp, Bovine  19866880223372
  misc_feature (1)..(1): n is a, c, g, or t
nacctttgttggcaagtatgtctctgcttttgaattgctatctaggttggtctaacttttcttccaggagtaagcgtcttttaatttcatggctgcagttaccatctgcagtgattttggagcccaaagaaataaagtctgacactgtttccactgtttccccatctatttcccatgaagtgatgggaccagatgccatgatcttcgttttctgaatgttgagctttaagccaactttttcactctcctctttcactttcatcaagaggcttcttagttcctcttcactttctgccataagggtggtgtcatctgcatatctgaggtgattgatatttctcccggcaatcttgattccagctcgtgcttcttccagcccagcgtttctcatgatgtactctgcatataagttaaataagcagggtgacaatatacagccttgatgggatagactaaaatggtatagacataaaagggagaaaaaagtcaaaagagagggtagaaaatgaattcaagaataaggccaacacccacattctataatgatagtttactttctaagggtgaagagtttttttctctaagcgttcttgctacatatgaaaataagaccaggtttttttctgcagttcatgtaggtcatatgatgatacagaagaatgtcaatagttcatggtacaagatgaggcagccattaagcctggaagtgttttttaaagagaatgcagtgtgggatggtgaatgatgtcctggggaaatagtatcagtttttacatagggcagcctctcaggctagatacatagcgtcatgcatcaaagcggtttagtaacagtgactgcctgtgcactccaggtgcccaactcctggcttagctggcttggtgtaaatatagatttcacaatactgggaagaatgacataactaatgatctttcaagaaattatccctatcacatgtcaacaaattgaagactatcctctccaacagctacaggatgggcagctgctctcagctgcttattaaatgcagaccccataaactttggcaagaagttgagcagaggaagtgttggcctcctcccgggaaaactgagatgcccgacaatgagtcaggcctcggctcttgcttgggggagggtgtgcatgtgtctgtctgtgttccatagtcctctgtagaaaattagtttgaatccactagaaaatgcaaactttaatgaaagatcaaggccctaacatacataaaccttattaaatggacacaatagttttagtcttgaaaatattcagagctagcaaactctgttaatcaaataatcaatcaaataatctcataaagtattccaaacttgaggctgaacaatgccgtttcccaagaattgttagtgaagtgaattatttatttaaagagattattgtttgtaaaccacttaggttaagaattgtctgcgaaaactataacttgaatttttgaatagttggttctgctttcaagcaatgcatagctataacgcatagtcatttgggccacagacaatctgagatactatgtctcatcaactgcacagaggaggatgcatgtgtttacactatttacactctttataccaggcaattacatgtccatctttcctgggactgcataagataatggataagtaagtttggaagtgtatttttcagtgctagattgtattgttctaaaattttaataacagtgatacacttagtagtaaaaatccaaacaatactaaaaaatgtagaaaaagcctctcccttatttgctttgcttttgcaactctccaagggtaatcacttttcaaagattctaattttgattttcctggttgtgacctcaatgctctcaataacatgttcaaagctctatttcttgacctgtttattctcaacagtgtctcttggctccccctacttaaaaaaacaatagaaaattcaaattaattacatcagattttactcaaccaaagctttatttatattatatataattatagtagctctctgttagctcttttagcttaccttatgatgtaaaaatatgcccaaactgaaacatatactttaccatatgtaaaatagataactagtgggaagttgttacataacagggagcccacccc

SEQ ID NO: 55074 - DNA, 1597 bp, Bovine  19866880357227
  misc_feature (1)..(1): n is a, c, g, or t
ncagtcatacagcatggaatctataacgcatgtcagagtctataatgcacttttgattataaaaattaaaggtcatattttatatctcaggataagaggtaaaactgacttcggcaaaaataaccaattgaagacaagggctccatggctgggtggctgagcctggcaagatccgtattgtacttgagaggaaggattgagatgaataacaatgcagattattctcagctcaaaggagaaggtaagtcagggatacagattggaaagaccagggtaacaactgcaagaacagaaaaatgtcatcatttcaaaaccatcaagaaagcaaaaattgcctgtgcaggaaaaatataaataaaaagagaagcaataggaaggtatggaaaaaagaagctataaaataagatggctgaagtaagtccaagttacatcagtaatcacaaaaaagcaaaccgattaacttacttattaaaagatagataccatcaggttaaaaaatttttaaatccatccatatgctgttacaagcgacagaactgaaataaaattatgcagaaaattaagggatagaaaaaatacacatatcaggcatatgtaaacctcaataatgatggtgaagcaatattaatcacagatacaatagaatttaggcaaatggcatttgggggtaatgggaattcactatcctaaaataattgtctgcaattatgagctggatgttcttgaatagcatagccctggagtatcaaaaccaatattgtatcaatatgcataaggcaaaagcgaacagaatgataaaaaattgcaaagctataaccataatgtaagattttaattcacttctatataaacagataagaaaattagtagacagagaatccaaacactatcccccttcataatctgataaataaatataccaccttggaatcattgttggggcagttctctgaaaactctggtggacagccaggctggcacttctttctgatggagatggctttcttggtaacagaagacaaaaatcactgtccttcaaaacctaagaagtaatggcactgacatgaagtaactagaaacctgtctgggtggcaggctaagtgtcatgttctgggttagtgctctgagcctcaggattcccatctggaaaatgggcatgggaaccgtgtgtggtctgctaactgggagtacacactggcaagaggaggggaggaaaggaataggctttgagcccattaagctccatgcatatgcctgtgtcctgatgctgtgagatgttcttgtggattcagaccagaatgctactgtgttcacagaaggtacgagacaaatcatggctggattagttagacagggagcagaataaatcagccataccaagagtttgaaattggtcttttgggaggaaagcctggtttgaacagggagctattattgtcctggaaatgagggaattggggagtgtccaggtcatcagagcccagctaattaaggctggacttagtcaccctaacaggaagtctgggagcctgatagctggaggccagcggacttgatgctaccatcccctgaggtcctgccaggccacagaggcttg

SEQ ID NO: 55075 - DNA, 1032 bp, Bovine  19866880375565
  misc_feature (1)..(1): n is a, c, g, or t
nttttaagatcgtttgatgtttgaggattttaatttttgcatttgaggaacaaggacaatggtggtattatgatggctctttaaaaacacttcaagcagattccggccatctctgggaggcaaactttgaacatctctgcagtccccagggagaacaatcttctgtaactttgaagccaaataggatttctgaaaaggaagttacagtccattgaaaactctcagtggagtgtgaagagcagagggttccctgtggtggagctgcagctgggcctgcccgggctagacgtgcccttctcagctggagggagaccgcacagacagcacggtgggcaggctggagacgggatgagtcctggatctgaccatgtgctccgagaccagcttagaagatgaaatatcctttcctcaaccttgttgtgaatgtggccagctcaaatgaattaaggtaactaagacagagaagacagaataaaaacaaacagagattgccttatctgttcctcggcagagatactctggaatggggcactcagtggtcaagaatccacccgccaaagcagaagacgcgtgttcgatcccttggtcaggaagatcccctggaaaaggaaatggcaacccaatccagtattctggcctgggaaatcccatggacagaggagtctagctggctacaggccatggtgttgcaaaagagtcaaatacgatttagcttaaacaaaaacaatacattgggatatatcagaaacaaagaactgagatttctgatggttgggtgaacgtctacgggggaaggtagacgtttgcccaatcttcctgataagagctcctcatgccaccctttcctgctcggccacatggaaggaaatgcaggggtgctgagagatttcgctgccttcctggcttcctgccactctcatgggatcttctaccacccacaccctcgtctgcctgttcaggggctggtgctctggaccattcccggagtaccctggggtctgccctgcctcaccgcaaatattccctttcctc

SEQ ID NO: 55076 - DNA, 926 bp, Bovine  19866880423445
  misc_feature (1)..(1): n is a, c, g, or t
ncatgcccagcgggacacagggcctgtcactaagagcccgtccaccttgcctccccgcccgcaggccagcactacttacacccacacttctgccacgctcatcccttcatagtggtacttgagggtggggacccccatgtcatccttgtagaggatggagatggggctcagtttggtgggcacacagcaggccttgcccaccttcatggggaacttgagatgcaccagggtcttcacaatggcatgtttcgttggggtcacatcgtcggccagggggaagaagcagccacctttacattcaaaggcatcatactccttgggcgcaatgatccagctgtcccagccgatgtcctcgaagttcacccgcagggaggtcttctgacagtggttgttggccccagtactcctcttccgtctgaccaaagacgattccgtgggcgtgtggcttcgcacatcctcctcctcctcgtctttgttctcacctgcctccaccacggtgttcttggacaacttcctgagcacactctcctgctcgtggccgatcatctctctgagctccagcctggtctccttagtcccattgctgcggtcattggagaagacgacaaagaagggcaggtttttggatcccggggggacactgatatccagcttgtcacagcccttcctgtgactctccaccgtcacttccagtttatttttgctcttggtggagtctgcccggatccaccgcttcacggcactggacacctcaaaggtctcccagccctcgtcccggatgtcctgagacaccaggaaggtcttggttcccgcaggagcgtcccagacctcagctccatccagaacgtcataaatgaccatgtttcctttcagctcgtgaggggagtccatgtgactctgacaggagaggtagagtctgagctcgg

SEQ ID NO: 55077 - DNA, 1407 bp, Bovine  19866880442349
  misc_feature (1)..(1): n is a, c, g, or t
nggaattttttaacctaataaaaggcatctacagaaattctgatgaaaacattatacttaataactgaatacttttcctcctaagattagaaacaagataaggatgttcattcttacaacttcttttcaacactgcattggagactctagccaatgcaataaggaaagaaataaaaggtatccagaaaagaaactcaaaaagaagtaaacctgcttttattcacagatgacatactatacatagacatttctaaggaatccacaccaaagaaaatctattgaaactaataaatgatttagcaaagttacaagaaacaagatctatataaagcactaggggtagaaaacctgcttcatttccgtgttttcccacccttgatttaagaaaccacttttctatgctgcaatgaatggttccatgtctatctcttaaaaaaaaaaaaaaggaataatttgaattttagaaattcaagttttccaaaattgccatctgaaaaataaatacttccccattctcatgtgtgcagagcctctgcagagataagaacaattttcaaaatcattgctaacaactggtccgtggcatgattcaaggcaggtggtgacttaaacaacatctttcccccaccttcaagtataggcttcataaggatcccaacatccctttccaagtcttaccactctgtatatagtgttcgctggtagcaggacatccccaaaagttgtgccttcaggtgctctatccacaatatttggaattaatggagacatcagttcttcaaaaaatggaggctttggaccactgctcaaattggctacagtatcctagaacagagagtatttgcttaaggggcgtacaatacagaatggagacctttttccctgaccactgctactgctaagtcgcttcagtcgtatctgcctcttagcgaccccatggactgcagcctaccaggctcctccatccatgggattttccaggcaagagtactggagtggggtgccattgccttctccacaccctccccaaaatgtcttcactggaacacacacacacacacatacattcactttcactttttctctctcttcccaagagctaacaaatgtaacaaaatatgaggggaactttgctgaaattggagcctagatgtccataattttaacttttgtgacagaagaacatttcggtcacaggaaacactttcactcccctcgtcagtataatctgagtgtaagctaggaatcacgctacgtgagtttagattctgggacaaccattctttacgtgtatgactctcaataggaacacatggtcagcctctgtgacatgacattgtaattattcttttaaatgtttaaaaagtgttaagtctctcttaaccaaagtcactaccaagtattttc

SEQ ID NO: 55078 - DNA, 2553 bp, Bovine  19866880451403
  misc_feature (1)..(1): n is a, c, g, or t
naccctgaggcctgttccttgtactgacttttcctggcttgagagatccaagctgagaacaagccatcattgtattccaggctgctgaaaaggaagggtgggtaccagaattggcaggccccggttgctgggatcagctgtcatttgtctgtttcttggttgtttcccaacttctttctaactcagggtcccttcagagaggataggtcagcactgggtcaggcttagaacagacacagctcctctcagaattgttatgctctaattttccatgtgatttttctcttacaaaacaatccatcccacctgaggacagaaaagaaaaaaaaaaaccaaaacagaccacaatattaaaagtttattgttggagtgataattttactgctcacctctggattaaccttggtctaacacatttccaacttcattgtattcactctgtattgtcagcgcttaaagtattttctgtgccacgaagcgttaattaaatgagcggttgcataaaagacagaagaggcagagtggtgagtttattccaactttaaatgtagttgaaagcctgttctttgtgtgacctgccggggagagcagcaacagccaccctggagtgtgatagcagtgtctccttgctgagcaagatcccagcacagggactgcttcggtctgttaccccatctgaagctcaaaggaacccccgaaagagaggttaattggtctttgttggagaggcggactctaagtcacatggaattatacccagagccggccccacggttctccgtccctctgcactccctgagctcttcactggggctcagggttccctgcttttctgcttggatttggagctgacaatgagcctccttttggacagaaacacagccaccctgacacttcctgtgtgggctgattttccacttggcagcagcactggcccccagagcccacagtgcccagggcacctattgtttgaactcaggtggcttctgtgtgactggaagccccacgttctcacccctctgggctgctcagcccgctccctggtaaaggctgacctggaatgacaggcagtttctacagttagctttgagagggtgggatgtgctctatcaaagaaggaaggtgggaggccgttggatcagtgtttgcctggatcctttataaccacctcgaaacggtttcctgccactaaggcagtcccacctttgtcatccccccaccacagggcacccactcacccctgccagcagtcacaatgtgtgcccatctaggagagtctgttacctctaatgatattactctgctcaaagcctggcctggctcccctccatgtaaccagaaagctccaaaccggctgggtaggccaactgtgaagccttctccactggcacagccttctgcttcctggggaaggaaactggccgacagcagccctcacatctaggtctggaaatggggtgctggcaaaccaagtctgctctgaggtcgccaggtcagcctccaggacaaacaggccctgcttacccggggcccaggcaccgagaggggggcaaagctgcaagggccccaggccaggaacagctgcccacggggccttcagctcaggaggccatcgctcaagccaaagaagcgccatgaaccaaggccaggcttggactctcagggtgactggaatagccagtagtttcccaggcttggagacagtcccagtgtgcggagagccctgagcccacaggggccgctcaggctgaagggtctccaatagtttcccaggcctggagacagtcccagtgtgcggagagccctgagcccacaggggccgctcaggctgaagggtctccatggagggcgtacctgctgagcagggtgcagtgcagtaccctgggcccagcctcccctctcgggctctctcgtggagctgagcacgctgctggcactcagcagttcataaatcaccgtcctgcaaggccttcagctgggataactgcacagctggaggaattttcttttttccccccaaacttaacacatcataaaacacagccgtttagggaatgagaacaaccaggaggtgtttttgcctcagaggctctgttctaggaaagcttgaaaggtgaggtttggagcctgatacatctccactcccagtcagccttaccagagcatgagaacggccatttccacgggtccccaggcaccttctgaactggcaggctggctgcttggccagggccagccagacctggggcagaaagaggccagggctctctctccagggccatcttgggttcgtgacaggtgggtttactgtaagcgagtataaattcgtcccaaaatttggtcccgagtctcctcatcccattcagagtctgtcggcacatgaccctaggttctgccagccaaagacaaggcctagtccagaggagagctcggaggggcctggctacagtctggttaaggagggagtctccgccaggccacagcttctatttcgtatcagatcaagattctccaacatgggtattaaagactttactttcattcattaattca

SEQ ID NO: 55079 - DNA, 1466 bp, Bovine  19866880459960
  misc_feature (1)..(1): n is a, c, g, or t
ntgatggtcactgagccagaggaagaggctagttaagcagcatctggcaggagcatttccaggcaaaggaaggacagtctgggcaccaacctggatgatccctaaggcactggaggtggggccctgcatggcccccagaatgcaagcgtgatactggggtcttgagaggaccatggagctgacacactcactgtccggcagagacttcattcacacatgcccaccactctctgtgcccctccattccacctcccctcagggaaagaagggcctggagggaggaatgggcagggtgtggggctaggggaccaccaggcccaggtctcacacataagaaaggccacatattagacatctgactttatttccaagtgaaattttgatgcaggcacagaaacaccctacagggactaaaagatgtctgtcatccatccttatgattgagcaacactgtcataccacgaattagtattttctgtaactccagtaattaaacaataatgttttattgtgttttggtattaaagctgttcattggttccatgtaaacatttaacacaagccattaaaaaaataatctgggaacttcaaccaatcggaacgacctaggtctctccaggccttctttgggatctgctctggctggtgatcagaagggccgtggagtggaatcttcgccacttccagaatcttcctactcgacccccttccatgtgtgactctgagagtcagaggtcctctcttgcggtcagtggggatgaagtctggtcccaaggcccaagcccaggaccgggactggatgcacattactcaaaacagtcagtgcatgcagccagagtcaaatgtggccaataaagacctgagttcatcaatggcgggagccctcacccaggaagactggatgttgtcacctgagtactggagtaaaaacaaggatattgcaaataccaaagcaagaatgcatttatttcaacaaattcaaatccaggtctcatcatccatggagtccttgtgggacgggagcccatgggtgtgtgatggtggtgagctggtcatgctaagtaactgcagagacacaggccatgggctgcccatccctcagggtaaactcagtgcacccccgccaaccatcttgcagtctgagtccacggcagcgagtggccctgtatgaaccactggtcacacagtctctgtgccagtgggtcaaagttcctctggccacagcgtacactgcagcctgagggcgttcgtcctgcatttgctccatcctgcagctggtttaagggatagttctgtgactcaggggtatcttaaaaagcacttggacactgaatcgacacaggcacagagcagtcagaatgtaccctagatgcgacaagtagcccagtcatcctgctgggcactggtcggacttagtccagtttgtcccccagtctccatttcccaaagtcaatgtttcagtacca

SEQ ID NO: 55080 - DNA, 1498 bp, Bovine  19866880463401
  misc_feature (1)..(1): n is a, c, g, or t
nctaatatttctgctttattgactatgccaaagcctttgactgtgtggatcacaataaactgtggaaaaccctcaaagagatgggaataccagagcacctgacctgcatcttgagaaacctatatgcaggtcaggaagcaacagttagaactggacatggaacaacagactggttccaaataggaaaaggagtatgtcaaggctgtatattgtcaccctgcttatttaacttctatgcagaatacatcatgagaaacactgggctggaagaagcacaagctggaatcaagactgccgggagaaatatcaataacctcagatatgcagatgacaccacccttatggcagagagtgaagaggaactaaaaagcctcttgatgaaggtgaaagtggagagtgaaaaagttaacttgaagctcaacattcagaaaaaataaaagatacccactagtgagaggcataaagaggtttattcttcagaggccccaccaaaagagggttgggaatatttgtcactattggccatacatagcacagtaggatacagaagagtcagtacagggttatctgcccatgataagaagtgatttcgacagaaacacatctacaactatcacaaaaatctcacaaaataaaaaaggaacttacgtgaactccccagggatggcagtgatggccaagaacccgagagtaacaatctgaacgtcaacgatatctgggtgccagggatgaggatttaacagctaggaaccaaagcatgaaaactgtgttaggaatattactctctttgctcgagaccaatgctgctcacagaatttcctttgttaatggatattcaatgtttccagttgtttgagtgtcttatcctacagtcacaggtgtttttctaagtcatgtagtattaaatattctatctagaattaatatgtgaatttcaaataccagtgtcccattaacctggaattatgttctcatcaatgaactttttggtggctttatctttatggaatcacaatgtgtaacagataaccaaggttctcctatattaccatggtgactatccttatacaagacaaacaaggaattaccatcatttgaaataacttaattatttctctttttactctaaataacactttaaatcttcagttgctaagtcttgccttacttttcttctccaagagagtatatcctttaccatgttcagattagcacagaatgtttccctctattccttctatttcttcattgcctctccttcttgaagaacttctaagtaaatgttagaaaaaaaaaaactatatttaaaaattgtttctacatcaaaaattcatggtattatgaacactggcatgaatatgaaaatccatgttccaaagggtatttaaagaatattgctttagttaataatgttgcctgagttctggaaaataacctgagatgtctttctctgtgaggaattctgtgctcatacatcttaatcttattcttccttttc

SEQ ID NO: 55081 - DNA, 1675 bp, Bovine  19866880541008
  misc_feature (1)..(1): n is a, c, g, or t
ntgtctttgtggtctgttctctacgttaacctagggacagtgattggggggaacagtaatgaatacaaatcgctccctggccacctcggaggctgtcgttagcatctcggcctcccagggctgatcgtcctcgtaccgcctgagcagctgctgtcagagcgcgggagcacgggcctgatgaagacagatgacgcctcctctgccgggccttcgcctggggtaatggtgtgcaaaaacggggccaagcatttattcagaactctgctctctgccccgagccgagtaattggaggcaggtgctaactgcaatttaaataaaatgttgagttaatcaggtcagtctgacaaggatgttacgagtcccctttcaagtttccaacagaaattttaaggcaacttggaggcctaaggtagtgtgatcatttcttaagtttctgtgcaaagataagggaattcttttttaaaagcctatttattttcacttttgtgatataaaaatgagatgattagaagaccagcaaatatatctgtctgatccatcatgtaattagtgtgaagtactcagcatggggctgtcacgctcaccttttgagggagcaccccaagcgaacatagtcaaatccaatagacccagatgcctggccttggacagcaaaatcagtgcccatgggttcccaaacttagaagccagaatgccacccttccccccaccacagtgtctggacaagagcaagaggaacgatataaagtccagacctgtcctgtccgcacaacttaggctcagagggttaaaaaaaataaatgtccgaagtcccaagactcctggcgtacaggggccctgctggggtgcaagccagaggcattgtctcatgcagccactgtggcctctgcccaggtcactctcagctcccgacctgcacaacccacccagtggccaagccctgatcatgctgctctagtacgaccacaagccgccacaggctcgctttctccacgctttggtctcaggccctccaggaatccgatcccccactcagctcctcctgtggctgttgcccgtgagtgaggctgcccatcttgaagctaactggtaccttccaagcccatccctcctttcatcattccaaacatgattaaaaattccattttcatttctggaacctacctggtagtccagaaatttgactgtgtttcctgagaagtccagagttaggtcaagaggctgccctggacctgaaaagacttgttagggaggccgtggctgggagctgagtgaggagggacatgagacagtcccagccttatctgggtggtggccggttcctaaggttctacagtaagtggtgtgactccttgtgaggcagtgtgggctggaggaaaggcatggcctattcagtccagagaagctgggggactgagtcccagatccacctgttactattggtgtcactttggagagacatctactctcttcaagctgtttctctgcagacctgagtcagcttcagcagaagttgaatttattggaagagatcaggccagggccaaagaagcctggtgcatgggcttggagaacaggtaggaatcaaggcaggtggcgctgccaaggtcagctacatgaccttggcatgtgggttgggagggtgtgggcccaggccactgctgccgccacgcg

SEQ ID NO: 55082 - DNA, 1736 bp, Bovine  19866880581207
  misc_feature (1)..(1): n is a, c, g, or t
natgtcaattttaagacaggttctcaggacccatctgtctccagagtgtgaataggaggcatttgctgagccagagctggtcctgggaactcagtgagaagaatcagaaggactgggtttgattttcagccccacctgcttctaacacacaaccttacacaatgtattagcctctttgactggttttcctcttcagcagattgaggaagacaggacttgcagagttcgtgtggagattaaaggcagtgtggccccaggctgtgccagcacagagtgggccatcagtcactgagcaccatggtccccttctgggcacctgcttggcacccacagcaggcctcagtcccaccacaggaccccacagccaggctttcctacctggtctaaatagcaactcaatcactttgattttgcagcaggaaaaaaatctctgcctagcttttagcatccttgtggcatttgtcttgtaattaagtatattttcaaaaataagaaagaagccagtaacaaaaggtgttttaatccatttatgcgacaatctgcaaattgcctgcagatttatgtgacaatctgcaaaaggaaaaatgacagggacaaaaatgtaaaccaatagttgctgaggctgggtaggggtcagggattcttcaggatgttgggattgttctatatcccccgtgtgatgatggttttaagaacctatctacatacatttatgtacgtagaactgtaagaattatacacccaaaagagttaattttactgtgtgcaaatcttagtatttatatgatagggaaaaaataaactcatatacaataaaaaataaaaattaaaaaaaaaatagttttgaccacaaagctacataaaccagtccacataatctgaataaaagtacttttaaatgacagaagcatgattggaaagcttgctgagatgaactgcacttcataaaaaacaaaattcatgactcaacccaactcggagggtggggactgaggaaggggtagaaatcagggcccagggagaaagaaaatctctccttcttcaagggaaccctggtcaggacaaagagcccattagaggcaggggtgtcggggagcggttgtcacagaggtgagggctgacaggcttggcctgggacagtctcaggggagccccaaaatcctggccacaggaagcatcagggaatatgacatatgatagcaggctttgcagatggcttactgaggaactggggaattgtgactatgggggaagcagacattgggggccaagaaaattctctttataatgctgaattcaagagcaaggggagtccataaaacacacaggggcctctgatttccgactgctgtgtgttcaaatgtgaaatagagcggtgttttgtgcaaggcagagaaaacaatgcattcagccagcacttctcagttcacaagtcatctctgacgatcacaggtcaatggataccttgggctctcatcttgaaagtgtgtttaaatgagatgtatcgccagattcccaagctgtgtcgtctagctccctctttaggcatgtgtccgtgtgtggcactctgttaagtaactctgctgtagttgcattatcacatgggcctttgggagggtatcacggctcatcgttcaaatgaagaagtcaagtttacaagagagaggaccttcactgtgatcgctcagctagtaaggggccttggagctgagctgctacttacacgtgcctagctc

SEQ ID NO: 55083 - DNA, 1639 bp, Bovine  19866880664724
  misc_feature (1)..(1): n is a, c, g, or t
nccagcagcagcatctttcaggagatatggcaggggtgccctgaatgtgcaagctgcaatgatgaggctgaagggcaggtctccactcagccaggagaccctgtcttgggcccataagaaatgcaccataggtcaaacccacagtgggtagaagcagaagtggggtttgaacctaagactatctggtttcaaaaatgcacttatgaaccactttggttcacagccagatggtgctctcccgggcatctgtctggcaggcatgggtacagaggctgtgctgggctggcatgttttcatcctgcccacctacaatggaccgttgatgttcatgtcacagctctaaaatattatcactggaggccatgagatttcagaaagaacttcctttccagagccacgttgctgtctataattagcacaagtttccataagcatcaagaagaggtgggaacagctgccccacgagctaggtttgttaatgtaaggcattcctggggcttctgtgcagtccaggctgtgctcttccatccctccctgcttccctggcccctgccctcagcagccactaggccctcattaaaggattagcaacatcggctgtgcaatgccttggccgtggacacaagaaatgctgggctttctgctctggcccttctgccccttatcagtaatccctgagccatgtttgtgctggagaaatcatagcagggcttgggcggaaattatggacaattggtgtcacacactaattaagcactccagggtcaagcatcacggaggggaccggacttcaatctcagtccctctgctaatgggatgttgaaaagcacagctggggcttcagactaagaaagcccactttgccaagtgagagagagaaaaaggtgatgcagcctgctgtgcctcaggaaagatgacaggtcttccttaaccaagtccagaagaggggctctcctacctggaccccatgcctgggtcacaaaggatgccactgccagagcctagccacatgctgcgaacaccacccaccgtcagcggccctctcctctcagtgcaaggagactggaggggccctgcgggatattctcacgttgatcacaacacacttatgacctaataggatacttggcggagaaggcaatggcaaccactccagtgttcttgcctggagaatcccagggatgggggagcctggtgggctgccgtctatggggttgcacagagtcggacacgactgaagcgacttagcagcagcaacagcaggatacttgggataattctgagggtctatatcgctgtcattaaaaacaaaacagattaaaattcaaggacaattctgaataatgggaactagccaaacatacaggggagaaataaaaatgtaatcctaaatggcttctcttgttggttatttcccagactctcagccccctagatcatgagcaactccatcaatatgatcttcctctgttcctatacccaagaagggcaggtgaaaggtgaaagcctggggccaagtcagttgctgagcacaaatccttgcacaaggggtgaataatacacccaggtatcagtcatatctccttttgcctcccaaactcactcagtccttcttggaccgggggccctgctcgagcct

SEQ ID NO: 55084 - DNA, 1671 bp, Bovine  19866880707645
  misc_feature (1)..(1): n is a, c, g, or t
nccctatgacccctttgtcctccacccccagcacggaagcacgctgtagggaagtgactgtcaaacctaagcgtgcatcaaaagcaactgtaaaggcctgttagagcacaacgctggggccgctcctgttcacggtttttgatgagtgagtctggatagtatctgaaaatctgcatttccaacttcaaatcttcttagtgatgatgctggtggccacatttatagcagcactgccccagggcttcagcgaacactcagaaaggactcagaaaatgtcaactgagtaaatgagttgcacacacgctgaccaactcaagtttttcagcctatcacgaggactctattgatcaggtcttacacgtataagtaatctggggtggaatttctgaataagttaaaagagacaaactacatcatgccctctccacattctggagggctcatctgagtttctatgattggagccttgctgtgtgcctggaggagtcaatatctttcccaggcacagggatgggaactggagggtctaggcctgggatctgtgactgcttcccattacaccatttggaattctttatagactggagagcttacaacagcatcatcaaaacacgtttttgtgattttccaacagccctgattcttgctaccgtgtcctgttcccatttccagcccactgccaagcttggaggacaaaagccagcaagcctcagagctctcaaatgcccacagcagtcccttctcatggagggagtctggaaaacaggatgtgaaagacccagaaaatgccagagaaggttctttagtgagccagcctgtaaccacacaagcaggaattgtgcagacaccatgcctgccagagtcacgatcagtttaaagaagacctcaatgtccagaatagccatgccagccaggcaggtccccttgcttcactcatcatatgccctcagtcccaagctggtccactttgattttgaaacggtaaacctaactggagggacatctgttatcacattcctcagtttaccttgactccaggtgctgccaaccaccctgggacttcacagagggtgtgcgggtgtggctgctgtatccatggctgcgtgtcccctgggcaccacgcagcagtcactgtgggaaccctttccctggcctgagatttagtgctgaaccctgggcaaagggcgcttcccaggtggagcagtggtaaaaacatctgcctgccaatgcagaagaaatgagagacaagttcagtccttgggtcgggaagatgccaatgcagaagaaacaagagacacaagttcaatccttgggtcgggaagatcccctggagtaggaaagggcaatcccctccagtattcttgcttggagaatccccatggacagaggagcctggggggctcaaagagggggtcgcaaagagtcagacatgactgagtgactgagaacatgagactgagcacttgggcaagggaagccctccccagggaactgtctccgttctctctccctcctccaggtaactccagatgactctaccacagaaggatgtgttgcccttgtgctccctgatttttctcccgtaatacttgggagttcactttgcctcaggatggcacctggatcacacaccagtgtgtcggaacatcgtcaggaggggagaagaaggcg

SEQ ID NO: 55085 - DNA, 2845 bp, Bovine  19866880800915
  misc_feature (1)..(1): n is a, c, g, or t
ngtctgggatcttctctaggaagccggttcaggtaggggtgacttgatggtttggaggctgggatcgccagatgacctttggactcagctcctgcacgtggtctctgcgtgtcactgggcttcgtaacaagatggaggcctcaggatgttcagactccagcaccagtttccagtggaagaggttgtattgtcgtttttttctgttctatttttttcacaggcccactagattcaggaggaggaggagataggagccctgacctgtgaaggtggcagagtcagcctgtagaagaccacgtagcatggacggtattactgcacacttctctgcaaatgcagtcggccacaaaaggaatagcagagaaattgaaatatacacactcaactgaatttttcttctctttctctctagagaatccacttcccccaacccctttatccctatctccaaaatcaggttttcagtacagtgaggtaagcaagcaccaacagtgttatgcagttgaactcaggcatggctctagaaatatgctaaaagaaaacttctttgcaagcacatatccttgtgcatattcaaagtatgacacatcagacactgtaacaaagaaagtgttccttccatctttcctacagggtagtttccagaatcagactggtttttgatctgagtctgaaaactgaaagatgaacattaggtcctaatttccatcaacaaactccttccagccaagaactcccaggttccactttgttcatttctgtaggaatttggacaagctaaaagagacactgtttttcaactcaagatctcccatcccatccaagtggaattaacgtcaggtttaaaagggagtggtggtggtggtggtaatttctttaaaggcatgtaatatgaaggaaggagcagagaacacctcagaataaacagaatgctgggtgttgaaatgcgtctttgcttattgaacgatttttaaaaattaaaaatgccactggacctatttctttaattaaaatgagaccaggagattggggatgtcaaggttagctgaaaacagggatgaactgacctcagtctaaacagaaggaaaaatagtgtaagcaccaataaaaaaagcgtttgattatttttctctaaatgtaaataatatttttggccagtagagagttgaggacaggctaaaactgctttgctgcctttagcaaataaaactcggttcaagacacagggttgacttactaccaatttaatctgttttcaaagttgtatgactttatttgagtcttccatgtcatttggaaggaagatgggacctttgggtaacatctggaaggcatgtatgtcaacaaataccaaaaataacttttaaataccaatcctctagaataagtgatggagagggagactttcttcagaaacgatggaaagagcaaactcattttattggagagcagcctaacctctaatgcatcttgtgatgctaatgtaatgtgatcaagaggtacctttctctagcttccctccacattgctccatcactgtcaacaagtgggtttgtggaagagatgaagttatctttcatttaggagagtgcctgtggtggtcgagtgggtctttggtttttctgggatttcttgagagacaacactaccatttagctcagccaatggagcacaacagaaggaaggcttgagaaggactctaggaagaaaagctgttgaagcacatggcatactttgctcttggtgcaccttattccagcagcctccataatccatccttcagattgcacttggatattcactaagatggggaactcactgccacttaaaatctcctattccattaggggtctttattgggcagctctccataatactaagcagccccgtccaagcagtcactggataaaaggaaagaaagaaaccaagctgaactccttctcacttatacccactggtgatgctgtgctcccttatagaaggagaccaagacagtaaagcagacggatgggcattgcctgtgggtcattctccacatgcgtgtttctctgctgaggcatcagagattacaggaccagcagacagggacagtcttaagcaagacaagatccagggtgctgtgagcgtgagatgtgaaatctggaggcagttagccagtaccttgctcactgtagtacaggagaaccatgtgagccctcaggacatggaaaggtttccccacacactgatgctttgctgaagaacaatgaagtgaaggaaattagggatgacaactaggtttttttcaatgcttgagaatgctttccctgttcagatcttgcaggaccttggaggactctgtgtggatacagctcttgctctgtagacatggaagccatggcagagtcttggctgaagagcaacaaaacccagaacatggtgagattactctgagagttgttgcatattcaaaacacactttcagcacaaaaccatggaatgtcattgctttattcattcatttaattggtcattcattcaacaaatatttttggaagacctaccacactttgggtcttaattgtcattagggttggggacagggcagggaacaaatcaggtgtgtatttatcatcttgaggctcagtatctatctgggggatgcagcagtaaacaaaaggcgacgtgttttataaagatgcacagagcaagctgcggggaaaggagggagcgtgggaaaatctctttagagaggacattcagctgggaatcatgggagaagagcatctcagcaagtcccttcagaggaatgggaagtgccaaaagtcttgtggcagcaacatgctgggctgcaaatgactagaag

SEQ ID NO: 55086 - DNA, 1321 bp, Bovine  19866880846515
  misc_feature (1)..(1): n is a, c, g, or t
ntgcctaaaaagagtgccttaacctaaaaagaactgcctaaaaaaggttaacatttaaccaagaccttcttatatgaatacattttttaaagcatcaggaagataaacggtaataatatagtctttggtctagaattagttaactgaacagaggggaatctgactcaatatcagtctctttataccttcattggatgaatcaaatttaaactttttaaagatgtagcctcagatctcttaggcaaccctagttcaaaggaaatacttcatatcactgaacattgccttaaaaaaccataaaaaagatttaggggtacctgtctgtttttattatccatattctcttgacccttcaataattagtataactaatacctgtgatatttatgctatcttttttatgacatgccaatgactgatactttagttgcaaataaatgtcctaaaattgccattcataaatttatggaaaataatttagatatgttacttaaataacatggtattatggactaagcatgtgtttgggcattaggagacttcagtttcagatttggctcctacacttgctctctgataaaacaaacttcattgctctgaacttgaggtaggtcatcagtaatgtcagagcataacttatgtttacctcaaacagtgagaattcaatgaaattgtgtaggtaaaagagctttacaaattgtaacatgctatacaatgtatgttacaatgtaatattcatctttatatcattattgttcttatgagaatttatgtggcatgacttacctttgtttggaccattccatgacgctgttctctcatttggctcactatattcatgatgtcgaactgtaacaggatgacagtaattttgtattatccagagagggggaaaacacaaaacccacagatgcctaaggagtatgccatacttctttccagtaaaagatatctcaagatttaactggcaagttctcgttttcagtcataagagcatgtactatgtttaacctagtctagtggataaggaagacttgttcaaatgggtttccaggaaaaagcaggaagcaatcatttataataagaaatgttctccaaaagaaataacaacaaatttgcccctgtgtatacttttctgttctccaaagggagaacttaaagcagcattgtgattctgcaagagtctgaagcatagaaaaccttttctggccacaacagtaacacagctgtttctcatataaagagccctctcaactcaaatggagaccctgagcagcagctggcccaaccccagattctgcacctgtgcgggagaacagca

SEQ ID NO: 55087 - DNA, 1568 bp, Bovine  19866880895265
  misc_feature (1)..(1): n is a, c, g, or t
nttgttctcaatcttagggtaggaaaagtatcaatgaatatggaagatattggtaatgatgataaataaggttgtttttaaaaaaaaaagatggtaaaattatagttgaaaggacaaaggaaccctttgaagaaatcacagtcaccaagctgagcataaaaacaaaaataataatgaggcttacttgaaacaaattgattttgtggaagaccacgaaattcataacaatactcaaaagaggaaagttaacataaatgtatgcataaaagaatccatgcattagaatttgtttaatttttattgctttttaataagtagaaagtgttttttcctgtgatgttttcaaagtacagagttatatttctcattgcctctgtagataagaaagaataaacacagggaactataaataaactaaaataattccccaaacatgggttctgcattatgtaacaagcagatggaggaaaaatgaagcaattgattgctttcgtggtcctacacagcaagcaattaagcagagaatcccacagagtgctccaagatgattaattagccaaatgctgcatgcaccccatctctcatctctgagtgtatggaaccttgagatggccctactaattataatccaatattgataaggcatgcataagcttccaattaatatttatagaccaggtcaatttatcataatgacgggacaatagtgtaagtattgccaaccataagaaactttcagaaatacatcatttctgggaatgacaccaagtttcagaaaattaaatctttggatttagattttaaaaggcaggggcttaagtctggatataacaaatagaacttcattatcaaaaggaactcagccagtgatttggtttagatcactgtagactgtacaaacttgtccttggtcagaatctgtgacctcttctctcctgaaatgctgtgcatacatggaggttagggtctcctgagattattagtactcaatagaatttgataaaatttgatagagtattaatataaaaataaaaccttggaaataatataagcaaaggtaaaaatttcttttaaatccagggaattcataattacatgaccacttttatatattaatcattgtcttaaaaagactactagtggggtatcctaggctatgttgtgattataagtaatctcaaaatcctaacaatccgatgcatgtctcatttctctgtaattgttcctttcctgctaagtaattaacacaacacacttagtctggtgtatcatcaaatcataatttgaaatgatcctgttaaattagaaaatggtctgaagatgaagtaaagcacgtacacggagaacctttaaccagtggacagggccatttagtctcctttacttattactttcagaacatgtttcacggctagtagaagaactagaaatctctctcctcccctaagtgtaaatggtcacctcatggtaagcacacttgaccgtcttgcagaatgtggtgtgtatgccgtatatctcaacttcttcatgttaaaatgaatggagtgaggttaagtcaacctcacact

SEQ ID NO: 55088 - DNA, 904 bp, Bovine  19866881398740
  misc_feature (1)..(1): n is a, c, g, or t
ntttcaaagagcactgaagccattatatacatttctaatgttccctctgaggccacagatacatctctttaactgttaaatgaagaatatctgatatgaaatttttgaggaccaaagtgactctgaatagtgaaatgaagttaaacttggtttctggagttgccatcttggtcctttacaaaaaccaaagacttctccctctgagagaaaaagccaacctcattgtgtctataaacatagcatatctggggctacacagaatccactggttttataaacaaattcctgctgaagaatccaaactagcctgatattataggtgtagaaaccaaggtgctaccggttccagtgatcttgaagcttggtcctctggatttctgtcttttcaccaagccaggctatggtgattgcacaagggaagtatttcttcaaaggagaatcaaacaacattccccaggttccgtgtcgacagccccggactggagaggaaagcagggctcctcacagaagttcagtttacagcagagctctcccttggccccaagacagctttgatcaccgtgaagtttccacaaacacagaatgaatgaggaagaagatggttatgcttttaacctgatcgacactgatgagaaatgaggcatatacagtcttttctgtagtgccctgcttcaaacagctgtcacccttccctttaatgtatgggcttaaaatagttgtacattttgttttctttttaacacttctcatcacataattaaggtatgatagtgaaaggcacttatgacttactgatatggttcagtagagtacaaggccagaaagtaaccagcctaccttaaaagcccaactcccgcttctaattttcgaatgtgggcttgggcaaatacttaaccactctgca

SEQ ID NO: 55089 - DNA, 1174 bp, Bovine  19866881607081
  misc_feature (1)..(1): n is a, c, g, or t
nctctttacaaaagaatttaggtgtgcagatcttttattatgcgtgtgagttgcttcttgtagcacaggtgtggaacataatcagatgtggattagaaacccagaggattgccattgttattttatggtaagaatgtagttttcagaaatactttgaagtgccgtttggggcattttaggggaaaattttatctgccctcccgctgatgagacattgagagattcttttgtcctacatgtagtctaccattgctcttagtcatttttccagtttccatccttgtgactggtgctttatgtctttgcaaattaaatccatattttcccctgctcctcgttctcttttatactgaaataacttgtgacatttgaaagttaaattctttgatctcacattttacatctttagatcatttgacaggattctgaaatgcttttaatgagctatgtcaccttttcaggttatgataacacagtgttctcattgtatgtaaaactgacattttgtcaaatggtttaggtattaatgcatatagaatttggaaagaaagatgagactacatgatctgaacattaagaaacgcaactcagaacagtgatccttgtagttctattttagcggccagggcctaatgaggagcgagtaattagggacttgccatctccatgcatttgctcagatgtgcctgtgttactattccagccagtgtctcaacagctgatgcaaattaatgggaacagcgcatccaaaaagaatctgggagtctcacctacagaaacagttgggaaacatctgtaaggtcttatatttaggctctttcccactgtgacacttaaaaatctgattaaacatactaccgaggagggttttggtaactttgaaaagtgtgagggcttagttttaggtagaaaatagctgtgtatataatttgggggaaaaaaaacaagtatttttactgaattcattatcgtataaatatgaaattataaatgtttgaatacttttggtttttgtgttatggcattgactctgcattgtcttttaatttgctcataaaagaataaaaattaaggaacctctctgagccttctgtttaggcataacaactggatagtgattccttttctatgtttaaggaattaagttcctgccaacagggaccaatgttatttt

SEQ ID NO: 55090 - DNA, 1103 bp, Bovine  19866881907357
  misc_feature (1)..(1): n is a, c, g, or t
ntttatttacattcacagtgaatttacgcactgacttcctctcttggaggggaaggcatgacctggaactcagaggaagagctaagtaggaggaaagcgtgtgctctgtgccgaggttgacatttctggcagccatcccacgacagtgcaggctgtggggagatggatggacagagccatggcccagcccagagggaaggtgagcatctgaaaacccaggtcagtgcaatggagcaaacagtcccacgtgtgtcctgcagacttgcgaacaatgagagctagttgccacgtgagcctctgccctgagaggggaggggagggtggggacaggggagtcacactgggaagccacttaggccagcaccgttagttacagacaccatgccctgaaatccaaacctgatttctagaagagccttggcaaagaaggggtttaagagaccggatctgtgtgcgggcgtggggtgggggtgggggggcgcgtgggggaacggccagtgtccacgcaatctctgtgattttgctgtgtggaaacacatgcctaaaaggatggatctcctgctctgcaaaagcagaaaggttctgatttaaaattcaaacgctatgaaggcaacactttcaaaaggacagccagacagcatccatctgtgggctgtatccacccaacaggctgccatttgggcatctctgtctagctactccctggcttgaatggatgggaggtgttatcatctctgtttacagacagggaacagagtcaggaggcagaaggacttgcctgcaagggcacagctggagtgacagtgagcagagcacagcagggtgaccctgacgccccctaccttgggcatcgggaactcacaggctcccgagcagtagtaggcgtcgaaggacttgggtgagatgatccattcattccaccctatgtccgcgaagtccaccttcagatacctccgggaacagacccgtggctcatcccattgcttcttccgggctttctgcatcgtcttctcatcgaagtccagcacctgtgaggaggccatgaacacatcctggcccttcttcctgcggtccttgcggcccggccgtggcttcagcgcacg

SEQ ID NO: 55091 - DNA, 1355 bp, Bovine  19866881932020
  misc_feature (1)..(1): n is a, c, g, or t
ntaaatctgtttatctctttgactaatagaaaagatggcatagaaatttctagcaatagacaattagagtaaggtttagaaaaaaatcggtttctactaaaaagagaagaatgccatcagtatccagacatcttgagagatttgtgttacatatggcacaagtaggaataggccaagggaggtatctcctagcctataactaaacacagcaaaggaggagccctctgaaggagcaagtgaatgaagggcgttctcctacaaatccagagaacctgaaagctcagagcagcagtggccagaaaggaacaaatgtttttggaaaaaaaaaaaaaaaagactgggatagtttatacaaattctaggattattagaattctatcgactgcctgcacacagagtggccatcttttgtgtccatcctcagctttcaccggtgaagcagcatgctcatgaaagcagaagtactgtggcaaaaggatgctacaaaggggacttgctcaaagtatggacgactattaacaaatttgagaggggaaaagccaattacgtggctcagtggcccgggaactctctcttcactctacatggacatctggagctctggttccaccactgctcctacagagagaataaaaagaggatcttttcctgccatgcaggggtctcaccagtagcccctccctggtactcaagtcaggaagcccgctcatctaccaaacacactgtgacgagatctctgaacagggcttacaccagttctgacagaacctttctcaaattcaaaaatagcagacataaatctctccttgtaaatatgaagagacaaaacaatcactagatatataaagatacctagtactccacaaaaggataccattctgagaaatcacagcaaatatcttcctttctataagagaagaatactttaaaaactcttatttgtattttaaataaaatctcagcaaacattattttattatttaaaggatgatatacatatatatgtctgtttattgatataaatttgttacattattaaattacaaaggaggtaaaagagcattaaagtgagatctttcatcatatatatgtatatatacatatatatcatatataagagcttctctggtagctcagaagtaaagaatctgcctgccaatgcaggagatgtgggttcagttcctgggtggggaagattccctgcagaaggaaatgacaacccactccagtattcttgcctgaaaaatcccatggacagagaagaccggcaggctgctggaagtccatggggtcacaaagagtccgacacgactgagcacaacacagcacagcatttatccaaatgctagtaggga

SEQ ID NO: 55092 - DNA, 828 bp, Bovine  19866882110625
  misc_feature (1)..(1): n is a, c, g, or t
naacaggggcagagcgccttcacagaggtgcgtcagctcaagaagaggcttgggggtgggcaggcccaggacaggaagcacagtggccctgtaggccagcctggcccccagcagctgacccctgatatccgcagggacctaactggcagcacccgcgtctctgtgtggcccagtggagcccgcagggagcagagaagtgccttcagcaagccagccaggggtccagcagggagactgggaccagcctgtgtctttcaggccggtgaacctgcagatgccctgggagagctgctgggactcatcagcacggttgatgtcacttgctggggtcgactttccaactccaagcttttggtgggtgatttctggaacctgcaaacagggccaccacatgctcctctctgcggcactttcctgggcgcccccgcgctgtggctcaagcacgccacggtccagatccccacgcccccatcgtcgtcctccaccagctcttgggccctgctgccccctacgctcacctccctgggcctgtccacccagaactggtgcgccaactgcaacctgtccttccgcctgacgtccgacctggtcttccacatgagatcccaccacaaaaaggagcatgcggggcccagcctgcattccaagaggctgagagcagaggccctcacgtgccccatctgccacgagtgcttccgtgagcgccaccacctctcccggcacatgacttcacacagttaacgggcggtctggagcaagcgctggccgtgaggccaagatggctcacagggccttcctctgaaaaggcggtcacggttgtctgcaggg

SEQ ID NO: 55093 - DNA, 1181 bp, Bovine  19866880768774
  misc_feature (1)..(1): n is a, c, g, or t
natattaaaaagcagagatattactttgccaacaaaagcccatctagtcaaagctatggcttttccagtaattatgtatggatgtgagagttggactgtgaagaaagctgagcaccgaaggattgatgcttttgaactgtggtgttggagaaaactcttgagagtccctcagactgcaaggagatccaactggtccatcctaaaggaaatcagtcctgaatattcactggaaggactgatgttgtagctgaaactccaaaactttggccacctgatgcaaagaactgactcatttgaaaagaccctgatgctgggaaagattgaaggcatgaggagaaggggatgacagaggatgagatggctcgatagaaccactgactcaatggacatgagtttgagtaagttccaggagctggtgatggacagggaggcctggcgtgctgcagtccatggggtcgcaaagagtcagacatcactgagtgactgaactgaactgaactgatttcttgtcctgcgttttgacacctcttctcactcccttcacattttcatggagaaattgaagcagaccagggaaagggagaggtttttttcctcctctcttctttccctcccctcaaaactctactcctagttctaagaattatgctactagttaaagtgaagatgttttctttcttgttttcctatcttcattcccccttcttatttttagaactacagaagctcaggattgttttcagggacatcatgaccagaggcagacaatctcaagggcctgactcacattgttgaaaacatatatcaagataaaagatgtcacaagactaattcggcgtagtcgcagtcacgtagctcattcctttaggagcagaacctagaggaatgacagagaggatggcaattaaagtgagaatgggatggtactaaaactcagctgtcagttccctgcaaaaataggtccctaaatcacttgatgagataatgggttgagttttgtgcatctagccattctcagaggcaaagcagaagttggtagttgactgactgggtcaagaagtttgagactggtaggtctgaatcaagcaggataaatgaatggcatttagttactttctatctctttgccatttatactcaaggacatcatttgtatggctttctgcaaagcaacagctaaa

SEQ ID NO: 55094 - DNA, 1718 bp, Bovine  19866881036724
  misc_feature (1)..(1): n is a, c, g, or t
nggatcttctggacccaggggatcaaacccatgtctcttgtgccccctgcattgggtggtggattctttaccactagcaccatctggggagcccaaatctgttttactctcacagagaagtttggccaacaaatggccaaaatagcaaaaatgtaaacagcaagcacttctaaatagcaagcctctttaaacacagagttaatatttgttcaagtaatcagatatggagacaatctaaaggcatgagccagattgttcagctttctttaggcaaaaggagcaaaagaaggaaacattgttctagccctgttcaagaaatctgcagtctgttgggggaaaatatgacagacatatactaggaaaattggttattaaaatattaatttatccattaaacaatgtctattttgcacccactctatttttattagggaaggaaatggcagcccactccggtattcttgcctggagaatcccatggacaaaggagcctggtgggttacagtccacagggtcgcaaagagtcagacacgactgagacacacacacacacacacacacacacacacacacattccaaatagatttctggagtctggggaaacaatactgaataagataaaatatagaacttacattcctctgaggcaggaaacagaaaataaaaatagccacacagaggggtacaggctatggaataaatgcaaagaagggaatgggttagacagctactggtagagagtaaagtgtagactttttttataagctgccataatttggcaagttgtatcaggaaatggcttttgagcagagacctgattgatgagaaatagccagtaactgatgttccaggcagaagaaactgcaagtttaaagaccctgaggtgagaacaaagttcaggaattacaacaaatggaggaaatgaaaggaaatgtatagctggagctagctcctgtgtgtatgggaggggagaaggtggggaagtggtgagatatgtaccatcagaaatcattttgagattattttggctaccatggtttccctgtcagttgagctactatgtcatgtacactcaaatgcctcagctttatggcttgaggtattaggataataacattgtatatctcttataaaaccattccttttctattgatttttgttcatagagatcatcacagtgttattatgatttccatttagcacttacttgccctccttagtttgttgaacaatcaatactctttgtccagaaagcagaggccatctttatttctcttatctctttttggtaagcatgagggaaggctgcttcttgtttcttgggtacatcctagtaaactacattgtttgtacggaaagaatcacttctgctctcagtcaaagcttagtcaaaacatctaggcatttcaaattgcaccccacagcctggctgccttcattcaggcaaagctgagacctgaggcaatactgcatttagaacagagagcagcccttaaatctagtgaaccaatctctgacttgcctctttaggattgaattttgctctaaaatacccattttaaaagcaaaaacatttacctaaatatatttccatgacacaaatgtctaacaactttcataaccctgcattatcattgttagcgtgtattatagaacttgtagacatgtactgtgtggttaaaaacgaatcatgtcacctcacgttcacagatgtgtt

SEQ ID NO: 55095 - DNA, 1129 bp, Bovine  19866881459270
  misc_feature (1)..(1): n is a, c, g, or t
natttaagataatgctaatttatttctctttcttctctgctatcccagggaaaaagttgccatgtaaaagtaatcttttcccaaatagaaagcactctatattaggaaaatattctctgctcctcaactggacacggtggtggtttagtcactaagtcatgtcctattattgctaccccatggacgggagcccaccaggctcctctgtccatgagattatccaggcaagaatactggagtaggttgccatttccttcttcacaactatacatagaagccacaaaaagtaggagaaaaagcaagtcagcatttttaagcttttagaacttcatgatgttcaattgactaactggttcttatactttagttactgcctcattaactataaaggagaaattatcttgggttcaaagagaaagataaaccatagcttttattccataaggaaaaatctaattatagcttaaagaatcaatgagaataatattgatataaaatatagaagagaactattaaattggctcaataaagttttagtaatagatgggtttcttctaggtcagtaactttttccctgtcttcctggagcattaattatttattcattacgttccttcagtaactgtgaaattattaccttttagtttaatcagtacattttctatattctttatttctgactcatgtctagaaagttttctaaaacaaaaaatttccctctactgcttgagtatatttatgggtttgagattaaaacttagatgctacatacctatacctgagaactcaacatctaaattatggcttgcaagaaaacttgttagcattttcaacaattttcccaagtgtaaattcaggaaaaatcaatttactttctcttttttaatttcaggtataagttataattctgcagtacccaatatctctctgaagcccatggtctattctttttcttttctgtatatttcaaactgatcctttggagttatcttgaaagaaaattaataggctccttattaagtattgtagtgtttcaggtagcaaatgcaggacagctacctaaccaatccctgagtagccaaccagtgagtgggcattaatatttggagaaagttaactaagtacatct

SEQ ID NO: 55096 - DNA, 1949 bp, Bovine  19866881693446
  misc_feature (1)..(1): n is a, c, g, or t
ngtaaagaacccacctgcactgcaggagacccaggttctatccctacattaggaagatatcctgaagaaggagctagctactcactccaagattctggcctgaagaattccatggacagaggagcctggttggctacagtccgtgggttgcagagagttggacacaactcagcgattaacactgtacacaggcaaagtctttagcagtcaatgaagcagaagcagatgttttctctgaaattcccttgctttttctataatccagtggatgttggctatttgatctcttgttaaactgttaaattaagtgactgtgagtctgagtgaactccgggagttggtgatggacagggaggcctggtgtgctgcgattcatggggtcgcaaagagtcggacatgctgagtgactgaattgaactgaactgagatctaaattcagagaggctaccacagaatgaagtggttacttactttagaaagtgattcatcccataacagaaggctcaaacccaaccccttttttcttcacctgctgtgctgcaaaaaacagaagccactgtgctgagagctgatccttggagccacaagcaggccagggtagcattttctctggccagtgcattctcagggcatagaaaaatttcacctctacccctcttgagttcttgtgactggacaaattgaatacaagacagattaaaaggaaaaaagacaagtttaatttatgcgcacagtggtctcataaaatggaactaagaagtggccaaggtaggtagcttttatactttttagacaagcaataaatttgagaggaactgacaggaaaaagtaactatgtttgggtgcttaattaataaggaatttaagcaaagtttggacttgagcagtatattagtaaaggattagcaaggtttacacagatgtctcagccctgaattccttgcctctgttgataaggacgtctttttatctcctttttacagggagggcatttcttacatgggacatttatgttctgtttccagggagacagagaggagggtcaaactgtcccctttgtattggccatttcttaagtaagtttacttcaaaataaccaatgtgaaaaaatgttttctggtcctaagcaatttctggatttcagggggatcttttaaataagttagaaggggatcagatttttagcatatacaatgagtctgtgagcttgacagataagttctgtttttttgtatttttaactgctaaatttagtgttatataactaactatcttcaacgtttgaaagctgaagattggatatacgtcatgttagcattgcttaatacttacaactttttgagttaaactggaaatgcctttttccacttggatacattttcttcaatggattttctgttcaaatgttctagaaatattcatccatatattgaaatatatgccataactttatatcgagaagaagaaaagcccaagtaaatgacaagagaatgaaagttgaagtctgcttattaaagttaggcatgttttgagtatactgtgattacatcaactctttcaatgctatagttaatagaatattagacgcagcaaaactgaaaacttgcaatttagcaaacatttattgaataacttatgtctatattttgtgtattactctgctgaaactatggtgtaatgtaagcacgggatgtttcctgctctgaaaagcgattttatatagcacatacacaaataatcctggaggaggaaatggcaacccacttcggtattcttggctggagaatcccatggacagaagagcctggcatgctacagttatgatgttgcaaagagttgaacacaactgtgggactgagtatgcacacacacatgtacacacatacatgaagtgataaaaaaatgatatacatagaaggagcgggagctgaggggagggagaggccggt

SEQ ID NO: 55097 - DNA, 1860 bp, Bovine  19866880243935
  misc_feature (1)..(1): n is a, c, g, or t
nttcttctgtgtattcttgccatctcttcttaatatcttttgcttctgttaggtccataccatttctgtcctttatcgagctcatctttgcatgaaatgttcctttggtatctctgattttcttgaagagatccctagtgtttcccattctgttgttctcctctatttctttgcattgatcactgaagaaggctttcttatctcttcttgctattctttggaactctgcattcagatgtttatatctttccttttctcctttgcttttcgcttctcttcttttcacagctaaactcagtaaatataggctgttctgattattgttatcattattacagttagtttgaatacttaagcatgaaatttctgcagcttctcccatagattttatgagatgaatatttggtgcagactcaaaaaacatggagtgaaactatagaaactgaagctcaaaatttcccatctacttgcaaatgtacttttaagccatacaagaagctagtgtcctatgaaatggtctgtgctttatggattagctctttagtcatggctttcctgcaaacactggagcaagttgttatcagctgatatactcctctaagttacagtgagtaaagtcaccaaataaaattgtttaatttttgatcattaggaaaacattctttttagatgactccagaaaggcacaatttgtggaactagtttctgaaccataaaactgttgagccaggattttacaaaataaaataattttatggtcatacaaagagtcagctctgtcctcaaagtatattcttttatgtgagttaaaatttagagatgggtttagtttgaaataaaagaagtatattacaaagcttcagaggattatttttagaaatgcttacatactaactttggaatcaagctctatcaatcaaacatagatggtttggggtggaaatagttaataggatggtcattatacccataattgtgaaagatttctgcactctgaaaaccattttcttaattattttaggttaacacttgtgtccatggcagggggagggaaggggcatgtgtaatctgaaacctcagatatggtgcctggtctgaattgagataacattaaagattttattgctgatacattataaattatttctattactggggtcctgcgggtattgcattgtcagtgcactttgcctattacctcatttaatgttattaacacactttggggtataaaattacagttttatcatggaaaccttaaacacttacatccaaagtactgaagcaagttattatctttactgaccagacccgttttattgtcattttatcactcataaaatctgagattcaatttgatttaaccattaagtaaagcttggtctccatgagtttaagtccagctgtaatattaatatattaatatataagatgacttcattttattaaaggtgaggtaagttagaaaacctcttttaatgtccttctgtgatcaagaaatttaacctgacctgtctccacttctgtttcaccaacatcaacaaaaatttaagaggatcttcttagagggtgctgagcaccttctctaacctgcttctggcctttattaaaagcccaggacacattaatcagccacaaaatggtatcactcatcacagtgtcaagaggcaatgtccaatttaaaaacaagaaagcactaagaatccatcatgttaaagaaacatgggctacacttaaaaaaaacttaaagcagaaacttaagcacatcatttcaatagctcctaagttaagaaaaggggaatgggcttcccaaatcaatccatcactcagaaaatagaacactacagataagagcacaga

SEQ ID NO: 55098 - DNA, 1415 bp, Bovine  19866880347301
  misc_feature (1)..(1): n is a, c, g, or t
nacccttcatgccataactaagacctgacaccaccctaataaataaataaaatttaaatattttaaaaaatgaaaacagtttccctcctaaaaaaatgaaggtgttgggcccttactctccaccagtagttagcagaagagaggactgcccagattttcaagcaacatgttcccttcagggacctggagaccaagcatcccagtgcactttggaacttcgattgatcccacagcctcttggtgcccacaggactccagggcagctcaggagatgccctttctgtccactgctcagttgctgggtccacgtggagtgacttcagatgcgataccagtgcctgggcacagctactaatttaggtatcctatgcatcctccttatcatttaatacattatcaaaattaggaagggcaaaaaatattcttcagagcagccttatacccatggggtattagttctacaatctgctcagctgttaggttaaaatctcccaaatgttttggctctggtactgaggtctatttcagggcaattgtgtcttgttccaccaagttctagtcaaaggagccaatgggaaatgagctgaacaacttctgggaccctttcaatccacattatggacagtttttagagctggagactgggggagaaaaactgaaagtataggaagaataaaatcagattttaattgaattgctgcaatgtactagtaaggctagttaagcatataattaattgttgtaactatagcaacaggattagctggaactgttagagtggcaccaggggttcatgagagactcttaaaaagacaagtggtggagactgcagaaaataattcattctcctccagtagctctcaagagggcctcacactatttagcaaaccccaaataaatctatttaataatatttcgttagattcatgcagcttttcatatcccaaagggccccgaggttcttcttaagccatgaaagcaaatatagatttggaataatgtatcaggccagattttcccagtgcttaaacaactccctggtggtttgttctgcacctctggaagccccattaccttgaggatacacagaagcagtaatttgctaagtggcatccccacaggactggggcctgaagcaccaacagaatgtaaactcaggtgggggcataaaaggctccagagatagtacttttatttatttataccctacctcattccaaaaacgcctcgagaaggcttgcaaattacccaggatataccaggataaaataaacacaggagaaaacccaaagcaggggcagaaaatagtaggaaaggaaaattagatgtttgggaaatgttagcacaagaagtgcacacagcaatctccaatctcctggtctgtgtgtgctaagtcacttcaatcatgtctgact

SEQ ID NO: 55099 - DNA, 1491 bp, Bovine  19866880424302
  misc_feature (1)..(1): n is a, c, g, or t
nagtagttgaatgtttgttgaagacccaggagcctctttaaatatcaagaaggactgaatatacacatttgatgtaaggaaatcaagtgcatcattccagcaatttgtttgaagccaagatcattaatgagtctcacgtcaagggctatatcctagcatccttgtgtgtcactattttgtaacttcctaatctttactagaagcagcaaagactggaaatgctccattaagggaaatatgtttgagactttactaaacttttgatgtcaaatcctttcagtttcttttttcacagtgagttcaaaatgtcttcattggaacagaaccttccaaagttacaagattgtttttggcgccccagggaacacacgggcaaggctgtaatcgagggagacaatgctgtcagtacaagtgctgggagaatctgaaagcccaagagtggagcattcatcaccatgattccacccgacacttgactgaaagcatttttcactaatttgctttgtgcctgtccagacaatctaaaaagaaaggatgagggggcaataggtgtctattaaacagaataaacagcccctggcaaatgaatgtatttcacacacttgtggcttttggagggacaggggcggtaaggatgaggggaaaggaaacagaggaggaggagtgaaggattagcctttcctccactggtggggaagggctggctcaggtcacagggatccatccacatggcccacacctccccagcctggagattcacaggtgcgggtagaagaaggctacacccgagggctggcttctcgatgtgcacttttattctgatcgggtttaaaacctacctgaaaatgactttcaaatctctgatgaaatagattcgagtctctttccctggattgtatttttaaacttaacctctacatacatataactgctgtaggctggttttaagcctctgctagtgggtcaattaaaaacaaaaaaaaagcctcaagcttgttgtcacagttgtctgactttgctgagagcatgcaagaaagattagggtaaaggtgaggggagcgaaagaactcactctgggacccctaattggctcctgttttgaactgtggaggggagggaaaaaggcgaaggagcgagaagatggtctaacaagaaacacatggtcttttgaaagtaaacacagctgggacccaaaccgtgctctcctcattgtcctagccttcagccttttcaggatcgcattatcgttgcggtactgatgattatctgtttggattatcattaagaaatgtggcaacattctagagagaatagatataaatctaatttctagggctgtggttaatcagaaaactcaatcatattttgccaagactaaaacaatggactttattaataattctcagtttctttagagtttctaagtcagtggatattttctaagctgcttgcagtttgatctttactcattgactctctaagtaaataaca

SEQ ID NO: 55100 - DNA, 1085 bp, Bovine  19866880473190
  misc_feature (1)..(1): n is a, c, g, or t
ntaccaagtgtttatacttttttatattttgtatatgaggcagtccaatccgtagtttgtgtggtatgggtgtttttctcaccattcctcagttgatgagccttttatgtcatctccagttttcattgttgaaaacagtgctacaatgagtatctttttgtgcttgtaccaacacctgtgtagggtgcattcctagaaggggaatttctgggtccttccatttatatttattgagtaactattttgtgtcaagtgctcgagaggctacaaagtaatagaattcaatctttgacagtaaagcagtgtttcctgctttcatgaagcctgtagtttaagtatcaagaaatttacagaaatagcaatttcaaatagaaaatcatgagtgctctttacaaaatgcaggagaacttccatgagaggataaaaacaccttgacttcctaacccagcctgtgcaaagtaataattacttgggagtctcagaggaaggcattgaaaatttccaaatagagttcctggcacctgttaatatgaatgagttgaaacacgggcatgccgaaggtgacttgtttattcaaagaggtccagagagcataattggttttgaacttttagaaaatatctctacttgtgaagggagggttggtatagttcactagagaatcgaagagtggaagaacttttgtttcaaagatcttttctcaatgtttgatacaaacaaacatttttattttggctcaaggctaattcattttagttttcagctttatatatgtgtgggctcagctacataaccttttttgaatctagaccattttgataaagctcatatttgtctttagcatagcagaggttaagaatgagtgtttcattttttattttttttcaattacgatcccaaaactgttttattagggaagcttctcttcaaattcagcatcctttagtcaaagcaacaatccctttcagaatcttacaatagtatgcaggcttgtgagttttaaaaatgtatccaagcagaaaaatattcatgtagagatgaaggttataagccatggctccaacatcgtatctttcaggcgagaa

SEQ ID NO: 55101 - DNA, 1272 bp, Bovine  19866880557548
  misc_feature (1)..(1): n is a, c, g, or t
ntacaagtatccattttctcccaaaactccccctccacccaggctgccacataacattgagcagagttccacgtgctagacagtaagtccttgttggttatccattttaaatacagcagtgtgcatatttctatcccaaactccctaactttccccttcaccccatccttctttaaagggaaaatgccttttacacccaataagctttgcgctgtcactccctaccccccaaaaaaatgaaagacgaagaagagtaaaagacaacataaggcataactagtggcttctgtttgctttgtgctccaggacgcggtcaggacaagtcatcgggtctcagagtgaattttctagttaccgtggatgatgcattgggtcgactgtggtgacggattgttggtattagtagacctgagtgtgattaataaggctgctctgtatctgacagagtgggaatggcaccactaaaattgaatggaggcaatcctactaaaatctgttagggatgctccttggggaaaaaaaaaaaaagtacaggggaagtaccaggagtagaagcatcagttcaccagctgtagccacatagatcaaagcaagatggcaaggtctcactaaacagaagaaccttctgcttctcacttggtcttcttaacaatgaacaagctagattccttcccttcttccacagaggcatacatttatttatagcaggactgtgtatgtaccagtgtatatatttgtgtgaactgttacctgtgtggatgggagaagaaaatcaaaccaataatacatttgagtacatttttgtttttaaaaggtgtcaagtgacagatttaaagtagagagagagagggcaagagagagggagagaaggagtcaatctttagtctattagcagatgtgtttaacatttagatactagagccagggtttcatatgacgcaagatgaaaatatattttcttatgacaatatatctttcatcaccattaaaatacaataaaactgtatggcggaaaagaggaaatatttgaaaagttgagtgaagctgtgtcatatatttagagttagtatctgagagttatgtttctgattaaggctgtatcaggagacttaaaaggagtaaaatatacctttggacatctctctgagcttcagaaaatggaatgtgtgcttctaaaatcaaaggcaactgtttttattgatagtctatctggaaggactatcagcacagagcctgctactttgcggagggcagagtagtggggccttaaaa

SEQ ID NO: 55102 - DNA, 1933 bp, Bovine  19866880558273
  misc_feature (1)..(1): n is a, c, g, or t
nactggagtgagtagctgttcccttctccaggggactttcccaaccaaggtctctggcattgcaggtggattctttaccatctgagccaccagagaagaactgactcattagaaaagacccctgatgctgagaaagcttcaaggcaggaggataagggaacgacagaggatgagatggttggatggcatcactgactcaatggacatgagtttgaacaacctccaagagatagaagaacagggtggcctggtgtgctacagtccatggggttgcaaagagtggtacacggcttagcaactaaactacaatggttgattggtgtcgcttactatgggctggctcctttttgacctccaaggagctttctaactgggaaggtttccttgattttgagaatgagaaatatttggtctcttatcttttatctgggcagggcccagcctcctctatggactgtcctgctattgatatgttggagtttctctctatagggaatgaactcaaattgctcactttggggaggcccatctacctcttacctcaatgtaagtttttggcagctgataggagatgaagatgtagacatagaaaaaaatatgaaaaaaaaattagtttaaaaaaataccagatttgcatgttttatgttatgaattccagttggttggttttattatagaaaatgtataagtggatggtatcaggtaaatatgagtggcctgctgattctccagtacaatttgaaggctgctgtaaatttctatttttttcagaagtagtcttgcttattaatgaattcaatttctctccatgcattccctgaactaaacattattgtctgacctgacaaagcaaatccatccttttaaaattataaacattattattgaatcgatttggatagaaacaaattattagatatttggcaggaagcagcactagccacatcaggaaaattttcatccaaactgataaagaagttgattaggagggaggcaccgaggaacagattgtcatttgagatgatgtgtggtacaaataaataaataagaaatcttatttgctttctgctgtcaaaatttctgtgaaagagttgagcttccaaattcatagaaaaagagatcaaattttgttgttaccagaagcaaggagttgggggaagggaaattggaagaaggtggtcagaaggtacaaactttcagttacaagatgaataaataccagggatgtaatgtacaatatgatgactgtagttaacactgatgtatgatatgtatgaaggttaagagaataaatcctgagttcttatgacatgcaaagatactgtttttctttctgtggtatttatatgagatatgaatgttagctaaatttattgtcattattcttggatatatgtaagtcagtctgtatactgtgtgccttaaacttattcagtgctgtatgtcaattctatcccaataaaactggacaaaaagttgggtgttgtggacaagagtcaagaaagaaataaagtaagcatcatgaataggtcaggaaaggttttctacaaggctaggagaagcctgggaaacaggacagacaaggtgatcaggaagggtgttcgagagactgaagacagttattctgaagccaggagttggtgaaagaaactggtacatttctattgcatttctccaagtctatagtgcccttctgagcactgcatggtacattacccccaggccattgcaacaaataattcattcacacttcagtgcaagtaggaaaaaaatggcagcgttttgacttccaactggtactcccacgttttcaagggaaatgagtacttcttacctctacaaacatcttcccattgcaagtaaggaagtaagcaaatttatgtacctggcttgcaaacagcgtatctttctttctttttttttttttttaatt

SEQ ID NO: 55103 - DNA, 1222 bp, Bovine  19866880826650
  misc_feature (1)..(1): n is a, c, g, or t
naatttctaaaagaaagactgaaaaaattgtttcactattagtattgcccatttaagtcatggatgaaatgtttagaaactttattttgacacacatgaaatatccattttctgtctttgtcatgaagccaaatatagaattaaataagatagtgaagggatttacacagtaagctttgcactatcattttatgagttctagtaaactttactctgcttatagttccttgcaactgatggagactttaagactatagaaagaccttaaaagtgtaagaaaattcaaagttccacaaagaaaccttggatcttacttaagaagtatcttgaagtccttgggtgaaactgcatggctgtgaattttatgtgagggggtgtcagtccagaaaaattcctagaggaaattatggagggcaaaatataggagaaaggggaaagagtagagtgaaaccttgacaaaactttgactataacaatagaatgcaaaaaaaaaaaaaaaagaaacaaacaaaaaataatttttgatagctagaattatttgtttaaaatattattttgtaagaagcaacaaatcattttgagctatgctcagttcttctttagttagcactcaattaactgctgaatctcagaaagtgaattcattatttttctgatttgcttttaaaaaatgagaaaaaaaatgtcttggaatacataaggaatgaagaaaatatccaaataaaaagaattttacactctgagtattagaaactatggctcaagtttcctcaactagtctagtagagttttttacactgtatttcacatcttccaatgggtgttggaccattaaaattgtattttgcatagaggggaaaatgtagaaaaatcaacaacttagggaggaaacacattttaggcttgtgtttgctaggttttttctcattaatcaagtaagttagtaatgtttcaaaaagacagtactctgactatggcattcagaagtcacagagaaattcttctgagaagttggaatctttttatttgtcactacatcaaagagtgtttcaaagattagggggctgtgttctttgcttttctccaagtttgcaagataatgaagattattttgtttttgcagatgtttaaaaacatgatgttaaagacaaatttttcaactaaaaccctcaagaaatgtcacttctgtgtcttgcaaagagagccagcattttctctacgt

SEQ ID NO: 55104 - DNA, 978 bp, Bovine  19866880869417
  misc_feature (1)..(1): n is a, c, g, or t
nggatcaaactcaggtctcctgcattgcaggcagattctttaccatatgagccactagggaagcccataaaataagtgtgtattttatacatacacatatgtgtctgtatatatatatatatttagagagagagagacaaagacagaaaccatttttctctgtacagagagagctactttttgtgtatagcaattttctgaaaaattagcgtaatgtaatataaagagaggaaaatactcaataaaagctttcctttcttgtacttatggttggaaacattgctagttagattttttattaaaaaaaaaaattgtgttttttttttttttagaaataagtagaaacttggccagatccttaggtttgaaggctccgcatggcccctcctccaccccctcactattgttagtcatcctgtgcctgacttcacgttatcaccttcaagagaacagctgggtcactgtgaaagggtgttaatctcccagtgtcttccctaacaccttattgacagcttgagttagggcggcctacttaggctttggtgaatccgacttgacaaaattccctctcaactttatattcatttaaaaaatgtggtctctgcaatttcctgagcaagatctgcaatgatccccattctgaatgacctagtagagctgtgcagtgactttcccatccctgggaggctttctgtactgctgcaaatttctacctgcataaatctgcaaagcctggcagatttaagcagcaagaaacaaacatacatctaatgggttatagacagccctctacattgtgctgaaaaattgagcgcactgccatggaagatttcagtgtcatttactgagttttttagatggaatggaatgagcgcagttagctccagattctccattgttctccttcctggcctttagccttaccctgggattaggcctgccctgggatcagaaccatcagatgcatcagcaaatctg

SEQ ID NO: 55105 - DNA, 2038 bp, Bovine  19866880930538
  misc_feature (1)..(1): n is a, c, g, or t
ncatgagactttaaagtctttttctgtccctatttgccctccaccacttcccaccatggtgtgaggagtaccccctgcagcacagaaaagggtcagtcatgctgcaggtccagggacacatgccaaattccacttaatcacagagcaagcccatcagaacagttaccaactctgaaatactgtatttgatcacttcctacaatccagcctatttataaatatacaaacttcatagtgtatttaaattaagtctacttaagcaacccaatccagggttcttgcctggagaaccccaaggacgagggagcctggtgggctgccatctctggggtggcacagagtcggacacgactgaagtgacttagcagcagcagaaacaaacatagcaaataacttttccaagaacctacattcagcttaaggtagggtttcagagtattttttttttttcggtgattagatattcctggatcttcctgcagtgcaggagacctgggttcgatcctgggtcaggaagatcccctggagaaggaaatggcaacccactccagtgttcttgcctgggaaatctcatggacagaacagcttggcaggctatagtccatggggtcgcaagagtaggacatgacttagtgactaagccaccatattcctggatctaacattgagtgattaattacctcaagtcatcttcatacaggtattgttggtgcaaatcaatgtgtagaagcaattttgagttcttttaaggagagaaatgtcaatgacctaaaagaattcaggccagaagtatgaataatcactgccatttatttttctgttccatcttgatttgattttcatgagcatcctgtttcaagggaattctgagtgtactagttgtagatcaatgcaaaaaagagaagaatggtaagccacaaggggagggaggtggtatggtagcaatttgagcaggaaaaggtctttctgattatgttcgttgtctttgcttttatttgccatttttctatctttatgaaagatgaaaattttattgtctcagaggaaaaaaaacaggaattatataacacaacatatttaattgcgttcacatacatttagcaatatgatggcaattttagcaattaaaactatttgtccctttctggagtatgagaacttcacatgggtgtgatggtggagcatatgcttactgcccctctctaaagaatgttcaaagtttgccagtgaggaaagaagtaagaattcataaatttcacacaaaacagtggaaattttatcaatggaaaagaatttgactgacctaatgctttttaatagcctatattttccctgaagagctaaaacatttgcatgaatcatctcattggattccacaaggtttctctggaattttagccacatatatgtttctctgtggaatgttcccactgaaaagtgagacagtcaaacaagtagggaagcagatttacaaaagtgggaatgtcatacattaggcttataatttaggtagaaacttcgaacactatttattattaggaccctgctcatattaggatgctaattacatttaggatgctattcattttaggttattttggatgatgaactggcacaaagtgagaaaaagaagattgtagaggattgttgaggaactgtcctgaaagtctctgcgtagctacacactcaactaaggaaacaagtacttaaaggaaattagtacaaggaaagttccaagcattatctcaacatgtatatttaatttccgaaagtcagactgaattgtatttatttcacacagttaattctattctcatttttcacacatgaaaaaatactgttttcacaaaagaataagtgctttcaagcagatcagaataaatgaagaaagtcatgactttcaaatacattgtctgacagatgctgaaggcctatttcaaaggaaggatatagcaggcaagcctgcacacctgtgctctgcccacttcaggagatgtcagtaaaaaacccataaggaataaatagggtcttccaaggg

SEQ ID NO: 55106 - DNA, 1449 bp, Bovine  19866880951352
  misc_feature (1)..(1): n is a, c, g, or t
naaaatagatctaaaattgaattctttgatttttcctgtatctcagggtatgagaaattatgtctttgattctgtataataattaaggcaaagttttctgagtgaccaaaggtatgtttgcagtcaatattttaaaggatgtatattcagtgatgccaaatttccattttgttttctatttatgaatataatcaaatactatttagtggggagaaatatacttttcatattttataagagtgaagtccatggtttataaggaaagtccataggagaattaaacagtcatatcatcaaaggaataatgactcatcccagagaatacagtgttcagatattttagtccacagatacgttgacatttttcttactatacaagaacatcatgacatgtaataaagaatacttaccaacttctttaggcgctgcatctaggggagacacgcacagatgtctttattgggctccagtctgagtagcttccctggaggggaccctggggatgagcattagtgggctgatggctgatatgtacttattactgagctcattagtggtgggtgacctcacaaggagggacatggtattgcgatttctctgattcttagatatgtgttgacttcagggggaaggatgcaggcttccagatgcacactctcagaatgagctgatcatgagaacatttccactaaacatgcccttaaaccagcagtttccatatcatgagaaaagtcatgagtcattcccagccagaataagttgaagtccagagaattggttcattctgatttaattacttcactgggtaaaattgttgtgccaataacacagaatttttccaagttgtgaatttcagtcgtgtgttcattttggaaaaaacaatgaagctatgaaattttttattactacaattttacttgtgaaaagtgcttgtctgcttttagctctggctgtttcaagtataattttaaatatgtgctgtatgaagtggtggaaattgacaagttgatttgctttatcctttgccataagtagtttgatttctgtgaagctgatcataatggtagagattctataaaaatgtaaagtgagtatatgtgtgtgtgtgtgtgtgtgtgtgtatacacacacgtttgcagtagttctgaatcttaccttgagtgtcatcatttcagtttctcaatgaaaagcaaatgttacacaattaaatgtttattgtttaattttaaatttcatatcaaatgagagaggagcactttcattcaagtgttttgttatataagcacttaaaactagattagaacatgaactagagttcactattattttatctcttttgtgttggtaacgagcacaaacagagaaaaaaaaggaacacctaattgttggactttgaatctagactgtttcaccatttcccctacattcattgggaaataaaaagagaaa

SEQ ID NO: 55107 - DNA, 994 bp, Bovine  19866880966833
  misc_feature (1)..(1): n is a, c, g, or t
ntttttatgtccctctgtcacctcctagtcagagtcaaacgttcacttgtttttactttaatctgttggtttcatgagctgagagtatttctggatgctgagtggaaggggaggtagggatccgcatgacagagattttggaccagcccagtactttggttttctccatgtcctaagggttcgctctagaaaccctggtgcttcccatgccaaatactgtacttcactcaactgaatgattagcttttctttcaatcagtatactcagttagaaaagtcctaaggttaaattttgtatgtaaaaattagatggacatttgatcagggatatttatacaaacattaggtaaatgtacacttttaatcctctgggcatacctctctcctctgtaatcacgtaagcatcgtaagccgttcttccgttgtaagcctctgttgaaaatcacagtgcaaactgttctcccaataattgcggtactgaaattgtcatgaatcgttactccttcctttggttttttggtgatcttttattttgctttgtttttgtgtgtaagaagctatgtgttgtctgaacagttttatttgtactttaaaaaaaaagatcagctatttcttgacctctgaattacagtttacatgttttgtcaagacattgtccatctccatgataccaaaacacagtgaaagaaacaacaaaattgtacggaggaagagcaagtttaattatctgactgcaggtagaaaggcagctgcttactagggtcttcacttggattgtcttgccaccttttttaaagaaatcataaagtgcacccatcaaagtaaaacagagctgattttctagcacttaacaagaatagctaaaaggtatgatttgccttattgaattgatattggtatatctgaccttaagcagtaggttgaaactgcatacctttttataatcaagaagttatttgatgaatgtagaagattctacattggaatagagaat

SEQ ID NO: 55108 - DNA, 728 bp, Bovine  19866881030086
  misc_feature (1)..(1): n is a, c, g, or t
nttaacatgcaatcctctaaaatctcccaaatattaatatccttacaggaatgggtcttgccttttcaaatgcccttttatctccaacctccaatacataaaaaagcgtgctttaatgatgaagttagtaacaatatttatcatctctgcagcctgttttttttaggattgttataagaccctccagcagcagtcaaccctgtcagcacacaaccgaatcaatatgcttgcacataaatgttaggattactataagcactgagatatcaaactcaaatctccaactggaaaaggatcactacattaaatggaattatctcttattagaaatgaatatataaagattacaggataatcaaacattctccattcctaatatatctgatcagatttcccatgcataatttatctgaagaggtttaatatcttaatgtaggattattttttatatatttggataggagaaattttaatcaatatgattaagaaaaattctagttttcagtataatcttagtagatttttaatacacataaaatataatttagcatctaaaacctttaacaaccttattttgcagcaaacttttgaagtgtttcaatctattatcaactgaaaattattttatttatttatttatttatttgctcaacaacaacaaatttattttggtgcaaacactaaagttctattctcttaataaatttcaatcatacaatgcagcatta

SEQ ID NO: 55109 - DNA, 2016 bp, Bovine  19866881031518
  misc_feature (1)..(1): n is a, c, g, or t
nctgcagttatattcagaaaagtctatttatctagagcctaaaatttatcaaatgcttgatttgatcaagtaattctacttttaggaaatcaatgggaacaagtcaaagtgaaaataaagcaagaggtacaaagaaataaacctcatcatcattcacaaaagtgaaaaaactataaattacataaaatccaatactaaaaaactatggttaagtaaattatggcaaatccataaagtgtaatactgtgaaaaccttaaaatgatgcatatcaagaatttttagtaaggaaaaacatgtatattattattgtatatggagaaaacgagatgcaaattttgatatattgtgtgattttagctaaataacaaagttacatgcatagaaaaagcctaggaggaaatacataattcagttaactctctttatctacaactgtaagggttatgggtggctagtttaccgtgactaaaacaattgttttcctgtgtaatttacttgtctttttccattttgaattataaatagaacaaatgatacaatttatagttcagttaaaggacatttaattcaaggggtttaggttgtcacaattgtcttccacacacagaaatttcctgtgaaaggaaaatataaaaatataccaaagagacccatgtacattgtcagaagtgttccaagtctcaaatcactgagaaatacctacctcacacaagttgccataaacacctgattcctaagcataaatcttggtgttgaaaattgcatcccacacacatttcatatggagttgaaagaacagtatgcggtatccaccttccgtcatatacactagtagtcacttcctaaacctcattaggggtggtaataatgcttcccctacaggaactaattttatgctaatcagtgactcctgtatgtcagtgactctcacagctgcttcacctaagcaagggttttgcaaattagctgctttctcatttggggaagatgtaggatggacagaagcaaaggcatcattggaactcatataatgtttttacacttgttaatgagcctagcagtctaattttatcatttcatcagaagatggtttggggcagaagcagttctgagtttatcaattctgactcagctgattaacactgggcttgtaagataattggaaagatcaaaaaacagtgtctagtctttctcctaaagctaaaattattggcaggaaaatgtccaagagacactcccgcctttgtggaaaggggtttcggaatcaggcagacctgaatttgaatcctgggtgcttgctttctctctgcctggcctggggggaaaggtacatctttgtaaatctaagttcccttctctgttcatctcagttcagtctctcagtcatgtctgactcattgcaaccccatggactgcaccacaccaggctttcctgtccatcactaactcccagagcttgctcaaactcatgtccattgagtcagtgatgccatccaaccatctcatcctcggtcatccccttctcccgccttcagtctttcccagcatcagggtcttttccaatcagtcagttcttcacatcaggtggccaaagtattggagcctcagcttcagcatcagtccttccaaagaatattcaggactgatttcctttaggatgaactggttggatctccttgcagtccaagggactttcaagggtcttctccaataccgcagttaaaaagcatcaattctttggcgctcagctttctttatggtccaactataacggaaataaaaatgcctctctcatagggagggacaagacaagatacatgaaatgtaacccccaccacactgctgggtacagtaaaccttctttcaactctaactggaaaaccttgcctatttgggaggaccaagcttcaaagctctaaactgatgggataatttccaccccctggactgggctggttagatttcttttagcttgaaagtggaatatgatatagtcacagggggttaaatgtggg

SEQ ID NO: 55110 - DNA, 777 bp, Bovine  19866881040192
  misc_feature (1)..(1): n is a, c, g, or t
nttgctgctgctgctgctgctgctgctaggccgcttcagtcgtgtctgactctgcgaccccagagacggcagcccaccaggctccccagtccctaggattctccaggcaagaacactggagtgggttgccatttccttctccaatgcatgaaagtgaaaagtgaaagtgaagtcgctcagtcatgtctggcttttagctaccccatggactgcagcccattatttacctattataaacagcagttgggagatgtggatggtatttctggacgtgccattgggaattctgtgtcttggctaggctaaactctcaagtccctgcctagaataatgtttgctgatttttagtaataagaagagtgaggacagtcacagtggaagtagcaattatcatctgagcactttctatcttatatgtgctgctcttacatactctgtatgtgtgacttcatcatgaaagaacctcaaaacatcttaccttcgggctgttccggcagagtcagtgtcaaccagctcatatccataatgaactggctggcaacgctggagtttctgctgccaaaaccattgtatggaactgtgccaatcactaacggcaactcaagcatcaactttttagcaccaggaatgtgaatgtacacctaatacgccaaaaaccaaaacaacaacaagagagagagaggcaaaaatgtaagttaaaccttatagtgagtaacccaattattttttcataaaaaaagcttcttttgtctgctacattcccaacacgatcacaaa

SEQ ID NO: 55111 - DNA, 741 bp, Bovine  19866881102485
  misc_feature (1)..(1): n is a, c, g, or t
ncccatgaactgtagcccaccaggctcctctgtccatggaattttgcaggcaagaatactggagtgggttgccatttcctatgacacagcatttcaggaatatcttttctctacaagtagtgtttcttaaactttattgagtatttgttaaaatgtgtatacctgaaaacatcattgctaacaaagcatttaaaaaggtttaaagtgaaagtcgctcagttgtgtccactctttgtgatcccatggactgtagcctgccaggttcatctgttcactgaattttccaggcatgaatcctcaagtgggtagctattgccttcttcaggggatcttcctgatccagggattgaacctgggtcttctgcactgcagacagattctttaccagctgagctaccagggaagcccaacaaagcatttacatgcctttaaacattctctgattatttcagttaaaatgcctcaagcactttctggaaattgatttgcatttggtagagatatgacctcactaggcataacaaagcttagttttgaaatgtcaagcaaactttctgggacctctggcttgcagtgaggtaaatatttatttaggaatcaaatatgcttgttctagtgaattcactgacaaactcttgatttctgagaaagtcatcattcatggagtcattttccagatcatgcagccgtagtcttaactctttcaacatccaggaaaaaatagtggtcacttcattaatg

SEQ ID NO: 55112 - DNA, 1558 bp, Bovine  19866881105464
  misc_feature (1)..(1): n is a, c, g, or t
nacagaaagaggtgtggttatccctccccagcaaactccgtgatccacagagacaatgagtctttttcgtctctcaattgaggcaggatggctcagggtctgtcatggagatgccgggaactgctttctcttagaaagcttctctataagcaaaagtcctttccaaatctgaggttctgcctcgaccaaatggctggctctggtctctatcatcctgaaaccttctttgtctgctgcgcgcttccacagtctattggaaggtatttgtcaacaattacatgtctattaaggagtagtcaatcagttgggcccaaacagccaggcctccagggcccagctattgataggaaactgtcaatattccatgcctccttttctcaacaaaacacacagtcacctcacccaaatcattgtctgtgaaacatcacagacctggctttccttgtgcgtgtctgattctctactttctgaactaatattcagtttgaatgaataaaagctgtttaaaaaatctgaataaaggatactgattaaaatgctatttcagctgggtgggggatagatatttaatataattaagaacattatgggaggactgtgcacgtaggtggctgcaattactactgaaaattggaaaaccggaagaaaattaataagggatagtttatattagtttgatggtaattaatatctataaatactttccattccaccaacaccaagtttagagttatttacttaatgtaggacaaaaggttatgatatcagtcaatacatttattcaatttacaaatctttctggggactttgtaattatcatggaggatttgtctttttctgaaagaagaaagactgggagttccatgtgaatgctttaaactgaagcccccagccccttgccatcccaggcaaaaccaccatgtgggggtgggggaagggagaagaaaagaaagaaagaaaagaagccctaagtaaggctgtatcctttgaacaggcgaccctcctgcatcacagaatacactagtcgtcccagaacaaaagacggcatcaaacccgctccacaaagacctcagacacccaacaatatttaaagcagatgtaatatttagtgtggccgcactatggaagatgcacttttaagatttgttacagccaagtcttgttaaatttacaaaaacaaatattttcttccttccttccaatgtgtttctgtgattctttgattcctcaatcagatggagaaattaccatgaggcagacatgagagctcagggttcaggtaacaggcaaatgaattcagagataatgcatgattaaacttgcccctctaagtcgagccttctctcattctatcccacctattttcaccaaagccaaataattcagacagagcaaagaaaggtcaaaaagaaacacacatgtcaagtgaaagttttggggagggaatggagttaaagagacaaaaaaatttcaaagcgctgaaatgaacagagatgtttcaggtcttaggtagaaaggcatttcttttttttttttttctttttacagtcaaaacaga

SEQ ID NO: 55113 - DNA, 1966 bp, Bovine  19866881114554
  misc_feature (1)..(1): n is a, c, g, or t
natatgtaagaaaaaatatcatcttaccttattcgtttgagtctctgctgtagcagtcaaatacaatttctaactgatacagcaaacaagaccaacataccctgattatacagaggttagaggctcaacagctggatctaaagcaacataacaaacatgagataggagattatagaagccataagtccagggaaccagcgagatacaggaatatttctccagagaagtaaaacctaactaaccatgggctggacttagccacacagagaggggagaggagaatgttccaggagaagaagaagcacgtgtaaggacgcactgttgtgaaatttatcacaacattgaaagaggttgttgaaggcctttaagtaagaatgttcatcttagaaaaatccctccagttgctatgctgagaaactaaaaaggtaagtgtgaaaacaggaggccagttgggaggctagtgcaggagcctgggtgagacacccagggcagccggggggctggcagtaagaggggagaaagtgatacatctgagtgatgctcagcagatagactcagcaggatgtggacaggaaggggaagagtcaagaggggctcagtgtcctggttttgtttaccaagcaagaacttatgagggtgtctcagaagagacccccatccatgtcctctgcctgcctttggtctgtagaaaaactttagcctcctaggccttccccaagttccaaagaatacatttaatcagagaaatgagaaaatgcagaaagaaaagaaaacagccaagcaagacaaaataataatactttaaccattaaagtcaaggactttagttcttcctcaaggactatagataatattctgaaccatgtcttttaagctgttttgcagacactgaaacccccaccaagtagaagcagctaactgcgtgctgcccacaagcacatagaccccagacgggctgcaaccagaaggactatgatgttgactctagatgacctcaccaccaaccagtcagaagaatggccacgtgccaatcacacccctctccctgaacactaaaacactcctcataaccttctcaagagcgggacacagtcttaagggcattagctggctctggccccctttgcctggcaaggctgtttctttctacttcaccccaaactctgtctccaagatttaatctaatgctgatgaacagaggccaggttttgaccacagcttgaacaaatctggggacgtgagaatccgctcatggactatactgtgtctatcaccgctacagaaaaatcttatttcttagcaacaggctgttctcttgccttgttcatggctgtgtcaatgggtcagctccagcccagttacccatgactactgaaaagaagtaagaaaatccttttctcaggcactgaggcagcatgtgatttatgagcattttctaggaaaatgctggggaataaaaagaaatgtttccagggttttgtgtgaaagaaaaaaagtggtgagtagatatttacatagataagtccacagcagatatctgttaggaaaatgatcccaactgttcttagagtccaaattctatggttttcttcaagcagtgatgtcagtctcaattctcagggacgatttaggcaaaggttccgagatgcagtatgtgaaatatgctgaacatcgaaagaaggtcctggaaataaagagaaacccacttcactacaaggaacactgtctctcactgggtacctggcgcaggtctggcggccagtgttataattaatcagacagaaagaagttaagtcaggactaccgacatgcagtgcagttacagcagctgccagaggagggcagtctaacccgattcccataagaggatgctcaagactaaggtgtaaatcaaggcgcaaatccggcctcaaaaagaccaacactcacagtcccactccgtgggctcccttgttggggaaaataa

SEQ ID NO: 55114 - DNA, 1023 bp, Bovine  19866881138746
  misc_feature (1)..(1): n is a, c, g, or t
naatgtgtaaatactaaatgtgtatgtatatacacttgtataatatttaacaacattatcttcttaagtcatgcttttgaggttgacagagtaatgagtgaaaatttggtgatatctcagatgttgtgtgatgtcatcaggtcatgtgataattcacactaccatcctgaataaggacactattagccccacgttaaatttgaggaaagtgaccttccaagcctaagtgattaattcaaagctaatgaggattagagtgaagactcagacccatttttttctgactctaaattcagtggcattcaattacaggactctgccttttctggaagtaaagttatgggtacaaggagtctgcctgctttcttttcattcgctttctccctggaagcattaccgtgtagtgattaggagcacttccacttgctaacgctgtatactccttggatcaggtatttaacctctttaaacttcagtttccatatgtaaaaatgggaatgataacaatatctctatattgaaaatttcctaagaacaatataatgcaggaaaagtgcttagaatgtaatatggtctcaataaatatcatatcccacttctttggaggtttacacgttttgttgttgtttttttaactggagggtaattgctttacaatgttttggtttctgctatgcaacaatgtgaatcagtcataattatatatataccccttccctcttgagcctctctgtcctctcctatcccaccctacattatttttaatatgaaaaatttgttttttgtgtgctgtacagtgtctcctataactcattagctcttgattccaaaaaatgttcatctagccctttttgaaagttaagacctaaagtaggagatttcataattgtgattctggtatgctccatgagtacatttattcatgtaattagacaggaaaaaggactgtcagaagcccattataaatactgtgagataataaaatctttttttctatcctcctgttcctggagcccatatgca

SEQ ID NO: 55115 - DNA, 1260 bp, Bovine  19866881170472
  misc_feature (1)..(1): n is a, c, g, or t
ncaggatgggacagattcacctctgacagcccttccatgaatgttgactgaattaatgttagcatttcaagtggtatctaaatagcacttcattcagagtaaggaattgtcagactgcatcatacacaatgaataacaattcaagcctaaggcagggtggtcattcattaccaaagtagggtttaatgaatctgtttcagaacataagagtgttaacagaccagttgaaagagaaatgcagaggatttatcatgatggaactggaaatgggctgagaatctaaagattcgggtgggaccaaaacagatgagtagttgttctctggaggaaaaatgcagaggaaaattttggaggctaaggcaaaataaaataaaatgacgcttctatgaaccacggaggaaaatgtgtgcctttagtagtacatgtaatgtaaccatctacatctcagacagatggttgtgagatgcccaaagcagagaaggttgactggcaagaaatccaatccatcaacattcctaactaaattcagtgggagaatcctcataaatggttcagacgtgtcttaacgaggcagtcagcaggactgaagtggacagatctagaatcctcaccctttatgctcctttcccatgctctcttcaatcagaccaacacacttctcatttcacccccttcaaaattgatatgatacatcaggtttgcattgaggaaaaaaagactttataaaaaacataccatcaaaatgactggaagtgaataaagaagttgtacttctgctgcaatgatgataaggtttaaattctgagcttggtatttttaaaaatccaatgcttgcatctacctagagcaaaacatcaacaaccacaaaacctcttaggagagaggagtgagaaagctaattcaaatctctgggccggtgcttctttgggtaatgtgctacctgacacggggcattaatatttcagacgccagagaggaacttgcctgtcacacaacgagtcagcgacctgacgtctactagccgggtgctcagcaaagggcaaccagggaaaggggaaaggaagagacggccctaaggcaagctcaacatttaactggcttcaaacaaaagggaaggatcaatgtagatcaaagcaaaatgaagaagaaattttaaaagataaatgtaaaggaaatgtaaatattgcttttagaaatgcatcagcatgtttctctgaggaaagatatgtatgggtttcaacaaaaatgttgtgacttatt

SEQ ID NO: 55116 - DNA, 715 bp, Bovine  19866881196205
  misc_feature (1)..(1): n is a, c, g, or t
ntaattctctaaatctaggttaacgtactttttgaagtatattcagtggtacagccaggaaaacctccctttaaaaaaattatgatttatactgaaaattgttgatctaatatgaaacttaaataaaaatatattgtcttttttaggggaaggcatcctcttactacagcctggaaaacatgaatttccttttagttttcaacttccatctgagtaagtgaaactgtgtagctttgggggttttctttccctggaaggtgtctgtacattgtatggttactgagtagcttctaacactcaggtgtaaatatttatcataagtaacctctgatagatcccacccctgttacctctctttttttaaacaaaactgacacttaatttaaggggttttccccatgaatcggagaaggcaatggcaccccactccagtactcttgcctggaaaatcccatggatggaggagcctggcaggctgcagtccatgggtcgctaagagtcggacacgactgagcgacttccctttcactttccactttcatgcactggagaaggaaatggcaacccactccagtgtttttgcctggagaatcccagggacaggggagcctggtgggctgccgtctatgggttgcacagattcggacacgactgaaatgacttagcaacagcagccacatggattagtggtaaagaatctgcctgccaagcagaa

SEQ ID NO: 55117 - DNA, 1059 bp, Bovine  19866881417941
  misc_feature (1)..(1): n is a, c, g, or t
ncccccccctacctaaatccaatgtggtaaaggtacagagtcacacacgcaaatgctggctcccaaatgaccctttgggtggagtgcgggaaccagtcagtcttacagaagtcagaggcagggcagaggaaacaagaaatgacctctgctagagacgtcagtcagagcaaggataatgtagggcctgggagatggagaggaggttaaaggaactgagggtatttagccacggggtcaagttgtgtgagggcatcatcggctctgaagtgagtagctggtggttctggtctcagccttcacacagctgggggacctgagaccgtagcttctctgaacctcaatttcctcatcttgagatatcagtaatgatctgtcccaggcagtgctcttgacaggattcaggagacagttcaggtaacccatcacgcgcgtgtcttgcacagctcactttcactaaataaaagcagttatttcatctagaaaagaaaaagcttggggagggagacgtgagaactgccttcacatttttaaaagcctgtcatatgcacgtgagtttcaactttttctgtgtactctggagcatagagattctgtcaagaagttacaaggcagtgagttttacctcaataaaagaagaaaaaaaaaaaaaaaaaaacagattgaaagcaaaaatggactggggagaactgagtaaatttctccaaagatttttcaagcaaatcttagctttctctttccctgggataatgcaaagaattcacaagtcatttgaaggttagcttcgaaggcattgtaaatgccttttacctctgagtgtctgtgcttctatcaaaaaggcagtgaagggcactccagtcccaaagccagagaggacgcctccatatttaggaggtggggcacaaccacatcagccatcatccacatgaaacctgttaagtaaagtctagcagctgcaattccattgcatgatgctgtttttaagtcacaaaaacaatgagttataatttacctgagagttaaagtctaccctctatctaaaaaaaaaaaaaaaaaaaaaca

SEQ ID NO: 55118 - DNA, 965 bp, Bovine  19866881733560
  misc_feature (1)..(1): n is a, c, g, or t
nttccatctctctctctctgcccttctctctttaatttctcctcttatattctcaagcaggggctgaatatcaagattaaggttcaatactagcccaattttattgttgatctctcaacccagagaaatatgggcttataatggaagtcctgacacagactgggctctaataaactacaagatggaccaataaaccacagaaagagcctattaccgagagccattactactcagagaacagggcaaaatttattttgttctgaatgttgttggagatctctaacataggatgggcagttttaaacttggctttgtgttggagagaagttatcccatgcttatctcagaggaaagccctgggctctcagggaatggaggcgcttcttatattatctcatgggtgtcacatcaaagtgggagtagactcttctttgaaagaaacttaaattgggacagtacagaaaaggtcaaaggtcatacctatgattgattttaaagagagccacttaacatggttttataacataagtgatgtcctggtgttctgtggtcttttcttcatcctggaaagtgacttggatgggtgatgttacacggggtgcaatggtcaccactcagctgtttaattttagcctcttctcatttcaagtttcatgttaccatcttgctcataatattctaatcacttagtaatgacaacatgttgatagcgatcacttcatgttcttcacagaaaggtgatgaatagtagttgaatctgccacttcccagggctgtgttctgacccttgaacatattcttattccatatactgggtgttggctgagtacagagtcgctgttattcacaatgcaatgttcatcacttctggtgctgaactcagagctcaccttttaaagatgggctttcagaaaggtggatgcaagcattctcggttcaaggacatgataccaggctgactactt

SEQ ID NO: 55119 - DNA, 685 bp, Bovine  19866881890689
  misc_feature (1)..(1): n is a, c, g, or t
naaacagcactaaaagtaaatgttttcacgtttctttttagtttttaggtttttttttttcttcaatctacaggattaccaagagcaaaatgtaaaagaaaaacatggtagaaattggctgttttgtgaaatataggaaaaaatataccatctgtgatttagcacagttttcaatattccatctgtggtctaactgccgttcttcacaaaggctgcatccattgtagttcagtatgattttttaaaaagtttttctaagaagactacttttgtaaaacattgttattcttgacatggagtttcttttgaatgaaatagtaaatatggcctttggactgcagcccaacaggctcctctgtccatgggatttttcagacatgaatactggagtgggttgtgattttctccttcaggggatcttcccagcctggggatcaagcccgcatctcctgtgtctccggaatagctgctgctgctaagtcgcttcagttgtgtccgactggcatagcaggtacattcttttaccttctgagtctggagcatcccatattggagaagcccaatatggccttaacaattgttttaagtatttgttgttgttgtacacaagggcttaaaattctgaaaatcactccacccttctcctgtcaccccatctccagcgaacttcattatataaaatgta

SEQ ID NO: 55120 - DNA, 1174 bp, Bovine  19866882161984
  misc_feature (1)..(1): n is a, c, g, or t
ncagaggaaacccctactcaatactctatagtaatctaaatgggaaaataatctgaaaaagaatgaatatatgcatatgtataactgaatcactttgatatgcaccagaaactaacagaaaattgtagatcaattacactccaataaatttttttaaatgttcacatttgctgactgattttcttttttggtcatgctgcccaacctgtgggatcctagctcctgaccagggattgaacctgggattttggcagggagtgaaagtacagagtcttaaccactggactgccagggaatttcctactccaataaaattaaaaagaaaaaaaaaagaaatctgatcaatgagatgaaatgacagaaaatatgaagggtgagaaaacttgctagctgaatctttataaacttcaagaattcttagagaagatttttttaaaacactgtacaaatgtgaacctttaaaactactctcattagggaacacagagatcatgattccaaaatgtgatttgattcaatttcaaaggattcagttaaaggtagaattaattcataagtttaaactacatggtgcttcacttgacaataaaagattaggactaaaggtaatcatccgaatttctgccatattttaatgcagttttgccacttgccctaactctttttgctattgctagtactggctatactgaccttgacaccagagtgaccactgtctataggctgaatccatgagcctatccaagttaataggaaattcattttaatgtatccgttatacttgactgacaaaggatgctctctatgtatgttaagttctgaaaagaaaaatccgtctcaaacaataaaatggagtgccttacgatggaaaatgtaaggcaaataattataagaattacagtaataataataatgttattatgaccccatataaaattgaaaaaaggcaaaaagccaatctacaaaattgctctcgttctaagaatatctagcttctggtcatttcaaaaggcaccagatcctgttgcaaccacgtcaagctcaggtcaacccatccccacctcatccaatgcattaggaattctgcaaatgagtgttcttggttcacagggggtttgatcacagaaagctagttgttgatcttcggatgcctgcaggcctgcaatctgtgcta

SEQ ID NO: 55121 - DNA, 3376 bp, Bovine  19866880208667
  misc_feature (1)..(1): n is a, c, g, or t
nttcccatctctttcagaattttccacagtttattgtgatctacacagtcaaaggctttggcataatcaataaagcagaaataaatgttttcctggatccttcttgctatgtcaagtctatttctgttttgtaaataagtttatttgtatcattttcaaaaaggtaccacagcaaagtgatattatattttgtttgtctttgtctgacttacttcacttagtacaataatctcatagccaagacacggacgcctgatatctgtcaacaaatgaatgcatatcaccacttctttgatggctcagtggtaaagaatctgcctgcaattcaggagacccaggttagatccctgggttaggaagagaccctggagaagagagtggcaaccttctccagtattcttgcttggagagttccatggacagggaagcctggcagactacagtccacggggtcataaagaatgggacacgactgagtgactttcactttgatactattatttactatatgtagcattctatcagtgtttttagaaacaatcttgtaaaagtaagtcaggatgaaattaagtcaaggactttcctggtggtgcagtggatgagaatctggctgccaatgcagagaacacaggtttcatgccttagaagatcccacacgccacagaacaactaagtccaagtgcctagagctagtgctctgcaacaagagaagccaccgcaatgagtagcctgtgcactgcaaccagagggcagtcttcactttctggaaatagagaaaagcccatatatagcaaagaagactgagtgcagccaaaaataaaataaataattaaatactattttgtttaaaagaagtgaagtcaatattgcactatgacccttttaaaatggcatctcatgcccaaattctctaatgaaaagctggcatcctgagtcaagtaaaaaagccccccatcaaatgattaaaatagtttacaactactggcaatatgaaaagtgtcaattaacttttctgtacataatagtagcagaatcataaatttaggaatcaagtattcttatttgaaatccttgttttactgtgggaaaaaggacaacttgttgaggttttatgatgattaaattaggtagtacatatgagaagctgacaaataatggatacttttttaatgatgtttcagtaacttcacaccagaaaaaaattgtctatttcaggtcaccttgtttacttctttataccatcccctgtgatgacaacttccccacctgatgaaattggtgttaatgatggaaaagtgtgattagatctttctaaccatcattaaaattttgctaatgaagtctgaacttgttccatcaaaaatagattttattttatttagacatttaatttttaatttaatttttgaatatagttaatatacagtattgtgttagtttctcttgtacagcaaatgaatcagtaatacacatacatatattgactctttttaatattttttcccatatagatcattacagaatattgagtagggttctctgtgtgatacagtaagttcttattagttatctattttatatatagtagtgtgcatatgttaatcccaatatctcatttttatccttccatcattcccccttggtaaacctaagtttctttctatatctgtgattctatttctgttttataaataggtatattttaaataaccattttatttttcaagtggattaaaaaatgataaacaaaatgaaagctttatccataaaattatcctgaaaaatgacaagaatgatgctaaaattagtaaaggcatctttgtatgttaatatttttatgttctacaggattaatttgtacttaacttttattcagtgagtcattatacatgtaattatgtattaaaattaatttgcattattgcactctattatgtagttttgttttcatgatcaaggataaagtatgaaaatacagtctggttataaaagaaaactattatggcagtatgatatacaatgctgcctttgtatattaaaaccagaatgtttttctcaaaagatacattaactctgcaagtaatacttcactctgttgaaaagtaaaagcgaagagatttttgatgtaaattttcttaaagaagaggaaattacatttattatgcttctatatttagatcagtgttttgttttgatgtaatattatcctatccacttcttttttcctcaaatcaggctgcagataattttagttttactggtagtttgtctatttctcttatagctatgactttttaaattacatatttctaatagggaggtggggcaaggaggttccaatctaaccaataactacaattatagatttgatacatggtcttctaaatataggatataagcttagttaggtttttctctaataaaaatgacattttgtgcatttctgtaaaacactttaaaagctgaaagtcacacaagatgtattttattttttaaattgaagtatagttaatttaaactattatattaatttcaaatatacaacatagtaatccttttattttttatttttatagattctactccatctaaagttattataaaatattgactatactccctgtgtacaaaatctattttaaaatagctatcaaaagacaaggacccctgagagatggaaaacaaactgcataaatcctactgtgatgattcattttaatgtgtcaacttgtctgagccaagattcccagatatttggttaaacattattctggaagttttcatgaggatactttttgaataaaattgagatttaatctgctggacattgagtaaaagcagattattatccataatgtaggtgggccccatgcaataagttaagcaccttaacagaacacagactttcttgagcaagaaggaattctgttagcaggttgtctttagatagaaattacaagtgtgttctaggtctccagccctccagcttactctaaatattttggatttaccaaagcctccacagtgcataagccagtttcttaaaataaattcttgtctctggagaaccctagtgaatacagctatatcattatagatactgtcatgaaaacagtttataggcacatagcagaaggataacaatcagaatatggtggtcttcattaattgaaaagactgaggaaagtgtccaggaaagccaggttagttaaagttctcagggcaagatagagaagtaatagtagggacctgatttcctcttagaccaaaaatgatcaacaggtgaatgcaggaactggaacaatagatttcaaaacactgggcttcagaaaagaaaaggtagtaatcactaagataaggaaaagcgtaagtcttc

SEQ ID NO: 55122 - DNA, 1314 bp, Bovine  19866880957820
  misc_feature (1)..(1): n is a, c, g, or t
naattaaaaagtgatgtttagtatgtctgtatgagagagatttgagctagaccagaagtcttatctgcatggatagtaatagggtggtgtctcctagagtcatcatcaccactgacttcagaaatataaatttgatgaagctgaatattgttgctttatcattatttgacaagaaaatgtgagccatgattttgttaccaacataaatgaggctgccccaattaaaatgcatggtcatttcctgtttgtggcaaaattaatgtgacctattactgaaatgtgttacttgaaaagcaccaacatatgtattctgtgattatttgccttctgcatcttggtatccaagcaccagtcactttgcattttattcttttagtgctctttctgatccaagacttagatttatggtaaagtattcatcaatcaaattggcattgcttttagtcacatttagggtgaaagaatgtttgaatttaatcaacaaatgcacatgtttcactcctggatatgtaactgtaggcctcattgcagttttaatagcttagtttggaggctttttagaaaactatcattatttatacaaatgcatttgaatgttgttgtctattaggaattgaatgaaaagaaggctatgcaaatttcttccagaagcttagtatgccaacactgatacagcttcaacttagaactgtcttcaaatggactacttgactgccactgccagttggatttacttaactattatttccctttagccaaaggcacaggatgtaggaaatctatatctattgctttggcagaagcttagctatttatcatttgtgtgaggatcaagcaggccaggtgtactgtttactttaatgaagccagtatagaaaagggagttcagaataatgatataaagcattgttcatttacttgaccctttgcttgcatttgcaagaatgcttgtagtttcctagaccacaaaatagcctgaattttaattcattttcacaaatactcagaaaaaaagccacttctgtttagacaccatttacactatgctgtgctttttgtttacttgaaaaaaatgaagatttctttaagaaaaaagaaaaagctgacccacataacgcctaaaactgaaagacagaaaattgagggaaaaaaatgatgatttgaagttagggtggagtctaaattgtatatttatggaatcacaagtgatttggaaggtaatttcaaagtcccctaccttcttttcaagtagatagtgtttggcctgattccaattcttctaggtatttctaagttctagtgttggggagtgag

SEQ ID NO: 55123 - DNA, 1225 bp, Bovine  19866881299057
  misc_feature (1)..(1): n is a, c, g, or t
nttttttttctggttaaaattaatggcattgatttatttaccatcagggaaatgatctgtattgaaataaatctatagtaatggaactatatgaggtacatttttaattattcaaaaagaataatttataaataatctccagatgcttttgctgagtataattcctcccttgggaatttgctcattcctgcctttgcctggctgtacagagtttttctattatatgctgttctctatttctttggctcctactcagattctccctctttgcctaccactttcaatttatgacttattcaggtttatcctttttaatttggctgctccccaagtaattgccttctggggcacatacttctcaacctgctcaacagttcttaaaaaattatgctttactttctcatctagctctgactagatagaaaactcaatttttctacttcctcaaaacatgagtcactctggttccttggggaataatgtatttaaattatgcatttatttaatatggttaattggaatgagaggcagttctggttagcagactcttttattattggactcacattgaaccatctgggtgtgaatcctccctttccattaactaattaactgtgtaacatcagatttaaagttttttatctgacaaaaactatgataaaaatagtacttaaccaataagattgtgttgattaaatgagaaaaaaatattaaagcttagtacagtgccctatgtctttagacatatactcataaatgtgcataaagacacatatgtgtagacataagtatagatacaatgtgagttattttagaaaaatatatctggggatatttagagaggaaaagtattagaaagatatttacatgattttttttcagtttctttacatcacatgataataatttaacctgcctggaacatgttcttgctcctttccacccaaatcttcattccagttcaataaaccattttagtaattgtaattcccactaatatctacctattccaaaataacataatagtactaattatattatttggtctcttatgaatgggtatagaaagaaagaaaatgaagttgctcagttgtgtccgactctttgcaacccccatggactgtagcctaccagactcctccctcagggtcttttccaatgtgttagttctttgcgtcaggtggccaaagtattagaatttcagcttcagcatcagtccttccaa

SEQ ID NO: 55124 - DNA, 1401 bp, Bovine  19866880244433
  misc_feature (1)..(1): n is a, c, g, or t
ntttcactttcatcaagaggctttttagtgcctcttcactttctgccataagggtggtgtcatctgcatatctgaggttatcgatatttctcccggcaatcttgatcccagcttgtgcctcttccagtccagcatttctcatgatgtactctgcatagaagttaaataaacagggtgacaatatacagccttgacgtactctttttcctatttagaaccagtctgttgttccatgtccagttctgactgttgcttcctgacctgcatataggtttctcaagaagcaggtcaggtggtctggtattcccatctctttcagaattttccacagtttattgtgattcacagagtcaaaggctttagcctagtcaataaacagaaataaatgtttttctggaactcttttgctttttcgatgatccagcggatgttggcaatttgatctctggttcctctgccttttctaaaaccagcttgaacatctggaagttcacggttcacatatgtttagaaaaaatgtttagagtagagcaaattaaaggttttagaaatcaccaacaatgaactccccccccaccttgatttttcatttcattgtaggcatcatgttatagatgttaccaactgggagtagtcacgtggatgaaggtgggctttttatttttcacctttaaaaatgtagtaatgattgaaatcttgcctgatgctatgaatttttcatactagccaggtagctattcagcccagcgatctaaatctgtacacctcagctgcagtccaagcagaatgaaatggaaatatgtgacggtatttcactaaactctatcatgcatgggcatgccacttcctttattttttacgcatattattcattcacgcagtaaagcaaatcggtttacacacacagacttaaatttgcttttcatttataagtggtaaaatcctttcttaatttattgttctgcatttttatatactaactactgtattttatactttgaattcctcattcaatatggttgagagtatcatgcaattatacaatctgtatactttcaattttaaaaagcaacacaatgacccaactttattacatgtatctgtatatttatatgggcttctctgatagctcagttggtaacgaatacatatacatattcatatatatatatacacatatgtatatgtgtatatatatatatatatatatacacacacacgcatgctaagtcgcttcagtcatgtcctactctttgagaccccatggactatagcccacaaggcttctctgtccatggaattctccaggcaagagtactggagtgcgctgtatatatgtccttctccatatatacatacacatatacaggtacacacacacatacacacacacacaccaca

SEQ ID NO: 55125 - DNA, 1526 bp, Bovine  19866880423715
  misc_feature (1)..(1): n is a, c, g, or t
natttttcagtttatccctatgtgaaactggcacaggtcaagctgaactacttcttttctaaaggagaaaaaataaattctcattataaatttaagtgaaatggtttacatctatatacacatattggctaataaattaagtaaatactattataacactcatcctggataggaaggagagtatataacacacacacacacacacacacacacacacatacacacacaatggatcaactttctgatatacgtatgagaattgattctgttttccttgtcatttactaaatcttttaaaaactgttttctcacattcatttgggatgttttcagaagaccagtctgtgaataaagtaaaaatcacagctgaaaatgaattagcaccatctctaaaggagcagacctcaccacctaggtgccaaatgaagggcacgatgaccctcataaacaccttgtgtgagttaatgagagtgaaggctcatttccataatgactccatatttgcatctgctgcataccactcacagagccctgtaatagaggttttcctggtacaggctggccaaagtcagctgtgaatcaggctgtgattctgcagtaagaaaatgaccatgcagtctttctgtctggcccagagcccaagtgaaaactgttgcattggctccacaactacaaagcctctgaaacacaccatctgctgggtgtctttgttgctacttactcttccttgtgagagttggactataaagaaagctgagcgccaaagaattgatgcttttgaattgtggtgttggagaagactcttgagagtcccttggactgcaaggggatccaaccagtccatcctaaaggaaatcagtcctgaatgttcattggaagaactgatgcttaagctgaaactctaatacttaggccacctgatgcgaagagctgactcatttgaaaagaccctgatgctgggaaagattgaaggcaggaggagaaggggacgacagaggatgagatggctggatggcattgctgactcaatggacgtgagtctcagtgaactcggggagttggtgatagacagggaggcctggcgtgcggcagtccatggggtcgcaaagagtcggacaagactgagtgattgaactgaactgaactcttccttgtagctacataaacattcatttaccatcaagtatctacttccagggtcttctctgctggctcagtggtaaagaatctgcctccaatgcaggagacccaggtttaagccctgggtcaggaagatcttctggatgagggcatggcaacccactctagtactcttgcctagagaatcccatgaacagaggatctggaaggctgcggtccttacggtcacacagagtcggacacaactgaagcgactaagcggcggcagcagcagcagcagcatttacttccagaaagcacgtctatgacaaagtgaaaagacagattctctcactgttttgctacttctgtcaccaatatcttcttacttgtaaaaggagtaagag

SEQ ID NO: 55126 - DNA, 1189 bp, Bovine  19866880455119
  misc_feature (1)..(1): n is a, c, g, or t
nacagctaaagactccttctaatgtttaagtagatcatatgcaataagatttgtctaaatgatctagtttagtaaatgccatccaaacacatcagcctaactggccctcattaagaatacaatctgccttcttatctttgttaagaagaagaaatgtttgcgataaaatatttttctaagtcgcttagttcaaaatcttataaataggcatgtggaaaattagaaactcaaatactggtgattctttttacactaacttttaagcatccaatgtatactcagcgtttagcaaaatcaagatgtaattgtttaccttggtccagttaaactaacctttatctgaatgtatgctggcaacaatacgtgcattaattacaaatgccaagcatcacaacacagcaggatctttcattcagaaagtataggtcttcaaccagttaaagaattaaacatcagaaaaatgttatgtgtttcaaggacttaggaaatatagtagaaactcaagtgcttttaaaatcttattttacctgcaggataaccttggacaagacacctaatactagttaatttcccaagctgcatttttggaacataattgtaaaattgaatagtttgtttaactatatgttgtacagaagaagcaaatgtcaagtctcacctaactattagaaatgaaagctgagaatatccaaaataaaacaaccatatgattttcatcaataacagaaatatcactattttttcaaaagaatccaaatttgtgaaaattatgcctaataataagagacagagaaaatgagggaaattgaagccatgttgactattcagcacacataacatagaaataaatgggtcccatttcatttaacttcatttaacaagtatattactatattgtgtacttaagaattcccttgtttaagtactgcaaaatgtatataatataaaatctctttcttcaaagaggatcagagcatccagcaggaactacatgtatccagctatagcctggcaatcaggaaatagttatggaatttttttccttctctttcagaaatatcactattttgtaaacaaaaagacataatgaaacgaatcgccagtccaagtttgatgcatgatactggttgcttggggctggtgcactgggatgacccagaggaatggtacggggagggagaagggaggg

SEQ ID NO: 55127 - DNA, 1649 bp, Bovine  19866880486345
  misc_feature (1)..(1): n is a, c, g, or t
naatcactgtgttgtacatggaaactacagaatgttgtaaatcaactacacttcaacaaaaataaatttcataaataaaggatggcttggttgttagtgagacgtctcctcagaacaaattaaatagaaatcattttaacttctcccccaaataataagaatcctggagattttaagtgcctaagtctgctgcagggcccagggggcgagggccagtatttctgatcctttccatcagagcttcaggatgactggctcagctctgaaaccaaggcaagatagatgaaggtgtttaaaaatagtcattgcttgacttggttgctccatgttatctgtattgttccttttcagttcgaaagctaactgtataaaacatttatgcaaagtgaatgtgtagtttttaatagaagttttattagatagctgcttgcacatggatgcattgtttctttaatataattatgtaaaacaagctctcatttataggttagatagctaagttattgctttcatttagtgtctaagttttgatttttccaatcctgcagacaatgtgtcgtaaacattcctttctagggataagagtgtaattagtgtgagaacaatttgtcttaatgagaaactgacatcagttcagatgaaaaatttgagagacatctcagaaaaatttatgtctcttttggttaaaaacatcagtcctgacacacactcaatcttggctcactcaccattcttcccattaattaatttactgcatttatgaagagctttctccgcagctaacttgatttcatttccttcagttttgtggttgtcatagttcatattcgtccacctgaaggtatcaagcctggtcaggtttgatttggttagaacatcatttcctgttttttctattacacaaatattgataactggaatttaatgaagggttaatgtacttccatgcagctctgaactcatcgtcaaagacccttacattctaactgattaattgttccccaaagcaaagtggatttggatcatagacttatagcttttagacttctggttcgcattttcttcttttcttttctattaaatctgcttataatagcaaacgtcacaggctgcacatacatgttaacaaaaatcttgcaaggcagaatgcagggcatgctaaaaggggattgatttcctctgtagttaaaagcaattatgctttatattctttaaagagaaggaacgctatttgatttagtgacctacctagatgaaccggaggacccattccaggcatttcacgactgacttgaagagggcaaggattctagaagtttccagttaacagagtgaggctaaggagttttgagtcagtgagaaaaggcaaagcccaagtggaaatgatcaggcagggacatactagactttatcaatcagaaacaaaagtctgggctttaacagcagatgccagcgcaccactcttgaaggccagacagcccagagcatcagatgttaggggttaagttcacataggccaccctgcagtggagcccacatgggatcctgcccatcatcgtggatttctggcttccatggaaggggatgcttgtgaacatctcagagtttatataagcgtggtttcgtccttcagtgaatgatggctgtgt

SEQ ID NO: 55128 - DNA, 1751 bp, Bovine  19866880775357
  misc_feature (1)..(1): n is a, c, g, or t
ngtgctatctttataattatatattattatctttgttattgccatagtctaatgaaaaataagcttgcatgtgatatttcacctctcagtgaaagaagtgtgaaagacatattttcaggtgaccatgtgggttgggagatatgatatgaaaaattgttctttcccaagatagtcaagccacacgatcttctgacagtgttgtctttcacattctttctgttgagaggttagctttatatcctatgcagttgagacagaaaagactgctgagccttttgactagtcaaatgagacccaagtgctgtttgatgacacccaagactatgtcatagaggagatgcaacctccacattgctcactgacaccctgcctctggaatcctgacctgtaacatgaatagttccattgtcatgaggtccccatgctgtcaggaagaccagaaaaagatgtcataggaaagctatgagactatatgaggagagagatggatgaccagcctccagctgcctccttttcacctacaatctgcctgcaatttcgtgggagactctgagtctcacctgcctaaccaatttctttatggattcctaacagataaaatggagaaggaaatgtcaacccactccagtgttcctgcctggagaatcccatggacggagaagcctggtaggctgcagtccatggggtcgcacagagtcggacacgactgaagcgacttagcagcagcaacagcagcaacagataaaaatcatgagaaataacactattattactgttttatgacaccaagttttgcagagatttgttttgcagtgttagtacctgatataattatgtttccatcttttctcaaatttattgcttaaaaggttttctcaataaatggaaagaatacatttgttgttacattacacttattgtcttcagaatgagatatttaatttttcaagttgacattatttttcacctcatagaaacttaatttctttgatctgtgagggttatggaactcactttccccctttcttccttatttctatctcttttgggagaaatgaatctgaatttcataaatgagagtgacagcaagagaaggatgcactttctggatcagttactagagtcaacaataccttcactcaacaaaagattatttaaagttatgtttacaccatgcaggatgtattttaaaagtatttcaatacttctatcacttggagatgatcagtaaaccccattattttgatctaattttgatttgacctcacgctatatggttgtgtcttcacatattttgcagtgtgatttctctgcattatagtatagccagtggatgtttcacttatgctaatagaactcttgtttgcaaacttaccttatctggccaaacttcttaaagcacctagtctctacggttccttattgagccaaattatgatgatgatgggtgatgttgatgagtgtgataattacgtgaattcttctccttttcttatttttcttgttctatttgaaaattttcaattccttgctttccagttctgcttaggagttacctgtaattaaaatatctttattctctttgtatattataaaatccatagtctaaattagccttaggaaatgtgtatcattaggaatgaaagaagctttttctagttactcaggtgtcccctgcttctgtatcaaaaatgggtgcagggatgaatttatgaaaaggggttttggcattcccagggcataatccctta

SEQ ID NO: 55129 - DNA, 1567 bp, Bovine  19866880893294
  misc_feature (1)..(1): n is a, c, g, or t
nttctacgatggttttgaactgaacccagagtcagacaatcagagatgtgaatgccgttcaaatgtttatggttattggtttttgctagtgttattggccctagatcactcagaagtaaacttaacaaattggcagtgcagctccctgggccagcctcctagagagccgtgccaggggcttcctgagcctctaggatggaggatgaagcctggggggaatggactgcatagttttccatctgaacacccctcctacactcctcattcaataattcatagactggggttgacaagcaaagttgtctgaagaatgcagtcagatagtcacagaggatctgtcaaggtaatgcctcccttagggtttctggaaaaagaatctttccaacctgacatttaaaaacactacaggtttcagcctgtctaccaccctcaccccttgctgttgcagaagccaggatccaaatgctatgccatatgctaacatcccacagataccaaagagaattgagatgcatctgacatggctggagacccttctcttcaaattgtcctggatgtcacaggcaggagaaaaaaaaagagctcgttttctgttaaatcaagtatcctcatcaacccagcttgacttacaccacatcagcatgtcaggagtgatggaactttctgcagtagtcagaagatatttaactacccaaagaaaactcactgcctgggtgttgtcctaccatttaaaatctttccattttattttatctttaaattaaaaaaaaatcttttgtctgcaccatggggcatgtggtatctcagtcccctgaccagggatcaaacccatgccccctgcattggcagcgtggagtattaaccactggaccatcagggaagttctagtttttccattttaaacatttcttgaatctggctatatttggatgctaccttatagttggaatatatattttaaaaatataccttttcccaagtaagagtattagttatccctggaaaagtaaataaatacataattcatataaaatgtgaagctataaatgaaatgtgtttcttggttttcattcacccttagtgtagctcaccattaggatagagtattttctttctctgtgctcactttatctcaaaaggaaaattctgaaattcagtatcataaagataggtatctcagagtctccaacatggtcctctccctttgcttgatttgtagagttatagcaccatccttgctgagatttcccaaacccattttcccatcttgactagcagtctttattccccagtagtagatcttgtaaattttgtaactttccctgaatgttataacatacacttcttttttatgtgactttgttcaagtttccgtgaaatcatgattggattactcagctgtgatttttaaaatttttattgagatatagttgatttacaatgctgtgttagtatcaggtatacagcaatgtgatttagtttatatgtgtgtgtgtgtgtgtgtgtgtgtgtgtgtgtgtgtgtagtcttttttacagtctcttcctttagaagttattacaagata

SEQ ID NO: 55130 - DNA, 961 bp, Bovine  19866881472935
  misc_feature (1)..(1): n is a, c, g, or t
natttttggtaataggacttggcataaaatttttgtgttatcagatctgtgcaattgtatgaatggtttggagatgttatagaaaatgtttttttgaattgtcaaatagggagaaatgaaaaactatttttcttgattattttattgaagcatagttgatttatgaaagtgaaacttcttgaaatcttttcagtattctttaacctctacaagtgtcaatcaactgatatttctgagaacagaacaataaatcaacttgatccaagaaacacaaaattaaattcagttagtatactttgatctttctgcaatgatttatcattcctttctattttcaatataggaatatgtatgaagcatggaaaagaaattagacgtttaaaaatctcatattcaaatctatatagatctataatatatattacaatgttcacatctagtaatttattatagatatatttattttttattgattaactactatactattccactaacatactctcagcaaaactttcatgaaatagacattttaaatatccttctgactcactcatttgtgcttaaaaaacccccaaatcgtaaacacattaatttagttcatttcatcatcattgtgtcatcttttcttgagtaaaacctggtttatatattcttctgttttggtcttgtcgaatgtctgcctgagttggtgctgggatttcctgattaggctcatgaccagtgtcaccaactcaaaaatcctggtggatgttggaactttcctcacagtctagtggttgggagtccatcttccagtgcaggggacataggtttgatccctggtccaggaactagggctctaggatcccatacaccacagggtagctggcccaagttctacaactagagatcccaagtgctgaactcgagaagccctcattctgcagctactgagcctgtttgctctagagctagtgct

SEQ ID NO: 55131 - DNA, 2016 bp, Bovine  19866880157512
  misc_feature (1)..(1): n is a, c, g, or t
natgccatcatctttgttttctgaatgttgagctttaagccaattttttcactctcctctttcactttcatcaagaggctttttagttcctcttcactttctgccataagggggtgtgagcatatttctttgtatgaatgtgtgaatgtgacgtgtgagtgatttgagtgtgcataagtaggagcacatgtttcagtgaatatgcaaatatgtccgtgtgtgagcacgttcaggctttgcaggtggtgctagtagtgaagaacctgcctgccaatgcaggagaggtaagagatgcgggtttgaaccctggatagtgaagatgccctggaggagggcacagcaatccactccagtattcttgcctgggagaatcccatggacagaggagcctggcaggctacattcagtagcgtcatacagagtcagacacaactgaagtgacttagccacacatgcatgtgagcatgttcatgtgtgagtgaacctgagtgtaagagtctctttgtgtgggaatgtaccagcgtgttcatgtgtaaaaaaacgtgagcatgtccacatgtgtcaacatgttgatgcaaaaatgtaagactatgagtaagtatgttcaagagtgaatgtgtcagcatgtatctgagtaagtgaatgtatgacaattcttatgtgtgttatagatttaatgggaaagtgtgactgaatgtgtgagcatgggtttgagtgtgtttcttccccctgggtttttttcaggactgcatgtccacatggtgaaatgtaaggcactgtgcacaaataagcttttcttctctattggctcaaaactgtctataaccagctgtacagctaggacacattattctctgtaaataacatcccacccctcctatagaaacatgtgtgactctcatgattcaccctgctggcttcactgcaggctaactgccctgaagctgacctgcaaagagagaaataagttatcccaagtcgaacgctttagaaagcaaagtgctattgggaataattgtttgaataacagctgagaagtaaatggggctctgtgttaggtcaaatcccagacactagcatttagggttaccatgatcaagccccagcaaagtgcttacaggagttgctataaacacagccctttattccaaccattcagaccccaccccccacaaacatgccattagagaatggaagctatgtatgtcagttaagaaaatctagcaggcccagggagccagggaccccaccgaccccaaggtcatacttctcattctagaccatttagtgccactcagacagccatccctttgggtgggatccagaagaccctaaaggcccagcacagggcctggtcgagagactcccagcgataagagcaaatgggagctgaaatacagtccacattctcctcatcaagctgcgtgccctggctctgagatgcagcccaaaagacgggagacatgttgtactttatcttcccagagaggacgccttatgtgctagaagggatctgcatgagaacgtagtggaagtatccatacatctcaaaaaggcaaattaaaagtgttacggactgcgtgttggtgtactccaaatacaaatatgtacagcctggggggagtgccactggtaaggtgcagctggtttgctgcatttcagctcttttcaacctaacacaaaactctttttttttttttaattttattttattttttaactttacaatattgtattggttttgccatatatcgaaatgaatctgccacaggtatggtatggggagggaggagggaggagggttcaggatggggaacccatgtatacctaacacaaaattcgtaagtgtcatgacttccctggtggtgcgctggctaagactgcactcccaacgcagggggcccaggtttgatccctggtcagggaactaaatcccacatgccacaattaaatagtatgccacaactaaaggttccacatgctgcaaataaagatcccacgtgccacaactaacga

SEQ ID NO: 55132 - DNA, 1144 bp, Bovine  19866880245166
  misc_feature (1)..(1): n is a, c, g, or t
ntctgtctacaatgtgggagacccaggtttgatccctgggttgggaagatctcctggagaaggaaatggcaatccactccaggactattgcctggaaaatcccatggacagaggagcctggtaggctacagtccatggggtcaaaaaatgtcagacacgactgagcgacttcactaagactcactaatgtaattactaatgtaaagtaattccaattgaaataaataaaattttttaaaaagatataggcaggttgagatttgtgtgatatggaggcagagactggagggatgcagccacaagccaagggatgccagcagccaagagaatctgaaagaagcaagagattgggtctcccctagagcctctggataggttatgaccctgccaacactttgatttcagctcactgaaactgatttcaaaaactatgttgttttgagccacaagtgtatggtgatttgttatagcagccacagaaagctgatacaggaagtgttcataggagatgggtttttgtttcttctgctaagtgcagacttacaatggtttgactcatgattttttgacactacaatggtgcaaaggcaatatgcattcagtagaaaccatacttcgaatttttatcttttcctgaactagcaattctagactcttttgctgctgggcagtacagcaagccacagctcctactcagccatgcagtcatgaaggtaaacaaccaatacacttagaatcattctgtacccatacaatcattctgtttttcactttcagtactatatttaataagttacatgagacattcaacattttattataaaataggtcttgtgttatttgattttacctaactatgccaaagcctttgattgtgtggatcacaataaactgtggaaaattttgaaagagatgggaataccacaccacctgatctccctcttgagaaatttgtatgcaggtcaggaagcaacagttagaactggacatggaacaacagactggttccaaataggaaaaggagttcgtcaaggctgtatattgtcaccctgtttatttaacttatatgcagagtacatcatgagaaacgctggactggaagaaacacaagcggaatcaagattgccgggagaaatatcaataa

SEQ ID NO: 55133 - DNA, 1138 bp, Bovine  19866880282641
  misc_feature (1)..(1): n is a, c, g, or t
ntcagtcgtgtctgactctgtgcgaccccatagatggcagcccaccaggctcccccgtccctgggattctccaggaaagaacactggagtgggttgccatttccttctccaatgcatgcaagtgaaaagtgaaagtgaagtcgctcagtcgtgtcggactctttgtgaccccatggactgcagcctaccaggctcccctgtccatgggactttccaggcaagagtcctggagtgggttgccattgccttctccgataccatgcatatatgaagtttaaaaacattcaaaaattcttacactgattataggtacatatatatgtagtaaaaggtatacatcagagtgatgcatacatatggagcatgcagaacggtgtctatgagaacaataaacttatttaggacagcagttaaatcttacagaagaggaagaattcaactggggagaggtatactgggttccagttttatttataatcttatgttttttaagatggacaatggttgcatgggtgtagtattctctgtacctttgtctaggtctgaaatatgtcctaatttaaagaaaaataaaagaggaaatgggcctaatatctggaacttactgaaggaaaaaagtaaagtacttaagctgagtagaggatcagaaaaggggaggaccaggggtttgagggtaaaaggccttatttctacatttagttaacgccacttgaatgctcactagttagcaatgccttgttctattttttgtgctcgttcatcccatatcctcgagtatattagcattatttatttttgtgtgtatctccccacctcctaaagtgtgagcttctgaatagttgggaatataaaggctttatttatttgtctctcctaaagccctgtgttttcttcatagggatttgatgaaggtctgttaagtgaagttagtacaaggtattcacaacccttttccctgtcactggttttgacatttaaacatgtattatcacatactaacagagtattctttatggctagaacaaagaagaaaaggcacaaggccttttgtcaccattgtttagtgaaagaagagtccaagtaaaatttatccatgtagtgtcacttaaaggcttcaaattggttgttaggttcatgc

SEQ ID NO: 55134 - DNA, 1148 bp, Bovine  19866880577237
  misc_feature (1)..(1): n is a, c, g, or t
nctgatttccaactacagagaagggctcgtaagtgggtcttttgtgggctctttcctggactattatgctgctgacatcacttaccccttgaggaaagccatccaggaaggagatctgcagatggatttccccaaggtgaattattctgacctggaagattctgaggaggagacctctgcagctttaaagaggcactgcaagagaatcctccctgaccggatgagggctgcttgggactgagccaaccagaagctggtggacttcatcatgaaaagaaagggggctgacccacatcttctggacatcgtcaaaggcaggaaagaatccaggtggcttgaatcatttctgaattcacagaggtacatgatccccattgaaacatacctggaggatgacgatcagctggatgtggtggtaagccacttacgagaaatctacaaacacgtagacaagaaaagtgctggctctgatgagagatgacccagtgagcttccttctggacgttcttctgccagaagcaatcatttgttcaattactgcactggatggattggagtacaaggaggcagaagcaaagtacctgcaagggccacctgtgcattcccgggaaaaagaactgtttgataagaaaatactgaagaaaataagaaagagatcagctgagaggtacaaggctaaactctccccctgtgcccaacagggcatcgggggagacgtctcagccacaccattagcaacaatccccgtctgtatgaactgcatgatctttccactccacatggcatgaaaacaccttctggaaatctgaggcctctggaacactcttgaattcactctggatccatctccagcgcctgcgagtggcagagtcatcctgagtttcttcttctgaatactctcacacaactaagtggttaaaatattgtaaacagctgccacttccctctacttgcccagatgtgtagttttccagatattttcactatgtggcttttgactctacttaatattttaaaggtggacatgcattttttttattagatgaaaaagccttatatcagatacaaagcagcaatcgtgtttaagatctaaggcatgtttcttacagaaaagccacatgggcttcccattcctactgggcacatcg

SEQ ID NO: 55135 - DNA, 3627 bp, Bovine  19866880848327
  misc_feature (1)..(1): n is a, c, g, or t
ncaatcacatccttgctcaggaaccaggagctccctcaccctccaaatactgcaaatccctcttcccacagacccttctgcttcactctgttccagaatgcatctcccatatgtcctacatgggcctgcggtgtccacctttcctgggctgcacaagaagtgagtcactgtgtctctaaactatccccgtaaccacccagaaggtctggaccactcatgattagacgagataaaaatccaaagctgtaaatttgcactgctaggaatgtgaaatattctgacgggatttgtacagagagaaaagaccaaaaaaaaaaaaaaaatccatgcaactgaagtggcagcacatagcagaagatggtttcagtctgtacccctctggcttgggggcccagcaatcttctgctgtgccactctgttacatttgtccctgatttagtaaaagtcctgatcatcctggatacagggaaaaatgaccatagcacttttgtgacacagtggtgaaatgaattcaaccccaactcaagccagagactttaaaatttattaagcaaccattgtcatagaggagacccctagtgctaatgaaactgatttgaagctctctgaaggaaaaaaaaaatgcataaatgtgagcaggtagagaggacacctaccccatcacacacagaaagtatatccagtgacaaacaagcaaaaaggatcagagagaaacaaatcagaaaacttgaatacagagggaggaatgaatttaaattgatgcaaaggcccacagtttaatctggttggaaatctagaatttgctaaaagaatttataccccagtaagacctttgtccttggcagacaactgtcttctcactgtgtcctcacatggccttttctttgtttagcgtaaggggagagagagagctctgtggtatctgttcctcttcttataaggatgcccccctattggattagagctccatgcctatgacatccatgtcacccaacacagtcaaataggggttaatgcttcagcatatacattttgagagaataggattcagtccataacatcttgatgtatattttgtgtgcctgtgaggccagtgattcccagagttctttacctcaactgggacaacttttaggcaatggcccaagagtttataataatgtacagatgggcccatttgccagccagggcatccaggactaaaatgaggatgggccaattgtgctgacgcattggtcctgtcctttatcatgggtattgccactatccatcagtattactgctttccatccctccaggtgatgatggtgacaataccatatgtagtgcacaaacattcaatattttccacacaatggattccaaggggctccccaggtagccaagaggtctggaagagggatggcttcttctaccactatctcatctgccctcttgcaagaaacatatgccagaaactctcttgtatcagggaggcctcagtaaccatgctgaggttttggggtgctggttccttgatccaaggaatgctgggcaactgagtacagggtgtcactggctcagggactctgagaacctctattttgacgattgctcattatgtggctgatacttgccactctaatggtttgtagtacaaagccaagaagggcagtttcttgcatcagtagcctgtggacaacttatagcaatcatgggtagtccagagatgccagggggcatgaacaaaggttactaaagcctcagcaatgaagaggcttcattggagacactactgggagtgtccattgttttagccttggacagattctagagtcttttgttggaagaagcttttatcattttgttaatataaattcttttagtaaattctgggtttctagttggattaaattgtaactttagacagaagcagccatacaacaagtttatatattgattcacaaggagcataggaacctaaccctgtatacccgctgggagcaatggtttagtggtcactaattcattacttgtagtgactttataggatataaagtgaacacacactcacacgttgcaggaactgatgttccttgatcagcatgtgaaaatatgttaggatcacagttatgctcagggcctgttcctattcccatgcccttgggaaggaaacctacctgccaaaagtctcaggtatcttggttgacacatcagaaagctttagaaaggccagatacctatagggctcaggctgggtacttgagtatactcatccaagacacctccaggctggaagcacatgattaatgagagaaatgccagttcccagaatgaatgtctttgagaagacagccttaaagcctaagaatctgaaatgaattttttgggtaaagccagaaggttctctctttgtgtcaagccacattcccagttctaaaaacaggtatacaagagaaaggttaacatggttgtgacaacaaaatgtcattcccagctcagataatgtgactttgtgcaggagaatgtaggcttgttagctcagctcaggagggcactgagggtggaagattacttttcctggcgcagtcagctgcccctggatggatccccaccaacatggagagctgtgtccatgctgactccaagatggggctctttagggggttgaagtaattctttttttctgtcggctgccctctgcctgcttcctctcctctccacttgcccaaatgcctgcactctatcccagcctctcatcctgcctggtgacattgacccagtctttgtgccccatcctctggagaaaagctggagaggagaagaggaagaggctgcctcagtgcgtgcttctggctcactcaccatatgaagagaagggagcaggggaaagaatgtgcatacataggactatatgcgtctgtatgtgtgccggagaaggcacggccctcaaaaggtgacagctggggtacttctctgctgtttgttctctgggaaactatgtgatatttaccgataaccagtgacttctctgtttcagcaaaagccttgcaaatgaagctggtttagatttttgacagggtgctgacaggatatcgtgtccgtcttaatccacataaaagaagaaacctgcttctaggcacttgaggggtttttttgtttttgttttgttttgttttgtttttgaagtatagttgattttcaatgttgtattaacttcaggtgcacagcagagtgactcagttttacatatatagacattcttttttacattagttttcattgtggtttatcacaggatatttaatataattccctgtgctatactgtacgaccttgttgtttacccattctatgtataatagtttccatctgctagacccaaactcccaatccattcctcccctacaacctccccccaccccaggctaggcaaccacaagtctgttctctatgtctgctagtccgtttctgtttcatagataagttcatttgtagacagttgagggtatttttaatgacttttaaattgtaattttcaaagaatacatttgaatcagttctaatgaggtggatgaaactggagcctattatacagagtgaagtaagccagaaagagaagcaccaatacagtatactaacgcatat

SEQ ID NO: 55136 - DNA, 698 bp, Bovine  19866881089484
  misc_feature (1)..(1): n is a, c, g, or t
nccctaataatacacacttgtcgaaatgtaggcacaacttcctttgaccctggcaaaaacctgattttctagtttgccttcatctgacatccagatacttaatgctctgtgggtcattttaaagtgaccagcaactcaaatacaacctgtcttgtattttggcagaccaaaaggtggtttgtaacagaaactggaacatgagtctgtgtctctaatagggaaccatactgcttaacccttctttacttccttgctaatcccttgtgtaaaaagcttgctttctctataagaaatgcctctaccatggcaagtattgtctccaatatttccttcattagattgggatggcataagtgactaagatcaagtataacactatgattctgagaatgtgctttcatttcctggtttccttgaaaagctaacatgaacaagagcattttgatgacattctggtttctatgacaactggaatatgccattttatcccgcaggcaggaacaattaacaaggatggtacaggctggatggactagcagcaaaaatctgcagcctagtatgtgattactatcactgtgagatagtgtatgtgtgtgcatgcttgtgtacatgtctttggaaaggtgaggtgtttagttggggattagggactttaagctctcttgttttattgaagaaattggaaattcccactaaag

SEQ ID NO: 55137 - DNA, 1825 bp, Bovine  19866880098611
  misc_feature (1)..(1): n is a, c, g, or t
nttggatggcatcactgactcgctggacctgagtttgagtgaactccaggagttggtgatggacagggacgcctggcatgctgcaatttatggggttgcataaagtcagacatgactgagtgactgaagtgaactgaactgaatccagaattgatgcttttgaactgtggtgttgaagaagactctcgagagtcccttagactgcttggagatcccaccagtccatcctaaagatcagtcctgaatattcattggaaggactgatgctgaagcggaagctccaatactttggccacctgatgtgaagaattgactcattggaaaagaccctgatgctgggaaagattgaaggtgggaagagaaggggatgacaaaggatgggatggttggatggcatcaccaacatgatgtacgtgagtttgagtaaacttcgggagttggtgatggacagggaagcctggtgtgctgcagtccatggggttgcaaagagtcggacacaactgagcgactgaactgaactgaactgaactaaactaatccagtatgacttcctcttaacttgaatacatctgcaaagactctatttctaaataaggtcacatatagaggtactagggttagaaattgaacatatacttttagtagacacaaacttgaacatatatttggggggataccctctataaaaattattgactgcatcaactcaataagtggtcattctttatctctttgtatccatccaatgattaagcatttactatcttataacctttaggagacctagaatatattactaaaactcttggtacttgttatagtttttacagcacttttagcctggaagattcttaaattctagcttacaattttcttttgaactttaatctggtgaaagcagtgatttttctgaaagccttgggcagaaggctgttctctaccactgacctctgttccaaaggagccacagggaacagctgggaggctcccaccccacagcacagttttgtgtgtgtcccagtgagagagacccagaattatcccagtgaaattctcaagattagcgtccctatagaatgagcactcttccttcaaagcccccttccctggcacacacccaagctcaccagcatgcttggccctcgcctccccccaccagtttccttcatccctcataacctcagccttgtgacctgaatagagtttctttttttttttttttgcctttcttcacaatggggaagatggggaggccagagtgagtcctggagagtacagtgagactgtgtgtgtgtgtgtgtgtgtgtgtgcatgtacgtatatgctgcttgtgactgaaaaggatctgttgggtttaattgatgcattcgattactgtgatgacttcctccccagagttttccaaaatagccagatgtacccaagtggaccacctccaggttttgcctttggttcaaactgagggcggggggcagagaatggtgaggattacagagcctggcacaatggaagaaaaacctaggcctgtttctgtagagctcagccaccatccctttccaccaggacaccaattagaccatctctggcttgcagagccctggggctagacgtgaaaaggcagaattggaggaagccgatggcgctgctacttctgggggcccctgccccagccatcccacccacccgctgccctgtttcactgccagatgatcaagaaaaataaaatgagagcgctcatttaaagctattgtaaaaggaggagataatcctttctccaccagctccctctgcccctcccagctcacgtcgggtggcttcctggaca

SEQ ID NO: 55138 - DNA, 1269 bp, Bovine  19866880359058
  misc_feature (1)..(1): n is a, c, g, or t
ntcactttctgccataagggtgatgtcatctgcatatctgaggttattgatatttctcccagcaatcttgattccagcttgtgcttctcccagtccagcgtttctcatgatggactctgcatatacgttaaataagcagggtgacaatatacagccttgatgtactccttttcctatttggaaccagtctgtagccctagactaacatctagtggccatgacataatggtgggcatcaggacagagactgaagcttcaccaacaatttagtctttaaatattttcaccctggagccaggtggacagaatagataccctgtatctctcagaacctgcccctcagggacacatctcacatcctttatagaacaaaggtgattgacgtttcccgagtccaatgaatagctttgtcatttcggtccagtgtataagcccctcctccttcaggggggcctttggcccaaaggtgtctcttccctgcatcctaaggctacagtctgaacatctaaaattacttgaaacataaacaatgacagataaccattagaggagagtcattcttttacactgtaaaaatagagctgggaattgtcacttttaagaggtaagagagagacatatgggcagaataccaagagacgctcatttgcctcttaacattaaatctaaatcataaaaccgcagacaggagactcttacatttggatcctctttttgttttcctttctttgtactaaagggtataatgtgtgcaaaaaaaaatacacactcagaagaatgtatcctttctgcactgtgattcctcggtggtaaaaatagactcacctctaagtctgtaactactaactagtcttgatccagtgagatttcttggggtgacagttggacagtttccatcatgacactggcttctgtgtgtgtgtgaagctctgctcttccacctacttggccttgacggaagaaatttaggaagttactaacacacgctactggagaaggcagtggcaccccactcctgtactcttgcctggaaaatcccatggacggagctacaacaggaacaaaccttgaaaacacaatactaagtaaaaaaaaaaagccagccacagaaaccctcctgttgcttgcttcatttgatgtaaaatgtccagaatggcaaatccatagagacagagagctgactggtgcttccctggggctggtaaaggtgcaggggcgggcaaaatgggagagtgactgccagtgggtacaggctttcttttgaaaggt

SEQ ID NO: 55139 - DNA, 3337 bp, Bovine  19866880442250
  misc_feature (1)..(1): n is a, c, g, or t
ncagatccagtaatgtccatgtgcacacattcctgtgtgagggcacagaaggtacctcttccggtatttctcctccccttgcatgacattcacggacctccccaggagacctagcttcatcatttgctttgccctggagcccagaactgaccagcctttctcccgttgggctccagctgcggcggttcatcaggaaatagcacgtggtgatcaagatggccagcaggatccccgaggtgaccagtgcaatcaaggtcttccgggaatagctctggtggctgctgacagcttcttcagagatgtcctcgatgcccatcttaaagagaagccatagaaaagtgagccttccacttgtggaaggtgggttctagaagaggagcccagcccatgctagacgcctctgtgtgactcaacactgaatacacccaagaagacatagacctcggggattttctaaacaggacttaagactggtatctcttcattaagccgaactgtaaaattttgtttcaaagatagaagggcaaagaccgttggagaagggtggggaggtaggaagggtaggtaggtactttctcccctgagacccctcatctctgcaaacttacctctctcaggtcagaccggtgctcttccagaagtttgatcttgctggaactttctagaatgagaaatggagtttgctgcatccagaagctggaacagctcatcctgcgctgttctagaagaggctctgacagtgagggtagatctcaggagggtctttcccagcctcagcatggccctgctccccggcacctgtgccctctgagctgcaatgcctggtttctacccagcatcctctaaccccagcccgtctccccctctagacctcagcacagacctgtcccttacctgtcctgttggtcaggaccagcagcaggcactgaggcctcacctcagactgggccaggagcaaggagcacacctcggcctgtttcttctgacacaggaatccggtcagtttctcttcattgttcttcttaaactcctcctgggacaacagagaaaagtggtgagcaggacatgaggtcgctggtatcctctgcactgtatccggagtctcaggcaatgattcagattaaagtcccactgttaccctcaaaacaaaaagaatcctttttttccccccctaaaattccaagtgaaaaaaaaatcttgcaaacttcatatgtgcaaaaacacaataagaaaaaaaaaaaaacaaaactccaaaattttccaagatcaaaaggtggtcttagctggcactctatgatgtcagagaacaaatttaggaaccattaccttattgaaggattgcccatgtaaacctacactatccaaattaagttcaaaagaaatcaccaataacacaaaatattaacagtgcaatacaaatgaagataaaaccctctgtttcaaggctataagaggcccagatattgaaggaaaagccaagggagatgaggagtagagaagaaatttatgactatagatgcaacgggatcctcatcccttccctcttagtctccaaggggtctcacagacagcatggctcaaattcaagtggggctcctgtctagttttccattccctgtccccactagagacacggaatccagtttcacatgaggtggacaggtcgctccaggttgctgactgactggtccgtgagagtcagacgctcagactcagaagacagactctgacaattcttcaacagtatagcctcaggaaagggatgaattagaagccgtggctgttccccctcctcggtcttctaggatttattccagcagcctccgaagggagtggcctgctctacccagaaaaggaatcaaaaccaagacactctcctctgtccggatggcagatggcgggggaggaaatgcctgagcagctctgacagctttcctgtgaggggaaaactgctggggcgtgtgaggggcatcagagctgagcctccgtggaggagagagcttcctgtttgcagagcggtgctgctccgagggcaaggccacagggccctcccagcttggcaagcagcctgggtattttcctattgctgtggcccaaggcagtaaaacccaggctcctttgctcctgcacaaggcaaggtcaagattggcctcacgtcccagctttcttctgccagctggaattcgaggctttggggaggccagacagcagggcgagctaacctccggatcacagaagagaggaatccagcgggaaccttagaagggccccaagagccaaggttacagagagatgagtcctcaggccatggctccttcttccttgggagaaggacagatgaggcaggtctccagggaagtcccaggataagagctcctcacaatagcatttgctgtggggagtctgggcaccacactgggtgtggtcagcagtctccttcttctctgggctcgtgtcccctcggacttgccttgctgccccgtgagcagcttctggaggaggaggagggaagtccctgcctggatgactctgggcttgtaaggtatctctggctgacatgtgtctcgttcccgagagaggcagggggacggggcacaatcgaaacaagccgaacaaggaggcacctcctccgtgtgctgagtcctaagaagctccgcctcgatcagactcagctgttctgatggtgatcagaactgcgtgaatccctctgtgcgtgtgtcgtgtgtggtgtgtgtatgtggagcggggctagcaatgaattccacgtggtcggagctgttggtatgtccacatggccatgaagacagacacaacttcctgtgtctcaggcactggtcctaagtgctttctgcacattgactcacttaggtttcacacaactctatgagatggacactgttactctccccattttatagatgaagaaactgaggcacaaagagacttcagagttgatagagtcacatggtaagaaccctaagagaggcacaatggtaccgtgggcatgtacaggagagcaagcacacgcctgcttcggggttatcagaaacatctcgaaataggcctcacagaatggacagaatgtatgcaggagaagctggggaagggcctcgggagtgcgggtgccaccctgaggaagcccaggcatgcatgagcctgcagccttcacagaatgggttgcccctgggaatgaagcacatggcctttccccttggaatttcatccttcaaggcttgattccacctcccctcctccaagaaaccagtccctatcttccagcagactgggtatccgtcctgctctgcatttactagattcttgcaagtcatacagctca

SEQ ID NO: 55140 - DNA, 1379 bp, Bovine  19866880450250
  misc_feature (1)..(1): n is a, c, g, or t
nttaattacgctgtgccaacttcagcctccttgcaagtaatgcaaaaaaagaaaacaaaacccataacctttcttctgcctgggcaggctcctggggaggtggcctgtctgtccctacctggacaggtgttctccgcttcctgtcctcaggccagaggccactgcttcctcagaagacagggctttgcttctccctccaggcccagagtgactacacggctggtggaagccttggcccaggaggctgggggcttgtggcgggagtccgtcaggcggcctgggccaggtccgctggatcccagccctgcctcctgtggcctttgggcccaccatggccgcctgagaaagctcgcaggtgtgagctgggcaaactcggccggccccggctcccgcctcccgttccggcagtctcccagccagctcggtttgcagacagctgctcaggtcattgtctcagcctctccaagctgtgaatgccgagtctatagagaccgccacgcaaacagtgcccacagtgcctctggggagggaagggagagctgggctttgccagggccattgactctgcaaataccaaggcctgctgtggatgggggaaagcttgttggagtctttaatgggggggagcggtttctccacacactgccctgtgccatggagaagcacgggggtgcccgagggctggcagactggcagggcaggggagaggtccggcctcagggacacctgctcaaacccaagaaagagagtcagagacgtggcggggcacagggtcgaggcatgagaggctggaaagagaaattcccacacaggcaggtggagacggtgtgctgggcttggctggggcagacggacctcctcactctctccacagctcgactcgccgggctgggtgacaacccactcccccaggttgggctcagcttctgcatctattgtgtggactggggaaaagttgcgatcaaacactcagagacgtttctcaagtgttctacatttaacacctattctcctgcagtgcaaacggttttcttcataacattctggaaaagaaaccccaggcaccttgtcaccctcgctttccacctctggctcttgggcagtgctgcggaaggcacggggctccctctgcttgcatccgccctcccgtgctgtttccaacaaggggccaggctctgcgctgaagaggggagggctgggtcagggggagcttcttgggctagtagaagacagcttctcccccgacatcctgctacgttctgcccagggatcagctctgcccagggatctagttcctgagccccagggtctagcttgggccctgggccctagtgtctgcaagtgcttttcatgctgtgtccatcccattcatatccatg

SEQ ID NO: 55141 - DNA, 1250 bp, Bovine  19866880480502
  misc_feature (1)..(1): n is a, c, g, or t
ncctccgcccacgtgccttccccacgtctgccacactcacagccctcgttctaggttctccaggcctcttgctgtctcctcagctgttctcagtccaccatccagattccacctcctcagtgaagccctccctgattttcccactcagtcagttaagttcttactattggtgacagcacttagcaaagccagtttcctgcttgagttatttaacgttcctgtctccaaggcagtatgcacagtgaccagtgtcacagagtttggggtgggactgtctggattcaaaacttggtctgtttgctagtgtgtctttggccaagtacttaagctccctatgtcttacgtttctcatcagcaatatgcgtgaacagtggtacctgtctcagtggggctgttgtgggcaagtaatcattgccatgggtaaagcatgcagaaaggggcctgtttcctcttatttttatttcctatgtgattgctgtctgctcttcttgcctggttgtgaattcctggaggccaggaagcacacaggattcatctttgtatccttccaaagagattccacttctcctgtggtctagaaagaaacacaaaaggctcaagctagaaaggaccagagaggtcatttggagtgaatgctggttttcctgattggtaaactgaggtccaggtgagctgaaggacctgctcgaatcacacagccacaggagcctcacagtcagggtgtgagatctaggtctcgtcagccttgcccgagccaacgcaaatgctatttctgtgtgctcttcggagaacagacggtcagcgctgtctcagccttctctcggcgtaccagtgaccacgctttagatggccgctcaaccccggaccccgcctgctaatggatgtccactgtcctcagccctttggcctttcctactgaggcaggttttccaaccttccagtcggggtgctgcatgtgctttacgaagggagtggcgatccagatcggggcttgaccctaacagagactccagggtggagggcgggtacaggggaagggaaccaaccgagtccagaagacacggtccggcccaatccccactccctcccggcacctccctgccaggcacccaggacgcgttcagactcctcccttcaccatggacttgatacaatctggaaaacgcattaaacgttacagagagtagttgacgcgtaattaataaagtacggattttggctggaagcctcaacttaaaatagcacggcgg

SEQ ID NO: 55142 - DNA, 598 bp, Bovine  19866880489748
  misc_feature (1)..(1): n is a, c, g, or t
naggagaggaaacaaaggattacgccttgcagagtctgtcctggttcccactgcccagagggggccttgtcaggaggaaactgctgattcctgcctgcttctgagccagaggaaggaggaagagcccacaccctcacgggactcccctgtctgcagagacaagcctgggctagtaagcaaagggctgcaaaggcgggggacagcaagtgggctatagggctcggagagaagagccccgcactcaccacgcccacccagagcatcagactctgctgaggccacctggatagcaggggtggggtggggggctacaggaagggccccttaccgtccttatagtcccagacctgggcacccagaggcatttcggtggcctcagaggggcttaaggatgagtgagagaagcagaggtcccagggcttaattttaacatgctctctggactcacaggaaactctaagataaaagattttgagctctgttcccagaaaagaaataaggaagggaaccctcactcacttaatagcagctctgtcctaaaggctgtgctggccagcttaagggttatctcacttgatccttagtatgaccctataaa

SEQ ID NO: 55143 - DNA, 733 bp, Bovine  19866880608228
  misc_feature (1)..(1): n is a, c, g, or t
nctgacaccggggtcttctgcggacctggatctgcgcacacccatgaactgtgttcctccgcccagccccgctccaccaatatgggtctccctttcctacatggaatgtgacggcacaggactctcaggaggctgaacatctcctcatttgagacatccgagatgctttcaaattcactattactggtacaggaaagaccctttgacataagaacgtgataaattgctttgtagtttctgcagccacctcatcccaggacctgtgactcacctgtgtgcttttgacgagcttcaaagtcaaattaatgctcacttctcttaatgcaataatatataaaagttacaattaataattaatgtagtagtgtgtgtagcaagcattggcaaagttttcaagtgcattaggagcaggtggacacatgctagaaagctggctgggtccaagtacagctgctcagagcacagacttcagagtggacttggttcctggctgtgccaccaactctttttggtctcagcagttacttaacctcttgctgacgtcaatcccctcaacaggaaaataggaaaagaatgtggacatcacagagttgttacgagaattaaatgagtcttgtaaaccgcagtgtctggctcgagaaaacctgctacttacaggccagttgctccgtgtcagcccctgtctgtcactaactggcagtgtggccttggggggaagtcaggcagccttgtt

SEQ ID NO: 55144 - DNA, 673 bp, Bovine  19866880692944
  misc_feature (1)..(1): n is a, c, g, or t
nagctgtgcctccccacctgacagcccccctggtgccagaggcgggccccacctggccgctcgcctccaaggaggctgcactggggtgctattctggggtgattcatcaggccccaggcttccttggaaagaggaaggcgcagcggtatgaggcctgggctgacctcaggagctctgacacagcccttccggccccatgcgctcacccgcaaagcctccccgacggacggagctttcggtttgaaaatcagaggttatttttagctatgtcctggggccggtagccggacatgaattcctcaagaggagctgcggaaaggaaataacagaatcctcatattctccatctgggtagggagctgcaggaggcagggctgtgtgcgccccttctctgggcaggagagctctattgcctacaggtggagggcagtgtgtccccctccgcctcccgccgttaggattatagttgccatcatgatgtacttggggtttggccttttgggcagggctctctgagacactctggcattgagtacacgggcagagacccctgcctgccccacaacatacatgcacagacatgcttagcccatggggggggcggggacggtcccaggagcagaggtgatgccagaggacaccaagtgaggttaagatgaactgtctcaccgcc

SEQ ID NO: 55145 - DNA, 1850 bp, Bovine  19866880723042
  misc_feature (1)..(1): n is a, c, g, or t
ntgtttctctgtccttagatcttctctttctttgaaaccctcttgctcttttgccttacaaacttccttgggtaaaaggtttgagggggtggtcacatctaggggagcagaacaggtggtttcaaaggactctgaactttgcaggtgcactggctttatcagctataggaatgagagatgagttcatgtgtaagattgcctttttttttttttccccaaactggggacaatctcatagattagctgacacatatgttctatttttcataactcagaactatctctggagctgccaagagtcaattccagctctctgtttggataagatggaggtttcaaagcaaagttttccttggcaaaatttatgccttagctggaacagtcccatgatgaaaatacccaagaccaaaggcgaggtagggctgcttccaattactgaagttgagctctttggggagaggcctcgtgacaggccttggatcgggagcagacagtgtttcgaatggcaagccaggggaaaaagaaagagatcatgtctctgctatttggtggacttcccaatgatggaaaggtaattcaagtctttggtgattttggaagcctttccactggaaaattccccttgagttttggtatttgacttcttctggagcattgagagtgggctggagggagcagagtctaagttgtccaggggcttgagatgaattgacgggcaagtaaggcagaaaggttgcctgggacttgccctgatgcctctgaagcaggctctggcttttcacgggaattgaacttattacaaaccaaagaagagcaacctgggctgctggcacagagcgagtcagaaatcccttcatggctaaaaactgaaagaagctgaagtcaaggcaatagaaaaggaactcacaggtggggaggctgggggagaagcagtgtttctcctcttctgagctggaaggtgggacaggaggaatgattattttgagctgctgcctggcattttacaggatgacaacactgcttactccgagtctggtcacgtaaataagcttaggagtcctgacccaagttcccacttggcttttcctgggtcgccttttgaaataactgctcagagttgagctcatgagaagttagtgatctccaccccaaccatcttgtaagtaacaggtgctcactacactgctctgtattttctgcccacctgcctgtgacctttgatctgtgattgacctgggaagcagggataaaggactgtccctgcctcagctcactttgtgcatcctccccacttatgggatctgtgagaagcaaattttgtcactttcttgcctttgtgtgcacttattgaaactgtgtgctgtgcacgctaagtcgctcagtcatgtccgattctttgtgaccctatggactctagcccaccaggctcctctctccatgggattctccaggcaagaatactggagtgggtgaccatgccctcctccaggggatctccctgacccagggctcgaacccgcatctcttatgtctcctgcattgacaggcgggttctctatcactagcaccacctggggagccctctaccaattaaaaggacctcaaagttttcaaccccttgaaatgggagctctgatgctgaggaagttagctgctgatcacatgtaggtggcttgtacctccaccttccgtaggtcatatgtgcccttacttaatttcattattggggtaacactggtttataacattctatcagtttcttgagcacagcattatactttggcttctgtataccctacagtctacttaccatgaaaagtaagcttccatctgtcaccacacagttgacc

SEQ ID NO: 55146 - DNA, 1923 bp, Bovine  19866880794085
  misc_feature (1)..(1): n is a, c, g, or t
nagatgtttatcgctctttgaacagcgttgaaattctgacagtgaccagcagagggcaccaccagcagagacagtgccgatgcactgctagggagacgggcatatgtgccttggatccactaatcaaaaaaacataaataaagaaactaaactggcttcacataaataataagctggcattatgtttttcctctctcctctttctccttacccctttttgctgaattttacatttcccccgattctcctcctcgttacagagaccccttgctgtgtgaaatggatcttctattttggggttgcctttgatcagaacagccccaaagccctggcattacaggagaataatgtaccagcctgcaccaccagtcagttctcagctcctccccagagccccagcagaagaccagacgactctcctggtaccctgggcgtggggaggaccaagacacggatagatcaggtttgtccagttttgctctggccgctggaaattctgctccttatctcgtctgccattgcttcaccacactgccaaaattacctcgataatatattttttttaatttaagaattcattttcacttcaagaaagaagaacactgcagccagataagaaactccatctgtcatcaagaaaaaagggtcgtggatttgggtgtcacaaatcctgtaatgtcttaaattaaggtgccacttctgcaggctttcttcgtgtttgtgaaatgattattctacagaggtgcatttaatatggttaaaataatgattatgcatgtttaatacatcaatttaagttattatctcccatgctataaaatgcagaataatttcataaataattataaagcatttacaaatggcgacttgatgcaaagcattcttgctaatcctttatctttcacaaacacagaaataacaattagattcctggaatgggaaagggaggttatgttctagaaagtgtcactcccttactgaatgcaaataaggaggcaagggaaaaaaataaaagccctgggtagaaccagtgtactttcccccgctcctgacagatggaagatgtctgtccaggttatcattagtctaggtacccacctttctctctgcaggcattggggagtggggggtgtggcctcagggaagggaggtgtctttgaatcccttagagaaagaataattctgcctccttctaattttttaagaaatagagaagttgcggtactgagacctgaccacagggttagaataagaagcaaccttccccacccaatcacacgcacacgtaggcaggacatcctttgactgctggaagtttgatccagatcttcaattatgccgaaggatgaactgagtcaccagggaccatgtatggcaaaaagcttcagcctccgcccttcagcctgtcaatcaacgacacagacttggagaggcaggagatcccctcagagggcttctgctcttgatggggagcctgaatgttcactttgaaactattcagtaacacagacagcatagagctgaggttaaatcagccacggtaaaatttagttgacataaataaagtaagtccagggagactttttcgaagaaatgagatggagccaggtcacagatcagtggaatcaagtaaaccaaagacgccatagatgctgagagagacgatgcacggtgcatttaaggcacctgccacacacacagtaaggacctgctgtgactcaagccaggacgccaagggctcggaggtatcttgggataatgccctttgcaccccgccaagtcagcctgtctctcaaaggctggacagtggcagagacaaggacgggaaggaggtcctaagtatgcctccagccgatccaaaccccagctctgcagaaagggatgtgggggagaaagagaaggggcaagacctcgagggccccg

SEQ ID NO: 55147 - DNA, 1338 bp, Bovine  19866880819214
  misc_feature (1)..(1): n is a, c, g, or t
ncccagcttagatgtcttctcccacagctctccttggctgcttcagcattcagggcggtagcagcaaatcctcctgaagggcaggaactccccagcacaagctggtcttaactggaaccaagtctccgaagatagggccgtggcatcacatgatctctgtctttattgcttcgtcttccgcttgctcgctgcctgactttgggcaaggcctttggccactgtgactctcgggtcctcctctgtgaaacagggatattgctcgtgccccctggcgtgcacgcggccgccccgtgaaagcagatgcagagagcacagggctggatcagtgtcggctcttccggttctgtcttgcctcccagctctgttctttgtgggggccttgggaacatgtacccactgaccatccacgccccaggtagccatgacccccgccatgccaaggagtggactgagcgatgacccctgaactctgccccctcatcctgctcgtagccttcgggcaaggaggtggccacttagcccttctggacctagcccctctcccccctccctgaagcagaggcgtttcctccgctgacagtctgaagacaggtcatttttcttctcttcccatataatggcctttactcccctacccaccaccccctctttccaagccttaatgactttaacatacacatagttctgaaaaaaaaaaaatacaagccccctgtgagctgcccagaccccttgtagtggaggagaaataacccgagcacatgtccacaagtcaccgccggcgatgacaggggtccgcgcgccgatttcctcctgtgtttgaagctggagcaggggggcggggtggcagggaggagacggagggcctgggcattcggtggttccctttgatcctcctagaaacgctgtagcatttagggaaatatttcaccctgagaaatctaaagcgtaagaaagacaggctgggcgggtgtcggggacgatgatggagggagattgctaccagatgaccttttctctccttgagagtctgaatctctgctgtcttgcttctctgggctggggagggaggagacagtctctaaggggagacactagctcagagtatttatggatctgctgaggcctgctaccccgaccaacatgcgtggcttctacctccagcttctctgtggtttgcctgacagagagagagacacggaggcccacagagcccagggccctcatcttcccagtgtagacagcatccagggccaccctgtccgcctgccaccctaagggctgtgccccggcctccagggctgacacctttgtctgtgaatgaacatccagggggacggt

SEQ ID NO: 55148 - DNA, 1933 bp, Bovine  19866880850225
  misc_feature (1)..(1): n is a, c, g, or t
nctcacctcccagttcccgtcctgctcctattctcaccttcaggaacttgtgcaggaggaaggcaaaccaattggtcagcatcttctctgccacagactctgtcctggggaggcagaagggatgagaggcagcccttcatggagggctcccaagagggtgcctggctttttaggtggactctcgcccaagagaacccagggctgggagccaggacactgcgtcctgtcccgacttcacccccagtagcaagacgcgagaccttgggccagaggcttttgccttgtgagcctcaatttcctgggaaaatggagtggcactctgggtctacaggcgcaggtgccaaggacaccatcttccagccctcttctggcctcagggggataaatacagtttctctgtccctctgaggtttcctgcctggtctgaatacttataggcatatctagaaggcccctgatacctgcccctccaaacactcagaatcagactgagttcaaatctcgactgccacggactggctgtgtgatctcgagtaagtcgcttccctttctctggattcagttggggaattaatcataataataacaaccacaattaataatggtaaccaccaccaccgtcgtcaccgtgtatcccacagggctgctgtcaaggttgaatgagtcaatgtacaaaaagggctaggaagagtgcgaagacccggaagctgtcgccccgctgacgtgtggggtctggacccggcccctcacatagagagctgcgtgcataagcgttcatgagacccggaagctgtcgcaccgctgacaggtggggtctggacccggcccctcacatacagagctgcgtgcataagcgttcatgagacccggaagctgtcgcaccgctgacaggtggggtctggacccggcccctcacatacagagctgcgtgcataagcgttcatgagacccggaagctgtcccccgctgacgtgtggggtctggacccggcccctcatgtagagagctgtgtgcataagcgttcatgagacccagaagctgtcgccccgctgacgtgtggggtctggacccggcccctcacgtacagcgctgcgtgcataagcgctcagctaacgggggatctgcttctgcaagccttgcccctttgccttgccgcccccaccccccacgcccaccccaggccgcagctctggggacctgggaaggaacaacgcagccctgacagatccctcagggatgaggacgctggaggagtgctttaactccctgcacatggtgcaaattacaccctccgatcgcagtaaatcccaggcatttgccagggcggctcagcaaccccgggcctgggagagagtgacaaaggcagaagaaattgtagctttctccgtgggcccctcccagcaccctctccctgcattatgcctgagattagctctaatttaaatacaacagttcttaatgagagtttctaacgctcagattggcagaatgggggctctgtattcataacacaaagccattcttcctccctcttcaccccatgtggggtctggaagcctgagaccttgctaggagaagggtacggaggaggcggcgatgtggaggtggttccaaagctgtgctggatccctggggcctccagacacggtgggcttgggggatgcatgtcaaggtctctgaccctcttccctgctgggaaaatggcaactggggagaggctggtggtaggtgctggtgattcagatcctggaagctgggcattgaaggcacaggcagcaccaaatccttagctgggtgctgaagggagaactcctccagggatgggaacagcttctgcctgcgtttccaacgtgggggccacttgtggggaccgagccctcaggatgggctagtgcaatggagggactgagtctcacattttatctcattttaa

SEQ ID NO: 55149 - DNA, 3141 bp, Bovine  19866880854813
  misc_feature (1)..(1): n is a, c, g, or t
naaaaacacaacaatataaactttaatgaacttaataacaaagccattccaattttagaaataaaaataataagaataaatacacagcattgatgaagctcaaataactgtactcagtgaaagaagccaagcaaaaaagtacacaccgtatcctcctatttatgtaaaattccagaaaatgcacactcacatatagtgacaggaaggagatagaggatgaaggtagaaggagggtggatgttaagatcacaaagagacttctggaaacaatggaaatgtttacgatttttattgtaacgatgttttatttgtaaggacatttgtcaaaaccgaatgaattgcataagtttatatatgtgtggcttcctgtacttgaattttatctcaatgaagttcgagaaaagtgaatgcttaaacatcatgcattaatacctccaactccaatccaatactacaagattcttcccttccttttcccattttttatttgtatctcatccctccacaatgattctcgccaacagattctcaacgtcccttgttctcaacatcaatatatttgctcattgctgtgacacatgcaaataatcttgaaagtactgtatttataccactactaaaacaatactgttagaaaaggttcaaaatttctttgcatttacttttagaatgtgtctaactgaggagttatagacatagacatccaagtactatgatcaaaagttagttgtattaatttttccttctgtatagttatcttaccaatttaatactcagatatgcttattcctatttacattcagctctaaggtcttttcccacgtgtttgatgagttagctttattttttgtatggtaaaatgtttacatgggtcaaaaaaatcaaaactatgcaaacagtatacttagagacatttctgactctttgttagcttttcttccttattttaacttattcccttcagataaccatattcactcacttctgattcatccttcttatgcttcttttgcaaaaatggatatatattcttatttcaccctcttttttacaaaatgtagcatactatctgtgtcttctatttaaaaatactatggaaatcatttcagtttacagagatatttctcatttttatagctgcatattatgccattgaatggatatattgagcaccgaagaattgatgcttttgagctgtggtgttggagaagactcttgagagtcccttggactgcaaggagatccaaccagttcattttaaaggaagtcagtcctgactattcattagaaggactgatgttgaagctgaaactccaatactttggccacctgatgtgaagaattaaatagtttgaaaagaccctgatgctgggaaagattgaaggtgggaggagaaggggatgacagaggatgagatgcttggatggcatcaccgactccagtggacataagtttgagtaaactctgggagttggtgatggacagggaggcctggtgtgctgcagtccatggggttgcagacacagagtcggacacaattgagtgactgaactgaactgtgtggatatacaatgacttattctaccaatctgctctgcatatatgcatgtagattgttcttgatattttgttactatgaataatactacagtgaataaccgtgtgcatattttgttttatatttttgaagatggatcttcaaagtaaattaatataaataggattattgagtgaaagtagaaggaaatggcaaccgactccagtgttgttgcctggagaataccagggacagtggagcctggtgggctgctgtctatggggtcgcacagagttggacatgactgaaacgacttagcagcagcagcagcagcactgagtgaaagttcacacgcatatgcaattgtgtgagatcctgccaatccctcttataggcgggattagccttctacattctacattcccactgggattgatttcaagtgactacttcctcatatccttgtcaacagaatgctttatgaagctttcaaaattctgcatattttgtagtttcaaaatggtatcagtatagtttcagttggcatttctctcattctatttattttttaaatatcttttctctcttttttttcctgttagttttgtgatttttctgttagtctcttgattttgtaagctttttatatataaaagatatgagtcctttttctgtgatagtcattgcaaatattttcccaatatatttaatataatgtgcatatgattttgtttatgctaattttagccatgcaaaaagttgttttatttggtcgaattatttttattgattttagattttgagtcatactgagaaagtcttttaccaatcccaaattatcagataaatcacctgttttcctctaatacagtgtgggttccttgatgtatcttacatatcttagggacttgcagtttattcctgggtagggtgagagggctgattacaattttatctttttccgaatggctattcagttatctcagcatcatttatttaaaattctatcttttcttcagtgatttgagatgttgcctttatcgtataaaagttttcattatgcacctgggcctatttctgtacctactaatttattttaattgtctcctactagagcagcaataccacactgttttaattttagagtgagcctcagtgttttaattggtaagctaaatcccctcatgtactgtaatagtactaactaaggagttatttctgccatattatttaatatttttcatttactctacattccctttgttttttattttgtctcattttcattgcatagataaatcatcttacgctatttaaaagttttcttttctatttttattattattgttgtcgtctttaaacctattcatacatttatttgcttgacagtgtctaaaatcttagttttgagagttataaatatgtttttcttttaaaatcttttgtttgatccttactttttcagacaacaacaagctttattaaagtatttgatcattcttccatcgaatttctcttgcagcactttcctggatttatttctctttatatttgagtgctcttccaagagttatcaaaaggggattttgtattagtaaacctca

SEQ ID NO: 55150 - DNA, 1088 bp, Bovine  19866880865600
  misc_feature (1)..(1): n is a, c, g, or t
nccctgggcctcctgagctctgggagatggatacttgtaaggaggaaaaggaaagggtggcctccatggccctgcaggaagagtgtcaggaggaaggaggtaccactgagcaaatctgagccggcgccctcccctgatagcctggaacgagcatcactggcccgccctcccctccttcagccacctggatgccaggaacctactgaaaaccctgacagaaccgtgatgattggcttgctctctttcctccacttttatttttaaaaatacattctcttgctcacggcggttaattacaacctttcagaaacactgtgaaatgaaatctttctggaaagcctaaaaatattttggtcttgcaggtagcacgtggggatggtattatggctattccgtgatgttggcaggtccacggggcagtgtcctcctgctgcgaattcaccacagtgatcttcaagggtctgaggcagaggcctggtcacttggggactgtcacaaatggacatttgtgagcacagagctgctcagaagcataagccagcttatgctgtttagagatgggagacttgacaacattattagcaagcataatcgtcttgcatgaagacacatcaaagagatggatagttaggggtgtggagacccaagtctgagcccttctaacccaggtaagagctgctggaatccagactgggatcatcctcacgggttaggggcaagtggctggggagtgctgggtccctgtgggtcttccccacacagtacacactatatcctgtgcctccagcacccggggaggtggtgaaggagtttgagggtcagaacactcagcagccactgtgccctggggcttacatggggtgtagcttcccttttcttgcttaagacaaaactgatgaacaaaaatctggatttccaaaacacagatgaggtggtgagaacttgatttgcaagaggattcccaaggccgccattacggatgctttccaaatctatattgttggctcagacctctctcccgagctccatatccatatatccaatcgctactggacacctcgacttccacatgcatgtccctcaggcat

SEQ ID NO: 55151 - DNA, 845 bp, Bovine  19866880885608
  misc_feature (1)..(1): n is a, c, g, or t
nagcagacagccttcccttcctggcttccaggtgaggccatgctgggacagaaaccaggcctgtgtgctcatctctcacccttacctgcccagcgggtgttaacattaaggccaggcaaagggtcagaagattgaagtcttgcattcggtatgtcctaggtatctgttgatggctgagcccgcaggcagctgggctgcaaaaacatttgctaggctgggaatgggatctcatgtgtcagggcagagaggttccccacctactggacgtgtgaagtcaagcgggaacactacctgtggtccagcagcctagtgttccgcctctggcggagagatgaagggtctgatggaaacgccttcacagcatcctccagagaggctcgggatggagtctaacaaggctcacccagcaaccatttatcagatgtcactgcgtcaaggctccagtgctgtgtgctagagaaactgcagtgaatcggacacagatctgtccccctgcagagcacgcagccctcggggctcggtaattacaaactgggacccactctacattgtggtgaacatccatcgcaggcgatgggtatatgccctgggggccttggtagattaaaggaggggccacccagcacaatctgtctggaaaacggaccagcagccaagtgtgggagagtcagggtaagagtgggctctgcagatgcctggaagggccttcctagctgagagattaccacgagcaaaagtaatcatggctgttggtgcatgcgaactcagtcctgtccgactctttctcaaccccgtggactgtagcccgtcaggctccgctgtccatggacttttccaggccagaa

SEQ ID NO: 55152 - DNA, 543 bp, Bovine  19866880900200
  misc_feature (1)..(1): n is a, c, g, or t
ntatctctaccatttgtctgacccacatggtaccactctgtctgggttctagtgagggcatttctggcaaaaacttttctgaggggccccttacctctgaatctaagcagggaacccaggatgtgtgggcgccaatccagtccggattttgcatctgtgaggcgcctgcttcgctccctccctgcatagcccttccaacacctgctgcggaggctggaagccaagagcgattgtgcaggaccctgaactctggccctccgcctccgcccccaccctaaaccggcacttctcgtgggggtgctctgctggctggcaaggagccctggagtttcctaggccgctggggagcagaattcctagccagccgcctccccctctgcctttggagtttcttccctctgctctccctctggggctcttggagttaggaagtttaagtgcgattttgcatttctattgggctggtattcagtggcagggggtgtatctgaatagggatgcgaggccagttggagtaggatgtaggcttcttggaaccaggga

SEQ ID NO: 55153 - DNA, 2978 bp, Bovine  19866880909938
  misc_feature (1)..(1): n is a, c, g, or t
ngcgggatggtgggcggccgcctcccagaggccaggtcgtgagccagagggaatctcggacacgctgccccttcgtgacctagtcaaagccaattagctagaaagcaggaagagtaggtctttgaaaacttttcttgaaagcaaaataaaaacccagagctgggcctgagtgatccaccttcaaaaatcagagaaaacgaaggggaatctcaggtgggaggaaaagcagactcactgaagacagaacccaagggtatgtcttgtttggcccgtggtaaaagggggagcaccagacggatggagtgaggggtctgctgagcctttagaaagggggtctcccttccatccacgcatttcatattacgagtttcaacaaattactcaatcttgtaggcctttgttactttgtagggcttcccttgtggctcagctggtaaagaatccacctgcaatgcgggagacctggcttcaatccctgggttgggaagatcccctagagaagggaaaggctatccactccagtattctggcctggagaatacagggacagtccatgaggtctcaaagagtaggacacgactgagccacttttaagggaaagggaaaacacaccataaaaccttaattgtgcagagacaggggactgggccaaatgacctgtcgaggtctttgcaaggtgtaaggactacaacagtatacaagagcagacacgtgcagcggcagggaacactgaggagaaatagcttacacccagctgtatcatatcctggccaagtagccttgggcatcaaatcatgacttctctgtcccttaattccttaacttgcaaagcacagaccataggaaggttgctgtaaggactgaatgagttaacataagtaaactgcttagaacagagcctgcttattgctccataaatattagatgtgttttttctgaaaaccactctcctatataccaattactcaattattttggctccaaagaattcaaatacaagatccttaggctaccaggatgatctggactcatcttgtctgttttcctgcttccatggaaactttgtctaaactatcccagagagatgggagcttgtgccacagaatagaatttggggaagtgccctgaggtgtctggtttccatggctaccagctggcgagctggatatgaccaggaagtctcccctctgactaggaaatctggtgggtaccacagccaccataaatgaggccagcctcacaaaatcaggcatttgggcaaaagatcacagtgaagagtagctgtctgagagcataaagccacttaaagagccagctcaagctctcatcccctggtcagtgtttcaggggctcgtgaaacagaatagtctcatcccaatcttgttttacttagtaaggccaaagattcattaattaaccatcagtctcattaaaaagaagagacacaacttcacaaagcaccggggacccacagttctcagagccaggagcagagactgtcgggaaagggaggccgagaatggtgactctgtgacccggcttggggagcaaagcgtccccagaagtcttcctttctttagcacgatgttgaatgctgctctaaaatatgaataataaatggcatgtgggtgagtccattctctaacaactcagagagcgtccgaagcagctgtcatcttatccactccagaagaaaggagcggaactgcaaatgcctttccttatttaacagaaaactgaggtccaccgaagaagaactgacccaagtctgcaaagcagtgagagatttgaaattgaactccgttgtttgacacccagctactcaggcagcctcatacctgatagtttaagcaagggagaataagataccttcccacagaatctccagttactcgccttgcatgacccaaaaaagcagtaatgtttggaaagaatagggaaaccatctcccaatggtctcagtgcctctggttccttcccctgcaatgcaatactgttcccagagtgattttctaaaacttaagtctgcttatgttactctcctggttaaatccttaaatgactccccattgactttaggataaaacccaaaggccttgtaatgagaccaattcatgaattggctcctgcttctcttaccaacgtcatcccttcctctaccccaacacacacacacacacacacacacacacacacacaacagtccatccatcagaagtgctccaatagctatgctttctcttttctccaagatacagtaaggatctcacactgtctgtccagcctttccgacttcagttcctccatagccagataccacctcctccaggatgccttccctgaccatcaggctgaatgaggttcccctgtccgtgctcttgcaaggtacggaggagttcccttagctagcgtatgtcaccacctttcgagtcagtgacccctttccatatgagctgccctagggcagaggctgggaatatccatgtcagtctccccattccctaaaacagtgtctggcacatggtagatgcctaatagatagttaacaattgcctctctctcacctaaagtctgcccctttagttttaatacttttacatatatttatttgcaagcccattttatctcaaccaaggaaaaaacaagggagcagaatcgatagttaattactctgaaaatgattgtcaccagctttatcgacaaaaaatggtatcaatagctcaaatcaacagatgccctagaagtcacttctagctaatgtgtttgcctctgtggtatagatgtacatttgtgcacacacacatacatgtgtgaagagcaatgtggcatgtgcaattacctgtgaggtttgcttttataatttaactgattttgctgattgcgtacatgttagagaatggaggggagaaaatagcaagaagtggaagaaatgagcctgatactacaaattacccaaaggcatacaatccaccagaggg

SEQ ID NO: 55154 - DNA, 862 bp, Bovine  19866880927232
  misc_feature (1)..(1): n is a, c, g, or t
ncctgctgtcagcgtcacctgaaagagtggttccgctcagccctccagccagccatcttcgggcaccactgataacagcagggcagggcgggctgccctctctgctccctcgctgtcctcagcaaatcatattaggatggggcagattggcttgcagagcagctaaatggaaatgacatgtagagcgctgtgcaatggagacgcggctgaggagcgtcaaggtgggaagtgatggagagtgggaagggcccctctgcccaggactgcgagtctggcaaggggattccacctggcccttctctttgacaggatgtaaggaccagggtcactcatagcctggtgccggacggggggactggttggccttgcagccctaggctaaatgaagagtaaatggtggtgtcccatcacccccaaagaaatgatgcaattacaaggttggtggccctgctctcatagctgccctgaacacccacccctgtccccagagcaccagggaacattcaccccctccagcctctagaccatcagagccgcaggcatgtcggatgcaaaagttctccagctgttgtagtggagtctgagcttaacatgaggttccagagacaccccttgaagaacagctacttctctaccaggctcctttcccacttccagatccttctggcgattctgttcatctttatttcatgggcacattacaaggaaacacacgagcaggaggggaggccagtgacacagttaaatatacacggcggcagctggcagcagcctcaacttgccagttcaggtgccatgaaatatttatggcgctggagttgtcactgttgggggggggtttctagtctctgtcctgcctcct

SEQ ID NO: 55155 - DNA, 1441 bp, Bovine  19866880974919
  misc_feature (1)..(1): n is a, c, g, or t
nggtgtcgttgttctgctctgttaccaggggacgttctaggtggattctccctaatgtcaagaaactgaatcaggtgatgccatgaagcttcaggatgatctgcgctctgatatttcttctttgtttccctatagcttctatggaattcacacagacacccatggcagctactactgccacagtgtcagccagcccagaaatatcttcacctgtccctacaactacattcgactggagaagcatgaactcaagtacttttagaagcaccagcctctacgatgtctctcaggacagcaatgggaccacagcagtcaccttaggtaaagatttctcatctcaccccagaaggatgctgctggcccttgggtaaagcattaggatatttgcaaaccacctctgtcctccatgttcccccacagatggaaacatacaagctccttttaataatggcttgagtatcatgcttagggaaccctgaagtatgttctagacaattcttcctgtagtgacagctttctccagtcaatgtctgggctgctcgttctgatcagtaactctccttgtactcctgagtccagcttagtgagaaaagaagaatctatgatcttttctaagtaaagcaaaccatgtacaaattgggggtcttttggtgtctctaaggtaccagtttcagcgttcagtttcagcgtcttggagggcatttctaacacattctagattatagctctggtttcaacagctggctggaaatgagttgccaagggttaggacatgaagcaacttttaactccccagattcccttttctgggttgaagtccgagcctatgtgaatgaactgagatgtgtgtgtgtgtgtgtgtgtctgtgtctgtgtctgtgtgtttatgccattgtgcacgtgttcacacttgtgtattggtcagttccagcgtctacagacagtttcacgtctacctctgagaccctcccagcctctggggccgtgaactcttctgtccagtcacagacctctttagccaccacggtgtcttctaccctcatcagctttgcgacttcagaggcgactctgcagcccagcacttttcctggaaatatttcggattccctgtacaatagtaccagccctgtgactttttccattattacctctccatcattttctcctacccaaagtatcctcaaggtgggtgaattgggctaaaaatgacagattacctacccccttacttcatatgtatgcaagctctctcccttccccttaacctctgcttatccaaaccaatgaattttgatcatataggagttcacatgagaattatgcagcttaaatattgctgaaaggggaggaaaagggtagggtttggtggcaagaccgatctgtgccatgggtataatgtttctagagagtagagagtgaagaggattctcagaaatccatc

SEQ ID NO: 55156 - DNA, 1269 bp, Bovine  19866880985457
  misc_feature (1)..(1): n is a, c, g, or t
nctcaggctgcaggagttctccttctaacactgctgtaccatgggcttgccaaataccccattcctttattccccctacccagagcagcactaacagggctgcaaggccagtgtgaactgactgaagatttaagatcatgcaggaagattacagcacaacccagaagagacagcagctaatcttgaaataccaggcattcccatgctaaacagccgggccacaccatcaggagttttcccagccaggtcttttccaccctccactcactaccgtttccctattgctccaagcgcttccctcctctctctatgctttcctgggctcggagtccttcagccttttgtctcttggttcatcaaacacaaagtttcactttattttatcatgctcagcacttcaacttcctgtctgccactgcccagcaacggtttgtgccagggtccaggttttctcaaccaaagactcgttaaggcattttcttaaacaatggagcgggctacctagagatggtgctctccaggaaggtagcaggggtggattctttgtgggttttttccctcttaaatcaggagcagacttccgaatgaagccagaggccttttcctttatgtccaaagggaagtgattcattctagcaggctccagggtgtatgtcctgggacacatgccctggtatatatccctcctcatttctaccacattctcccaagatgcatgcacctttctccttagcaaagtcgagggcccttgagactaaaaagtgtagacactgtgtttttatttcttagctgaggaaggaagagagtgttctcattaggaaagtcaaagcccagaaaaatacggaaattctgccctggcaactctgagcattttcttttggagggtggcgttttattccttttccataccttcagattttcagttcgccacacttggggccatttagtgacatccagcaaagtcattgggagagggagacccaggcaccctcagggtggagctgggtgaccaccccgccatgagcgcaggcctgcgccctcctgcccaaggagctacaggaaatcgggcagcaaggtggtaagaagtggaattgttgctccttttgatttactttcgtaagaacgctaggcctgagtttatttgctgcagtgtggtccttctggccctgagctttggaagacaaagactcttccaaaggagatgagaactagtgagcacagaggcccaggaggtggagccaaagggatgagaaaaagttgcccaggctc

SEQ ID NO: 55157 - DNA, 1207 bp, Bovine  19866881013712
  misc_feature (1)..(1): n is a, c, g, or t
natggcaccggggaccctgactgcctcacatttgagggcagttatggtggccacggatgaggtcaataaaggacatggttgcttccaaggcactgcaaggctttttgggcccaatgtccacaagaacacaaaaatattctccagggttcctcgagaatcccaagctcaagatatgtcactccgtgggtctgtagctattcctgagctctcttcacagggcgctgacagtgacggaagcctgtgggcattgaagggaggcgaggccaggacgggagaggggtgctctggccacgccgtgctcctaccttcagaatgataggggatcctggcttctgatccaagactcctgtagggctgagaagttcaaaggtcgggttggggtagtagatgaacttggtgtcattgtaaatcagcaaggactggacgttgttaaagacaaatccaaactcgtctggccgctccacggtgtccaggccaggccgatagtccgtggtcagcgagggtgccaggcaggtcagggtggtggtgttcacaactttgcacacctaaggggaccagagcgcagcattccaacacccagccggcaacactgcggggtcacactcccattgtcccaccttctgctttgttagccggtctccagtgagctacttacttcgggaaaagagctgtgaaattgtatttttctgttgttggttttgtgtgtgcgtgaaggaggaggggtgtgttttaacttcacttcttcactcgcccacactgactgagcacctacaggcgctgtgcccaggagctgggccatcagtgaaaaggccccagtccagggtggagacaaggatccaaccagcatcacagggtggtcccagcagagggcctgtggcccaggaggggccgtggcactgctaaaggcacagatggagtgagaaacgcccggacgggcagtccctggcactctaggggtgcctgtgtgtgtgcaccagcctgtgtgcgtgtgtgtgtgcgcgcgcgtggcctgggcagggtgagggtgactcatgggagctttcctttggaaacaatgaatgaaatttaacctggagaatgtgtaggactttcccagacagcagggatggtaaaggatcaagttccaggcagagaaaaacagtagcaaaggcctgggaatgagggagcctgaacaaatgaggaaaagataagaacagaagccgtgtcc

SEQ ID NO: 55158 - DNA, 1834 bp, Bovine  19866881041253
  misc_feature (1)..(1): n is a, c, g, or t
ncacacacacacacacacacacactttcacaaggaagcggatagggtgtggtactcaaagtcaagtgcgtgtggaggaccctggggggtcttcctgcccgagataaacatctgcacagctccctgcagcacctcataccaccagggtcttcaactctagaactgcatgtgtattttcaggcactaacattaatatcagtatttttaaacattcttttaagattaaaaatacaaataataactcaccctcccccaaaaaacttactctaagattgctgctggtttcccacttgcacatgagcatagacggggtgagggagtaaataacacagatctcctgcctgacctcctgctggctgccccagagaaagaggggttcggaggctgagtttgaggagggacccaggaaagatctgacgacccttctgcctggcctgcaagcaactggacaaggatctaaacaatggattctctccacctctttttagagaaacagcttacaaaagcaagaagaaaattcaggatcatattccaacctcctcatggtacagaagggaagacagaggtccgggaaggaattcagtgttgtctaagctcagggatccagtgtctcccgactccagtcttctttcctcctcacccactccatctctttaggcctggagggggcggtagagaaggaggggggagggaagagccccccttggggaagatgcagagagccacagaagaacattacataaagcacagaaactccttctccggctgaagtttcctccacaacccagacctccctcccaaaaagtccaaggtgccccccgcctgccccagcccctctgctgatctacttaacccagcgacactggtgctcctgcgctttgatcctgcaggcgtcaggagctttttgttctattattcactgcagggtggatgctgggttgtctctcctcattacaggctatggctggactgcccaccacctccccaaggccaccggaagatgtccatcaataagtcagtaacagcgactggatgtgagaagccttctggggcaagagttggcaccatttcagaatcagagttttcaacaagcctcttttttaggaggagagctggagaggaaagcaataagcataaaaactatagaagtgcaggtagagatgccatgagacacgtctctgcccagctgatcgggcagcttcggaaggcgggtcttgctcgtagggctatgtgtgtcccccagagcagccgacacacagtgagacaccaccggtgtttatgtaacaagtgagtgtgtgagcgggcttctcctcccaaccctcaagaccatcttctccaagaaggagcacagagcttctcggcacttctaactgcacaccgtgatgggacaggtctggctgtctatccacgatccacacatacacaccagagggtataaggtctaggcagtcattcccttctgttcacagctgcatccttagcacccagcaccatgcccagctcatagcaggccctcaaccaatgtgtacaataaattcataaattgggtgtcagacccgagacctatttccaggtcagctgccagcttgctgagtaacccgggccagtcacttcccctctctgggtctcagtttgtccctctctgtactgagggctgtgtgccagaagatctccagtgaggtcatccagtctagacatttcttaggaagatgaaaaacgggcgtgaccatacacagtcatgcggtgactcttccaaaactcatgttctgtcccttgcatcgttatgggagcttccatcaccaggcctctgataacctatggggaagcaggtgatg

SEQ ID NO: 55159 - DNA, 812 bp, Bovine  19866881122312
  misc_feature (1)..(1): n is a, c, g, or t
ngctgaaaattccttatgcccagaggcaggactttacagtccaggaaacaaataaagagccccgtccaggctggtaagaatcttgtgaggttgcctctagactgaatcctcactgtctaaacagaaagaacccccaccaatggcaggggccacagggagtttcaatgacaaggacataagttccagcaatcagttttgcagattgccgctggtgatctctgggtggcagcgggtgcaggaggaagaaaactgctgggtcctctctctggattcgctggagccagcgtaggttcacggggcgggtgtgtgggtctgcgcgggcagcacatgttagtccccacgcctgcacttctccgaggcccagtgtcccggactggtggccgcagtggctgggctggtgtggggtgactcggccctgcctccgctgacactcaccccaggtccctccccttctctccagccggtgcccatcgatgacaacttctgtggactggacatcaaccagccactcggaggctcggtcccagtggagggcctgaccctgtacgccaccagccgggaccgcatgacctcagtggcctcctacgtttacaacggctacagcgtggtgttcgtggggacaaaaagcggcaagctgaaaaaggtaagggtctgagcctggatgtcccgatgctgtaactagaggcaacttggttttcttgggggtggggttagttaaaatggggacagcactagggggtaatccgtggtttatcttccagctagttcctctagctgttgggcaatgagtgtcttgggaatatacacatatt

SEQ ID NO: 55160 - DNA, 1095 bp, Bovine  19866881169381
  misc_feature (1)..(1): n is a, c, g, or t
ncatggggttgcaaaaagttggacacaactgagtgactgaacaacagcatcccgttaatgcactgctcatgcaagcctatgaaggagagaggagcatcagcataaccacttcacagacataggcaggcttgaggtgaaatattttggagaaagcactgatttggaagtgggccttggacgtgatcctggagttacatccctctctctgcggctctgctgccgggagtgagaggtgccaccaagtgatgccagcaaggacagaaccccgactctggaggtcagtctccctgcaccaggcaggctccggccacacccagcatacactgtcaccacttccggaatgggggtgcagtgtaaggagctcaagtcagacttgcattcttggggacaccctgtgagaaaggaagaggcctggctaggagccctccacccaatgccccttggctcctgtccagccctggggagaggctgaggactggagatggctcacgggcaggtgtggcaggtaagaagaatccagaaacagggctttgcaggcagagaggctggggtgccaaagtcccctccccacctgacctgctcttatctgtggggaagaaaacctatacttgccacctccccttctaagacccttgcttccatggtcccagcagctggcccgagatcgcaggcagaccctacctgcctctgactgctctgtcttctccagctctctaccccggctccgcgggctctgagtcccagccctggcagatcactgattaattcagggctgtttaataacccttctatttcgatgaaacaagctgtctcgttttctttatttttaacaccgactttcgtttctttgctaagcatcttactgtcatttaaatttctctgtctccaaccaagctgataatagactggagtgagcagctgcttccatcctgtttatgacagtgattagaagttagagctgtgcaggcagagagctgaccatgcacgcggctctgcccctgcttgtagacagagggctcacttggacacgattaggacaattctggctccaggagaggccagggcttatcccagtcctccagccttcctggcacc

SEQ ID NO: 55161 - DNA, 1775 bp, Bovine  19866881191524
  misc_feature (1)..(1): n is a, c, g, or t
ntatccaaacacgggagctttgagaggattggttggggtgggacttgggagattcctctcaggatgtcctaacctgggagagctagcacagcagtcgtctgaagaccccagagtgaagctggaggactggaactggagaaagaatggcaaggccctggagtgttctcagctcttctctccaaaactctgtgtccaaacatatgactttagtcatttgccagctaatctgactcactgtgtgtgtgtttgcttcacaactagaacatagtcttctccaaggaggtcttgagtctgccacacagcttgtcagtaactcccctgttcctgcatttctcacttggaacacgagtagcttctagtctggtctcctgataaccatttttttgttgttggtggtggtggtggtggtgtttcttcttctctttattcagacatcaggcagagatactgtatgaagaattaaaacggaggcatttcattctcttgttgaaaactcttcagtgattgtcctttgctctaaaataagatccaaactcctcactgtgatctggagacctggctgggctggactcttacttgtctctcagtctcctctcttgatctcacctccttgccctgtctccccaccattctggccgtttggggttcctaaaacctcccaaggtcttttcccaccttaactcttgacgcaagctgtttctttgtctgactgctcctctttctgtaacccggctcatcgtcccatcctccctgaccaccccatggaaataagcacccccacccccagtcacttttctctctcacagcccaccccaccttgaaacatgcattcatgctgcatatcacagtctacaaccacacacttacttgttggctccttgtctttctcttctgactgtaagcgacacagtagcagacatcatgtgtctgctgtgcctgggaacagtgcagatgggtaacagaccctctcaatatttactgggtgaatgaatgcactacctctttattttcctttgaggagtctccacttgcccagacatcagtaaaagaaaacgttttaatgctagggacaaacataggattatcacatgctattatcgttgtttcagaaaaacaaggtcatttttacaacctcaaggtgaggggagcctaaactcaaaagaaagccctttctacagaggcacagttggtgatcttatcctaatttcttcagtttcctgtgaaaaatgtcacagataagcccacgtcttctgactgcgtttggaaaccttagccccatctcacagttcctacaacccatgacagcgcccaacgtcggttaggtgttcagactctgaacatccgggtggacccaagtgaatccttgcccctccgtggggcccagtcctggcatctgccgtgtgatagggctcagagagatggttgccaaggtgactccggctccaaccgtacccacccaccggcttccctctaagaggcaggctgagccatgcctgctgccgaggggactaagcggggtgggcggctggtgtctgagccgtaagctactgccagacgcgggagggggggggggtcgtctccttgtgtgccgggcagccaagggcgagaggggaagcagccagagtgggtggccagttcctgtctctgacccttgggggcagtgcctgcagctcctgccaggctcccacaccttggctaagaatagctcagctccttcctgccggcctgcaggccgccggagcccagaggaaagagagcggactatataacctcag

SEQ ID NO: 55162 - DNA, 1776 bp, Bovine  19866881267134
  misc_feature (1)..(1): n is a, c, g, or t
nggttagttttccagcacacaaggctggaaacccctcaaccccgacacactgggtcttgctcctccccttctgcactgcggccacttccggaggagccattttcatgccgttgtccacaggaacagagctgctgagtcccggccatgctcagcccgagcacagtgttctgcctctctacttccttcacgttatccatcctgagcctctgtggctccattcagccttgctgtgtgtgctcagaaatggaaaatgcttctgctgaggcgaaaagagctccctgcctccttgcgggcacacctgcccctatcctccccctcagacggcatacaggaggctgccatgttttgaaggaaagggaagtttctcgctgttatggaagaaagaacaactctgctcaaaggtctgacaccagcacagccgaggagagtgttctggctctcagaggtctgattctcacagcctgagacctctggtgattcccagctgggaagtctgcaaaatttgtaccctaaagggtggggccatcttggatgaagatggtgaactaggaggagtccgaaaaattcataggaattggggctgtccttgacccattcccccgacccgccgcctctgaggtggtctcttttaggcgtagccctaactcagaagataagcagtaggagaggggtgaagggagaaatgttcccagagccaggccccaaccaaccaccttattttatgtgatggttttaagaaagaaaagacctccatggaaagtgcaacaatcaatagtttgggacagatgtttcctttccagccaccttttcctgccccaagctaaaaataaccaccctctgtgctttggcttccatcaaatgtgtgtcattaaagttgtccgtttgggtttccagagacaaagactgatggattcctggatttcccagcctgttgggccatgtgctacatgcagtattgggtgcaagatgactctagccccccgaggtgattcttgggtcccagacatcacttccctgctcctacctttaggtagcaccacagagtttccaagtgaggaagtgcagtttgccaagtagctccacttctgttactccaaataaatccttcacgttggcattttcttgaatccattacactccagcccccagggtagccttgacccttcctgtactctggctttactggaaatacaaatgttatctggtcgcactcaagagggatgctgagataggcctgccctggcaggaagatttattggaaacctagaagagacacaagggacataagcagagccaacagcagaggtagagacacactcacattcacagggcacggatttctgccccattctcagagggctgcttcccgcggcttagaaatgttttctccaagtgccctcattgctgacatatatattcgctcttaagccaagctgttttctgttatcacgtggctgctccttcagacaacctaggtcctaacaaatcttaagaggactacagtaaaaatcagcacatttattttccttttcacgatgcaaatagctttatttgtcattttttgtttgtgaaagtaacacatcattattgtaaaaaataaaataaaaaagggccatgctgtacacagaagtgaagaaggcagcatttgcccctaactctgccagccagagataaccatgtgacagcttatagcctttcatacactgaccttttctcccttcccaccgcaaaatatcaccacaccgcgatgtgcttgttcccacatgcgtgtcttat

SEQ ID NO: 55163 - DNA, 1314 bp, Bovine  19866881396391
  misc_feature (1)..(1): n is a, c, g, or t
ntgtgaggggagcgcggcggcagcaggcagggaaggcccctcgcctggggctgccccgagggctggccgtcaggatcagctttcttccttctggacacgggggccggcccctgtactgacgcttgccctccgaccactgctggctgacggggagtcagctggtggatctggagccagacgatacaagggctgatgtgagagggtgaggcggggggaaggctgatggggctgaggatgccctgcgggatgtcttaaaagcctgccaggaccagagcagtggaaaccactctgaatgggtcccacaccctctaccctgagccacaagccctcagccagccccgcctggaggtcgaggtggcaggggcttcctgtcctggccttgctagtcatttgcagtgagacctcggcaaagcggcttaacctctttaagcctccctcatttttaaaacggagcccaccatacccatctcacttcatcctgcctgctcatcagggagcagagcccttctgagctcctattttcagctccggcctttccaacaaatcaacttcccagtaattaacgtgaagaagtcattattgtttgttcccagggttaggtccagttctttaaaaaccaatagtgatgtgtgagagccctttaaatcctcataaagtaaacgccaatccagccccctgaccatcctctgagctgcgaaagtcacgtgaccaatagcatcaagaaggaggcgtgaacctcccaggaagccagctggagttcctggaccctgtgatcgccaccaaagcaacatgcaaccttctgaccagaagctgaccctggggctgtctcccaagaactcctgactatctggacacccgagggcggagtgaagctcaaagagaaaaatctatttttaatgacttgggggagaagagtggagtggctgagtagttcggagtaattaaagctatctatcattctgagaatgggagccaaagttcgtcgaacttttcaatgatatatatttttttccccttctcattcataaaacccagcagagggtcatgtgggagtcaaaggggaaaggatgatggggaaagcaatttctggccccaaacagtggaattcatgctattgatgaacacttgggtaatgatggcccctcttgaatccttttggtagaggccctatttactttgtcctggttaagaagtggggctttgaaggagacagtcctcagtttcaaatccagctgctatggtgatcaatgaataaagggtcctcattgacctcctcgtgcctcagtttcctcctctgtaacatgctgacaataa

SEQ ID NO: 55164 - DNA, 1411 bp, Bovine  19866881408315
  misc_feature (1)..(1): n is a, c, g, or t
natgatctgaatgagtacagtgggagtgtgggtgaagtttatttcttacttattctgtttcccatgggtgctgagtcactcagtcgtgtccgactctttgtgaccccatgaacagtagcccaccaggctcctctgtccatgggattctccaggcaagaatactggaaatgggttgaaattacatgggttgccatttccttctccagtgtttcccattccagccaccagcttttacaaatgtaatgactgtaatttaaaaagtactgtactcttgagcttctcttccacaatcactcttgtgggcagacaaagaactctctcaccctcttgtctcagcagaccctcttctttccagccctaactcaactatcctccactggcgaccctttcactcccctgcgtttgcccggttaggaagtagaggggccctcacacggtatgcattgttgtggccaccccacccacaggacccagcacccagggagaaggagcagtgattccccaggctttggcattggcacagtctgcctgggttcatgtatgatgctggctaacgatcgtgggaagctctccactgagccaagtatgctgcaagagtgaaggttctgtcgtggccaccactgtctctccaaagcagattcaacaaatattgaatgaatgaagaatgaatgaacacttctttctgtgaaatgggatgaagtactcccgtttgacagagtgttgtgagaaccgaatgcagtgatgtgagcacacgggcccctcgtagatgccggatgaacactggtacccatgccgcagccggctgacccccgacgggggccttggtctccctgctctcctatggtagacagctttgctgaagctatgcatggcttagccttgtctctctgagttttccccgatggtctgaaacacgtggctttcctcttcttgtttttcttttggtttcctccgaatcgattctgccactagtgaagggcagtaaattaataactagctttccccccacgacaccaagcccaacaactaattggctcgatatctccccgttgctgtgtcactttgggattttctgggtgagatataaataagccgattctattaataagccatttggccaagggaagaaaatactcttccgagatccccaggggcctggggaagccgcccggtggcccgtggagcgaaaaacttgattacaggaatgaagcatgccgcctccgtgcccgcctccctgcaaagctgtcctcccagcagagtcctctcgggtcctgggggggcaggggagggaaagctttgttaagtttaaaaattataatttagataaatctgcacattcattggtctgagcgagtctctggaaaataatagttagcagggtagaacctgccgcatttcagggctttattgt

SEQ ID NO: 55165 - DNA, 819 bp, Bovine  19866881787089
  misc_feature (1)..(1): n is a, c, g, or t
nataattcctgctggttgctaagatgatcagctgaacatttccttcactctcctgggcagagccatgtaatttaatatttttttccccactgtggatttttgtgatgttaaaaaaagttctctatcgtcagagcagaatgtctgctatgttgttataaattttttagtttgttctactggctccatctttctcttttcagtcaatatgctctgaaacattattgtattcataattatagtccaggagatgctattatggccatcatttttcacatgagttactattattacttctttgaccttctggagattgacgaggctgagatggagatggaaaaggtggtgttgcatcgaccctctttttcctgacgcattcccagcatgcttggggcttccctgggaaacagaaatacacaaaatgacggacttgccggaaggctagatctggaaaggtctcggagatcatctggtccaaacttctcctcgtgtagcttagaaaatagggccagaagggagtaatgacttgcccccagacatgaaggcggcaggtggtagggccaagctcagtcccacacatctgactcttcgtagctagactatgtgagatgctggtgggcttgacattccatcgtgccagaagtgtgggatgccagtctgttacctccagtgcccatcgtggtaacagctctgtaggctagacgagcacatggctctgtgtcccagtgaagagcttgatatctgagcaaaagagactgtgtcccctctccactttcaggctgaggccacagcccacctccacctgtctgctgtctctaggaa

SEQ ID NO: 55166 - DNA, 2106 bp, Bovine  19866880124144
  misc_feature (1)..(1): n is a, c, g, or t
naatcgcagcacgccggcctccctgtcctcaccaactcccggagttcactcagactcacgtccatcgaatcagtgatgccatccagccatctcatcctctgtcgttcccttctcctcctgcccccaatccctcccagcatcagagtcttttccaatgagtcaattcttcgcatgaggtggccaaagtcctggagtttcagctttagcatcattccttccaaagaacacccagggctgatctccttcagaatggactggttggatctccttgcagtccaagggactctcaagagtcttctccaacaccacagttcaaaagcatcaattcttcagtgctcagctttcttcacagtccaactctctcatccatacacaatcactgaaaaaccatagccttgactagacatcaccaaatgtccactgggggcaaaatctccacggtggagaaccactggtctaagcaaatgatttttaatatgtgtaaataaagatatgtgtgtgtgtgtgcatgcgcatgagcacacacatacatatatgtcctagttctattgagaggagctggaagcaataacactgtcatagctatgagtacatttatcacccaggtcttgggttctaactaccattcttgactaaaaaggaagcagagttccttggggaaatggcttctctataaaatccaatactgggccctggaaaatataagatgatcctggaacttcttgttatgtcatgaagtaaggaaaagctcaagaaatgctgggaaatatcaaaatgacataagggtttgcctgaaggtactccctctgaccaaatatggggcaaaagattcagaaaatttcagcagcaacgtaaatagaattgaataaaataagaatatatagtcaatactaaataaataagttttttttttttacagtagaatatcaatcagtgaacctagaaatgatgatgattctatcattagaagataacataggctggttaataattgattcaggcaagaataactaataggtgctaaaaccagggggtgagagtggatgaataacagtatgtttacatcataaaatttttggaaagtcaatgtcttgattgaagggcatattattcttgtataaatgcctttattgaaagaaatctaaattatggtacattccatattcaaatgagcatatataattatactaatcagcatcaatgcctggaaaaataaatatttgttgaatgaatgatgcatcctcactaagcatgataaacggctgttgctttggtctaagaatcagaaatgtgccattgtgacacacgaggatagcagtcagctgcaactgccttagcctaaacagatgtttactacatcatgaaagaagttttaaatgttaggcttcagctatgcatatgatttagtgttttgatgctgaaagaaacattcctatggaataagtaagacaagactgaattgttcttttatattcattatcttttatttttttcatatttgaaaattcactgttttctgtatattctttatggagttcatatgatagtatgttggagtgtcttaatttacttttcctgttttttaaaaaatttttattggagtatagttgctttacaatgttatatttctactgcacagcaaaatgaattggccatacatagacataacccctcccttttggatttccttcccattcaggtcaccacagtgcattaagtagagttcctctgcagccaaaggggcaaggtaaaatcccacaagaccagataaatgaagctattaatgtcttgtctttgaatatgaagtccactggagtaaattgataggataccagcaggtgaatttaaggaaggcaaatgtaaaatgtccaagggacactaggtcactaagcagcatgtatacatttaaaaaatgtaatgttagaatcatgtaggtctgtacttgtacatcaataaagtttcttcccatggggatactttcacaaagctgagacgatctgacttgtaaaccagtgacatacagaagacaaacttgaagatagacctgcttaagggttttccactcctccatggccttccccgtcattgacagtgtctccttacttc

SEQ ID NO: 55167 - DNA, 2314 bp, Bovine  19866880254798
  misc_feature (1)..(1): n is a, c, g, or t
nttctttgggattggaatgaaaactgaccttttccagtcctgtggccactgctgagttttccaaatttgctggcatattgagtgcagcactttcacagcatcatcttttaggatttgaaatagctcaactggaattccatcacctcctctagctttgttcatagtggtgcttcctaaggcccacttgacttcacattccaggatgtctggctctaggtgagtgatcacatcatcgtggttatctgggtcatgaagatcttttttgtatggttttctgtgtattattgccacctcttcttaatatcttctgcttctattaggtccatactgtattaacactagtcaaaagaaagcaggagtgaacttccctgatggtccagtggttaagaatccacgtaccaatgcagaggacacaggttcaatccctggtctaggaagatcccacattgccatggaacaactaagtctgtgcacaactactgaagcccacgtgcctagagcccatgcaccacaagagaagcccccacagtgagcagcctgtgcaccacaactagagagcagcccctgcttgaagcagctagagagaagccttcaagcagcagtgaagacccagagcagccaaaaataaaaaaaaaaaaagcaggagcctgctatattaatttcggacagaggagccttcagagtaagaaaaattatcagagataaggaaggatattacattatattacatataacatgaataaatctctctgaagagtgaagtctcaagaaagcaattatactatcttttctttaaagataaagagaaaatcatcctaattttttaaatgtacttcaaacatttcccctgcagttagcaattctatatcaccgaattcatgccctgacacttggccatatctgtaggaatgttaaacattatatgcctaatagcaacccccaaacttcaaatgagctatttttatcatgttattaaaaagttgaacatttaataaattattgctgttccccagtaaactgagtaatttcttttaaatacatccccccaaagagctggcagccccaattttggtggtgcttaaaattccaaaccatacccattctcgaaggtcactatgtagttaactgctatgaaataaataagcattaaaaattgatgttaatgattgttttcaacctttccataagaaatttgctatcaagcagagattacttgtttcttcagtctctaattataattctttttataattttgctggtagtcattcatttagataggatcttaaaatacaaaactgggtagatgagatttcttaaagacagctggggttttttttttaatattttaaatttttaaaaattatctagtgataaggtaagacttgttttcacattgaatggctattacaatccatctcccactttcccaaataaacagattgataaatgacactagcctaacaaaaagtgaaaaaagaaagaaaatagagcaagagaaacaaagagatagtgcaaagagaagaagattaaaagactttgtaagatgggcttcctggtggcacagtggataagaacctgccagccaacgcatggattccatccctggtctgggaaaatcccacatgccttggagtaaataaccccatgtaccacagctactgagcctgtgctctagagccagcaagccaccaactaccgaaccccgtgcaccctagagcccaagctcagaaacaaaagagaagccaccaggatgagaagcccacccacctcaatgaagagtagcccccgcctgctgcaactagagaaagcccacacaacgcaacgaagacccagtgcagccaaaaataaaagtaaattaattaaaaaaaaaagactttgtaagaggctgaaactcaatatcactttttgaaaccatcacgatttaggaactaaatctaacatagcagagtccatctagctgattcatctcttaaaaggtagacttgtaaactcagggtgctattcagtgctccctattgaaacaaaagaaaaagttagtaactcattactaaaaagataagatgcactgataacctatctacttcaagaaaaggaatccaaatggaggatcacagaccttcctcacttattcgcaggcagggaccacgcacagaggaaggctgtctggaggtcactagattaaatactatggcagcaccaagccagggtccatgaatgcatgggggttttgaagcaagacttcaaaacttcctttaggctaataaagcaatgtctcatctccacccaacattagctgtgtgctttatgtggctca

SEQ ID NO: 55168 - DNA, 1377 bp, Bovine  19866880449482
  misc_feature (1)..(1): n is a, c, g, or t
ncgaggaagagatggctggatggcatcactgacttgatggacatgagtttgagtgaactccgggagttggtgatggacagggaggcctggtgtgccgcagttcatggggtcacaaagagtcggacacgactgagtgactgaactgaactgaactgagctgtttgggtattttaattggaaattaatcccttgtcaatcatatggtttgcaaatattttcttacagtctgtaggttctagattttgttaacgtggggttaattaactatgactgttttgcagcctaagaggtcaagatgtttatttctatctttattttcacttaaaaaaaaaatctctcctccaattaaaaataaataaatttttataaagtaaattaaaaaattctctaaaaggtacatcactttttttttttaactggttagtccagcatttatacctcacctcccatatgtttgcagtacacatttgctatgatttgtgacaatgacatttgttgtaacacagcatttaacagttgtccctaagtacaaaatatgttcagcaccaagaggctctttctttggaggactttttattgttgttggagccagtaggatcaagctatgtagtaacaagaaaactagaatgaaatctcctttttagttaccctgttttcctagaccccagggtttatgcaaacaaatcatcttatatgttctctaggagacgaaaatgaaatctgtgatcagttaatgaaatcacatttttatatgaaataagggagggataaattgcttgagtacagtaggattcaactcatcttaaattgggcaatttcacttttgtgatatatttgcttcgtcctgctctgaaaaacaaagttctgttgctctacctacaatgacaaatattattcaaacttgccaatattattaagcactgattacacgcccacatgctaacacaacaaatctgctagtttctctgcatgtgcctccgtcttaacacagacaagatagaaagagggccattattttttggccataccacgtggcatgtgcatgcatgctaagtcgcttcagtcatgtctgactctttgtgaccgcatggactgtagcctgccaggctcctctgtccatgggattctccaggcaagtcattaccggatcctaattccccgaccagggatcgaacctgtgcccactgctggtggaagtgcagagtctaaccactggacctcagggaattcccaatgagagggccttttatcaaagatatttaatcctagaatcttgctttacatagtctatacataagaggccctttagatgagatgcattaaaacattaaataaacatcagttttgaatacagcctccttagtggcaagctgacag

SEQ ID NO: 55169 - DNA, 4657 bp, Bovine  19866880472632
  misc_feature (1)..(1): n is a, c, g, or t
ngtggacaggggtttgggtgaactccgggaagttggtgatggacagggtaggcctggcgtgctgcaattcatggggttgcaaatagtcggacacgactgaacaattgaactgaactgaactgaatatttcatcatccatttttaagtgtacagttgggtagcattaagaacttttatagggttgtacaactgtcaccatcatctaaccacaaaactgtatcatcatcttaaactgaaactctgtacccattgaacactaactccccatccttccttccctgaccatcttactttctgtctctatgagttcgatgactcttaagtacctcacataagtggaatcatagtgtttggcttgttttgcttagcataatgtcttcaaggttcatccatgttgcagcatgtgtcagaatttccttgctttaatattacttaataatattccatcaatctattcaccacattttgtttattcattcatccatcaacagacacttgggttgcttctacctgttaactattgtgaataacactgctataacactgtgtacaaatatctgtttgagtccctgctttcaattcttttgagtatatacttgaaagtagaaatcttactttaacagaagtacttaacttttctatttcatttcttagcaatcaagctaccagcaactttggggaccaatataataaaaacaaactgtcattatttttcctccaaaaagatactctattgatcatttaaggtaagttttagggacacccaataatgtagtatttcaggaactattattgctatggctgaaaacagaaaaatacttctatcgtttggtgaaaagcatagtaataaatctgagtataattttactgctctagtgattgcaaaacagtaatgtaattaaaacttgatacagtaacattgagactaaattggattgccacgattaagacatccaggaaaataattctacaagcagttagagattacagaaagactgttgacaggagtgtcagtctatgaactggttaaggaaagaaataatgtcatcactaaggaagacaggatgacaattcaaatgtaccagttagtaaagagtcctaattctaaggagggatgtaaatgctgctttgagctgaagggagagtgtttctttcaatttaaaaagtgttggggcagaagagatgttcttacacagatgtaagctgacactgataaatcggagtcattaaagcctgtgtgaaagtcttttgatagattttttcataaagtgcttcacattctgacttaactcgaggaagagaaaaacgcaactaaagacagtcttaaataattcttttagtgctggttttcttctaatcccccttgttggatgctctgtgtctacactcacttctagcctttcagaaggtctcaaggaagacctccctcccgtccatgtgtgagtcttcagttgtttagaacacaggtgtcaagccctagctaagcctcccttctcctggtgacacgtcctccttcgtctggtccttgtatgtcaagatttataggtgctccactaccttgataactcatctctaaagtgggtccaatttgttattttttctttgacaacagagtacctggatccaaactcaacctttcaaatatgtgctgacaagagtggaatacagaatggctattgctttctgttctgtagaaaatcatcttggggtgaagtctaaaaagctttggaattattgtttggcttgtagtcaccctttcggcttctggtaagcttcctttggacaacttttatttatttattattttttaaacttattatatactccaataagcttattggagtatagctgattaacaatgtcctgatagtttcaggtagacagcaaagggactcagccatacatatatgtgagtcccccaaactcccttctcatccaggctgccacataacattgaatagagttccatgttctatacagtaggaccttgttggttatccattttaaatgaagcaatgtgtacatgccttcggacagcttttagatcttcacctcaaaggatgttaagttgttaatgatttttgatcgttttcttcctgtgaaattgacaccaaggtttatcccatcaaccccatacaatgtatgcaatatatgcgctctgttccttctttttttttggtcgcactgggtcctcattgctgtgagtgggctttctctagttgcagcgagtggaggctgctcttggttgcggtgagcagcttctcattgtgatggcttctcttgctgtggagcacagggtccaggctgcgtgggttttagaagttgcggcacacgagctcagttgttgtagatcgagggcttagttgttccacagcaagtggaatcttcccagaacagggatcaaatccacattggcgggtggattcccatccactgtgctgccaggcaagtccacgtcagctattcttgctggttgtgtcatcagcagatatgatagcagaagcaagtgtaataaaacccaagtcagtgagtgttacgaagttctgtgctttaccttcaatgtcttattcagttagcacaccaatattatgaatcaatctaacagttatgaagcattattattcctattttatagatgaggaaactgaggctgatgagtttgtaaacttagaattggaagcttggcctctctaatttctgtcatcttaactaccctgtggcttccccataagcgtgccacgtattttcttaccccatcacctgtaaaatgattgactaggatcgggcaaatccattgtctttggagttggctcagtccattaacagcacagtctttgtcaggctctttatcgtgtatctctgtgacccagcccatgcttctctgatgtcagttttttcctgcaagcctattgggatctactgtgtaaatgttttgaatgcagttccattcctctgatatgtctcaaccagttcagagaggaaaaatataggcagtcctatatgttcctttttagtcagtctatgctggctccttcttttctaaatcatcataaaccatctatttaaaaatccattctgaagttgccccagggatttacattagatcaactatctggaacttttagaatcctttctttagaaaactgagataatatttacttcttttctggcactttccctatggtttctaaaatattaccagtattgattctacaattacatctgcattcctttagatggaaattaaattttcttggctttttgtatttgcttcttatttgtggcagttacctagttttggttctaagttgggcttaggtaggtggccatattctttttgtatgaccaattcaactaagttttagctcagaaagctattacgtattgggcaagtatattgtaaccaaatgtaaaacatggttcctagacatttagggctgcttcttacctatgcagtactcctgtacagactaggaaaaagatgcccctttctcaaataaaaaagtgcttagataattatattatgatgtaacatgactaatttatggtagatcccatcctggacttggctctttggctttagctatacaatacaaatgctcacattttgacccaatctcacataagacagaaccatttcagatcaatgactgctgtgactggaggcacggtttccacacctcactcagactggtaagaatgatgattccgatacaccatgataagttataattcctaaaactaccactaaaaagctatacaagaagatacactaaaaaacactaccgatatatcaaaatggaattctaaacaatattcaagtttcccctaacaaatcaggaaaaaacccagggaaacaaaaaagtaaaaactaaccagaaaatcagaaaattaagaaaatcaaatggaagccttaaatcctaaaatagtaattaaattaaatgtaactagttgaatgcacggattaaaagagttgcaggcaggattaaagaacatgacccaactataagctgtctaatgatgaacctagacagcatattaaaaagcagagacatcactttgctgacaaaggttcctatagtcaaagctatggtttatccagtagtcatgtatggatgtgagagttagaccataaagaaagctgagcactgaagaactgatgcttttgaactgtggtgttggagaagactcttgcgagtcccttggacagcaaggagatcaaaccagtcaatcctaaaggaaatcaaccctgagtattcattggaaggattaatattgaagctgaagctccaataatttggccacctgatgtgaagagctgactcattggaaaagaccctgatgctgggaaagattgagggcaggagggaaagggagcaacagaagatgaaatggttggatggtatgcatcactgactcggtggatgtgagtgtgaaactctaggagacagtgaaggacagggaagcttggtgtgcctgcagtccctggggtcgcaaagagtcggacacaaatgagcgactgaacaacaataaaaagaaggaacatacttcaaatataaagatataaactgaaaacgaaaagagaaaaagttgtaccatgcaaacagtaatcaaaggaaaacaatagtgactattaatatcagataaagaaatttta

SEQ ID NO: 55170 - DNA, 1300 bp, Bovine  19866880562812
  misc_feature (1)..(1): n is a, c, g, or t
ncatgatttcctaggaatgaatggctcaaaaattttctctgaacgtgagacaggttagcatagttgccagacaagctggtaccttgatagaaagagggtgttcctgtccagaggttttcagtggatgctatgaagtccaaattcaacagaaaaactgctcacacagaaataccgaaagttaagagagatactgcttttcttggaacaaaatacaattagtctgttgtcagctagaacggcttgacgtcctgttctcagagaattgctgaaggaactaggtcttttgaagacagaacaaagaagactcagggacaaacaatagttttcatcaaacatttgagagactgccttgtagaagaaaattttgatttatttcacacaactctatatttaaattaaagagaggtgggcttggattcacaatagagaagaatcttctccaaagggcgtcaagaatggaaactgcttctagagtgaaagttcaggaatcctttctaggggtcatttggtaatgtgcaagaatcttatcccattggcccagcaagcccaggaatttctactgaacaaataactggatgtttcttgaggtatttgtaacagtgaaagatttgggtaggttattaagtaaataaaggaaaagaaaaaagaaatatggggtaaaaaacaaagcaaaatgggggcaatggaacagaaactactattctaagcacagggctggaaaggagcgtgagatattattaggaaagcaccagtcaaaatagggttgaatgcagaccactgaggcagtggcccaatttttttgttaattagatgagagaattgtgattgctaaaataaaacttagattgagaatctctagtgaagtgaggtcaacaaaaatagctaatagatgggaaattactttagtcatttgcaagtgaagaaatctattactaatggatgttaaatggtttgtaatgtagagaaaggaaacagattcctgtacaggttattagtcactacaatgctgcattaatagagggcttcaggatgtagtatactaggcaaatgctgggtttggaagtgtgcattctgtgttagacaatagtccaaatgtttgtgatctaaatggcaaacaagtctctgcagaattatttaaaatcagaatatttaaattatttgaagatactaagatttacttgaatgtcttttttttttttttactgaagaagagtgcataatgtttgggaatacaaaccagaaaaaaatttgcacattttcttgaaaaagacttttatgacattattcataaggtgaaaaa

SEQ ID NO: 55171 - DNA, 1170 bp, Bovine  19866880574322
  misc_feature (1)..(1): n is a, c, g, or t
ngaaaaatggacctttgttggcaaagtaatgtctctgctttttaatatgctgtctggtccagggcaggatgtgcgtatttggaggtgtgtgtatgcaaaggaaaacaagatctttcatctatatttcatttatggtatgggaatgggagcagatggatttgaataatagcctctggcctttcttatccccacttggtggaaccatctccttctttccttgtaacacagagaccctccaggacacacttaatgtttaagggaggaaatgatgacattaaaatgtgcttgtagggagttccctagcagtccagtggataggactcgttgctttcactgccagggccctgggttctatcgctggtaggggaacttagatcctgcaagccatgctgagcagcaagggaaaaaaaaagtgcttgtgaatgacacctgccatttcagcaggtttctgaacacacagattgaacacaagtgtggaaggaaagcttgagtgcccatgatgggacctgttccctatttctagaaaccaatgcctgcttttgtttcttcaccaaaattacctctattcctatacagttctgagtttttaacatctcccttgcttcacatgttaaagcttcacaggttaaagcctcaaactggcaggaacaagcctgtgggaaagaagcattgttctctctttaaacactgtgtcaactgctacaaaagacctcttttgattgtgactacttaaataggtaaacatttgggcttgcagcaatttgggcctttttgactaagcaggatgttaaaaacaaaaagccaaaattgaggcagcatcttctgacagcctcttcaaggaccagagacttggcaagacctttggtagtcagaaaccagcacctgccaacccagaggctttggatcaatccaactgctctcagcttccctggaggacggcacagacgagcacccaccctccctattatactcaacaatctcttttctttgccaagttaacaatactatggcctagccaaatagttccttcaggtacacctgagttctaaaggtgtggcattcatgcactgcacatttcaaaagcctggaaactggcataattctttatatgcctcatacattttttcttccttccttctctttttcattttttccttcctgcccatcctc

SEQ ID NO: 55172 - DNA, 1383 bp, Bovine  19866880638508
  misc_feature (1)..(1): n is a, c, g, or t
nagtgcgatttggtgaagagcttctggaccgagtggaccaggtggcggatgcagccggggccgtcgctgcggtgctccacggccgtgcgcttgtactgcaaagtgtggtagccatcccggctgagaggtagctgcctctcaaactggtccaggaggttggcggggatgcggttggccttggtggccagggtgcggggcaccagggcacactcgtccttcagctcctgctgcgaggtgtagtgccaccgcgggaaggtgctgctggccagcgggtcgctgaaggggcccacacactcggcctggaaggaggtccgctgagtgtagtaggggtggtcggccggatggtgctccaccaggctcagcaggtatggcttgcggtccgcgtggcgcgacagcgagtcacaggctgaatcgcaggtgactccgtggtgatggctgcggctgcccgataaccctttcatcgctgacggggcaaagccacgggggtcatggacacctgggggtgtggttccagacccgtctcccgcaaggacctttgatgatcaattttccatttttcttgcttccaacgcaggaaaagatccaaactttacagcttttgttttttaacccgatgtgccttttggtgtgtgatgctcaactgttctcttcagatgaaccagacatctgattcttcatctgcaggcttcccttgtggctcagtggtaaagaatctgcctgccagtgcaggacatgcgggttcaacccctggtcaggaagatcaccacattggacttatggagtaacaggcaaacaacacattatcttggataggactccagaaaagcagggattgtggtcagaggaggaacctgtaacttgtcttagtgagacaagcagtgtctggtctgcagcaaccccatgaatctgaaattgaactggatgcttgctgatcctttggagaaagtgtccccagaacaggtgtgagtggttctcacaaaaagtgctcaagagcaccattcacctgctgacctgtttcttataatggctataactcaggaacagccaggtaagagagatgctcaagaccagacacccagggaaaaggcgagaagcttccatctctctctgacatcattgctcttctagcacctccctgtgctcactatcccggaagttctctggaggctgcccgaatgggtttttatggaggcttccttaggtgggaatgattaacataccatttcagttcagttcagtctctcagtcgtgtccaactctttgcgaccccatgaatcgcagcacgccaggcctccctgtccatcacaaacccccggagttcactcagactcacgtccatcgagtcagtggccaacaatctccagcccctctctcctcccagga

SEQ ID NO: 55173 - DNA, 1796 bp, Bovine  19866880660668
  misc_feature (1)..(1): n is a, c, g, or t
nttgctctctccctgacatgtttagctagcctcttgttacacatttttaataacaagaagctctttttcaccttgcttgggatctgatgcttttgttgggaaaaaaatcttttcagtctaacagctgcctcctcaggtgtatgagctggggatacagtgtttgcgtttcggtgtgataaagccattcattattccctggggttatcttctgacctgctcctcctctgctcttctcacgcccgtggacttttcggtctcccagggaggccccaactgcctctcagtgggagtgcagaatggtgctaccacccacagaatccaggtgaacccatcctgctggctgactgctgaagctcaggatgatgtgtgaatgtgagaatgttcttcccccagtggtactcactgtcctccccaagtggtactcgctgtctgtccagatttcttctccggggcctgggcagccccaccatctctggggccagaagcctggttcttgggctcagcctggttgtggtctgaggcctcccatgcaccttctggggcacctgaccctgctcttcctcattctcacaccattgcttgtcctgagatgctgcccagagagttaaattgcttgggcttggcctccaggctggactgtatcctctgttttggggaaacttgagtatttctgaaaaaattccatatcacctagtcaactagagactcaatcatggcctccatttacttcttctcaccagttggtggtcattgccccatctgtgggagaaggcaatggcaccccactccagtactgttgcccggaaaatcccatggatggaggagcctggtaggctgcagtccatggggtcgctaagagtcagacacgactgagcgacttcactttcactttccactttcatgcattggagaaggaaatggcaaccctctccagtgttcttgcctggagaatcccatggatggagaagcctggtaggctgcagtccatggggtcgcacagagtcggacacgactgaagcgacttagcagcagcagcagcagcagcagccccatctgtttgttcctgtcccatgcttgtctttccctttcccactttagtctagtcatctctcccagagttcagtgtgggtcaaacagttgctaaataaatcttggttgaatgaaagatgttgagaatggttgtccttgtattgtttaacatttaaatatagaacatttaacatgatctgctcgcaatcaagactacaaaaagggaccgtagattatgatagctgggtgaaatcatcgctggttgaatctaagaaatataatgtttacaaatatcaatgagaattaaattggcatgatttaattttagtgaattctttcatttcttagttacttacatgtccctgtgaagtgaataacatttccttcttatgcatggggatatttgataaaatactgaaccaagagaaagcgggagctgttgaaacattaagactgtatctataaatttaaatgaacttcatctgggcttaaataaagggagtgggcatgaaatcagggcttgttaaaacaatgaattctctgtgatgagacacacgtacatgaggaagagtccaaaatgagttgagaagcaagatcctaaagactccgtgactcccatgttcatcactgagcgtggcactttttatcctgatggagttcagaagctggaccatcctgtcttgttatctgctattggaatttagtttaaactctgctgatattccctaatagtactatttgtcagatatattaatatgtaccccctg

SEQ ID NO: 55174 - DNA, 890 bp, Bovine  19866880710484
  misc_feature (1)..(1): n is a, c, g, or t
nttagaggagggagctgtaattgctctaacataagcataagttccctgggtcctcatctccgcctcttcttctcttgtatcttaaacccttcactctccatcagtatctttccatcagcatttaatcatggttaagaagctctttcatcttaaaaggaaaagctacatcttgcctcaatctcataccactttcaagctattgatctctatcttttattttgtgcagcaaaatttctagtacatgtccatcttgttttctttatagtcccttcagccagcctgtcatttgtttcttggcagtccgttgactaacatttgatgaatacaatggctgaacgcacatcttaaaacctgaaaacacacacagttaaaaaaatgtatatcatgtattatctctttagagaaaaccatcacggacattttaaatagttagcatcttcatatttatattcctggacttcaaaagacaaataatagtcttattcagttttagaaagagcacagtaatgtcttcagaatgatttagaactgctattcagttatttgtgcaaatgttatccagaaaaagtagagataattgaaatttaaaggaaataccttttcttacaccattaaatcatcatactggatcaaacctctattggaacatctaataagtgatatcaaggaaaggaggttttaatttttaaaatttttattgatttttttggatgtggatcattttttaagtttttattgaatttgttacaatattgcttctgttttatgttatgggttttttttggccacaagacacgtgagattttagctccctgagcacgaatcgaaccctcaccccctgcattggaagccacagtcttaatcactggaccatacgggaagtcctagaa

SEQ ID NO: 55175 - DNA, 1629 bp, Bovine  19866880716543
  misc_feature (1)..(1): n is a, c, g, or t
ntgaattaatattgaagtctttgagaaaagatttaaaaaaagagtaaacaaaggtctgtctagtcgaggctactggtttttccagtggtcactgtatggactgtgagagttggactataaagaaagctgagtgccgaagaatgaatgcttttgaactgtggtgttggagaaggctcttgagagtcccttggactgcaaggagatccaaccagtccatcctaaaggagatcattcctgggtgttcattggtaggactgatgttgaagctgaaactccagtactttggccacctgatgtgaagagttgactcatttgaaaagatcctgatgctgggaaaggttgagggcaggaggagaaggggataacagaggattagatggtttgatggcatcagcaactcgatggacatggatttgggtggactcatggagttggtgatggacagggaggcctggtgtgctgcggttcacggggtcacaaagagttggacacgactgaacgactgaactgaactgaactaagcagttcagcggatctcagtatattcaaaaatgagaagaagctggaaatttctagctgttgatcaagagatcaccatgactgtcagttaaaaaccccaaacggaaaaatctacttctttgtacaatggcccgtggagtgtttttccagtagtgggttgtttgttttcagcccctgcgtggcattgtcttagaagccagtcctgcatgaaggaattgaaaaggaagacttcatgattatagcttttgattttggtggctggggacatattttactttatatcatgctttttgcttccttttcattctcttcaaatgatcaagaggtttgagatcctaagccgtcacatttattaaaattacttttaaactcttagctcattactgtgttcttgcccacgatttagaatcctttaaccaaagagaaatagctattttcttatagcaagttctttttaccttctatagctttgcataaagaatactcctcatcaaagagggaagaggttacctaaattattgttcacacatacaatgggatactttgcagttgttaagaatttttaaagaaaagttaatctacgtgcatttatgtaaaatgatgtttaagaattttaattgaaaacaaattgtagaataccatgcataaagaatgtagatgtgtgtgtaagatatgcatagaacatttctgtaaggatacacaagaaatggttacaattcttgtctctaatgaggggtaaaacagggattggagaggggaggaagacttttacatactattcaagcacactttggtgctgttaggatttttacaagtatttttaaaaaaatatttatttattcatttggctgcactgggtctacactgtgatgtgagggatctttgaccttcattgtggcatgcaggatcttgagttgccacatgtggaatctagttccctgaccagggatcaaacccgggccccctgcattgggagagtggagtcttagcccctggactgccagggaagtcccaagtgttctttctataatactgtaataaagaaggaagcctttccatcattcctaagcagaaaggagaggtgtgtaggcatggcgtttgttgtggtgt

SEQ ID NO: 55176 - DNA, 1220 bp, Bovine  19866880740304
  misc_feature (1)..(1): n is a, c, g, or t
nacattattaatgattatttcagggttatatttatagttctaaagcattggttgccccttgtcacagaggcctactcgctgcctccctgcatgctgtggaaggtaaaattacttgaaaaattacactagaatctgaaaattaggtgaaaaattgacttgagaattgtcatgtacattttaaggttcagtaatgaggtgtgaatccatgggcagtttcacacataaaacaatctcactttcttaatagttatcagggctataaaaaaacctgtttcatgaatcacagtaacattctaatccatcctaaggactgtaagtagaggaaactacagcctgctgatgaccctgccactatcagcaagttgaaatatttaatacaggcagccatagtgtaggcctggagaaggcaatggcaacccactccagtcctcttgcctggagaatcccagggacggaggagcctagtgggctgccgtctatggggtcgcatagagtcggacacgactgaagcgacttagcagcagcagcatagtgtaggccagctcagttcagtaaacatttaccaagcacttcagtgttccagacactgagctaggttttgaggatgggtaacaaatggtgtcagcccttgagcagctcccctccatttgtggaaaggcagtcaatgcctacttgccatgaaagtttctaaacagtccctggaaaatgcaggaaactcagagtaaacacaaaatgcacaaagaggttaaatgaatctcttgcaaaacatactgccttctccccttaactggtttgtcttcattctctcatgttctgcaaaggaatgacttgacttatggggatccttggaatagaattggccacgccagaagctgcctaacaaacctgcttgacaatggggtggggggattctcccctgagattgatcctaaagcaaaggaggctcggaatttgggtgtaggccagaattcatcatcagtttacaaagctggttggcaaaatattcaaaagcaaggagaaaaaagaaaaaccctccttacattagaactagatacaagatcactaagtattctgaatgtctttattttggtgtgtgtgtatttcctcagcactgaatttacctctgatgttcaaaattcatacaataccaatacttttttctgctcatttaaaatgcaggcataattaatgacactggacagctacagaacaaatatcaa

SEQ ID NO: 55177 - DNA, 817 bp, Bovine  19866880799358
  misc_feature (1)..(1): n is a, c, g, or t
nccaaatccgatccttctcttgtcatttgatttatactgagatacaatggctggaaaatttgaaactatgatttataaatcatttgataggtttgttgtgattgctttcggcctgtgctcattaaaacgcttatgtctcgttgatgagaaaaaatgaattactgatgtttgtttctgttgtgcccagttgccgtgaccccttacggttatgcgtccaggtttgagatccactttgatgacaagtttgaagtgtctttcgggagagaaggcgagacgatgagtctgggctgcagtgtagttatcacccctgaaattaaacatttccagccggagatccagtggtaccgaaatggtgagccttaatgatgaattctcactgaggctcatattcgcagaaggtcacagaccagacttggtcctaaagcatgaatgtctgtagattgcagttctgtttactagacctggcagaaactagatagtggaggacataacatactgggtgttacaaaagtttttacacatgttttagagtagcagaacttttataacatgtttgtggagatcataatttcttatcacagtataatacagggaaaggattacaaaacatgtattttccttttacaagttggatatatattcattttgtaagttaattttattcggtaagataaagtgaaatccagggaagtcctgttggttcccaggcggtaccagtggtaccactgtgggtggtagtcagcgtgctcaccacgcagctggcctaaacttcagtgtaccgtgtgggcaccgggcaggctgggccatcgtgaagcga

SEQ ID NO: 55178 - DNA, 1725 bp, Bovine  19866880840652
  misc_feature (1)..(1): n is a, c, g, or t
ncagatgctacatttcccaaatgcactgcttttccagcaagactcattttcaagttctcctcacatttgctgtggcttttaacacagctgcttttaaaagacaccgaatattggggaccagctgtgctctttctagcgttccctcatgcccgggactgggtttgtacaatcctgtctaatcggcttaagcttggggctggtgcactgggacgacccagagggaggggatggggagggaggagggttcaggatggggaacacagggtatacctgtggcggattcatttccatatttggcaaaactaatacaatattgtaaagtttaaaaataaaataaaatttaaaaaaaaaagaaaaatctttcaaagctgtcatagagaactactagttttaaaggtctgtggcctgtttttccataactgaaaaacaaatgactaaaccctaatctatcccaaaggatgtgtgagtgctacctttgggttttcccagcaacatctgtcccagaaatggacgtgaactgtgaatgttgaatccgttgtcactgaaattggatggacagtgtccttaaggattttcacaacagaactgagatctgtattttagaatcagattagccagtgggatgtgattgatttggaaagaggtgatctcttggtgatgaagacaaaacccttagcctgaaaccattagcaactagcacatgtcaagtgagtaggtggctttgaggcagcacaaacgctttttaaagggtgtgtaagtggtaatttcctgttgttctcagctcaactgacttatttcaggaagattcctgtgacccagaacctggtgaggtaaaactttattatctcctctcatctaaaatagtgttttctgtggagcagatgatcaatttttatgtctttccagccctggaaatttaattcatttttttcatcaatggcataaaatgtgaaacacccttagaatgaagcacctgacttacattctttcactaaccgcttttcagtatcttgaacacggactcagatacctttataacctgtaattaaatagatattcttttccctgtggttgtaaagaaagaaaatctcatctgatagagtaagacagccaagtagaaacttgtagagagaacagaaatagtcttgttccaattacattttgaaaactattggtacagtgttgacagttatatgggatatttcagtacactcacagcgagtaaggtaagtataatatggagataaataggaaataatggtgtagaaatactgtcaatggacatgagtctgagcgaactctgggagatggtgaaggacagggaagcctggcgtgctgcagtccatggggacacaaagagtcagacacaacttagggactgaacagcaagaagaaacattgtaaatagaagttggagttaaaaactggtttctaagagtcaacatacttcaaaatctaagaagagaatattaaatgaccctgtagctagttactaaaaaaataataggtttatgttacctcacgtacatatttctatgatcatgccaaaaatgccttgagtagagatagactcttaaaaaaaatggattctagagttactagagacacgtactgttccttcttgtgtatttcatctcaaatatatcaaggctatttctatctgatgacttatgcttctaatgcttcttcaagccactgttctttatttaagtgctaattaagatt

SEQ ID NO: 55179 - DNA, 3680 bp, Bovine  19866880843778
  misc_feature (1)..(1): n is a, c, g, or t
nggtgttcccagtccagcactgaaacccagcacttctccatttcgctgccattttgagaaagtggcaatgacatatacaccttaatgtgtaaaatagtgagttaggggtaagccgctgtatcacacagggagctcagctcgatgctctgtgatgacctagacgaaatggaataggactatggggagattcacactgttgtacagcagaaactaacataatattttaaagcgattatactccaatttagagaaattttggaaaataaaagtattagaatgcaaaaaagtttttaaaataaacctaagtgttttactcctttgcaattattttttttaaaaggcaaaataaaatgcctgatttttgtactgcttttacagtagtagaattttctaggatctggtgcaaatagacatgttctctgcaggctgaaaagaggctgaaaaccctggtgtaatctgtctccctgaattattataggattttagatggttgacaggtgcaataactttgaactcctcaggcatctcgatggaaattcagttccggcttgaaagtgctaactgtacagcttacattcaaacggagcttctcagatcagaggagctggttcaatactgcccttgatttatccatgtacaaggaaggattccgaaaatgcatcctttggagtcgaggatttctaaaggagcgtcttctagtgactggctggaggctgactggaccagcacagagtgaaggaaggaatacagtaggggttgactgtattcagacaggtgaagtcttgtgggtgtatgagatcagcagacagataccagatctcagcttactaattcatcaggcttttagcaactggtttctccatttcagtcctacagagctaacccacaacatcatccgtaatgcctggtgatattcatttctccctttctgaactcgactcttctcttaaatttcatatcaaaatccatttttcccctccaagccccaagctcaaagtttccaacatcatctactagatccttatgaatacttctctatcaagttctcattgggaaactttctcccaggatatatgactctagtgctccgttgctcccaactttcttacttccttgtccctggtaagttcacatcctccgaggatgggagtacaaggctctgtctgatttgaatcacatcattttgtcagctcgcctttctctctgcattcagatgataatgccgctcaggtgaccaggtgagcgcttacccagtcatgtccaactccgttgtgaccccatggagtgtaactctccaggttcctctgtccaggcgatttcccagggaagaatactggagtgggttgcctttacctcctccaggggatcttcccaacccagggatcgaacgtgtgtctcttgtgtctcctacactgcaggcggattctttactgcttgagccactgaggaagccctcagccaatcaccaatgtcacagatacatgtctgcagtgggccttatcttcaatgatcagaatcaacatttacatcttcagagtacaattatgtcctcatgcctgctagtactttgagcaagagaatctgtatcatgtttcccattatctgtccttgccctgaagctgttgctgtgtgaactctgcagggaggaccaagggaagggacccagccaatgtccactgagccaccagtctttacctgagtgtagagatggaacatcccgcctctgctcagcacccacctgctatgggactgatattaaatgtacgggcaaaactgagtccctttggagagtgaaaaggataccattaataattacactgagatatacacttgctccttgaaaggaaatctatgacaaatctagacagagtattaaaaagcagagacatcactttgctgacaaaggtccatgtagtcaaagctatgggttttttagtagtcatatgtggatgtgagagtagaaccataaagaaggctgagcactaaagaactgatacttttgaattgtggtgttggagaagactcttgagagtcccttggactgcaaggagttcacaccagtcaatcctaaaggaaatcaaccctaatatgcattggaaggactgatgctaaagctgaagccccagtactttggccacctgatacaaagaactgactcattggagaagatcctgatgcttggaaagactgagaagaggacagcagaggatgaaatggttagataacatcactgacttggtggacatgaatctgagcaaactccaggagatagtggacaggggagccctggtgtgctgcagtccatggatttacaaacagcagacacaactaagcgactcaacaataaactgaaatgacatttttgagtctggaactgtgtctaagcccagggccctagatgaagctgtgtcctaatgctcttttgctgatggtttgggtagagcagcttcgtataaagaatgtcactgtgatcactgaagagtgatccatctgagaggcaaacacagatctttcattccagctgcaatatttatacaagtacaacactgactgactaggaggtgaataaagcacaacaaagctgcatttccactccccccgctgaagtttcctgagaagtagtctgagaagtttaaaatattttttccaaaaaacaagccaaaataactccttttattttgggttcctttcagatagccttgcagatggtttgctgaaatcgtcagaccaacaaaatctgtttggctcaaaaaattaaaataaccctaccaaattatgtgtttatttgtaataaaaaaaacactgaatttctaaaacaaaaactaaatttcttatttctatctattaaacttaccctcactctgcattttgtgaaccaaactacagaaataattccttaaagatccacacattttcccctgtagtgccgaattctagaaccccaaaatagagtggtataaatgctgagttcttctctgtttgcttttctatcaatacatattcatgtcttttctcttgacacaagcctcctatcaaaacatccaaaagacagtaaatactaatacatccaggaggtgctctttcttcctctaattgcctgcatcaagccagtttccatgacatcagctcaggaacaaacacagaaaactcaagttaaaaatacttcctctgggaaaaataagtatgacccaatgggccagttggtgggacagctaaagggaagagggcttccctagcagctcaggggtagaggacccacctgttaatgtaggagacactagtttgatccctgggtggagaagattccctgaagaagaaaatggcaacccattccagtattcttgcccgggaaatcccatggacagaggagcctggagggctacagtccatggagtggcaataaagttagacatgacttagcaactaaacaaaagacggcaagagtcccatgttctcacagaggttttagttcaaagttgttttgagaagatttgaagaaataatcgcctcctcccacccatggtctcagcgcaaagccaactgtgccagcccttggggtccctggtgcccagcacacagcccctcgggtaggctgggcacaacttcccctcatcaacaggatgtgaggagatgctgcgaggtgactcagcttccaagatcctaaccgctgccactgcagt

SEQ ID NO: 55180 - DNA, 1201 bp, Bovine  19866880889736
  misc_feature (1)..(1): n is a, c, g, or t
nacttttttctttttctatcaacttgtagaaagctctgttttaatgaagtgacagttacaacttatcgtgcagttactgtgtctggtgctgggctgagcccaccactgccgaatacacagcagatattttcccaggcggtttgcattttaaaatactttcctaatgaagccattgctcctatttctcgaggcagcttttggagtggtctgttttagaagtctgcattagttcatttttggcatttagcatcatgagtgggggacagaggctcagagtttgtgtaggctgcccttgagactgtgcagctctgagtccattcttcatcagaaaggccccaccctgctggggtgtccacagggtcgctactccagatgctctggcctgggactctgggtggtaacctcagagtgtggtccccagaactcagtggggatccctctgttccccctgctccctctctgcaccaattcctaagaggcagagccatgagagtaggtgtgatgaggtgacaatgacaccattgtccagggacactaaaacatggggtcagaacagcctggagagctcgtggacattgatcccagcacctgtaggaaaccagccagtgtcacgaccaaggaagaacaccagtgacccactggctctcaaagcatcctgaaacaggcacatccctcttgtgcactggggcactgcttatctgttgtcattgttacgtggaagctggtctaaaatggtcctaacgtagcttctcccggtggctcagacagtaaagaatctgcttgcaatgcaggaggcctgggttcgatccctgggtcagaaagatcccccagagaaggaaatggcaacccatttcagtattcttgcctggagaatcccatggacagaggagcatggagggctacagtccagggggtcagaaaagagtaggatacaattgagtgactaatactttcactttcaaggtagcttctgagtagggcctaagtaccgtctccaccgttttctctattctctgccccttctcttccctaagaaggccagagggacatagcatccttctgggtgcagaggctgtgcccacctgaaggggaatagtccttctgagtgttccccactccccctgtctgcttggtggcaaatacaccctcacctgtgctcccttcagcctcgaccagcttctgccggtcatcctcacttccc

SEQ ID NO: 55181 - DNA, 1453 bp, Bovine  19866880912131
  misc_feature (1)..(1): n is a, c, g, or t
ncagggaagccggttgagtccaaagatctggaccctcagatatggagggaccaccccagagggagagctgactataaattgtatgcaaattttcttcttcgtggagggttggtgcccccaacccccccatgtgtccaagggtcaactgtatgttttataaagtagaatggccacatgctgaatactatttgtaatatatacacacatatatatgcatatatttttgagtttgaatatctgtgagaaatatgagaaggaaaatgttaaaacgatagcagtggtggtgctcttcaggaagtggtggtgggagactgggaaacaggggctgacttttcactctgtaccattctgcactgtttgtatttttccagcatgaacctgtattagtcttattaaaatatgaattctgtgggaaaacctccaaacccacttttctttaaaaaataaaatctgtggaaagaccacaaatttataagcatacaagtttgttttttagaatttctgtcatctttacatgatctcaatctgtaggttctattccatcactggcaaagataatctaaggaacacaatttaactggaaattgatgaaagttgagtaggagaatcataaattagaatcttttaagaactattattaaagacattttgctttcctattttttcagcttgggttagaattttatatttaaagttaggaaaatgcacatataatcatatgcgaagacccgtatgttctgtatcagtctgtgccacttattttcaatgagataaaacagcttacttaaagttgaatttccccattgagtttagacgaatcagctgtttatccagcagcactttgcttaaaaatagatgggatgacatttgtgggtgcttttaaaaaatatcctttggagaaagaagcagaactctaatgccacttttaccatttccattacataagaaaggcactttttttttttgttacgaggacttcctgtaacttattcttctttctcacacatatacttttggaacaagtaacaatcattggatgtataagggcatctcacctgaattttacattttagtgaccgaaattaattcaatggaaaccttaaatatggctagaaagagttttttctgattgcatatggagatttctttttttcatccttctaattatgtgctctcccatcattcttttatcagctagttattgagtgcctgctatgtgacaggcactgtggttacaaaaatgaacataaagatgattttgagtgcatttcacttgatcttacagaccaatttaataattgtctgtaccaacctgccaacaataagaagtggttgatgttaccttaaacctgctgtcatatgattccacggagtctaggataagcattaaaacagggctgagctgaaaatatactgtcacccaaatttcaaaccaagtagatacacaggagaa

SEQ ID NO: 55182 - DNA, 3155 bp, Bovine  19866881012078
  misc_feature (1)..(1): n is a, c, g, or t
natctatatagagtatatttttgcatatgacaggtttaagaggttgtgaaattatgggcaaaatcatgataaatgctcagtttattcatatttggcttgttcagttaaattataactccttttgtgaataactcagagtattctgaaggtcaagattctcttctccaggcatgagtaaaaagaaacatcagttacggtcatgtggtgtcagacctggttcataccaggttgcaagagccaactgttacattttggggaattttgtaaatccattattaaacacacccatgattacaaacttgcaattataattatgttaaaacaaaggtgataagtaccttaaaatctttacttcctgactgtttgactactttttactatccatgctcttggggttctttacatctgctatccttgtgtggtgaaatatttactacatgatggttttactatcattcatctctttccaaagccatgtcctgtgacagcaaagctggaagcttgaaataggccacagtgggagtgttttcatagtgttgacaccgaaagagttttaacttaatcaaaatactttctataaaacttgaacagtttaatagttcaagagatcacataaaagatacaatgataatgaatttactgggaaaagaacaaattgggatgcaattcagagcattatttttgtcaaatcatgattgatttgctggctgtgaatcccacggtttggtccaaatcaacaaaagtcttctgtgagaatctgttggctgcatggaccctgcaataaataagactgtatattttattattatgtgtagattgtgtactacccatcacttatattggtaaaacccataatatacacacataatacaggcatatttttccccttgttaaacattgaccagacatgactggttccaccagaaagatgaaattcaactggtaacttaaaagaaagttgttttttgtttttttcagaaagttataaaagagagcaagtttgtctctttgtgaatagaatctgttaaaaatcagcgggtggtcatgctgataaccagtttggtttaccagtattgaaaagcattttgtttccatttttcatttgagactcctcccatttgaaagagaaccagactttccacctagcgaaactgcagactttttgttttttttccagcctaaggtatcatggctatcacacagagtttgggaaatattgtttatacttatgacttacaaggaagaaaatgaactttcaaaatcaaattattggaccaggtctaatttattttagtttagtattttgacctttcagttcacaaaaaagtcacgtggatatccagtcaagggtagtgtctgtttgcttcatgaataatttgacaagctcagcccctccactgatctgcaaggaatgggaacactgaacacaggagaccagaaatggcctctggtccaaccacccccgagaaggaagttgccagatcacaccatggtttctaaccacttgttacgtatttcagcagaaaccctgtcccaacacctatcagatgatctccaggtgcagcttaagtaggaaatactaggccttgatgtccttctgagtgaagttttatcaatccttcatccagtatgacctatctacagaaatagccagccagactattgagacttggcctttgtttcatcgagaaacatggccgatcctttatttagtgaaaaatgctcccaagggattctagtgggagaagaagacattcatgaagcttaatcaaggactgaaaattacttcgtttttgacattgatgtttgtttacttaaattctcaaaaagccagcaacaacagcaacaatccagatttgaagcatgtgtgtaatgtgcgaagcctggcaaagtaatttgggtccattctataactgcgactttttgtttttattcaaggtgtcataaaactgagttctgcagttgaaggtacgtttttacaaccacaaaatcagtaacgttttgcttcaagattgcaccgcgtggctttgtagctagaccgcttctgtggccgtggtgtctgaagccatgttctaatcgccagctactgcctttccatctgtgtttctccttgtcctggttctcttatgccacacgtccctcagctccccagtgagtggcctcaacactgaccccgagacagcattgacgagagcaagcaggtgtggttctgccccctgacggggcggcctcaggaccactggctccttagagagcatccttatcctctacggcatccttatctgaggctggaccttgagtcttgtcaggaacccttggcccacccccaccccactccctctttcgataggaccttttctagagggatttggttcctcatcctaatatagcagacatgtttgcccaggaaatatgcagacatggagtgattaaaacttcttgatggctagtctcaagtcacgaggtgccacccaggaggtattgcaagaaccagcttccttgagtgtcatccatgtcactcacaccaggtggttccttggaattgtgcttctaagacgctgagaagaaaaggaagagagatttaaagaaagaggagggttggtgggggagagaccacacagccgtgtttcactgagtaactcccaagaatgttaaaaacacctcatttttttgaaatgactcattggttattggtataaaattgaccaccttgccctaagaggagcacacatcttgtaagtagggaatatgtcatgctctctctttgtgagtgtctgtgtttgttgtggggcgtgtgtgtgtgtgtgttctcgtttattgggagtttgtcagtcatgctttggacggttcttcatccccattttatcaggggaggctccttggaagaggtggtgggctttaaggtgaattttcaaatgtaaggagagatgcagcttcgtgaatgggcaatgcatggaggtgcgagccggaaaatgcgaggaggaggggctctggtggtgagaccacctgcttggctcaagcaaaaggactgggtgggctggagtttgcaggctgggagaggggagagggactcggaaatgtccccacagggctggcccatccggagagggggactctgctcctttagggatttagtgccatcacattttgaaaag

SEQ ID NO: 55183 - DNA, 1654 bp, Bovine  19866881013767
  misc_feature (1)..(1): n is a, c, g, or t
nttttgggaaaagaagaaatgagaacaaaaaccgagacagaacaagaaccatttggatttgcaggacccaagtaaatataagaacaagcacttctcagacatttcttgagatataagttgcattattcaacagaatggggggtggggggagtgcacaagagacaaacaaagatcttgattatgtaacaattagagttatgtaccttattgatatagtaatggtctgtacctcccaatctcaaagaaacatgttcactatgtccttataatacgaacatattatagggaatgttaaaaagtaatacaggggaattccctggagatccaatggttaaaactctgtgcttccactgcagggggcactggttccaaccctggttggggaattaagatcccacatgccttgtgacaaaaaaaaaaaaaagtaatacgagatgctaactgaagacaactggtattaaataatctttctatttacatatttgctgctgctgctgctaagtcacttcagtcgtgtccgaatctgtgtgaccccatagacggcagcccaccaggctgccccatccctgggattctccaggcaagaacactggagtgggtactgtgatatagtagcaaaacatatctgctactgtatcacagatttcatttttattgcttgaactacctgggttccttccccaccttaagattgggaggcacatcattatacatacatataattactttattactggttttattctgttggttactttgccagcagagatgaaacatatgattaagcaaccacacatgtcttacacgaattttagcagagtttatagaaggcaggttaatgtgctgttactgaaaacaagccaagctctgctgcagatggaatggcttttaggtatgagatgatctggttatgggtgatacaccacctcatgggattggatggccctctgtattcccaggaggagcaccaagttaaaatggagtttcacacaatgggaatgaatatctgaggacacttgggctgatgaagatggaaaggctatacagaagcacagaatctggataagtgatggagatctgtaaaagaacagctgtggaagattagaggtcgcctggagtcagagacaatgaccatctgaggatgggatcattgagccatcttagaaacttgacacagtctctggaggggatgttatctttcgttgtaacttagaaaaaaatcattcccgccccctccacccgtaaagctgtgcatgaagaacttaccaatagcagcttttacttcaattgcttctgaattctgtgaatattcactaagtccagctgcgttaactgctctgacccggaaaatataactctgaccggtcttcaatccatgacaagtaaatctgaaagggaagaaaaattttttaaagtttcccaggaggaaaattagggaactaaactaaattctgttagtttaacagaatgatctggctttatgaaaaccattcattttttcaaaaggaagaaaaggatgtagagagatccaggtaacatacgtaccttaaacaagaaggcatctcaggcaattttctaaactcactctgtcaaacagtgaggagtcctggttttcccctgaataaacaccctatcctttttgaacctgtgtgta

SEQ ID NO: 55184 - DNA, 1039 bp, Bovine  19866881124637
  misc_feature (1)..(1): n is a, c, g, or t
nttggggcaaatgcaagcggagcagcacttcccgtgctttgctgagcggcagaaacagaaaacgcagtcggggttggctacttgacagtaacactaaaacaaaaaccttctttgtttgcatgtttgttcgtttctctcaaccacagacaaagctgccatcgccgagaaaagtaagtaaacccctttgagtttattcctagtgtggcttcaaaatacaactttatttttctattattactgcagacggaggagagtgaaagcatttttttttccttttctttcatttctatgtatatttttaaaaccttaggtgttccgcatgtgttgtcctttagtctcttgagtaagactgtctggaaaagaaggtctcaggttacactgtaagaatggctcccagcctcaacatgaaaaatctctgggctgcaaatcacacagtaggttgttcatcgcttgcagcaggcggcctatgtcagaaaagtgtatatattgagttggccaaaacaattcctttgggatttttccataagatgtagtggaaaaatctgaacaagctttttggccatgccaatatgttaaggaaaagaaaaaatattaatgaaacttgtagattgatatgtaaatcactatagctggtcccccaacaagtggtcccatttttctgaaagaccaagtaaggctgagtgaccctgaccccagcggtcaagcctgtgtctgcacaagtgtgctctctcccgacccctctcaactgtgcttcacacacagaggagtctatagaatcctgggatctacaggatctacaggatctacggataaaccatcgtgatgattcaggctctttctcagggtgggagcagaatttgaaaaccattgaaggttgtggttgtagagtcagtcctgaactcagggacgggaaccaggaggaggaggagtgagactgtctgctgactgtctatcccctctcttgaattctcctgtggacaagaagcctgaccctccctctgctccatgagctccttcctgaggtctctggaccacagta

SEQ ID NO: 55185 - DNA, 1332 bp, Bovine  19866881317640
  misc_feature (1)..(1): n is a, c, g, or t
nttacccttttttggtagttatgatagataatagtgtgaaagtgaaagttttagtcactaaatcgtgtctgactctttgtgaccccgtggaccataacccaccaggctcctctgtccatgagttctccaggcaagaatactggagtggattgccatttgcttctccaagggatcttccccaatccagggactgaaccctggatttcctgtattgcaggcggatgagccagctctttactgtctgagccaccagggaagccttagttatgataataacgagcttacaattttgtgttctgcttttttccacttaagcattgatttgtagccgtccatttttccatgtgcttatgtaggctttatagttctccttggtaatggctacattatatgacaaaagtaatcccagcataatagtgaggggattaccaagccagccctggaaggattacacctgatacacagcgctgagtgccagaggagcctgccaacatgtgataactttgaaaacctctttaactcaaagcccaaattttcccatttgccaaataaccctaatcatagttgtttgtcatcttcagagaaacagtgtgtacaagtagaaattacttttagtatcttataggtttgaaatatgtttatagactagaaataactcactctccttcgtctccccctttgaaggcagagcagactaataagctaccttcccaaagcagtaagcactgaaaaaagtgaggaggccaggcagaagcattttggctccgtggttgttttgcggtcacctatttgtaaatgaaatcattttggagtcaccttttggtaaatgaaatcattgaaaaacttcttgagcccatttgctttgctttatacaacatgtgcatggcttaaaagtaatttacaaatgaaaattgtactaatcacccatcctgtccattaacttagcttatttttgaggttcactcaacaggtttggtctttgctcagtgagaacctcatgctctcaggtgtgatggcagattgcccaaatgctgagactttcttattagaatcaaggactgttagagtctgaggagtctctattaccatccagcacatttagtccaaacatttgctcacatttctctagattaagggtacacacaccactgatggggcttgttgggcttccctggtggttcggtggtaaagaatccacctgccaatgcaggagatgcatgttctattcctgggtcagcaagatccctggagaaggaaatggcaacccattccagtattcttgcctggagaatcccatggacagaggagcctggccagctacaatctatagca

SEQ ID NO: 55186 - DNA, 1516 bp, Bovine  19866881355327
  misc_feature (1)..(1): n is a, c, g, or t
nattaaagaaggaaactttccccagaagaaagcagtaagtggattaaagagaaaatgaaaaagttggaagacaggctaagaacatcagagctataatagagtcccccaagaagaaactgacagcaaggagataaatatcaaaaagtacaagaaatttttacggaaattaaaaaaaaaaaaagatatactggaagggtaccacatctacttgagaaagtcaacttggaatggccaacactgaggcgtgttttaataaaagtttttgactttagaaggaaaaacatctcttgtgcttccaggcaaaatgactaagtcacatataaaggaaagaaaatcagattattatcagactttttgacagaaatgttttgtgccagaagaaaatggaacaatacatttatgaaacacaagtaaaagcactttgttcatagcagcagacttttaagcatgaagaatgcggacaaatgactagcaacatgcaagaaattagaaaatactgttttcctgggttcttcctgaagaatctactcaagaatgggctttttaaaaataaaataaagaacaaatcaatcaatgtgattagagcaccatcaacataagggctgatgacataaaacacatatttacttgtatagaaaaagcataattttaaatggctatatggtctggcaatgcagattcagtacaactatttaaaatgcagagatacaggacttgaatctatgagaaaattttactgtttcagtcatcaaattagggagctaagactgatgtcattactgttaccctgatactgttaaatacagaaaatggaggtggaaaacacatgaatgattacatgattttctaattctctcgtactcttgtctcctttcaaactaggatcttggtgaagaaaggcaacacagatgtaagacagtaaagtgaagtaaaaacctgtaaccctgagtatttgaatcagagtgttattatgaattctagagctattttattctgacttcatatgaaatagctgaaattggtaaggcaagaataagcagtgtttgattggaatcagaggtaccagaatgaaatgatagattagagaggcagagagagaggtgtgaagggtgatggaggaataaatatagatgtgtgtgtaagcaagagttatacacacatgtatttccaagcactgtctactaagaagacctagaagaaattacagtcaacagtgaacacatctaacacccagatcttggtttctaagtacccttcttccataaagggagctaggcctccttagagaattagttgacttcacagctgcagcagaaaagaatacaagatgaaaccagagcaactgtggatccagtgatctaggattttaacaaagaaattacattgggttaaaaaaaaaaagtaaatgcagttgagggggaacctacagactgggaaagacttgtgtatccttaaaaaacacacatgtatacctgtggcagattcattttgatatttggcaaaactaatacaatta

SEQ ID NO: 55187 - DNA, 1055 bp, Bovine  19866881401434
  misc_feature (1)..(1): n is a, c, g, or t
ncccatgcagatcacttccataaacttctttaggtgttctcatttgaaaaatatgtttaattgaaatatatacacattaagtacttcccagctggttctcttagcaacaattgtagcctgtttctagtataagaccaagtttctactataaactaattttgggaaaaaaactacctaaagaaaaatttgccatgttttgtttcataagcaatatgagctaatgaggtgtcattggtctctaacatatttcagggagccatgcttacaagctgtgcatcagtgctgagaaactgcaagtgtcggctgcatcctctatgaccctcagctgtaccaacttaatttataaaatgtaattactgagccaacaatgaggtactgaatatgatcgtatctctgcagtgactcacctgccaaaagaaggaaaacaagactgttctcaacgtttataatttccctaagaagcctccctgttgccatggtgatgttgatgctttttagctcaaaaaagcaagaactctacattgttactaccataattgataaatggcaaatggatcaggcatgatggatgatgaaggtgtcatgggactatagttgttcagttctgtaggtaccatgagatcagagacagaaaggcagcgtcagatacggtcttggcgagacataggagctgtcgggctggaacgcttcccctttgtagctgagattttgggcaagttacctaacctcattttcctcatttgtaaaatggggataatagtcgtaatacccttagttgtgtggatcaaatgagttaacacttctaaagcatttagaatagagcctgcacacaggacgcatgacttgagtttgttaaaagaagctgcataacaaagcttaaccaaacttcgctggtagttctcatcattagaacctacaaatcactgttttcaggtccaggaatggtagcatgtcttcagtctgatgtttctagatattgcaagctttcaaaacagttaaatgtacgagttaaggaggaaagaacggtgcctttttcccagtggaatgtctattct

SEQ ID NO: 55188 - DNA, 737 bp, Bovine  19866881931413
  misc_feature (1)..(1): n is a, c, g, or t
natcttaaaaagttcttcacatgtttctcaaagacaattctgagactttccatttacttaaacacagtgcttgtggaactagagagataagtcaaataacatttttgctttaaaatcattaagtgtgactggcattttctattgtgaaatagttttcttactttacttattaaaacattgttcaacttgcattgaagtacgttcactgcttgatcatcctgttaatcatcttcatgtcagttaaaataaaatctgttcacaccacttaacatcaaatatcatgttttgacagtttgatatcagaggcttctgaacagggattgtgccctgtggggccctgaacggcatcacataaacatgactgtaatttatgatgagaaaggaaatgtttttaagataatattttttgggggaagagagcttaattctaaaatatgtttgacctttcagttctcttcggtttttatcttttcaacatttgaccatttccttccttttacagtaaaatacgcatgcattcgcaaatgataaaccactgcctataaccttcatacactgagaaaatatatatatatatatatatttacctaatgttgagggcaagagatgaagtgtcttctcaaaataataatggtgaaagagttttctgtcttcagtacagtctgacagagatagagataaaagggcccaagcaaaaagtcttggatgaaagaatttcatctaagccatagagtcca

SEQ ID NO: 55189 - DNA, 2395 bp, Bovine  19866880413426
  misc_feature (1)..(1): n is a, c, g, or t
nttctctaaagaagacatacaaatggccaataggcacatgaaaagatgcttaaacatcactaattattttagaaatgcaaatctaaactgcattgaggtatcacctcacaccagtcataattgccatcatcaaaaagccgacaaataataaagaatggaaagggtgtagagaaaagggagctctcttgtactgttgtttgggaatgtaagttggtacagtgactatggagaacataatacagagaacacagtatggaggctccttaaaaagctaaaaacagaattatcatgatgcaacaatcccattcttgggcatagagcttgaaaagacaaaactacatgcaccccaatgtacttaacagcacaattcacaacagcaaagacatggaagcaacctaagtgtccataaaccgatgaatggataaagaagatgtggtacatatatgcaatggaatattacctggccattaaaaagaatgagggcatgacatttgtggcaatatgaatagacctaaagattatcacactaagtgaagtaaatcatacagaggaagacaaatatcatatgatataaacttatttgtggaatctgaaaaaaaaaataatacaaatgactttatttacaaaacagaaatagactcacagacatggaaaacaaatttatggttaccaaagaggaaagagggtgacaagggactaattaggagtttggggctaacagatacacactactatagagaaaataaacaagaaggatctactctgtagcacaggaaactatattcagtatattttaataacttataatggaaaataatctgaaaaagaatacatattatatatacatataatattatatattatgtataataatcactttgcagtatacctgaaatcacacaacattgtaaattaagtatacttcaaataaaaaatttctgattttaatcagtaaattttcaaaataaaaggaatgagaatagtttctttttaaaagctgtaatagctaaaggaagcaattaaataatagatatcttcagattcatcatgataattaattgggaccatttgaacagggagaaatctcaaaatatccttcattttgattcaaccttaatattttgcttttatcagataccaactttgaaataaaccttttagaagttggtccattgcttataacaaacctagagtagttttaaacaatttcccctttatctgatggagtgaagattgtcagagatgagccccagctggggcccaaattagagtaattaagaagcaaaaagtcaaagtacttttctataacttgtttattttattagaagattaaacagtattgctagtgcagaatttgtcatacttacagaaacagaaagagagggcattgtttaaatgctatgtgtaacagatatggaagtgatagcctcagaaaacaagattggatcatcaaacagtaagagacatgcttaaaaagacatgtaattttactttatgataacaatgtagccattgccaaataaggaagtgtctcattaaaactatcacaaatcattcatctgtggtcaaagagagacctgtatactaacttatctgatgtttttgaaaaactcttataaaccctaactatacttgggcaataaaagagaaacttacatacaacaacaggaactaaaatgttttaaggccttaaggtagttactcttcttttctggagacactattcatgcttataaaagtcaatcaaaaattaaaattaaaaaaatcctataacaatactgttatatcagtatcttctgactcaatatgcaggctatattatataaagaaacatttaggtactaaattttaggtactaaaattgcctctttggattcatttcaaatgcttttcataaatgcaatgaattgtcaatgtcttgtgagcctcaatgatagttttccctgtcctttaggcatttctcataatttctgcagtcccttaaaaagagtagaaatcctataaaaaaatttgctgttgttgcttagttgcttcagtcatgtctgactctgtgtaaccccatagatggaagcctaccaggctcccccatccctgggattctccaggcaagaacactggagtgggttgccattgccttctccaatgcatgcaagtgaaaagtgaaagtgaagttgctcagttgtgtctgagtcttcgcgaccccatggactgcagcctaccaggctcctccacccatgggattttccaagcaagagtattggagtgggttgccattgccttctccataaaaatagtagaaatcttattttaaaaaaaaattgctaataacttctaaataaactctcttctctgcaccaatggtgaatgtaattgatgacattgcttttagtagatt

SEQ ID NO: 55190 - DNA, 1397 bp, Bovine  19866880477795
  misc_feature (1)..(1): n is a, c, g, or t
naacataatgttgaagaaaagaagtcagactgtgaagagtaatactgtgcagttcattttatgtaaagacaaaaataagcaaaactaacccatgctgttagaaatcaggagggaggttacaatggatcagggagaggttggaagggagagtcccggggagctggaaaaggactgtttcttgatctttggttacacattgattcagttcttaaatacatgaagctattcacttgagatatactcacttttttgcatgtggatcacaattcaaaaaaagctaatacaccagacacacacacacaccaaaacaaaacaaagcaaaacaatcaaaatatctactagtatttactatttgtaaactttagaatgtaaatgtagtgaccagtgcaaataagaaattctgtgagaatttgccacataaatcagtttgtcccaactgtcaaatcagtataatagagcaaaatgtcaagtagcagaaaggttagtcccctgctttattgtccttttaagtgtctcataccagcagaggtacctcgcatcacacacacttcgggatgggactcatgagagtttaccacccatgaaatgagggagggactgtgtgctaaatgatgcctttctcctaagctttcccagggacaagaagatacatttcttaccatgtctctttcttcatcctttagatcccattccaaagataaactgtaatcgcaggagacatctcatcaatagaaaactcatttttcctagacccatgacaaatgggtcatgaaacctataaatcattgcttaagccttagccaaagttgatcaaaaaatgttttttccctaaaaggaaagctttcttctcttaaaacagcagcatcctctggttaacagtgtaactcttaactaaaccttggtgtcagaatatgttttggtagagacagcttaatggagttgctgaaagatctatcattcattcctctgataaggacttccagaaccagggaatcacatgcattattccaaatttatatgagtaaaagctccaaaaaaatttaaatgtacctttcaagatcaaaatgtttacttttaacatattaaatggaaatacctttatattatttcataatcaatattcagttgcaaatactacctggatacagatattaaggaactttttgagttcaaaacatggctgttagagtcagactgggaaggacggttagggaaacaccttaaagttctttcatatttgagctcttaaacaaaataatgaaaatcttgtataccatccaatggccatattagtgaacactgtcttcctgcattgcctagttaactgtaaaaagaaacagctataaaggaattcaagagactgtcaactccaatttcctgttttctaaggaaaggag

SEQ ID NO: 55191 - DNA, 1262 bp, Bovine  19866880613079
  misc_feature (1)..(1): n is a, c, g, or t
natcccacctgccttgcagcggaagcaatatgcaacaaattcaggaaatctttaaaaatggtccacattaaaaacaaaacaaaacagaacaggtaggaataaggtggcattcatgactcctagaatgtgtggcttggggcagattataagggctgttgcgaccctggcagacagcttgagtctggggccggcatggcatctatacagctggtgtgtgcggatcctttgatggcagcaacgctcagactttagtggaattgaagaccctgaggcatttgttccaaactcagattgttggctgcatcccaaccaagggtttctgatggaacctgatgttctgcatttctatcaagttcccaggggatgcctaggctggttcagggtcacacctggaaaaacactgcttcaaagagcagttcaggtgggcatcatctttgtccatcctctgcagttaccccagagaagagatttccaagtgcaagggagtagatggcaggttgtgacacaattaccactctcttttccagaatgctttgcttcttctctcctttcaaatgaacatgaacctctgtttaatatccaccccttttctccccaaaggggaagaccatagaatcaccttattaagttgctcaccacaggttcccagacgcccaagtccttgtggggcaatgggctgtggcagcccggtttgcaggcaggggctgctttcaacagaccctgtatccccatccttttctcattgtggggctccctgaaaatgcactccttcttcccagacatttatctaagagtaacagcgcatagaggccagtagcactgctgatctccaaccaggaagcattcagaccgtcaggaaacacgggcgagcaaatgtttactgaccgtgtaattaatatgatgctctaccctgtctctcggcccttagcaccgtatttcctgttcagggcagtggaaagctaaaatatttgtcgctgtttgaccaaaggagcaagtgtcttccaaacgaacacatgatctattagcagtcctgccgagtcttcccatgggaacaggcattttactttgttttacagctaatttctttcttacagcaggttcccagacacatcaaatgccttacatgtgagtctgaagtcaagatttatagtccaggcccatgtaattcaatgtcaagcaactctgataacataagggcttggaagtcaaccattttctcatgagttctcataaaaaagtcattttagccaaattaagtttga

SEQ ID NO: 55192 - DNA, 1046 bp, Bovine  19866880753187
  misc_feature (1)..(1): n is a, c, g, or t
ntctgtgatttctggaaaatgcttatgtaagcataatcctaaatctccaaggctatatacacgcatatccacatacattagcacgtatataatcacctgtcacaatactcatggtcagcactcttggttctccgctcttactccctttaactggcgggtgtgtccattcatcaactgctgtgggtattttacaactgtccccttatttggataattgcccttggccaaatcagatctactttgcctggaaatttatactccctgctcctggaagccatggagagatagccaatggctgactgacaatgagtgttttaaaaattaagataaaggccagtttccttgccccaaggtaggaccaaccatggtacaattcatgcttcggggccctccgagggatgaggctgcagctcagctctagatgagaccacccacatgctacatgccttcgctgacccaccgatcccctcactccctttctcctaagaccccttctttcttaagccccaggcactgtatccctgtctcaggctctgcttctagggaaccccacatgaaataactcctcatcactgatactgaaattttcagcaactaggaccctaacatgggtgttttcttggtctaatttcacttttaattttctaagttattcaccaccacataatttcagtttgaccatatgcttgacaagatatcctctcctctccccacctcagtctctgtcattcacgtaggcaacagactgcgttccttaggttggaattgcctgacacgttcctatagaaactcaaagctcatttgctttctttacaacaatgtatagattggattacctcctactccttgcaggttagggggtgtcggggggcgtggggtgaggggaagagaggaaactttcaaaaataatgctttggaaacagtaatctctcttgaacttgaaacccacagacaatggtcacgggattggctggtcctggaaaacttcccataagaagaccattctgtgaaaccagtgaagctgacccagtctcgataagctatct

SEQ ID NO: 55193 - DNA, 1007 bp, Bovine  19866880953169
  misc_feature (1)..(1): n is a, c, g, or t
natacttacaccatcagtcaattcaccgtatctattttggaatattccaagcctacaactaaaggacatggcttcctgctaagattaacttttcccaccttggtttgtgaaattggatatacacaatgcttcttcttaaaggtcaccctcatacagcaacactgtctgagtactctctccataccacagacttgagctgtacatggaaaagtacttgaaaataataatttattatgctttttcactttaagaaaatctatcttctgaaggtataagtagaacctgtgcctaaaaagcactgctgctgctgctactgctaagtcacttcagtcgtgtctgattttgtgcaaccccatagatggaagcccatgaggctcccccgtccctgggattctccaggcaagaacactggagtgggttgccatttccttctccaattaaatttgtttttaatttaatctcaaaatgacagaaatgcttttgaatttgggattacagtatgacaactccttcctcatatggttataaagacttgacttgaaatgagacacttagacctattgaagcttctcaatttagtctatgaaagggatcaaaagttgtgcatataaggctgagacaggacgctgagtgtctcttaaaggagagaaaaaagaggctagatgtcaattattctagaattcaatggtttcagtttcaaacagaataccaattgaacattttaaaaaatcaacaattatcatttgattccaacacaggattaggtaggatggtcctgaatttgaaggtaaagagacatggatatatatttaaggaaacaacactaaactggccatgttttattcttgtacttctttactgtcaagaagaaactcactctattttgtgactcagactttcttcagccaaactaggcttagagattcaacagggacatttcaaccagaaaattcgatgacagttattctttgtgtctgtaactaggttgaaaaaagtgtgaacagatg

SEQ ID NO: 55194 - DNA, 763 bp, Bovine  19866881022660
  misc_feature (1)..(1): n is a, c, g, or t
nttcttcctgtgttggctttgtcttgcaggtgtctcatcttatggtagtttttggagcttcaagtttctgaactgcataccacaccacccttaagaaaagaaaacaatcaatgtatgagaagtttaagctctacggggctagaacaaacttaggtcacatgtccacctttgatcaatcactatggctataagaaaatcatatgctaattggcttaggttgggctgcctccatgcctaaaagacacattgaaaacaggcttatactgactggtttaaatgatcatgaatcaccccgtgaaccatggtcaaggccattcacatccaaaacccttagctcccgtgcaaatggcagaaggaacagatactgatattacccaccttgactagtaagtggtagggaaagcattttgaacccctttttactccaagtccaaccccatgttcttccctgaatgcctaccctgtctttaggcaggaagtaagacttgaactaactgggccttcagggttggacctagggaggtgatctgcttttgaggtctgggaatgaaaagcatgattgtgtgtgaactcagaattaacagtatgggctgtgcctccctccattggtagggttattagaagactagcagtcgtttgttctactatcctgacaatttagggaattttcataagcagcgatttttgtaaagggaggggttaaaatgacttcttagacattgaggatccatctataataatgcatgttggcaaaagggagaca

SEQ ID NO: 55195 - DNA, 2238 bp, Bovine  19866881034123
  misc_feature (1)..(1): n is a, c, g, or t
naattccttgaagtcttctacatctttccgaattagatgtttgatatgagacacactcgaaaaggtcagaaggatggaacttaaccaagagaagctggtcatctattcaaaagtctcctcaactcattctgagttgagcccatctaacaagttttcacttgttcctttgaccctgggaatctacatgtaataattttgacttgaaaggtagaagttacattttcaacaataggagaaatttcttaaagcagcaaaaataaaattggtctttgccttggcctgccaccactacttcattgctatgacatatgacatcatagttagtcctcagagtccagggtgtttctaatgagctggagttggaagggtcccagtggaatgcagtgaaccaaaagaaccactgttctttcaaattccaacacaatattagaagggaaaacaaagagctcttcaagagccagaggtcaatctgttaagtaagttgtgcattaaaaagtggcagtaatgaataggaatggccagtgtcagagcatggcaacaggtaattgttacctatctatgctatattatcactgctactttaccaataatggtaatggatatgctactttcaacatattctgatacattcatatgtcatcacctgacttgagatccttatcacaagattgcctcaaacaaaatattattacagttttcagtgtgtatatgttattaaaaatatatttaaactttttatttattttaaactatatatagaaaaaatatatatataaatatatatatcaaaaatagatggggaaatggtggaaacagtgacagattttattttcttaggctccaaaatcactgcagatggtgactgcagccatgaaattaaaagacacttgctccttggaagaaaagctatgacaaacctagataacctattataaagcagatttattactttctgacaagggtccgtatagtcaaagctatggtttttttcagtagtcatataaggggtgagagtcagacatagagaaggctgagtgacgaagaattgaggattttgaactatggtgttgggtgagactcttgagaatcccttgaacagcaaggagatcaaaccagtcaatcctaaagggaatcaatcctgaatattcattggaaggactgatgctgaagctgaagctccaatactttgggcacctgatgcatagagctgattcattagaaaagaccctgatactgggaaagattgaaggtaggagaagaagggggcaatcgaggatgagatggttggatggcataatcgactcaatggacaagagattgagcaagctctgggaaatggtgaaggacagggatgcctggaatgctgctgtccatgaggtctcaaacaattggacatgactgagtgactgaagaacaacaaaatagaaaataaataaaaaggagttaaatattacccagaatatgagttaggctcctttttgctcctgggcacacaggacccactgaggggcatccacctttcatagcatccatgtaagccataaactacttattccctctggaaatgtatataattatttagccaattacatcaagacagcccagtggctacccccaacttcagcatacccaagggcacaggaattaacaggatctccttccataagcttacttggtatctcagatggtaaagaatctgcctgcaatgcaggagacctgggtttgatcactgggttgcaaagatcccctggagaaggaaatggcaacccactccagtattcttttctggagaatcccatggagagaggaacctggcggtctatatccattgcatcacaaagagtcagacaccactgagcaactcatactttcactttcttttccttctataagctaaaatcatagaaatggacatgggtatcttattcctaatcccaccacacagacccctaatcttcagtcaggggaagctggacaagcttattgtcttcaacatctccaaacaaaaatgactaataacatgcaatttccagatacacccacaaatctcaggacaaacctgttcaacacacacccttccaggagaagtctgggacaaggggcaccagggctggatgttacttacctctaggcttcacaaaaatgctccagaaatgtgtctgcccatgatgagaccacaattagagcgaaagagtttggtacaactatattaaaaaagacagaacaaattagaaacaa

SEQ ID NO: 55196 - DNA, 4180 bp, Bovine  19866881037665
  misc_feature (1)..(1): n is a, c, g, or t
nctttatgtagctctaaagttcctaacctaattttataactcttctctcctgctcagtgttacaggttttctgctaccaaagaaacactggtctcccatctcttctgaatcacaaaagatgccctcccttcctgacaaaaataattttttattcttagttgaatatgtgttttttcaagattttgattttgatatcctaagctgtcaaaggaatgaatgctaattccaggcactgtacacatactctctcttcccctaaatgtaattgtttgtaaaccattaagccttatgttaaagctcacaggttcagattaagaacacttagatggagctttccaggtggttcagtgggtaaagaacctgcctgctaatacaggagatatgggttcgatttctgggtcaggaagatcccctggagaagggcacagcaacctactccagtattgttgccaggagaatcccatggaaagagggattcccctggtgagctacagaccatggggtcacaaacagtcagatacgactgagcacaacacaaattatttttagactatctatatcatttaggcattagtgctttacaaactaccccaaatttagtgacttgaaacaatactcacttacgtggctcacagttctgctggtcagcaatttaggctaagttcagctggttggttctcttgttttcatctgggctctcgaatgtgtccacatcagctgttggtgtgatgaaggctgctgacctaggatggcttcagctgggatcagctctgtcccaggtggtccttcattgtccaggagcctacactgaactttttctcataatggcagtgggggtctattgagcagcactccacaggcctgcaagccttgtaggtgcccagtctcaagacccaagaaagagcccagagacagtgacagagacatccacggtttactgaacaaagggtctgagagcagcctcttgctgtgtgtggcagactgtgagcaggacaaggcagaagtcttagctccttgggggtaggatgctactctgtatagaggaattgacatcaggtgggctcttcatttatcaggggactaagccctataattaagaggactagagagtcatgtgagtacagcagggactgctcaagcagggagtatacagagagcaagagaacagccaccttgaagggcctgaccatacagcattcaagagagacacatatgcatacaaggcatttggaggtttaatcagaagacaggcaccatgtcacttctgccgcattctgttgatccattcaaggcacatgtctgtacaggttcaaggatcaggaaataaagcaacctcttggtgttcagagcagcagagacacattgcataggtgtatgaccatttttcggagaaggcaatggcaccccactccagtactcttgcctggaaaatcccatgggtggaggagcctggtaggctgcagtccatggggtcgcaaagagtcggacacgactgagtgacttgactttcacttttcactttcatgcattggaaaagaaaatggcaacccactccagtgttcttgcctggagaatcccagggacgggggagcctggttggctgctgtctatggggtcacacacagtcggacacgactgaagcaacttagcagcagcagcagcatgaccatttttgcagttaacttatcacaacctctgtccctttctgtattgtaattcctcaaagactcggtcacatttctcgtactctcagtgtttattggtgtacatcccacacaggacacttcccatacaacctcaccccaagtccccacagggcaaggtgctggtgattgtcttagtccattcaggctgctataacagaataccatagactaagtgtctaataaacaacctaaatttattgcttatacttctggatactggaaagtccaagatcaaggtgggagcagattcagtgtctggtgagagcttggtttatggaggctatcatctctctctgatctcatatggtagaaggggaggaggaactcttgggatctgtttcataagggcactaactctattcatgtgggttctgcactcctgacttaatcaactaccaaatgccccacagccccatcatctcagggactgagatttcaatttcaattttgagaggacacaaacattcagtctatagtagttactttgaccatcgtatccttttatgacaaatctggtcagccagaagatctactggctcatgtaggaatagaaccacagccactgcaaacagtaggttaattggttacaaagtaatatttatatcagtcattacacaaccctggctgcacaagagaatcaaatgtggtattttaaaaataatggatgcccatcagggacaattcaataagaatatctgaggttgaagaatgtacagatgtcagagctccacaggttactctactacacagctgtggttgagaatgactgattgaactatcaacccccctatccatctaacagaactgtggttctcaatattgagggcacatcagaatcacctagagagctgtgaaatagactgctgggctccacaatccaagtttctgagttatcagatctgtccggaatggggcccaggtgatgctgaaaaagaactgttccagggaccacaccttgagaaccactgttataaaggaatgtggtctattggcctattaaaagtacaacatctcagagacatatttgtccccaatactgccaagaaggcagaagagtctattttatagacctgtagtaattccaggagaggaaaggatggtttcccctacaactatcaatgagtgggttccacattcagtgattctgattaaactgggacctgagcgttgcagagattagaatttgtcccaagtgattccaatgtgctaccaggatgaaaagctaccagcctcctcatttcctataccttgtcccgggatcagcatcatcaacctcacctgaaaacatgctaaaaatgcaaactttcgggctctaccccagacctactgaatcagaaacctggggggtggggcccaggaatctgttataacaagcccttcaggtgattctggtaaatgctaatgtttgagagcccgtgtattagtgtatagtaacaaagaaaggaaatggttagtgccaagtgagtgacatgcggcttctaagccccatccgtataggagttcactggatttgggccactagggagaggtaagatccgagtgagcaggaagaagatgggcctccaattccccttgccaaaagaagtatgtgaccatgtgtgcttgggggtggagggtcggaatccccaggcggtcccgggacaatacgccgaccacactgcaggtgcaggcagtttagatggtgaagtagcgcagtgagtgcttcccagcctttttggcaccagggatcagtgttgtggaaggcaatttttcaatgagccgggagcagggggactggtttggggatgattcaagcatattactttaattgtgcactttatttctattattattatacagctctacatcagatctccaggcatttagatcccagaggtcagggacccctgaagaagtagagggaaataatcccacattggatcacagcccgtttcataatttcaagaagagatggaaagctgcatgatacggttgttccaatatccaagccaaagcaacaaatgaccttcagaatcccaggtaccttcaggaagttggaaacaatatcagtggcagagaggtgaattctcctgctatggaagaaaggaggaaggaatggctcattgtgaaaacatgatcctgccccctttcagagaaaatagataatgccaggggccctgtttcctttcctcattcaacaagcttcacagagtgcttcccatatgccagggatcatgttagtcattgggaatacatctggaaacaaaacgcaatccctgtctaggcagagaggaagagtcaaaggaacccacaaaatgcatattacttcaaggtgtttcttcattcccaggaaaccacactttgctagcagggtctttaaaaaggcactctgttcagatttaggtacctaaaccctacccctcatccatcttcccctctgagatgcccccaaggagctaaacacaaggaacaaggtataaaacaggaaaaaagag

SEQ ID NO: 55197 - DNA, 2462 bp, Bovine  19866880264344
  misc_feature (1)..(1): n is a, c, g, or t
nccatgtccattgagttggtgatgctatccaaccatctcatcctctgtcatcctcttctcctgccttcaatctttcccagcatcagggtctttacaaatgagtcagctcttcacatcaggtggtcaaagtttagcagtttcagttttgacatcagtctttccaatgaggatccaggactgatttcctttaggatggactggttggatctcacagaagagaaaccttacatattcagtgaatatggaaaaggcttcagtgagacgtcttattgcacgccattgaactcatacacgagaaaccctttatatgcagtgaatgtgggaaaggttcaccttgaagaacagtctgagcacacatcagcaaactcacagagaagagaaactatatatgtgcagtcaatgtgggaaaggcttttcaacgaagcactgcctcatcatacatcagcaaactcatacaggagagaaaccctatgtgtgtagtgtctgtggaaaaggcttcactatgaagggtgatcttgtacatcagtgcactcatactactgagaaaccatttacatgcagtgattgtgggaaaggctttactgtgaagagccaactgattgtacatgagtgaactcatacaggggagaaatcctacgtatgcagtgaatgcagaaatgcttctccagccaaggcccacctcatcagacatcaatgaactcacactggagaggaaccctatatatgcagtgattgtggaaaaggctttgttcagaaaggcagtctcattgtgcacgaacgaactcactgtagagaaacccaatatatgcagtaaatgtgtggcaaaggcttattctcaaaaaggaagcttaatgcacacctgcgaactcacactggagagaaaccatatatatgtaatgaacatggcaagggcttagatttccctggtggctcaggaagtaaagcgtctgcctacaacgcaggagacccgggttcaattcctgggttgggaagatctcctggagaaggaaatggcaacccactccaatattcttgcctggacaatcccatggacggaggagcctggtaggctacagtccatggggtcacaaagagtcggacacgactgagcgacttcactttctgtaaggagtactctagataagtatcagcagatttgcactggacagaaactatacaaatgcagcgagtgtggtaaagcattttggaagaagacatgccggatagaacatcagagattttactcaggaaatgcttctttgcacgtactgaatgtggaaaattctctttacacaaaaatgatctcatcacctgttagagaattcacatgggaaagaggccatatgaatgctgtgaatatgggaaagtctttaccacaaagtcaggactcaaggtttatcaatgaaacataccagagaggggccctgtggatgcagcaaatgtgggaaggctttttgcccacttgttaatccatgttaaacataaaatgaaataacaggtagtctcctttgggggaagtgtgtaacaagttgcagaccctcaagaaatagtatgcagagaagaattgcaatgcaaagaatgtggtattatctttagtgattacagcatattttatattgatggaaaaatgtacaaaacaactcaggtaaaaccagccttcttcagcgttactggttggggcatagacttggattaccatgatagtgaatggcttgccttggaaacgaacagagatcattctgtcttttttgagattgcatccaaatactgcatttcagactcttttgttgaccatgatggccactccatttcttctaagggattcctgctcacagtagtagatataatggtcatctgagttaaattcacccattccagtccatcttagttcgttgattcctagaatgttgacgttcactcttgccatctcctgtttgaccacttccaatttgccttgattcatggacctaacattccaggttcctatgcaatattgctctttacagcatcagaccttgcttctatcaccagtcgcatccacattgtggatattgggtattgtttttgctttggctccatccctgcattctttctggagtagcatacctactcatcaccagtagcatattgggcacctactgacctggggagtgcatctttcagtgtcctatctttttgccttttcttactgttcatggggttctcaaagcaagaatactgaagtggtttgccattcccttctccagtggaccacattctgtcagacctctccaccatgacccgtccgtcttgggtggcccaaaacagcatggcttagtttcattgagttagacaaggctgtggtccgtgtgatcagattagctagttttctgtgattgtggtttcggtctgtctgccctctgatgccctctttcagtgcctaccgtcttacttgggtttctcttatcttggatgtgggatat

SEQ ID NO: 55198 - DNA, 788 bp, Bovine  19866880403644
  misc_feature (1)..(1): n is a, c, g, or t
ncccaaccctccgctgcgtcctcccccgtcccatcatgcactccttcccaaccccaccacaggctcctgcgaagttaatgtggtcccttcagccaatggcaaatgggtggtaggtgggacttcgtttgtttggacaaatgaaatgaaacgcaggctcaggacagcgtagcatggccaatcactgtggaggagtccctattaaggggctcaggccggctgcagtctgagaggaacaaagatggcggcggctgacggcgataactcgctcgaccccatgtcgatcctcatagacgagctccagaatgaggacattcagcttcgcatcaacagcatcaataagctgtccaccatcgcgttggcccttggagtcgaaaagacccgcagtgagcttctgcccctcattatagacattatgtacgacgaggacgaggtcctcttggccctagcggagcagctgggcaccttcacccctctggtcggaggtcctgagtatgttcaccacctgcttccacccctagagttgctggctgtggaggaggaggccatagtgcgggagaaggcggtgcagtccctgagggccatctcgcatgagcactcaccctcccatctcgaggaccactttgtgccacttgtgaagcggctggtgggcggcgacttggtcaactcccgcatctcagcctgcagccttttctccgtctgctaccctggcgtgtccattgccatcaaggcagaacttctacagtgcttccgggatctgtgctcagatgacaacctcttggtgcggtgtg

SEQ ID NO: 55199 - DNA, 3649 bp, Bovine  19866880737510
  misc_feature (1)..(1): n is a, c, g, or t
ntaaggatcacaaactggtttggtagcttgatagcctgtttatgggaaatgacaaagacttggatgcttacaattggacttggtgggggatgtctaggaagagcacaaaaggaacagacacactatcaccttggcagattaaagagctaatgaagatgaacgcacattaagttctgatgggaacagaaggactgaaaattgattgtctataaactcaactccagtatcttgaggctctttggacgttagagcaactaaaaaaggaaaggctattggctgtgttctgaatgacacagggcaattatcgttaactagtgtcataggttactagaattctccagtaacacatcctgatgttggctcttctaagcagaacctagtggctaccactcttcccaggtaaagaaatagaagtgaagttgctcagtcatgtccagctctttacgaccccgtggactgtagcctaccaggctcctctgtccatggaattttccaggcaagagtactggagtgggttgccatttccttctccaggggatattcccgacccaaggatcaaacctaggtctccctcattgtaggcagacgctttaccatctaagccaaaagggaagtccccctcccaggtaagtccatagaaatattctcaaacgacactagtccttattaattatcacagattcttcttccaatgtatggtgatcattctgagtgtgtgtgtatgtgtgctcaattgtatctgactctttgtgatcccatggactatagcctgccaggctcctctgtgcatggaatttttccaggcaagaatactggagtgggttgccatttcctcctccaggggatcttcccaacctaggaattaaacccatgtctctcgggcctcctgtgttggcaggtgaattctcccccactgtaccacctgggaagccggtaatgatcattaccaataagcaaaagacctacaggtacgtgttctggctgttttcaccataagttaccacggctcgctctttctgggtaacagttttcattagttactatgaaaagaagtaaaatgcccttataccgattttgcaattgaacacttaattatcaactagtctagtaaatcacaagttcctgaaaagcatattcactatatcttacaagtaaaatatccctaaaacagggatataagatgtctctataaaccatttcagacaactatttaaaaggtgaagaagaactaagtgctaacatataaacacagcaaaaatctgccctcaaggagcttttggacacttttcaacagatagaacaaataacagaatcagatatgaaatgactactttttcaagaattatcagcacaagattattaatatgaatgtttaatataaaggtttactgtattgagaaataggaaatctaaaatatgtagaagggatattattaaaatgaccatttagatgtacataaaccagcagaaaaatttaaaaataaagttcagttagttctcattattcatggatttactgtgaattcacctgactgttaaaatttctttttaaccccaaatcaataatcatagcactttcacgaacattctgcagacatctgcatagaataatttgagcaacaaataatttgagttgcccaatgtgtatgatcccggctgagtctgaacaaaatgatgttgtcttatttcagttctcctattgcaaacaagcacccttttcatggtctacttagtgtcatgtttttcatatttttatactttttcttggtaattctgctgattaaaatggtcccaagcacagtgttcaagtaccgtctaatgtcttcaagtgcaagaaggcagtgatgtaccttatggagcaagtgtatgtgttagataagctttgttcaagcaagaggtataatacagggcttcccctgtgggtcagtagtggagaatctgcctgccagtgcgagggacacgggttcaatccctgatctgggaggatcccacatgtcacagaacaactaagcctgtgtgctacaactactgagcctgagctctagagctcgtggcctgcaactactgatcccatgtgccctagagcccatgctctgcaaaaagaagtcactgcaatgagaagcctgggtacaactagagaaagcccacacgcagcaacaaagacccagctcagccaaaaataaacaaaaattttaaaaagagatactgcgcaattggccatgtgtgtgtcagttgttcagttgtgtccgactccttgcgaccccatgggctagagaccactaggctcctctgcccatgagattcaccaggcacgaatactagagagggtgccattcccttttccaagggatcttcccgacacaggactgaaccaggtctcccacactgcaggtccatctttaccctgtgagccaccagggagcaatgtgtccctttcttcacgtggacagaatcccacagaagattataatttccataatccacttggcacagcctgcttggccatatataacatttataagaactattttaacatcattttctactaattctatcacccatgtcatttctgggtctctcattacttttttcctctttttagatttattgttttccacattgttattgtttttaagaaatattttttcattttttatttttctgggtctctttcccacagactttccttcacatttatgggtcctattttcctgtttcttggcatacatgcgtaggttctgattggatgtctgacttcatgaaattaacattactggttgatccatgcctgctgagtcatgtcctactctttgcgaccctgtggactatagcccgccaggatcctctgcctgtggaattttatatgtggatatattaatctattcaatttcagaatagatacaaacgtatgtttggtagtatttccagcagcaaaaatctcatgttccattaggagagagttcttttccatagctgacaatttgattcttatgtttcaagagcattccacggtgttcacatctaagaattagtacaagattctctgattaaagaaaaaaaatgttaatgtacttagatcataattactttagataactgcttcactgggaacatgctgttccaaatttatttaaggggtaggcaggaatttactgaagtgcaaactctctgaaatctaatgcttttgtggtaggcaatatcatgacaaatcccaaagatgttcatgtcccaattcccagaatctggaaatctgttacattatacggtgaaggggaattaaggcagaagatggcattaagtcattttagggccaaataaattgtttctagagttttaaggttcacagagaaaaatggtgccccagggaagattacacccagaggcttaccaatactagctttagaaggtgagatttggcactcccgagtggatccgttttaggtgagattttggactctgagttggtcctgtgacaggctgagacactcggagatggtgggatagggtgactccattttacatgtgggatggccacgaatcattgggtgccaaagggtggccttcggtagggagcataatggcctcccaaagatgtctacatccttatgtccaggacttgtgaatatgctatattataaggcaaagggga

SEQ ID NO: 55200 - DNA, 1640 bp, Bovine  19866880995773
  misc_feature (1)..(1): n is a, c, g, or t
ntttcagttatttctacatttacatgtgtgtccatgagttcatgaatctagaagtccacggttttcataaaaaaatcatgattttataactgtgtactgtattatagttaaaagtataaatatattccatgaccttgcattttttctacactctcttgttcatggttcaaatagtagtaagattactaacatgttatgtgtatgtgtttgtgtgcccatatctgtaatgatcgtttattgccttctgtgttgttcactttgaacttatttcaagtagtctcagggaaccctctgtcagtgtgcttctaatgctattcttttttttttagccttaatgctcttctgttacttcagtttttgcttctttatcttcagtttaagactgcattctctttaattgaggttcttggtatatcatttcttagcttcttaaactaagttgagtttctccaaatgtctctgatacttgtctctgtagaacagcatgtgtctttctctactgagctatgatgttgattaaaaaattccatagccgtaaagcatttagaatattgcatagcatctttaaaggatttgaacacttttagtcattgctgttgttcttatgataataatttaagattttgacctttttttatggcactgttgactttgtcatttctgatgccaccacccatagtgtagctcatctagatattgaatagcagtcagtgtgtaaaacatagtctaacacttctggaggaacatcacattgttgaatcttacttacatgtatttcatgtattgtccacaaaaatgaaaaatccatgttgattacaggttatcataatctttgtataaaagcaaaaggaattaaaattaagagacccataatttcctccaaatagctttacttggatctgtcggaaaacatacttcaacttgatcctttcccttctcttctccttttgtgtgaaaataagaactctcctcatggccccttggtgaaatgtgttttcatttcaggcacagttgaccttcaaggatgtggccatagagttcactcaggaggagtgggaatgcctggaccctgctcagagggccttgtacagggacgtgatggtggagaccctcaggaacctagtctccttgggtgaggatcacttccctttgaagttgggatctgccctggggtatctctgcatttcccactgcgtgcctcttgggagccccggttttacttgactgatctgaaatccctgttgattcagacatgaagagcttcaggacgcagcctcaggagtttaaatctaccttttcctctgacgatctgcccacttcatgatacatcaggaattgttccagagcttttgtagtgataaagttcaatggaaaacttttaagacacgccttttcctgtttcctacctatgtgcttttgatttagaagtcttaggaaaagaggtatgtttctgtgcattatactgttcccttcgtattcagaaggagataacagcctgtaaattttggaaatatttttctgttcctctctgtattcccatcagtcctcagttgagcaagggactaggattctggcaaagccacagcaagtcatgtgtctttcctcttatgtggaggtatttgtttcttatctgaatattt

SEQ ID NO: 55201 - DNA, 3414 bp, Bovine  19866881042601
  misc_feature (1)..(1): n is a, c, g, or t
ntgagtcttatccttctttccaataaatcctcatttcttctatgtctcattacttcctttgcttcttcaaaccattgtcatgtttgaactgcctactttattccttatcttgctttttctgtttcctttccaccgcagaatatggcttcaatttaagtaaagaatttttttgtgtttctccaataccagcaccatgtctggtttgtggattagccatttaataaggatgtgttgaatgaatgtctttcaccattttgaaactgggtgtccctccagtctctgtgaggtgatgctaacagtgacggtatttaactgtccccagggccttatttataaagcaaacaaatctatatttattcattgtgaatttactgtattttacactgatggctgacatcttttgggttgtttggtgttttatattatcgtgtttttaaccatttccaagagattggagttagtgcttaatggatgcagagtttttcagttggagaagatggaaaaaaaaccccaaaaaactagcaatataaggtgctggtggttgtacaacattgtgattatacttaatatcacagaactgtacatttaaaaatggttaagggacttccctggtggtcgagtagtaggactctgctcccactgcaggggagcatgggttcaatccctcgtcagggaactaagatcttgcatggcccagccctgccaaaaccattaaaacagtaaaatttattttatatatatttaactataattttgaaaagttttttaaagataaggtaattttatgcttggaatttctttgatatcttgggtttttcattaaagagccagcttaccccaaggtatttttgaaatagttttattccatctgatgctcataaagtgttcattgttatctttcctagacattaaggaagtggatgatcatgtgcagttgcactggcaaaaccaaaatatgccgaagtgtcatgaacagaatgcatttgggaatattattcatcagagcagaagttgttttcctttaaggccaaattatgatgtatttgatttacacaggaaaactctgaaatcatatctagatgtaactaaccagaaaaaaagctgcaacaaaaaggagcctgctgagtttaattgggatgggagattcttgctccatgctcatcatgaacaaactcatactgaaattgaacatcaggaaatacacaaaacagagaacacccatgaatgtactgaatatgggaaagccttcctcaagaagtctctcagctcaatgaacataaaataattctcacacaggaaagaaaccccatggatgtagtccgtgtgggaagaccttcttcaagaagttcaagctcactgaacatcagcgaacttacaaaggagagaaaccccatgagtgttttgagtgtggaagagccttcctcagggaattttagcttactgaacatcagaagatgcatacgggaaataaaccccatgtatgcagtatatgtggaaaagcattctacagaaagttcaagctaactgagcaccagagaactcatacaggagagaaagcctacaaatgtactgaatgtggaaaagccttctttaggaaggcagagctcactatacaccaacaaaacaaaacaggagaaaaaccccatgtatgcagtgagtgtggaaaagctttctccagaaaatcacagctctttctggatcagaaaattcagacaggagggaaatcttatatatgcagggagtgtgggaaaggtttcacacagaagggcaatctcctcatacatcaactaactcacactggagagaaaccctatggatgcactgaatgtggtaaggccttcagtcagaaggcatgcctcatagcacatcagcgattccatacgggaaagacttcctttgtatgtactgaccatggaaaatcttgtttgcagaaatcaggactcattaaacctcagagaattcatacaagagagaaaccttatgtgtgcagcgaccgtaggaaagccttcaccacaaagacaatgctcactgtccatcaaagaactcacacgggagagaggctctatggatgcaacgagtgtgggagaactttctcccacatgtctggttaaacacaagaggacacacacgagagagaaacaagtagattctgtgaaggtggaatactctttcacaaagggtcacagcttcttagatactagtgaactcttgcaggggaaaaaccctgttaatatagtgactgcgcagatgccttctgtgacccctcagacatcattactcatcagtggactcctagcaggtaggaatgtagtcctgatggaacagccagctgccagatgtgcaccctcaggagataacagagagtttgtacaggagagaaaggtttatgaatgctatgaatgtggttatgccttcagtggtcaattacatcttattttatgtcatgaaaaatacataggaaaaaaactggtacattctatatggaaaagccttgggccataatgtatagctgcttgcatggttatatgtaaacaggaagcctgtgaatgcagaagttagaaaagctgtgttttggaagaaagaccctgtcatcagtgattaccattggtcataggtgagcttatagtgggtaaaaaatatgagagtggtaaaacccttgcccccaataggtattacatatgcgagagaaactgttggaaggcagtgaatgtggcaaggttttcagtggtacattctgcctcatccgtcagctggtgaaatcatacacaaagcactgtgaacatactacttgacaagtatcttaattagttcttgtgatgcaaagcctgtgaaaatgaggggtatttgagagctttatgtaccatttcccactttaatgcattacataatatacctgatacatatttttggacaggaaacctggaaccatattcttaggtactatgcttaaaagtgaaaatgttagttactcagtcatgtctgactctttgtgaccccatggactgtacctgccaagctcctctgtccatggagttctcaagacaagaatactggagtaggttgccattccatttgccaggggtttgacccagggatcgaactagggtctcctgtattgctggcagattctttcctgtctgagcaaccagggaagcctggttactatgcttatgtttccataattttaaggagataatctacctcacatcactggttatattcatttcttatacattcatttctcccaactgaaaaaaaattatcttcaacgcccacccagtatatgataactagctgctacatttctttgactctaaatttatttaaatattatttcagaaaattgaattttctaataagaaaaataaatattaaggtcataaatgcaacttaatgtcctgaagagcttaactt

SEQ ID NO: 55202 - DNA, 976 bp, Bovine  19866881566422
  misc_feature (1)..(1): n is a, c, g, or t
nactgagtgactgaactgaactgaaactcctacaaagtaaaagttctctgataccgggagagaaatgcagggaggaactgttcacccatcctccaaccccctcacagctgtggctcttctctgacaaggtcatttccacagcctgtccccctgctggtctctcactcacctgaacgggtttgacagtgggtttcatcatccatcatccatggttctccttgatccaatttggagactacctctggtgtgcttgcttgaaaacctgttcatgggaaatgacagaatatttaggcccagtgagtttgccttggggtctgtgaagacagcagaatgctacatgtgaggccaaaacaatttcacaacctacagagtcaaggcttttctcacaggagaagagagaatacacccacttctcttgggccagagaggacaccgagcatcacagatgctccagagttctcagaagctgagaaaggaaaggccactgactggggacctggtcagtgacccaagggagccatcctcaccggcagacaccaggttgctatagttctccagcatcacatccctgtacagggccttctgagcaggggccaggagctgccactcctcccacgtgaagtccacggccacatcgtcaaatgtgagggtttcctgtaagaagagaggtgtgtgatgatgatgtcatcttgatgatatggaagaaatgttaagggtgttctgctcatttccactttacaggctgcactgaaatatccagtagggtttttattttaatgtatcattaaagaagcaaatgctgaatacaatattctctaatatatgtgtatgtatatacacacacatatatatatgacatgaaaagatacacaaatttatactttatggaataatgaaagtgattttttacaggcctctaaaaatccattagggaacaaaggaaagaataaaacaaatcaaaagtcacctgggcctg

SEQ ID NO: 55203 - DNA, 1096 bp, Bovine  19866880545284
  misc_feature (1)..(1): n is a, c, g, or t
ntcccaaatgacgggacgtgaactccgcctactcatctggcattcgagaaggcctgacgtcctgccaggacaagcattaaattgcattgttacaaaggagaagggccctcgctctttaattctccccaatgctgaggccaaaggaagaaaatatcagcttgggtgctggtgtctttaaatcctaacacttgccaacctccttaaaaaaaaaacaaaaaaaaacaggtagtctttagattgagagccttgatagcagcatctagctagagttttactttttatgatgggtttgattttatttttcaaatgacttggaatttcaagtcaaatgacatgattttccattgatgatgataaagactcatttaaatgtatttaagtttataaaaagcaaacaacataaaagagaatataaagtcaaaaacagtccagtgatagacaagccaaacaaaacaggaaggctggttaagatggtaaattttaggttatgtgttttgtactacaaattttaaaaaagagcccttaaaaggatgacaacagtcatataataaacctttctgagtcagttactcgccaagcatttaatgcatgcattttctcatttaatcctcaccaaaagtctataaagtaggtgctactatttcccccattaacagattagaaaatgaaggtttagcgagagtttatatataacttgcccagtggcatcctgttcattgggtaaaaggactttgtaaactgtccagttgccagtggcgtcttggcagtaagcaaacgtaccacctaagctacataaagaaaaagtcttcaccatccccaaaaataaattcattgacattactgagttatttgcatatagccaaatcacccagggcaactttaaagagttgggaaataaggtgctttacagttgtatggcctatttgagattgaagagcagatttcttatatcacctgacttaatcatccactaagtcgaaggcagctcttactatgtgcatttgacagatgaggagactgaggctcagagttcagtgacctcaatgagtagaagagccaaccccacaatccaagtttatccaggttgcccttcagg

SEQ ID NO: 55204 - DNA, 921 bp, Bovine  19866880640555
  misc_feature (1)..(1): n is a, c, g, or t
ntatgtttgcgacaaaaagacccttatccgaatataccagatctagtccttcaagaaaacatgacagcggaagcatagctagaacactgtcctccaggtgggtaattggagcttagagtgggagagacgccgacagctgttaaggttgtggagtcttagctgaggcctcttcctcatcctccattttgcatttcactgcaaagaaaagaaggagaaagtcagggctgatttatcaacacacacctagacagaagtggcacctggacaccgcaaactttgatacacggaagtcagttgctttgaatcccactgagctcctgcaatggttctgagcccacagatccaccggggaagaacacagggccattgtcctcccctggcagcacctgaggtttcaaagaaactgcacaaaatgttcacagctgttctgagttcagttcagaagaaggtcaaaagtatgcttggcaggtcaggggcactaagggaagtttcactaaagatgatgacagattcgaagctctcgattcaaccgaatctatcaccactcaccctgttccccccaccacccaaaattaaaaactcaggacaacactggggtcaatgcacggccagaagagaaccttttcttgtctttcatggaccggacgagaatgtgatccgggtgatttcctgagttggccaaacaggaaagttaggtgaacacacaacggggactgttttgtaagggaaattgtcccgatagataaaaagccctcctccaagatgcacggaaatccaatctcctggcgggtggggatccatttggaaagaccctctctttttaataaatctttgcttctagtgtccaagtgcttgcccccaatgttaaggcctaaagggttattcagagcaaggccacaggctctggtcatgtgtggagag

SEQ ID NO: 55205 - DNA, 1013 bp, Bovine  19866880688047
  misc_feature (1)..(1): n is a, c, g, or t
ngcacgacacggttgatgcaggacacgacgaaaggcagtaaaagcaccgccccagggttactgtggttcgccaggaactgcaggggatggagggagagaatcaagttgctgaccgtacactggacccctctctgcctgactcagaagatcccccaaggtgggaaaaccccagaagtagctcctctgattagctattaaaggaccacttaccaaagcacttgcccttggccaagaattactcacatgatgctttaattcccactatagcccaataggtgggtgttcatagacttaactgatggacaacctgaggctcagagaggcaaagatgcttacccagggttccccagctaggaattggcagatttgaacccaggtctatcagactcagggacctatggcccaacagccattctgtgactttactttcctcaccaagagatttggaaacatgagaatgtgctccaggctgctggaagaaaagcttgagttaccaaagctacaactcaagggaatttctcctccgctctcctgcgtgcccttgttcatttcaccaagctttgcctgtccttgggtgctgaattaggggcaagggagcctctgctagcccatgctgctcttttctatgagggtcagaggggtgcccctgcctttgtggggacaccaccctggcatttgtctggagtgaagcctatgccgcccctcttggagtaagagattctaatggatttatctgatgtctgaaagttccctcatttcccaccctgaagcctgactctgcctctatttacctctggatagctttgaaaacaccacttgcactttcacagtatctttggagccagatcggagagggcaatggcaccccactccagtacttttgcctagaaaatcccatggatggaggagcctggtaggctgcagtccatgggggtcgatagagtcggacatgactgagcgacttcactctcacttttcacttttcacttttcactttcatgcattggaaaaag

SEQ ID NO: 55206 - DNA, 2627 bp, Bovine  19866880727922
  misc_feature (1)..(1): n is a, c, g, or t
nctaagtcgcttcagtcgtgtccgactctgtgcgaccccatagtacggcagcccaccaggctcccccctccctgggattctccaggcaagaacactggagtgggttgccatttccttctccaatgcatcaaagtgaaaagtgaaagtgaattcccttagtcgtgtccaactcttagcgaccccatggactgcagcctaccaggctcctctgtccatgggattttccaggcaagagtactgaagtggggtgccattgccttctccgtagaatgtgtgaggagctgttaaaaaccactgcaggtgggaatgtggtggaggggaggggtggagtgcactgctatgcaatggaaataccatgtgagccccattcaaagagctaaaacaaaaacgtgtaattttaaaatatacttcatttaatctaattcatctaaatatcatttctatatgtaaacatgtaaacttaaaaatcagtgagatatttcatggtctcttatttgcattaagcctctgaaattcaacatttttttttttttactcacagcatatctcagtttggactggccaatctctagtgcacaagagcctcatgggaccaagtggccagcataatggatggtgcaggtccagcacttagagccaggctctcacttgctggtggcaggactgtgccaagttcctggctctttcccactgggtgggcccccctaaaatgagatgcagtgattccaaagagcttttctagccctaaaggtctgtagagttctgtcttgctttctgagaaatgtgcatattaactagttttaacaatacagatgatggaaggaaggaaaagacagaaacagaaagagaagagagaaaaaagagacaatgaaagaaacagcaaaagagaaagagacacagagagagaaagacaaaaaaagaaaacccaaaagacaagacaagacagattaacagacaaaaagaaaagtcaaattacagggtctgtccgatgccatctcttcatcctccagggaagcaggagcaggaggaggtgggatgaaagtgaagacagcctgttgttctaacttgaacagatgagcgcacttcctcccagcagtgctaggaactcagaaggaggagtaagagagaatggatgctgttgctgcgagttccatattagcctcactgtcatctttcatttatgtgacaaaataaatttgtgatctcattgtcccattataacctcctgagagttcaaattgagcagcaataaatttaatgcaaacatcacttgggcatatactgtagatgcaaagcatctgttattattgatttatttgatattgttctttaatataaaattagctctataaagcaatttgcttcttaggaaagatatacaggaaaaatattaaaatgtcaagcaccagagaaatttaagttggtataaaagttcagttgaatctaatcataggaccttttcattcttgcagattcaaattacttgctcaaatccctagctggctgttggaaaaatctgcttttcaaagactgagatgatcagtaagagtgtttctttaactttcaacacacaaaaaatttcaggtctcaataaatcctaacttgatataaaccttctaaccctgacttcagggcagaatgaaacccgctggaacagctatgacgttacctggtaagacactgcggttatccacacacatggaaaagatgcgctcgtacaccagcttccctggggagaaaaggacatatggtgtcagcatcatgcccttcaggtgcaaacactaaattaacatttcttaattagggacagagaaggagacagcgccaggatgagcttcaacttgtgagagtatgctgccacctagtggaccaaatttttaagccatgattcttttgaacttaacactttctgtgaagaggcagaaaagtgatccttcacttatgccaggcaaagtaagtcagacagagaaagacaaatactgtctttcgcttatatgatttcacttatatgtgaaatctaaaaagaaattaaaaaagtaacagagtaatagatacaaagaacaaacgtggttgccagggaggaggggaaggaatgaaacagtgagagagataaatgactcatgggttatgaaatgtagttatggggaatatagtcaataactacgtattatctttatatcatgacaaatactaatgacttattgtggtgatcattttgaaatcactgtgttatgtaacaggaactaacacaggtcagttatacttcaaaaagaaacaagcagagcctgggatctacaggctctatggtggggtcaatggcgacctccaagagggcttacgccaaggggcaccttccaggactgcagcggccagtacccatccccaaggtgagccacctcctccgaggtctccacaggagactctccaacactagcaggcatatctaataggctgaaagtgagagtgttagccacttagttgtccaactctttgtaagcccatggactgcagcctaccaggctcctctgttgatggaattcttcagataagaatactggagtgggttgccatttccttctccaggggatcttcccaacccagggatagaacccaggtctcccgatctt

SEQ ID NO: 55207 - DNA, 928 bp, Bovine  19866880753905
  misc_feature (1)..(1): n is a, c, g, or t
naatttacagcttgtgctttccccagatttatttaccaagcgggcagttgcatgttatcaaacaggcagggagcagaaatgtcaaagagtacaggctttgcagtacattcctactgtgccatttgagcagggaaccacagaacgtgcctctctgtagggtggcatgtggcaggtgagctgggtctttgcctgtgtgatcagaggggacacaccattaattgtcacgtacgcttttgtcgtgtgggacctgcagctttactgggctggactgggctgatgagagtcaggaaaaccaactcgccatatggtaccatccgactggctccttctatggcagtgccagaaagacccccactgaagagtgaattaggttatttctttgtccaagaagcatgtgttgaatacctactatgtgcagggttcttccaggcctcctaggggatgcccagctcggtagtgtggggcatgtagtccagagtctggtgctgctggattccactggggttctgccattcagtggtgcagatccattctccttccctcccgccacctgaccagggctccgtttccctgtctgtaaaaggggtaggggtggttcataacaactaactcctggattgtttcaagcctgaaatgatggttcagatagagcatttagcacagtgcctggcacatagtaggtgctcagtagctgctgccacctttgatcctaataaagcagatgccaacattaagatttgtagcctgttatgggaggggcgacaagtcatgcactcaggtgactgtgacacaagataagtcagataaaagccaccagagatgtgtattcattcattcactgaaaaaataaatcagagcaccccacacgtgccaggtgccgtgctaggagggcagtggtgaacgaaaaagacactgcctctgcccgcat

SEQ ID NO: 55208 - DNA, 1505 bp, Bovine  19866880797457
  misc_feature (1)..(1): n is a, c, g, or t
ntaaaatttgtgtccccaaatagcattttttgccctgtttttctttaggatgaagatataacgcttcagatcacagaaagtgaagataatgaggaagatgacatggttgatgttatctggcgtcagttaatatcaagttgcccatggctttcagaacttgatgaaagtgcaacagaaggagtcattaaagtgtggaggaaagttgtggacagaatcttcagcctgtataaactgtcctgcagcgcatattttactttccttaaactcaatgctgggcaggtaggtagcacagtattcttttatgaaagtttatttgaaatttcttttctagtagatgaaaacagcatttggaattgtttaattgtatcctcttgtctctcatccttagattcctttagatgaagatgaccctcggctccatttaagccacagagtggagcagagcacggatgacatgattgtgatggccacgctgcggttgctcaggttgctcgtgaagcacgctggggagcttcggcagtatctggaacatggcttggaaacaacacctactgcgccttggagaggtggtggtctaaataaaatgtttcagggaaaagtacttctgggtagaatgtagtaagacagttgaaacataatagttccttggatttccctggcaggccagtggttgaaactatactttcactgcagggggtgtgggttcgattcctggttggggaactgagatcctacgtgcttaacggtgtggccaaaaaaaaagttcctatatgtttactgtttgaatgtgttatgaaatagctaaattagttcagacgacactgtggactgcttgttataccactttccctcccacctttcagagaaatggaaggctgagaggcaaaaagcttttaatatagaaaaggaattttggagagagtgataagaatgtttcaaaaaatttcatatccctttgaaaaaattgtctatatctgccttcttttacaggcattcacagacaatatatttctgtgtaacgtttgaatcaagattttgattacagctgtgtacccttactaaacctgcaaatcaagagctattatgtatatagttctttgttatcccagggagaaatttgaggctcctagaactaatggctgacatatatcaagttttatccttttgcctccaccatgttaactgtttttctttaataactttaaagtatttttcttcttatcctaaaggaattattccgcagcttttctcacgcttaaaccaccctgaagtgtatgtgcgccagagtatttgtaacctcctctgccgcgtggctcaggattccccgcatctcatactgtatcctgcaatagtgggcaccatatcgcttagtagtgagtcacaggcttcaggtaaggaaggttaaaatactgctactttaaattagtttgcaaacactgtttattaggtaaaattttttgagctttatgttccagagttataagagtttgtactttttttttccc

SEQ ID NO: 55209 - DNA, 1582 bp, Bovine  19866880802997
  misc_feature (1)..(1): n is a, c, g, or t
nttttccccacacctaaactgacccaatttctacgttctttcaaggaaacagccctgaattttggtttttctttcctgtgagtcccctgttaccaccactctccccgctccctggtttcaccctactctgtgcccatttactgacctcagtaaagaccaacttaccagtgaaatggagttcagacactgagcacagcagttgagctccaggatacgacgggacttcttacttttctctttgtcaaccattttcctgtggcaaagggcagaagaaagtgagacaccaatgtggtaatgcattcatccccttgacatttcttgagtgcctgccacgtgccaggcacagtcccaggtggtgagacacagatgtccccagctcatgaagctggcaccttagtggggagagaaagaaaataaataagaaatgtaatcataacataggtaaacaatataagataatagaaggtgagtggtactatgggaaagagaagggggaaacagagcagagtaaggaggcgggaaatgctgggatgaagaccctgttatgatttgaatagctccttatttgcacaaagtctggaaggagaagagggggttagtctgtggataagggactatccaagcacaggaaacagccaactcgaagccccaaggaggctgagatgggcagaaatgagcaggggaagggtggagagtgtgagtgataaccgtgagtaggtggctggggtcttataagtcagtggttctcaaccaggaagattttttggcctcaacagatatttgggtatgtctgcagacttttttggttgtcagattgggggttgggagtggcactgacatctagagaccagggatgctgctgtataccctagagtgaacaggacagccccccaaacatagaataatcccaactcaaatgtcagattgaaaatcctgctgtgaagtcttttggatcaccacaaggccctcactgtgtgacagacagagccaagcagagtttgaaatgtaagggtattttcaaaaagatccagctgcagttgttctctttacttttccatgaactcattacatcttctttgctctgggctcttttctttggcccagccaaaggcccacccccacaacaccatctttcaaagctcagttcacagacgtcctctactttgcccaagtggaccgttatctctagtcctgttatctcctagtcctccccctgcaatctccttctcccttgatttggcctgatattctttctatcatttataagttacttgttgaccaatctactttccctgccagactctggacctcagaacaattgcatcatttatttacatatatacaattatttattagcaattgcatctactctactaccagctccttgtgctcgtgttcagccatgtccaatctttgtgactccattgactgtagcccgccaggctcctctatccatgaaattttcgaggcaagaatactggagtgggttgccatttccttctccaaaggatcttcccgatccagggaatgaaactttttctcttttgtctcctgcactggcaggcgaattctttactacttg

SEQ ID NO: 55210 - DNA, 1979 bp, Bovine  19866880858024
  misc_feature (1)..(1): n is a, c, g, or t
nttagttcctctttgctttctgccataagggtggtgtcatctacatatctgaggttattgatatgtaatcaataattatgtaatatctgtgatgaaagatcataatataaacttatcacgattagtttgaaatgcatagaaatattgaatcactatgtaataggaactaaaatagtgttgtagatcaattatgcttcaaaaaccaacttatagaaaaagagatcagatttgtggttaccataggtggaggtgggggagggggaattggatgaaggatgttcaaactccagttataagattaaataagcactggggatgtcatgtacaacatgataaatatgattaacactgctgtatattctgtatgcagagaaggcaacggcaccccactccagtactcttgcctggaaaatcccatggacggaggagcctggaaggctgtaggccatgggattgctgagggtcggacatgactgagcgacttcactttcaccgttcactttcatgcattggagaaggaaatggcaacccactccagggacgggggagcctggtgggctgctgtctatgggatcacacagagccggacacgactgaagcgacttagcagcagcaccagcagcctccagaactgtaaaaagataaatctgtgctgctttaagccaccaaggttgtggtaattgactaaacagtcataggaaactaatactccaactcctaaatgtcagagctcagactggaacccagaggtgtctgccatgctgcctcacgcaggctccccgagcttgtccccaaagagccacacagaaacgacaggaaaaaggagaggaagcagactgtgtgccccagggaaagggccacccccacgacacacctccagtgagagggaggcactcagcatgtcctgaattcaggaagcagctctctttccttcctgtttgaagacaaaagttaacataaagagcaaaaaaaaaaaaaaaaaatgattatcaggatactctggcctttggaattactgagacagaaatcttctataagacaaaatgaatctaaaggattttttcctttcaacagggcatgacaacaaattttctgccaggctaccatctaactatgatctttagtgcagaatgcatgccatttcctgtgccgttctgaaggcatgagcgttttgggtctcacaaaccgcttaagctcagcacagaccatcctacaaatgctggtgtttgtcctcaaacggcacagtgagtcttctgttttcatctcgggttttggtcataagatacctttcaccaatctgaaagtattgaggatttttcttttcttttatccaacggtagaacttagctgaaaagagatttcgcccaaagcaaacttttcttttctcttctataacataatctttgtttcattgaaggtctcagttttaatgatgtttttcatgagccttttccccagggacaccgggccagagaggcagcagcgtgctttttgttccttgtatttatttagtgattgatctgtgcaagcaaactggactaatactttttggtcaaaataaaaagctaaatgtttcctgttcttagtatgatagcaaacaatttcactgtttcttatgggctggttaaatcaggactccattcagtaaaagaggacagcactggattcacaaacaggagccaggaaaagaggagaaatgatgtaatctgctgctgctgaaaggtggggatgaagacccccctcctcaggctgattggaacatgcgcagattgtttcatttctcccaactatcactcctttctctataagagaatcctgcatccctgctcttccattcgcctgcagtttctcctgaagcaagtggtgtcaattccctataacactgatattgagctttctcacgggccctgtactgaacagtgaagtgtgagcagaagtaatattggcctgggttgctcgttgcccttctccctctgccg

SEQ ID NO: 55211 - DNA, 774 bp, Bovine  19866880908299
  misc_feature (1)..(1): n is a, c, g, or t
nccttgtgacaccagcccatgtttcatagggcttgaaggtagcagaagaagagagtctctcccagagtttctctcatcaaactggctcaggtcaatgacctagtttggaatcagcccttggaactaggaggattcagtgggatattaggcaaatggaaggagacttatccaaggcacacagctttagagttgagaagggtggaccccagtaggaactcggggcactgttagacaaagaaggcagaagggatagggggcagctatcttagctatggttcattatgttgaaactagcgggaaagtggcttaaataataaaggggatttattggcttaggaaattagaagttagaagtttctgagatgaaagaaggcttcgggattgggttgattcaggtgctcgatgatgcagtcgaacacttggttctcttcttggttctcttctctgtctctctgcttgatctcttagagagtcagttttatccataagttggcttctctgaaaatagtagcacagcaatggccactggcttaggttttgcctcagccagaaggagagaatgctcaaaatatttcagaaaagcaaacaaaatggcttcccaggagccccaacacatctcttatcatgatggaattgattacatgcccatcctgagtcagtgaatccctttggacagggtaaatgtggacctcgttggtttaggtgtaggtggcaggtgaggtgggattacctgtactgctttatcagggttcgtaccggagcggagaggggttc

SEQ ID NO: 55212 - DNA, 2047 bp, Bovine  19866880930256
  misc_feature (1)..(1): n is a, c, g, or t
ngcaggtgcgcgcggagagacccgagcgtccctttaccctaaacctgctcgacttgcgccctgggcgcaacaggtctggcgcggggcggcccagcagcgccacccagcgtcgcgcccagcgtcctgcgcgtctctgcccgctggaagctccgcgccagcgagcgtgcgcccccgggcgtgtccacccgccagcctgcctgcccacgtggctggggcgccctgggcctggaggcttcccccaaaccggtcctcccaccccaaagccacagagctggggccgactctccactgcggtatctgaggtggaacactgccctctgcaagttctctttttaaaatgtccagacatctttagttgccagtttaccaaccatttaaccttccagcgactctatcttttcatcaataaaaacagcataaaatttctgccctgcctatcttccaggactgtttttgtgggagtaaatgaggaaatgaacgcggaagttatgaacaaaaggtgtaataacatatgtgtaaatatttcctgtaaatatctagcatacatatacatttctaagtatgataatatttcatttgtagcacatggcatgtaacatatgtcgagtgcttataatttcgcaggcatctcgctcaagcatttcgtcttgtcctcccctgccttgctcattcctgtatgtctggcagagtgctggtgtgtgtggatgctcaatcaagtcctctgtccatgggattttccaggcaagaatactggagtgggctgccattccctcctccaagggatcttcctgacccaggggttgaaccaggtctcttgtgtctcctgcactggcaggtggatcctttaccactgaacccacctaggaagcccagcagggtgcttgactcctcttacctttctgaggggggcactgcagctctccccagtttacagatggggaaattgagatgcacagagggaaagtcactaccaaagcaggacaggtggcagctgacggcactggcatttgaacccacgtggtctgcactcctaaaacttggtgcgtatccacgatgtttcttttgcagtgatgggaagtgatgcttggtggggagagggcttcacagaggaggggttccctcctgggatgggtgctcccccggggtacttaagggaagtggaggagttccccaggtgttcctgtgaggaatggctaagcgttttgagactgtgccagtctcaaaccttttaaccttttaaaacctttcacaataaattcaatcttttaattctctgataggcttgaggtgggtactgttactgttccactcttttagatgagaagaaaaaaaaaaaggagtcacaaagcagtgaagttgcccaggagctgtacatacagcatcaaggagctagaattcaaatcaaggagctggaattcaagcctagactccctaaacctagcctttgccggatattggggagaggggggtgaaatccttagggttagtttcgtactttaatctgtaaaaatttaaagctgtctcagaatatcaaacacccctctgccaatgaagaagattacttgaaatggggataagagaacataccccctggaattacatcaataaaacactttgatgtatgtcaagcacctggcaggcaatggatacgtaataaatgcttgttgaatagatacatcgatggtattattagctaatgtgggtgcctccgacatatgtgccttcacatatgttcttgtataatcctcaccagagccctaccaagtgggtactgtcatcacccattttacaagtgaagaagttgaagttcctggaggagaagggagtcatccaaagtaaacagggagaaagtgacagagacaggagaaaagtgcagatctggttgactggaaaggtccaactctttagggctgcaccgtcctgcttccagtgaaagaaggaacaaagaaatgggtcctgcgtcgttcagcaggggactgtcagaagccacttcagggtccccagctctgctagcctctccctgccctagagaggacccacagtccag

SEQ ID NO: 55213 - DNA, 1106 bp, Bovine  19866880938097
  misc_feature (1)..(1): n is a, c, g, or t
ntttaaaagcctttttaatggagtaagtcaagctgcattcccttcatagaaagaatctttaccaccaaagggtgcactaaatgccaagggaacaatgaatcttttgtagggagagagggagagacactgccatcctacaattgctggattgtttaaattattagatggcaattcatgctaaatacatatttgcattgttgtacaagtattttcttattttggtgaaagatagcttttcaaagggaatcctactcttgcagtgcaaacttagaagaccccattacatggtcgagtgcatttaattttattactgtggccagcagtgtttcaattttttaataaaagtctatcagcagtgaaggaaaagactgcagacaatctccagcaactcaggcacctctatattttatttactaacagctgtagtaaaactttcagtgaaaaatcttaagtggcactttcctttgtggtgagaatcaattgcacaacaatcttttaaaccttatttaagcctataaagctaatttggctacttcaaagtaaaggggtggggggagaaaaacagaagaaaaatatttctcctaataaataaaatattagaagaagaaaatgaagaggaattgtccagaatttattagcaatgcctacttaataagtgtcagaattcttgtacaggagttttttcttgctttttttgcttgagttgcatggggaatgcattcattcacttactcaccagtcattgatcacctgctctgtgccagatactcagttaagcactgggaagatagagaagacacatgtcctgtgctcagagagtttatagtttggtagaggggttggacatgtgggctagcagttatattacagttatacctgaggtgctataacagaggggcacgtagaaccagtgctggccgggagaggagagcttactctaaattgaatagggtaagaatgctcagaaaggcttccaggaggcatcttgaaagacaaatggagttagccaatgagagaagaaaggaattagttaagaaattagttaaaactctttctgttggaagctataaacaaaacaaattggctgagtaagaaagggggaatat

SEQ ID NO: 55214 - DNA, 1430 bp, Bovine  19866880966732
  misc_feature (1)..(1): n is a, c, g, or t
nctggcaggcagcctgtggtgccagccgtcttgacttctcttgctcttgtggttcaagatggttatggaggttccggcctttgtatctgcattcttgccagcgggaaggaagaagaaatgaagatcacgccccttcccttggagctgattccttgcgctcctgtgtatgtcctgggacctgaacttggtcacatggccacactgagctgcaaggatggctgtttgcccagcagaaaatgagagtcttattattaaagaagaagagagcagatagtaggggaaagtagcatttttgtcagaaggtgactcaagtcttcaagtggtatggcagcctaactctgatttctcacctcagggtcttgacttaccatacacgtcaggtccatgtgatggaccatcgcatttcatgttacagttgcagattcctcaagcatctggaattcttagcagtatctctgtagttactggtgggtacaccaagagcctctggattaaattaagggcagtggctaagaatataggctgtggagccagactgcctgagttgaattctagctcttacgtctacttgcagcgtgccctgggcaagtccctaaacttggcagtgcctcactctctgtgtctgtgaaagaggaccgtatgagtacatgacttggagggcttttgtggggaccgagtgagctgatgtctgtaaagcgctctgagtggcgcctggcccttagaaagcctctgtgtgtccgctctcatcgtcactggttgtttcctaataatgatatttgtaaggaaagccatggaaggactgggcgccccacccttctgctgcactgtaactgttttttgtcccaggactcagagcagctgtaacagatcccaagaattaggaaggctgatgggtattatttttgttttacagatcacttctctccagagaatgtaaatgacacagccaaagaaacatgcttaaattggtttttcaagattgcttccatcagggaactcattccaagattgtatcctttttttctgtctgatgattttaaagataggctgcaagagttgcactgttaatagaggcggtgtgaggggctgccctgagattcctgttgaaaatgggatcctgtcagggttgctctcctggaagcacagcaccagccacaatgtccaagaagcccttggatctggctctctccagttctctggagagagagactttgactgtggtgctgtgtaccaggcttttgtttccctgaagaacattcccacattaattttcttaattaaaatgctttggggttttttttggggtatgttttctctggtcccaagaccttgaaaaaagcagggtccagcttctctgcacaaacaccagtgttgaagaacagacagtccagcttatacacaaaaggaatcttagttctctaagtttcatc

SEQ ID NO: 55215 - DNA, 1001 bp, Bovine  19866880981796
  misc_feature (1)..(1): n is a, c, g, or t
ntacggtgctttgaggagaaaaaggctgagtgacccacaatctgaacccatcagagcagccctccaaggccaggcaacacagaccctgatgcctgccatcaccaggagtgcctctccctgccagacagccctcaccaactcgcactctgagccagctctttaatacagagaccacaaatctgataaaacaatcaaattcaaagacaaagggaaagcacattttgagtcaatgagaagttaacctatcacccgaaaggccttgggagcctccttcccagcaagaagggagaaacaattagttctgaaacccagttcatttgtgagatgatgaccctaattagagttacgggtaagtgggtctacttagaaattaattttaaacagaaatcctacagccctgctttctgtggacaagctgtgctctaaaattagcagctaatgaagtccttcgtccagtgactcgtgaggtggcggggagggagaagcacaaacgctggaggaggcaggatgtggtggtctcaccctgcataggtaggccctggcatacactgacaccagtgggtccccgatgccccggaccatgcacgtcagccgcggcagacactctgaaatccccctgcgagagatgaaaagacagcagcatttacacccaaaagtctacgtttcgacttcctaaaggtaggggggcaaaatcaggtttcagaaacaaaccaaggtcaaagttgatgttttctaaggccatgtaccaagtctttctctcttgccattattcatttttttgaatggtttctttcatctctaccatcttttcagtgctggagtctaatctttacttttttcctgtttgaggtcacttttactaatttaactatttttgtcccatccccagttatcgtccattgacaggtcactaggtcactcctcacccttctcaatatttcggctgttatctatatccctttggcatggatttactgccccgtgctccaccccattcttaa

SEQ ID NO: 55216 - DNA, 708 bp, Bovine  19866880997298
  misc_feature (1)..(1): n is a, c, g, or t
nctgaagaatccccatggaaataggagcctggtgggctacagtacatggggtcagacagagtcggatacgttgagcgactaagtgcaatgcagcacagcatgactaatgtattgaaaggcttttgtagatatattcctgcttacttataaaagtatttctataggataaattcctagaaatggagttgctgagtcaaaggataaaatatattaagtttagacagtgatcaccgtactgtcatccaaaaacactacaacaatttatgcttaatgcataaccaagtcactttggaacttttgatgggtgatgtaatctttgtatttcattttccccacttgtaaaatgagaatgattatgcctcaggaataattctaaatgaggtcattgctttgatatcaccatgggtctttaagaagaaatacactgttgggaaatctaaggtgtcattttcattttaattttttctctcatatctcctcaaaccttagttccttttctattttaaccagcagaagaaataaaaatttgattaaaagaagtctagtgacttcatgccttgagattactttcatcagttctatttttaagactcaccagtgggtgaggatattaggatgacatcaactttcatacatatcttttcatttaaaatttgcaaaagtctgcacaacccggacatgcctttgcttaaaatgcttgatgttccc

SEQ ID NO: 55217 - DNA, 806 bp, Bovine  19866881064531
  misc_feature (1)..(1): n is a, c, g, or t
ntcattgctacaaggtccatggatttcattggcatgattaaggagtgcgacgagtccggtttccccaaggtaggctcttgacttaatccttggtggagaatagataggcagcgtttgcctaacagctctccagggagagggaatctggtgtcgggggcagctcgggccaagaggaaaccaggtgaagtctgtgtttctgaagagtgcagaggaagacgagtgagcgacgggttgagagacgcatgtaattgctgagagtcagggttctgtgagtcctaaatctacccagttagctcactatgaagtatttaggaaaaactttggtcttacgcctttaaaactgtatcttcatccattaattatgcaaaagtttgtccaggagaatagtatcgcccacaggttggaccagtatacagagccagctctttgttctgaccttctcagtctaacttgcataagtttgtgatagaacttcagaaaatggtcgttggaagattaaccttgagataggccgactgtgacagccttttcctttattttcttaagttactctgatttttaatttctgagatcataatgtttgctatatttcttagcatctcctttttcgctccctggggttaaacttggccttggctgatcctcctgagagtgatcgacttcagattctcaatgaagcttggaaagttatcactaaattgaaaaatccacaggtgggtgacaatttagaccttgttttgactgctttgtgcccaagttatgtagtatgctctttctttaaaaagtttctctgtcaactaatcatc

SEQ ID NO: 55218 - DNA, 1127 bp, Bovine  19866881066494
  misc_feature (1)..(1): n is a, c, g, or t
naaatatcccaggcattctgaatgaacttggggtataaacagttctcatccaggttcagactggcagaagctctgtatattgaatgctgtctttaagtgaaatggaaacagatcccccagtttatttttacacagctcctctgtaagtataacaagttaataactaactgagaaactatttcagtctgtacttaggcaccgtgacagtattcacttattatctggtggtcagtctggaaccctgggctgacacagctctagacaagaatcatccaggactaggaagacagttttatcaaaccttaaaagaaggagatgggaagtagcattccaagagtttcagcacagagttctaaaaggaagctctctggtgtactgaaaataaaaaatcaaatattctcaacctctgaccttggagagaaacatactgactcctaaacaaagctactttttagaaaggatctttcatatcacctatgtcatttttaccctctaaacgtctcctaaacccatccacttctgtcgaattccactgccaccaggtcatccgatccagcccccacctccagccatgctcatccttctataaagcccatctgatgatgccaatgcccagctaaagccctttaaatgctgcctgctgcccctaggatcaaggccaaagtccttaaccaggcccctgaggccactgctctctcccagctccccatcacctcacacctgctttcatcacttaagccttctttcagtcccccttccaggctcaaggtctttgcctccatcctttcctcatctgaaagccctcactgccactcatgtctagttaattactaggggaacctattcaaacctcctgttaaagtctctcaaagcatccatctgatgcctcagaacttctttagagcgctggtcacagtctgtaatcaaggatgcacgtgattactggaacagcatctagcttccccaactggcttaagtttccaggagagcaagatgttcacttctgttcgccactgaacctccagcgtcaggcaggcccagtcctgtacccagagcaggcgctcagtcaattggaagcccccaggcctttctctctcagcctccctccagactatcaaaaggacaca

SEQ ID NO: 55219 - DNA, 1581 bp, Bovine  19866881306661
  misc_feature (1)..(1): n is a, c, g, or t
naaaagaatcacatagtaatttccctaagcattctcacacccagtttttttctttttgttttcatgttaaatcttaagaggagcagagcaggtgttcctttattcataaacagacccccccaaaaaggacaagatattaaataactcctagaaaaattcaagagcagagttgggatgacgcagaacactgagccgtgctgcagtcttcgccttcccaccgaacacccggcccctcccaagcctagccgcccgcatgctgagttgagttggtatttccccctctagtcttccgaagaaccccacttacaagacaatgagggtgaggatgaagaagaagtgcacgctcccgatgaggttcttgtagatccaaacaacccacaggtagctgggcgtttgattcagggtgttgatccacctgtagatggactcaatgaagaaggacagacctcgaaacggaccacagtcagctgaaggtttcaatctgataaaacaagggacagggaaacatctctagcgccagactcaggtatagtttttctagactagcccagtcctttctgggctcttaacctggaaccagtgatccttgcctgctccatccatatccccttccaaaggaaaccctttcactcacaggcccagctggtgtgttttgtactcatgacctgtattctgaggaccagcttttggacagcaggatcacttgatccaactgatctaatccaacttggatccaacttgatccaatccaaagaccaggttgtgaccttagctgtgtcctggcacaaagaaatgaactggggcgataggactctcttccttaggaacttgaactaggaaatacaaagaggggaggctgtaatctagggaagctagagctgtaataatggccacatgaagtcagttgtgaacaagcagaaactagaaggcaccaagaactgaataggaagagagaaaagagccaacgcggtgagacaactgagaacatcttgcaactgaggagcctgccctgaagctgccaagttccagttctgcaagtattctaaaaagtcaacttccttgtgcattcatttgctcattcatttgctcattcatttgacaaaggcccactgaacttgtaactgaggcaggagatagatgggctccagaccagacatttacaactagcctcctgtttatatttcttgaggcaagacatagatgggctccaggtgagacatttacactcagccttctgtttacacatccaggtagaaataaccacaggaacagggtaaatagctggactttgtctccagtggacacttgagagaacagtaatggtaagggctggaaaagaaaatggcaacccaactccagtactctcacctggagaatccccatggacaggagaagccctggcgggctacagtccgtgggatcccaaaagagtcagacacgactgaagtgacagcacacccgcaatggcagagggagagaggagctgagtcttgcccagataaaagataaagagaccacattttctcattcttgaggtcaagaagacctccccaactacacatctgtagaaggctccttggg

SEQ ID NO: 55220 - DNA, 2913 bp, Bovine  19866881311364
  misc_feature (1)..(1): n is a, c, g, or t
ntctttttccatcaggaggtacataatgtcttactgacttgtgttgtcagcagctgctgttgatgccagtggccagttctggcaatttactagcagttgtaaaatatcagtattttaagtctgtcatatattcttcatgtatagctagattaggggcttccctgttagctcagctggtaaagaatctgcctgcaatgcaggagacccccgttcgattcctgtgtcgggaagataccctggagaatggatagactacccactccaagtattcatgggcttccctggtggcgcctgcaatgtggaagacctgggttcaatccctggattgtgaagatcccctggaggagggcatggcagcccacttcagtattcttgcctggagaatccccatggacagaggagcctggcaggctacatacagtccacagggtcgtaaagagtcagacacggctgagcaactaagcacattagctaggtagaattcttctgtagaaaggcactctcatctatgatttagctcctcagtagcaaataaatgcttaattttgccctttgttcaccagtttccaaaacaaagagttggttcctcaacaatggccaacatagcatatatttaaaattttacagtaagggtggcgcctactgagatatagtgtcattgagatgaatagtgtaatggggctttcagacatttgaatcggcgtttcccaaacttccttaaccgcagacctttaaaatgtgtgatacgttttccagagcagcatagagcacagactaaagaattctactgcatcccattgctttgtcttcatccctttccccactgctctcttttctcttctctcagccagtttccccaaccccacacctttttttagccattttctctaaaaaggatcaaaaactaaccagcccatcttgacatggtcatggtttcatcctaattgcattctgattatctctagccataatttaaatccatatccgattaaaagttactctttgtgacattgttaaaatttgaccctgaaattgtaatgttctcattttaaagataggattgcaattcttttaggattgtggaggaagtgttcttgtctatattgtatatttacgtctttacatctcacacattattttctcaaaggatgtatgatagagtatttagtagacatgggggcagcataccacccgtgacctcctcgttcagaatgagtacattggctaaatctaaagagtaaatgagaggtattagagttaagatgtgatgatggctttctttccccaaatttcttttcagatgagacaaacagatcagaatgtagtaacggctttaattcatagaccctggagccttagccacacaggagatgggaaaccacgctttgaatctttctggaaacagtccatgtttgtggccttggacattttgctcgattggagtatgcataatatcttgtggtacctgtgtggagtttcagctttcctcgcacaaaaggactttatatccccgtaagttggaagattttatcttctcctgacacatttcctgaatgttcttcttggaggattaacagtggacacctgcattggttcccacccacagagcaagccatgcctttattaatttggaatgctaatagctgcttaggtggaaagagttcaggcctatttcactgtctccaaaagatactgatcaattattcttgttttttagcgcattttaaagaagtagtgtcaaactctgacaacagaaacagagaaattgtatttccttgtgattggctgcctttaaaaaccaacacaggatccagggaagacgtcttgtgggcgcctgcctcatctcctagctttcctacaggctccacttcattgcttctgagaaacttgccattccctaaactgtcagcattctctgaatctgttttggcaattttatggctgtgtatttcaggtggttatagtttttaagttttatattatttcaggcatgcatgcattcagttcagtagatatttggtgtatgcctatggtattacaaggtcctgtattaagaagctgatgatggctgtggtgaaaaaaaggaagccatggcctgccctcatggagtttatagtcaagaggaaaagagagatgctaatcaaaaagcgacccaataaatattaaattacggctaagataaatgctatataggagaaacgagtacatgtatactgttcaatttctcctaggaaaggagtcagggaaaacatccctacggaagtaacagctaaacaactaagctaagatctgaagggaattgaggagggtaggggtcgagatccaagtcagaggaaaacacatgccaaagtgttgtgacaggaaagagcctgttgtttgcaaggaattgtatgaaaaatcagttcacacacagaaaagaaagagggaatgtggcgtaagatgaggccaaagaaacaggtggggctaggccactgcttacagcctctagtaggggcgcgtggccgcaaggaattgtttttaggaggtcgctgaagtgtttaaagctgcggcagtgttggggaggcgctcatgctgggcttggaacagtctggctgcagaggccggttaagaggctcctgggtgctgttagtcctccgtgaacatcatacttagagaccattagagatttctgagacagttggcattattctaatggttgatttttcctctttctccagggactatgtgaagaagtggtcagctaaaggcattcaggttgttgcttggactgttaatacttttgatgaaaaaagttactacgaatctcatcttggttccagctatatcactgacagcatgttggaagactgcacacctgaattctagacttcccccgcaggggaggaaacacagttacagaaactgtctgtgggc

SEQ ID NO: 55221 - DNA, 1580 bp, Bovine  19866881321456
  misc_feature (1)..(1): n is a, c, g, or t
ngggaagcatgacatgaataatttctttcttatttttttattgcatttcattgcttatatttggttataggttaaatgtgattttccaaaacttaggggtatttcaacaattacgatgtaacaacattacagtccacttaacatctggacacctctgttgttagctgctacggttgttccatggccagatctcttaattcaataaaggttacacaatgccagtattttacttgtgtgatttcttgtcatttagtagctggactgctacaaaaagaaacttctgctcatcctgggaagagttggaagacttccagctctccccagtttctccctgtcccattgcttctccctccatgctggtgatgggtgacatttcctctcagacgtttcctctctctgtggactgagaaaatctatcctttctagttcccagattggttgactcctgcttcagccaggaaaggcagagagtgatagagttgtaggaataaaaggacctttcctagtggctaaactgggatataaggaaaagacttttaaaattttgcttgcagcctccactggcctgtagtctgccatagttttccaaagtatgacagaaggaggtgagcctctcaacaaaatagtaaagcagcagtaccccagctgcttacttatctgctggtatgagtttaaaatgcatcctagtggataatgcaacctaccaatactcctttgaacatccccatatattagtaaacttctgatgtagttaatagagttgtacttaataatacagtagctactggctgggactacattgtaatagattttaaatacatgaatctctctgttttacaggctactgatgctctaaaaaaagtatatatggaatttcctaaactatacaataatagtatcgtctgctctttcttgccagaagttatctataaggtaaaattctgggtttttgttgtatgttatattttgttagttggtggtgataatagcagtggactaaataagtataagatagatgcctattaaagtgaactgaatcaattaaagaaacccctcttttaaagtaacaaaaatttgggaaggggagggtacttggaccccattttaaggtaccttgattcctttttagctcctccttttatgtttatatgggagaaggaaatggcaacccactccagtattcatgcctggaaaatcccatagaccgaggagcctggtgggctacaatccatggggtcgcaaagagtcagacaccaaactgacgacttctggtcctgtgtgtgtttatttttgcttttatttccagaattctgggaggtgggtcatagaggatcctgctgtgatttatgtcaaagagtgttttgcctatgttctcctccaggagttttatagtttctggtcttacgttgagatcttttatccattttgactttattttggtgtatggtgttagaaagtgttctagattctttcttttacaggtggttgaccagttttcccagcaccacttgttaaagagattgtctttaatccattgtatattcttgcttcctttgtcaaagataaggtgtccataggtg

SEQ ID NO: 55222 - DNA, 786 bp, Bovine  19866881338319
  misc_feature (1)..(1): n is a, c, g, or t
ncccacaccatcatccattctccatatttttgtttttgttttccttcttggcaggagggcaaagacaaaatgttcctgatagataagttgatcaagctgcaaggtatggaaaagagagcaaaccccaccttatttacgctggaaagaagagatttggaggtgaggctgcaggctgccttgggatccctgtgacacggatgtgccctcctgtgaaaagtgcatcaggagctagaatcacatctgggcccttcactttctgtgttttaacatttctttacttttatttaaaaatacagtatgcattcaccatattctatgcctggccatgttctaggtaatgtaatatcatggtaatatcgtggcaacacagtaaggcccttccctcctggagcttgcatacatcttcctattacccagccatacagaagtgtgtcccactgggatgaaaaatgccttgaaacttcaccccactaggttattgcttcagtgtatagtcttccagatctttcccccaggcatctgcatgcatccatacatctactaacattcttgtttatttatttattacaaaaatgggctatattttatacataacttcccctctccctgcttaaaactgtatctcaaacattctttcagtttgtatatacttggacatttgggttgctcccagttttttttttaatactaaagacaatgtgtaatgaaacttttttgttatagtttttgtacgtgagtgttttatctgcctcaggcatatgcatgataatgttaatagatattgcc

SEQ ID NO: 55223 - DNA, 1109 bp, Bovine  19866881341722
  misc_feature (1)..(1): n is a, c, g, or t
ntataaaaataattgagttagatggattcccgtggtagatttttcaaaagattttcttgattaaagtgcattcctgttgatatagttctggttaaaaggtttgggttcataattatcaccttaaccctaatctcattggtgaagtagcagggtcaaaacagtgtgatctaaatgttttgcagggactaggcaggaagagataagagactgggaaggatgttattcaagcaagaagttatgaaagattatcagttaagagcatgaagcctcaggctgagaatccaaggcccaggtgagttatacaggtaagcgtgaaagtttcaccataaatccaggtcatggaaatcatcatcatatgtgtccttatcccaattaagttaaacattaattgacttaatgatctaacccttcatctcccatccccactggaaggagattccagcacttactgcctggccatttccgggtcctctgaagagccataatcatgaccattctcagcacctgggtaatcaggctctccccaaaagtttggagagttccgatggtcttcagcacccagatagtctggttctccaaaaaagtgtggatggttagattgactctcagcacctggataatcaggctctcccagagagtctgtgtatgccttgactctggggctagcatgctccggattccttctggagcctggatggtttgaactggccctggggccagaagagttcaagttttcctgagctccagggtagtctggttctcccaaggagtcgagataatctggatttattctggagcctgtgtagtttccactgcctttggaaccaggaaaatcaggatttcgttgaaactgagagtagtctgggtctccagatgagcctggttggtatggattcctccgagatccaacatactctggttctgccaaaggtttgggatagtctgtccctgcagagtatggatggctcctggtgccagggtagtctggattactctgagatccaggataatctggttctgctagagacccaagatagtctggacttgttctggactctgctgggtatgggttgctcctggtgctgggttcatctgagttgttcagagga

SEQ ID NO: 55224 - DNA, 1293 bp, Bovine  19866881352791
  misc_feature (1)..(1): n is a, c, g, or t
naatcttgaatgtagtagtgcttaggaatgaatgcattattaaatctatttctgtaaaatagaataacatgttgcatgcagttacattttctatttagtctgtttatttcttcatactctgcttttttttttagcatgcttgatttaggagaggaataaagggctatctaatatgataaattcagattttcaaatgggatgataatactctagttgaaaggctgcattacatgagacacttatatttaaggtttttcatcactaacatattcatttaaaatataaaccaaaaaaggttaccaagggaacatgactttataaaaagaatgttcgttgttaatttatcaagctatttccaaaagggctttgtgcttctcacgtaaaattgggaacatttatgtgtgcatttaatctttctgacttgaatattaaaaagatactggtattttgaaaatgcagactgtatgtattcttagtattctcttaaggattttgagataaggatggttttcttcgattttccactccttttaaaatttaacttttccatccaactgtagacaaaaattgtaatctactctgggtgtaaacttgattttctttattgaaatgtatcatttatttaaggagtgaatcagaaaattagaaatagaacacagtcaaaaacgtctgaattaccaatttatatttttgggcaaagtatatcaaaatgatcttaatatgataaattgtgctttatcattctgaaaactcaggatacagattacttattatcattgtgggtctttccagtatgaaagatagatgctaaatgttttgtgtacagtaatgcagattggctataacaaatagtgtgtttcagagaaagttaaaactagttttggattgaggatgcagaacttgagttttttttttaagggtaaagcttgcatgttttacgaattttttaatgttcacagctttttctcataaaagtgccagacattgttttgtgcttttaatgtgctttttatttatatatattatttttattatttttactttgagtggaatgtccattaatgtaaattatatttatttttatactttaattttcactagttttgcttctaggcaaaaggcaaaataaatttttcattgtaaaataaatttggtgtgatttttttttttttttattaccaaagaaaggacttttgaaaagtatgtgaccaagacattaatactttaatacgatgattttttacaagacccatgaaaaatatatcgcactgtttaatatgtaacctgtaacag

SEQ ID NO: 55225 - DNA, 1089 bp, Bovine  19866881374938
  misc_feature (1)..(1): n is a, c, g, or t
nggttatctcagtgcaccagctctgagcaccctatctcatgcatcgaacctggactggcaatctgtttcacatatggtaatatacatgtttcagtgctattcagtagtgttttttgaggtccatttttgttgtaccagagagtagcatgttattcatttttttgttgttgaataattttttattgcatggattttgtttcactgtttttacatttttggctattacgaataaagctgctatgaacgtgtgcatacaaatctttgtgtagacatatgttttcatttctctttgataggtacctaggagtggaggaaactgagttttaaaccttatcttattacatttgattgcatgtcatgacattttattaaatgttcagacagcggatctccatttcacattttgaatttagaacctaaataggatatttggctccaagttaagggctgtttcataatgacctattgttaccaaacagtgcccatctatgtgattaatcaatagtgattgatggcaattactgatagtgtgcatgagtgtgctcgtgtgtgcatgtgtgtgctcagtcgtgtctctttgtgaccccatggattatagcccaacaggttactctgtccatgggatttcccaagcaagaatactggagtgggttgccatttctttctccaggggatcttccaagccagggaccaaacccgagtctgtctccaacattggcaggtgtagtcttcaccactgagccacctaggaaacccccaatcactgatagaatatttcttaaatgccagacattactttacattgagatctcacttaatcattacagtaacactttgagcagatgcttttattgttccattttgttgctgaggaaacttgagactgagaagctcatatgactcctaaaaggaagagcccgaatttgaacaaggagttgggcttcggagcttggcacccagttctactatgtcaataaggctgctggttctgaaaagacttcccgttgcaactcttggaattgctgtcagatccagtttgtaaaccatgcaagaaaatcttatagctttatagtcatgcttcttttcttt

SEQ ID NO: 55226 - DNA, 1032 bp, Bovine  19866881384798
  misc_feature (1)..(1): n is a, c, g, or t
ngatcccccaagctgataccaaaccaagggtacacaatcctttatagaaattggggtagtatttgaacataactcttcatacaccgtcctgtatattgaaatcatctccagattacttatagtatctactataatgtaaacactatgtcagtagttgcagatacacgacaaattcaggttttggaaactttctggagcttttttccccctgaatatttctgagccgtggttggttgaatctgagggtgctgaacctatagttatggacagctgtttgtcctttgtagggcccggcacctttctagaaggggagatgggggccgtttgctgtccaggccctgaggctgcactgagaccgcctgtgcctggccagcgggcgtgcgccacttgccgggacagccggtgcccgctgggcctgttgggggccgccctgccccaccccgcacctcaccatggtcctggtgtccacacagccgtgcctctgtgccaggtgccacaggttgacggacagctggttgagcctgttgttgcgcaggtcgccgtgggccaagatgctgttaaagaaggaaaggcccaacgagctctggcgctttaaggcctgaaatagaaaaaagaggttactaccgggcactgggctcagactcatcccagtgttgacgctgcctggggtgccacggccagctctgccatggatcttctggagggcaagctgcttaacctcccagcttcatctgtaggagaattaaggtaataccagctcacagggtaaatgagactaaaacgagatgctgtgtgtgaagcccacctgggcattactcatgggctggaagcagaaggcagggctgcatgagactcagtgctcagtggggttagaggaatgacataggccaccagagaccagccttcttgctttaatgccagtacaggaggtaaaatatgtctctcacagatgtgtcctcaagccacccaaagtttctgtcattattcctaccctctggctgccaggaataaagacaaaagacctcagcttcc

SEQ ID NO: 55227 - DNA, 1046 bp, Bovine  19866881417893
  misc_feature (1)..(1): n is a, c, g, or t
ncagatgcacagtgggtgtaattttctttccctgcttgtaagttgacatgaaaactgcctccctgggtgtctgcctgacccccaccccctgcattaaatcaggacagaatgtagttgacttataatggcaattatgtctagagatggccttaggcaaggacatcatttaccagggaaaaaaaagcacacaagttggtgaagaataggcagagtgggtggaaaggctcagccttccctctgtctacaggagctggtgtctacactggctggagaaggggaggagcagggtgcggaggggtgtctttggggcttaactctcagccactccctttaggatcccaagttacagagatccaggaagggtgtccattggcttggtgccaaagatcccattatgtgtctgctttcagattttattctgcctcattttgttggggctggagaagcagaggagagacatcctgtggatgattcatgggtggggttctcttccatccttgttcagggtcacgttgactttctcagtggcccctttggtacagaggggccaagatgcttaagaaatgcgtggacaaccacgtgataaaatgagggtccctagcctcattacaagaaaagtgaaactgaaagtcactcagtcatgtccaactctttgtgaccccatggactatagagtccatggaattctccaggccaggatacagggagtgggtagcctttcccttctcccagggatcttcccaacccagggattgaacccaggtctcctgcattacaggcagattctttatcagctgagctacaagggaagcccaagaattgtccctaaaaggccaaagtgtccctaaggcgtttgaagatggggcaggtcattctccagtgatctggagtgtgactgagtatgacttggaaaagaattcatggaagggataatgcaaggggccagagttcagttgtggctcttctccgtactaatcattaggcttgggcttcccaggtggctcagtggtgaagaattcacctgccagtgcaggagccacaggaga

SEQ ID NO: 55228 - DNA, 1001 bp, Bovine  19866881450010
  misc_feature (1)..(1): n is a, c, g, or t
nacttataacattctagaactaatagaattttgagacagaagggaataaatcatacagactatctagtcggctggttttcagctatggctgtataaatatcacctagtaaacttacacaaaccctcctatgcccaacacatacataaacattccattcagaatatgtggggtagtgcttagacatgagcatattttaaaaagcttctaagctagtgataagaagctaatatctgataagagcagtgaaaagagaaatctattttacataaaaagaacttcacctttttttaacagaaccctaaggaaatgacttgatttctcaaatcacattcttcttagaaaaatattttaattcactttcatcttatcgaagtttcatctgaaatatttaatcaggtatatgctatttagaacactatttcccccaaaatactgtatcaggtttttcttgcctgaatccccgctgggcgacacacagcctgaccaagaataccatatattctctctttttcttcttcggttatggtgtctgggagcagattctgaacttcagatttttctctaggcaacagacgaacaccttctccctgactataaaaataaaacaaatcatcagtatttcagctaccaaagctttgccatgtcagtagacattttaaatctctattttgcaatgcattaaataaattacacattttaacatacatacctggcattgtcaaccacctttctgccccacctgtaagcccaactagccaatgcggcccaagatttggctacttcaggtgcctgtactgaagacagatgatacagctgtcccaagatgaagtcaggttccccaactccaatatgtactgccatgatgggaaaaaaaaaaaataacaatgtcacattcataaatttctaacagcattttcatttacattttaggaatttgctatcggtcagtaagtcctataacattataatggtacataattgataaagcacacatttgtat

SEQ ID NO: 55229 - DNA, 963 bp, Bovine  19866881450953
  misc_feature (1)..(1): n is a, c, g, or t
ntccctcgggcaccccaccccaggggaggggccgcggggagggcggcccggggcgcgccagccgcccggcccgccagctgtcgttgccttggtgacggctctggctaattggccggcggagcgagccggcggcagctgttccggccgggagggacaaggacatcgtctctcccgggcactgggtgctgaggggtgggggacaccccggaggcgcactggtggtgttggggggcagccgattactttgggccattgccttgggagttgtggaccccccttcccttcatcttggggacaccccgcaagaatccttaggctgaaataatttccaggctccttttcttgaggagggcatgcttgactaagagacttgtctcctcagtacgaggggggaagcggcgacgggtcagcgccaaggtcatgcggtcagacccgctgagctgcttgttctggcactgggtcctttgcccctggcagtgataccgacgggctcctacattctgcctgcccagaggcagacgggtgcctctgggctcgcttctgccctcgcccaccactggaggggctcctgatacctcctcccactttggctcacacacgcacctcctcctgtccttagtcttttccacctgccggggaactctgccctgccatccgctcatagccgccccatccctctcctgccttagattcgctccattgacttccctttcatgaaatccttaggtcatcttttcaagttcaatgaaggtcacatttactgttcacctactgtggggatgttgttggggggagtggccactgaacacgttcagcaaacacttgggtgacatgtaatatgtgtgggcaccgggaacacagctgaggaagcggcgtggtccctgcccatcaaggaccacgcactgagacctgaaccacgttagaacggactgctagggctcttaagactgtcttctgcaccga

SEQ ID NO: 55230 - DNA, 1429 bp, Bovine  19866881496438
  misc_feature (1)..(1): n is a, c, g, or t
naaaaaaaagatcgcagtaaaaagcacctctagagactgacacagggttttgtgcatattcagagcttgataaatattcaattggctggaagaatggaagatgggtggatggatgtgtgaatgggtgcacagatcaatggatggatagtaaataagaaagtaatcaaatccatttaaacagaagaaatggagggagccttcagtgcactaataaaactaaacattaagtaacaatactgatccaagctgcaaatatacatccacatctcctatgaaaagcactgttccaggacctagggacacagtggtaaagaaaacccactccaggctccccatctaccactgaaagcagagtggaggagaaacctcttatgcctagaagataagaactcaagtttatactgactttatcacttatcacagccccacagggaaagcactgctattatacccaatttacagatgaagagatgaagacacagaaaggtcaaagcaagtgacccaaggtcataaagctaagaaagagtggagccaatatcagaagccaggcaactggactccagcattcttgaggtcaggggctatcctgctgctctgtaggcctcttgcccatgcaagcatgccaagctcaaaaaaaaaaagcaactgactctattttcaaacacaggctttatgaatttcaaaatacttacttgtttcctagcttcttacatctctccatcatctctgttagcagagcctaattaaaaaaaaataataaaaaccatcaagttgggggatctaaagtaacacttctcatgagcagatttgcaaagtaatactctaaaataaaggtagtcatttacatacccatttctataattctcagtgtttggtagcatggggaggatggaggagaaaacaagttcactcttgtggcatttagcataatgggtaagagctagggccctgggctcatgcaccgctgggttcaaatccagtctcaccaactactttttcttcatctgtaggcagatgatacaggtggtaccatgccacctgcagattcctacaggacaatgagagtggtaccgcctgtgctctagggtaccagtaagaatgaaatttgctttactccccacctctcctaagatcccctggagaagggaacagcttacccactccagtattctggcctggagaattccatggactgtatagtccatggggttgcacagagtcagacacaactgagcgactttcatttttactttccacctcttctagacccccagtgttcctcccctttcacgaggtgcctgtggaactctaagtaaaatgaataacactgggccagtcacagggagaagcacttgacagtcatgctgccacttctcacaacccctatgaggcaggcttcaattctcccatttcacagatgagaaaccaa

SEQ ID NO: 55231 - DNA, 1581 bp, Bovine  19866881685175
  misc_feature (1)..(1): n is a, c, g, or t
nctgcaggtttccgctgcagggtgtcggccgccttcttgctgagagccatgctgggcctggccaccgtgggagaggggcgactgaaggaagggggcagatttttaaagccacccatgagtttgagaaatttcagtttctgttcctcattttcaaaaccagcagtatcccattggccaaactgggttccctgtggtaagagaaaacaggtggttactctcctggcttccaaagcctggtctttccccagtccccagccagggaggatccagatgatcaaaggcttactggaactacttcttaattccaaccagagccctgtgaggagtgctgttggttcccactccactgatgaggaaatggaggtctgcagctggaggggactcaggcctactcagtaatcctgctggaactgcgtcttgggtctggccctcaccaaagccacctttcacactgagctgcctgtctgcttaactccttctcccccggttcatggcagtcagtacgacacacctcaccagctagctactcatccgtcagcctaaggtggaagtggagagcgcaagcaggagtctgaaatgcatttatcttcgcagaagcactgcattttctagcaggaaaggcatggaggcttggagaagtaaagggtcacaggagtcggaggcagagtcagcccaggaacctggggttccaattcctctccagaacactctaccacccatgcactaatcacccatgttcgagaaaatgcaaaacagcaccttggagacgtggcccgacagaagactccctttccaaagaaactctcttcccaaagaaaccccatgaagactgactttgaagactcaggatcaaaccccacctgtgttaccacggtcaagttacttaacctctctgaaccttaatgtcttcatctataaagtgggggtgtaacactccccccatccctgacaaggcttcagtgaggctcagatcagacttgataccaacaacccagagcaggattcctggttggttttaaatcctcaagaattggctgttctaccccacctcctaccacccaccccaccaggactgctgacctccgtgccacccgggaactttccgcttgtaagccaaacgctagcggagctcttaattctaggtcggctttgagagaataacaggaaccagtcatcactacagctgccctgagtgaactggtgacaagttcccccagcttcacagtggccccaatacaggaccaaagacagcttcccaggccttcagtttctagaataaggccacatctgaccacctcacgctcggtctgaggagagagctgccagaggctgaccagtcctgggagccagctcctggaggggacccggtctcacatgcccaccgtgtgcctcagcaggcaagtggccctgggccctggggcagtgccactaaagcatgtgcggaggaccccagcccccgagcagccccctgtggtcaggcccaccagtggagccgctgggctgcggctcggggtggcgccggcctgcttctgaccttcctcattcaatcatggaatcgtatcagctctgcccagctcaagt

SEQ ID NO: 55232 - DNA, 1289 bp, Bovine  19866881695708
  misc_feature (1)..(1): n is a, c, g, or t
ngaagttacttgctaagtctatagctacagaaagtggccgagctcagaacggatctcgggtctttagattcaaatcaactgtccttttctgtgttacgctatgaaagcttcaaacagcacaagcagacacgccttcctgtcatctggatcctcttcccccagatccacgtctgttaacaagttcttttccctcccctctgccccctcctaggcctcaggcctgcacactgagccttctacaccagctccctgcttccccacacacataccctccagcagtgcccaccacaccctcccatcccccgcttcagccagatcacgtgccccatgctatacactctcctgtcccatctcctcagccctggtttggaaatttcctattccaactggaccagaggcctgccacacacacccccacctctgccccctccatctgtgtcagcagccttctgagggcaccgcccactgctgggaagggctcgccatcatgtgccccaagaaactggtgcccaggacatcctgcccatccagaggaggagacaaaggtccaggcagcttatctcaagcagccagctctccaggagggaggcaagcgcctcttgcagaaggaaggaaatgagctgaggacgagctctgtggagagggagccagatggcgggatggggctgcccctgggccagatggactcggcctcctgtccctccactccacaaggtgagaaggaggtgggtgggacgctggagcacccctcaaagagcccagtggcgaacttactgtccacttcttggtgtcataagcttccgttttaccagactcacgatcaatctcttcttgcaaggcttttcgcctcacctgagcaagagaaagggaagagagcaatgagacagacagtttcctctgagcttcaaagccaggacagagatgcggtgggagtcggggggagactgaagggatcttcacctgagggatctggtggtatctcaggcagctttgttctgctgcagactgtggaaggtatggcagctccaagccccccctgccctgtgaatctcattcttcggctgcccctgagttatatccctttagaataaaccagtgatctatcgagtaaagtgcctctgtgagttctgagttgctctggcacattaattgaacccgaggaggaagtctttggaacctctgatctgtagctggttggtctgaggcacagctgacaacctggcttaagactgacatctgaatgtggggggtgggggtggggagcagtctggtgggactgagcccttcag

SEQ ID NO: 55233 - DNA, 1160 bp, Bovine  19866881749548
  misc_feature (1)..(1): n is a, c, g, or t
ntttcaccattaatgatgaagctgttctttgttataatccctgcacccccagtgtctgccccagtaacgcttgggtattttggtttctgcctttcctagtatggccaggtatttccggaacaacttcattaacccccacatttactccagagggatcgccaagctcattttttgctgggacttcactgtcactcatgaaagtgcagtaaagctgaaacagaagaatctgagcactgaaataagggtaagcagagctagctttaaaccccttcccatggccagtcctctttcctccttcaacatgcctgtaacttttcttaaagtaataacgttttattttttattctccacgatattggcaaaaaagaaaaaaaaaacaccctaaaactattttaaatgcccagtgctggtgatggtgtagggaaatgaacattttcacacaatgtggtgactttgttattgacataagcttgctaaagggcagtttaacaatttatgacaagatgttaaatacttattgacctcacagttctaggtttaaaatgttatccagtggtttttgactcgaggcagatttgccccagagacacagaccaatgtctggaggcttttttgattgttgctgcagaggagtgtgtattaccagcatctagtgggtagaggctcaacatcccacggtgcacaggacaagccctcaacacagatttatcaactctgaatgacaatagagctaaggttgacaaaccatgatctatagaaaagtatttaagagaaaaaaagagcaagcagaatttataaactaatgggctttgacaagagggttgcagagggatcctcagccttattcttcaagaaggccctatggcctcagtgtattctctcaagatcatggtcccaatctctttccctctgagatggaaaaggtattcaatgaagcgatggggggttcttgcccattagagattttcctagtggtctcctaatccaagctcatggtgctttttcccactctctcgcctgtgggtttgtgtctctttgagagcaccaaagcctagggtggtcatctttgctgacagtgtaggggttctgcgagtgaacttgacttccttgtgtttacaggagaacttgtcagaaatccttcagggagaacgtcaagttaa

SEQ ID NO: 55234 - DNA, 595 bp, Bovine  19866881768772
  misc_feature (1)..(1): n is a, c, g, or t
ngcatcccacactcgtgaccccctcactaacatgacaaagggaatcaaaatgatggtgggtgaaacctccacaaaaaatggggcagagaacaaactggtagatttaaaaatccaaaatcagctaccgctgacaaaatgagaaagaaccaggaacgctgtctataattttatggaataggaatgtcacagggggacccttgacaaaacttaccgttattggtttcagtgggtgatagtccccaaactccagcggtacagcctccaatcggcatgacgcaaactcagccttgtagttcctattcctggaatgcctggtaaacagcaaaacccagaaaccaatttagttggagatgcatacatattaaaaactttttgctaaaaaaaaaaaaaaattgtttttgatgagacaattgacagtggaacagtatttctaccaagaccagtaagtaatggtaaattttttttaattttttaatggtttgaaggtataaagagctgccaaggcaaacaaaacccatgaggccagacaccagaacaaagggaagctcagtgaggtgaagccaacttcttgctggctatctctggctgggcactg

SEQ ID NO: 55235 - DNA, 703 bp, Bovine  19866881816785
  misc_feature (1)..(1): n is a, c, g, or t
ntgcctggtacatagtgagcgtcattaaatggtatcttatagaaaaaccgacactgagaaataatattagttttgctctgtttccaggagtatatgcaggaaaaatccaaagaaagcggccaaatgttgcgacaatttaagaagacaacattcattaggataaaaacggggggcaaggttaggattcatattatttttcctgctcatgattttttatttaactctggcctctgtttacacaggcaaagtgatgtcaaagggctgagaaatcatctggatattttggtctctttctaaccacctccccccaccccccccaccccacctcaaattttcctcttagtatcagttttttgttgttgttcaggcacaaagttgcgtctggctccttgagaccctgtggaatataccccccaggcttccctgtccttcactgtctcctggagtttgctcaaattcatgtccattgagtcagtgatgccatccaaccatcttaccctttgtctcctcctcctgccctcagtcttttcccacatcagggtcttttccaatgagtctgctcttcagttttgggtgaagacaaattagtgcttagtaactgactcatttttgtccttaacctgtaaaagtttattttattactcaggtgtctgttgagaacctttttgtaaactcaaaggacatttgggtttatttctataaa

SEQ ID NO: 55236 - DNA, 1634 bp, Bovine  19866880374323
  misc_feature (1)..(1): n is a, c, g, or t
ngaaggactgatgttgaagctaaaactccatactttggccacctgatgcgaagagctgactcattggaaaagacactgatgctgggaaagattgagggcaggagaagggaatgacataggatgaggtggttggatggcatcaccaactcaatgtacatgagtttgagtaaactctgggagttgttgatggacagggaggcctggtgagctgcagtctgtggggtggcaaagagtcagacatgactgagcgactgaactgaactgaactgaactgaagcttttgaggaaaaatatagtttgaagtacacttacagtaattttatagaactaaatgtaaactttctttgtgaaactattctaaatttatcagatttcatattttagtctttaaaaatttttttgttgttgttaattgaaacaagtttttcaactttgttgtatgaaggcaatggcgacccactccagtactcttgcctggaaaatcctatggatagaggagcctggtaggctgcagtccatggggtcgctaggagtcggacacgactgagcgccttcactttcacttttcactttcatgcactggagaaggagatggcaacccactcctgtactcctgcctagagatcccagggacgggggagcctggtgggctgcagtccgtggcgtcgctaggagtcgggcacgactgagccacttcactttcacttttcactttcatgcattggagaaggaaatggcaacccactccagtgttcttgcctggagaatcccagggacgggggagcctggtgggctgccgactatggggttgcagagagtcggacacgactgaagcgacttagcagcagcagcagcccttaaagagggggaaaaatcatctttatttttaccctaatggctgaaaaggcagcctgtggttagagatgttacctatcctttgataggtaacattaatctttgttttctggatgcttgtgaaagaaatccataccatcctaaaatatggaagcagatttcaataatttcagaaatagatacagtatctatatttaatctatttagtttctttccttacatcactcattcatgctcctcaggaaattcatgttagaattcttgagtctcagaaaatggctttgagggcttaacaccctcagaactttaaccagaaaagacttggaaggatgagaggagtggtgatccttggctggcacaggttttcatcctgaaggaacctctgtctgccttttagttctttctctcccttctgctgcttacttttagggcttatttatcactctgtcagaggctgcaatgggaagatgaaaaaaaatgaaaatcatatttattaatttttcatagtagcccttggttcaaaagaagggggaagggaaagagactgaagctgctggatgagggaagatttggaaattatttattagtacattcctgccctcttgaccagtaatagaccagcaaaaaatcctacaggattaaaataatccatattggacaaccttttggataattctacccacagtattatgaactctttgaatattgtgtatccctcatattatcatcatggtagtgaacatttattgagcatttatcaggtcagccaccacactatc

SEQ ID NO: 55237 - DNA, 897 bp, Bovine  19866880476885
  misc_feature (1)..(1): n is a, c, g, or t
nctaaaaatagaaaaataaggagagttccctcaatgaatttaactttagtgaaaatttcaaaatctttctttttaatcacaggtaagtattttgaaacgattcatatatttagctaaggtttctgccaatttcagattccatgattctaagtttctggtgtctccctcaagtggtaggaggtccggctgccttccaagttctatagctccatgggcttcactgctccgtggtagggaacctccacccccctgatgaccactctcctcttcatggcccttcttcactgtgctcatgatctttctctcctctgcagggtgattctggagggcctctggcatgtcatattgatggtatatggatcctgataggattgtcaagctggggaagaggatgtggtatttctttccctggaatctacaccaatgtgacctattaccaaaaatggattatgtccgttatctcaagagctgaggtcttgggtgccaataacctgaacttatctgacttcttattctctattgtaccgctttctctggctctactgggaccctcctgtgtgtttggatctaacattttaccaggagagtagaaagtgtagctgatgctgctgaccaaggacatggctaggaaggaaggtgtggagaataagcactcggggcagggaactcacacagtcattgggaactctggatgactttattaaaataattagaaatgattctgatttcgaggtccttgattctggaagtaggttttactggctggaatgcctacagctgagaaaaaagaatgccagtttgtgtatggcattcttgtccttgacaatgcaacttacaaggcaggaaggatgccttctataagaagtatgggacacaaataatagtccacagaagcca

SEQ ID NO: 55238 - DNA, 695 bp, Bovine  19866880479065
  misc_feature (1)..(1): n is a, c, g, or t
ncttcagcccccatccccctgttccttgtctcctcggaagcacattctgctggttctgcgcaagaaagtgtcaacccagacaaactgagaaaactgtctagaaaaggcagtaacttccacctcccagacagaagggctccaggcagcaaaacaatctagctcatctcttccaaaacagaaaagtaaaggctgaaaggaaaataaaaggagggtaaataaaaagaagagaatattcacagttttatcccaaaaacaaactctcctgaactgtgtcctgagtcataacttcccttccactggggctctccttacccggaatggggtgttgattcggctcgtgagtgtatccaagatgtggacattctcgtgctggtgcaacaggataaagcggaggaaggtctcgagcagtgctggctcggagatgctgcgcagaaaaaggtccaggtaggcggtggtggtcatgacctcctccacagtcacctgggcccaacgacagagggaacgcaggtgagcctcccccgatgctgcgatccgtgcctctccaacggcccccagcctcaccgtggtgaccccatcaaggcaagaacacacctgccgcctcccccgatgctgcgatccgtgcctctccaacggcccccagcctcgccgtggtgaccccatcaaggcaagaacacgcctgccacgagagcacactt

SEQ ID NO: 55239 - DNA, 1829 bp, Bovine  19866880554452
  misc_feature (1)..(1): n is a, c, g, or t
nttaggttgtctgagattgtttcctgaggtctactgctatgaactttcctcttagaactgcttttgctgcatagattaatagtaatatctttgtcttctgcattcttctactaaagttctctttttcttctttgatctgttgcccctttgcccttttgctttaagattttaatttgtgaggtgaagacagcgggcatgattttctcctgcattgcaggtggattctttaccaactgagctatcaaggaagccctttattatagataattgcctcgaacgctggctagtgtggacttgacctttcaaaatgcaaggccaaagatcacatttttacttgtgtgggattttttgttgctttgatctcagaggaatcgatggatgcaggtgtggagaagactaagggagatgaggggcaggtgcttggtcaggagctctggggccatgttcagtctctcagctcatggtagtgtcttacatttcttggaagaagcagaatagattcaaatacctgaggctaggagcagagcaggcctccatacttccccaaagttcaagttccttttaactctgaatgtctcctgagatcattcttttaaaaaacactactgtattttttttcataaggatgaaaccccagcactctaaattcatgctccctactgtgggacctagtattatagaatctatttgcctctaaataaagaaagtaagtttcgacagcatgtcagtcagctgtcccagacaccactcagaagttgatgggtgttttgaggttgtatattcacctgtctggagagttgaggactctggacatatttcgagttaggaaataaatacctatgtgattacatggcttattgtttattgtaaaacatatcaccttatgttagagtccagtgactcatgatctgacttcagaatacttttacttcaataatttaaaaaaccccttttcctgccatttggcttttaacatgtgttcaggccatacttttcttttggtacctttctaattgagatgaaatttgcataacacaaatgctgtgaatattttttgtcaagagaatttaagaaaggttaatgactcagcacttggtttatttatttgaattcagtcgctgataggccaggatgatatataaagccaggtccgtgccttgaaggagaccagggcctccacgggggataaacatataaatagataaaatagagacacgtacagtgtgccccgtgactgcccaggatgttgcctgcacgttcctttctgagcccacctctgaaaacggtgggtcttttcctcttgctcaatatttttgtagtgacttctctcacttctttgtcttactgttttcagttagaggtttcatatgaaagttagaatttgtcagctacttcatgcttctcaacatttcttgcttctctgattcgaagacaaaaatgagagtggtaatgcttgatgttagtctgtttgttagaattataaaacatgcagttgatataaaattggatataaaaatgtatttttgaatgttggagtaggaatttggcattctaccaagtgtgtttttcctgtaagtgtgtggcaagactgttggccaataaaatccaggactgtttgcttgcttaagcctgaactatattgcgtatattttaatttttattgtatgtttcaccctcattgccttaaaaaacccaagctgaaaaagtatacttcctgttttctttgctttgaaatatcctgaaacttcatatcttttctctcttttttttttttgtcacttaaatctcttatgtgttgaaaatgataatagcagtgcctttttctctta

SEQ ID NO: 55240 - DNA, 1739 bp, Bovine  19866880575883
  misc_feature (1)..(1): n is a, c, g, or t
ncacgcaggagtggaattaaataaaaagtgcaacgggaacctgaattctctagttgctgctatttttcccctctgactgccagctttttagcaagttccactgcctggtagggaagaaataattaaactgcatttattcatcttttaagagcgataacgggtttggttaaggtgggagatgtagcagtaagcaactgaaaaatgagatgctttattttttctggctttctgatctttctggcccaggtagctcacataatctggagttagtgttgccaaatattacacgggacatgcttatactaaaaaagtgttcgtttttatctacacagttgattcatattatcacagtttcacagagcatctgtattttagttggcaaccattcccagagtttaatttttacagattaagacttgctgtcttagcacagaaaacaaggtggcctaatgcagtggttctcaaagtgtgttccccaggccactagcatcagtgtctcctaggaacgtgtcagaaatacagattctcaggcaccaccccagacctgcagagttagaaacacttcaggtggggtcagaagatctgtgttttgaccgccctgccaggtgattctgatacagcttaagcttgaacagggctggccaggaagccaggaacatagactgtggagccaggtcacccgagttcacctcctaacgttgatgcttactggctctgcggcttcggcccgtgggtccttagtctctccatgtcctgtgctttgttcctggggctctcctgagaactaaacggtgcgaagcgccgagagcagcgtctggggacgctgcgtcagtggtcatcctctgttcttcgccgagtctcacctgccctctctttagtgtgcgtgcatctgaaaggagtccttcccgcccactcagaaggtggtgagggagcgctggcaacatccatcagtgttttagtgctccgtgcttcctattagtggagcgtgagtgtcactgcattttctggctcgagaaacaagggaagttttttcagggagggcatctgacatgatcggttagctcagagagcaggaacaaaaccaggctcacggcgctggcagctgctgtcggctgcgctgagacgcgatggcagggtgcttagccagcactcccagtaagagggtctgtcaggagcccagtaagcagatgcagggctgagctaatgagctaagtggaaacagcacactcttttctcagaggctgcagacagagagatgactgttagtccccagaatggtactccgcagggaagagtgaggatctgtgtgctttactgcttcattattgggggcgtggggacgggggactcagagaagtcaggagaggccaggctagattatggccacagcgcatagactaatctttcggctcgttttcctttttttgttgttgtcgtattgtgtttttaagtacgcttgtagttttaggacattaaaaggagtgatcaactggttcccagctttgacttacagactagtgactctggcccccatttgcctgcaggcgggctaccagattacccagcagaggctgccgatcgctgtgaacgggagcttggcatacagcgtctatgtgggggaggaagccaagtcagatggtcaccaggaccgtgagggtgaagcagatccagctggagcaggacagtggcaaaagcctgcacgacgacctgcggtcccagacgctcattgacctgaacag

SEQ ID NO: 55241 - DNA, 2385 bp, Bovine  19866880592947
  misc_feature (1)..(1): n is a, c, g, or t
nctgagatgtagattaaaagctcaggccctctttctgggtgatccttggcttttgggcagccatgccctcagccacatggagaaaactgaaccagagagaagtaggaagaagtagggaaaagacactgagactctcagtggtataggagtttctagctttggcttccaatacctccttcacttctctcatacctttgaccatgtgagtcaataaattccctttccatatagttgaaatttctaataacttacaaccaaaggaatcctaataaaatccccaccacagtgacctctacatttctggtttcttatgcttactttcagagaaggcaatgcaccccactccagtgctcttgcctggaaaatcccatggacagaggagcctggtgggctccagtccatggggtcgctaagagtcaggcacgactgagcgacttcactttcacttttcactttcatgcactggagaaggaaatggcaacccactccagtattcttgcctggagaatcccagggacggtggagcctggtgggctgccatctatggggtcacacagagtcagacacagctgaagtgacttagcagcagcagcaacatgcttactttctgtacaaataacacttaatcacaagctgtcctaattttttgtgtgtcaaatacatgtctgtcaacattttttgtggccttgtagacatattaactcataacttttgaaagaatcccactaacaatccctagaagactgccaacagagatttagtacataaataacaattaccatgtactgattattacttccatggtaagcatttcagatgtgttatcttatttaaccctcaaggaaaattcctgctgtggggggtgcattataaacttgggcttccccgatggcccaagtggtaaagaatccacctgccaatacaggagacacaggagatgtaggtttaatccctgggtcagaagatcccctgaaggatgaatggcaacccactgcagtattcttgcctagagaatcccaagaacagaggagcctggtggctacagtccatgggggatgtggagtcagatatgactgagcataaaaacataaagaagctaaggttcatcccaggaaagtaacaggttcagacacaattattaaatagcaaagcagaggtctgagccagatttgtgtccaaactgcaccttctctccaccatgcccacgttgcctcccacaacaataaatacttgctaattaccttaccagagagtataattcaccaaagacctccatttaacccctgactctccactgacctcaaagtacatgcccttcgtcatcaagcatacttaatatatggatgcataaataaatgagctatatgaaaataagtaccttgaaaaagtcataatacaatttctccaaaattactactggcagcctgaagatgaaatgctggcattcctcttaaggaagaggtaaaaggatgaatatttaagacccctctgcctgaacaagatgtatacaactcccctggcggtgatatttcaaaacagcaaaaggagatttgtgagagcctgtcgctgtgagacacgccttcagctctgcaattgctcagaggaacattcctgtgtcatcattagacactaatagttattgagcactcccatggcttggaggcaagaacagaagccctttaggaagaaaatggctccatcttcttagctcagtgacgacaggccagaaggacaggaacagcaatttactgacagagaacccaaaaatcaccagttcccatctctacacgatctgcatccttcaggccaaggttttcgattccatgcttctgtgtccaattgctgctggaactactctattaaactaacttcgaggcaacaactgttttcagcatctacccaaggactttccagtgagaagtgtcccatacacgtgctggtgttgtctgtctctttttcttttcccttcctcactttttccactctacttgggggcttataccatacatacactcttctgaggaagacagtgattgttcctaagaaggccagagctgctatcaaagaggcacgctccttagttataagctggcaagagcagagccaaggggagagtgtgcccagcacacactggagaatggcgtaccccttgatgccacaggactttgctaacctgcatgctctggtgaaagacgagccctaaagcactcagcaccgccaccgacacaaaacgacttcagatgagactgtatgtgcgacagtgctcttcaagccacaaacagccaggagactctaaatcagtcctgctatagatgcggctgcaaggaaggcagcaacctgcgggacaggtgggtatgtgggtttggagcctgactcggtctggag

SEQ ID NO: 55242 - DNA, 727 bp, Bovine  19866880660597
  misc_feature (1)..(1): n is a, c, g, or t
nccaccccaccacgctagctggtcgcagagtgccaggctgggctccctgtgtcacacagcagcttcccgtcagtcatccgtgttcactggtgttgcgttcccttagttcctgatggcaggcctgccctgggaggctatttttactccttgtattgggtcactggcaggcccttctgatttggagactcgtgtcctgcagctctgagagattcatctgtgtcatctgtttgacaattttctcttgtctgcttcctctcttttggaactcctattaatcagaggttggaggtcctggattgattttctcaatttcctattttttcccccctactgtccaattcatcgtatgtgttattctttctgaaagatttgattttatattctgactcttctggacttttttttttccatcctaattttaaagcttctgttctgattgtttattttaacaaggtggtagcatattcctgtttcaaagatacagccaccttctcttatctttctgaggatatttataaaagcttttaatttttaaagtatttttaccctatgcgttatctgttgcctctgatttcgttcagttttccttttattttgggccctgtctgctatgttggagaatttcttcaaatgtctggtgatctggggctgtcaatttctatcttaaagtaaggtaccaaacgcgattaaaaggccttgcgactggcggccctcacactagggctct

SEQ ID NO: 55243 - DNA, 1262 bp, Bovine  19866880692700
  misc_feature (1)..(1): n is a, c, g, or t
ngagaaggggaagtaagaggatgtactcctggtcaagtatattgcaaagtgatagacaaatcacttgagggccaactgctgctcttctaaaaatatctggggaacattcacgtcctgtaattgctttcatgaaaagcaaggttttaaccagctacctattctaggaaagcaagaagagaaatttgcttttcttcctacctaaaaaggtttcctccctatgtttctggaagcctagttacttgtcacacaggtagggacccatggatcagcccaatagaaacccctaagatgacctaaccagcagagagggtgaaacgcacacattacctgagcccagtggtttttaaatacaatcatgcatgtttctgggtcaactccctgcaggctcaccgccctctggattttgctctctgtcgcaacggatgacatcataagccttcataaatcaaatgctcctaagtcatatttaattttcatgaaaatttggtaggcagccactaattttcaagtatcacagtagaaatgtaacttcttcacgtttcgttgtcaccttctgaaatctgtaatgacaataacaaaaaaaaacacacattccattaaattcatatattaaataggatatgattaaattaaaatcaaagcatagacattctcaaagtccagcactgagcaaaatatctacaaaatagacatttaagctcaatccaaagcctttcttatatttttctctcactttgctactaaaaatataaaatgatgctaccaaagctacatgaataaattaaaaaattattgagtttattctactaccaccaaccacaaccccctagattattattctaaaccattcaaatctagtttcaagcaataaagtacgattatcaatgttgggtggtgtttaaaaacaccaagaaacagaaaaatctttagttaatagtgactaaaataaatagcttgacataactcaggggagtaatagcacagcacccagactgccgggtccaataataacaattttttaaaatcagtgactgtcataatggaatttaaaacattctcagtcatttcgtggctaccaactaagttaaggtttctaacttccctgaaaaataaatataaaaatagaattccaagtaaccttgacaaatcagatagaaacgatccatcaaaaacaagatagtgcttacttagtgtaagtaaagcacagcacacttatcaatgaaaggtagcagtgttatttatcaatgaaaaatgaattatgt

SEQ ID NO: 55244 - DNA, 1344 bp, Bovine  19866880913041
  misc_feature (1)..(1): n is a, c, g, or t
ntttattctatagggattgctctgtgctgggtgtacttgatcagcacatatctgatcctgatttgaaaccacatgttgaaaccttgaatcatttctgatgtcacccacttattcccttaccctgactgtgtttctgagtttgtaggttaattggcctaatgcttaattctaagactgcatgtggtgtcagggctgatttgccttaaacatcatctgttctaaatactgcagaagtaaagatcaggtgcctcaggtgctgaccgaaggatggatgtgtggtcatcttaagaaaccgacatgcctctgctgtgtctctgttcctggagacactttattctagatcttgtcttcaaagtttggcaataaagcttcgatgattacaatggtagaaagaggtttggagggaggtatgacattcattcactcattattattttattgaaatatagttgatgtacaatattatgtcagtttcagctgtactacacagtgatttgacatttgcatacattaggaaatgatcactgtaaatctagtaaccatatgtccctatacaaagttactatgatattattaatattatctgtattccttatgctgtaataaatccctgtggctcatttattttatcataaagttttattatctcttaatccccttcacttatttttccatcttattccccttcctctctgtcaaccacccttttgttctgtgtatctatgagtctgttttcatttgtttaagattccacatataagagggatcatatggtatttatctttctctgacttttcttatttagcataataccttctaaatccatgcatgttgtcataagtgggaaaattttatttttattatgactaatattccactgcatgtatacatcacatttttatccattcatctgttgatgggcttgttatggttgtttccatgtcttggctttaacagtgctgcagtgaacatgggagtaaagatatctttttgaatgttgaaacattaaaaggatgcacagccttgtttaaatgaattgtgtcatttgaaatttctgggctgggtattgctcagagcagagcctaggatgaattggagaacattacctctgcttgttactggtatcttacattgataaggaacaggaagacctctggagtttttttttttttttttttaatcttgtacattgagccaggaaaatcacatttaggacaataatgatattaaaaataatatcttatctttgcattgtactcagaggttacaaagcactgttatacacatgagtgcctctaaataacctgaactgggttttcattatttactactgtgtattcaaaa

SEQ ID NO: 55245 - DNA, 1647 bp, Bovine  19866880936824
  misc_feature (1)..(1): n is a, c, g, or t
nccccggtcccgcccctctcccctgttctcatttgctctccagcccagtactttcacgctggttgtgtggatcattctagacaaactgaagattcgaagcttgtttgatttgatgttttgagagcaccacttcccccccagaacacccaggcagttaaaaccctgtcgttcctgcagtcggggctgtgcctgacagatgtcctgataactcagagcagaactccgtgctgaagtattagagtcattagtgctggttttgacaggtcctcgcgtctgtgaagaataagattgaacagttcgcctctgtggagagagacttccctggcctcctcatacaggcccagcaatacctgctcttccgcgtggacctctccgatccgagccccgagacacccaccaaaggtcagcgggtcctcccctgtccctccctgtcagcggctcctgttcccccagcttcccgacttggggtcctgggtgctgcagcagctcctggatgctaaaagcatctcaaaagaaaaaaaaatctcagaaaatatttcccttttcaccctgagtgtccttacaccaaaaggaaggtctgctccacccatacgcagcctggtcccactttggaggctctagcaaggcatttgttttcctaatgtagggtagttcagggcaggactgatgtgggagctgtttctagaatgaatgacttggcacctgtgggccagaaagaagccttatgtgcatattgtttggttggtgctaccccaaggagggcatccattttatttattgtgttttcagagacttttgagccccaaataaatgtgcttcagggctccagaaggtgaaagccgttcatctgggctccagaaggtgaaagccgttcatctggagcaagagaagtaaagtttatgtgcaccttaaaccttccaagatgcctttccatgggctctggagggctggccgatcaggtggcacaggaacccgaggactggccacggggcctggggaaagggctgcccagccttgattaagctctggtcacacagatttgacaacagctgtctctcttactgagctggcttatgttcatctcccttgagacaagtcaggcttctctgtggctggtggacagcagagagcagggctgttggtccgggctaaagcaagtgatgggaaacaagatgtggagtgagaagcaggaatgtaatttagagcagtgttacaccactgagggaagctgggaaggcccggccctctgacggcacgccctggccaccgtgtagctgtctgttcttggttacttgtcttcacgggacttaggcctcgactctcaagtgaaggtttgtctctctgtctctcgaggtctttctgactgcagaattcagggtgtgaaaggtgattagaacactgcaagacagactctgagagaaagggagccctgtgcccctggtgaagtgagggggaggcttcaagcacaggccgtggagaagagcaggtggccagtcttggatggaggggagccccccgtctgtgggaaagtgggctgcaggttccctgcgccctctgctagcctcgtgccagtcagcctgttggcttgtccctcctggtggggggcatgctgccgtgactcaccctgcgggagtggtgtgccagtta

SEQ ID NO: 55246 - DNA, 861 bp, Bovine  19866880978131
  misc_feature (1)..(1): n is a, c, g, or t
ncgtaactcactgaaaattcggttggcccgctcctctggcacattcaaagactctgaggtgacgccttacgaaaagcccaagcggcaattattctatgaaattaatgttacatgtgacaaacctgatggatgattaagatatagcaccgtaaatgctttaatttatagagagaaagtaattaagatttactaagtaaaaataaggcactaaaacgggtctttattttactgctaaccataaatttgtctcaaagcacgaactctctctgattcatattcaaagcaaaagttcccacacagataaattttcattacggtagagaaagctgctccccactgcctcacccccacattctttctcaccactgagctcttctgtcatcacccaaaacaaacacttcaaggtctgatgactaagcgtgctgaaactgctaagaaatttttttttaaaaagtggacttttaccatcaaaagataccagctttgggaattcctttgtagtctagtggttaggactcatcgctctcagtgccaagggcctgggttcaacatctggttgggaaactaaaacccccgaagccacacaggatggccaaaaataaaagaaaagagttaccagctttatgcagatactaaatatttatctaaatacacccacataaacatatatgttctttacacctaaggggtgttgcctcgggaaaaggagaaagaatgctacaatttctcttttatttaaatccctccctcacaaaagaggaagaaaaacaatcaaacacccatcccaggaaacaattcttgttcaaagaggaggggtgggtcgacaggtcagccccgagctccaaggcgcctctctattct

SEQ ID NO: 55247 - DNA, 1155 bp, Bovine  19866880979102
  misc_feature (1)..(1): n is a, c, g, or t
nttcgtcaggaaaggctgaagcacttttggggggccatccaaaaagttcttgccgcttcctgtcctggaggtgtcctgaacgggatctgaaaccagaaggcaggcagccgtggtgaggagcctctgggagcccttctgtctgcccttaagtgacgtgtgcgtgctggaagggggggagggggtgcggatgttcagttcccactctgactgcagtctaaagagcccccctctacttccctctgagacactcagatccacccagcagatcagctccagcatcaggcatgtaatgagagttttatcccaattcctatatgaggctctacaagaagaaactgtggcaagaatataggttcatcaggaaccctctgcgcctggggcgagacgaaggggaaagggaaaaggcgtctcctcccgccgagtcagccaagtgaagacgcaggacaacagggacaccgaccctccatgcctcctggggtcggggtgaccaccctccctttgccagctgagccctgaccacctcgcagggctgtgcaaggcggcctgagtcacacacaccacgctgcccacggcctgggcacagggctccggcctccagggcttcctgccccgatcccagccccttctgggtgggacctccagcctttgggaggaacagaatggatgaagccttttcgaggctagaatgatggagaggaagctgaatgctcctaagaccagactgggagctctccaccaccacgggcatctcagagcagcaggtggcttggacgttccattcaagcaaggtttccaggagtttcaatctcagtttcaataatgttcatccaagatgatatgaaccaaattttgtatatccaagtgatttgcattttcatatcgcatcagtttaccaattaaaatggttcagcttacctatttaattcctgaagatctccagccttcctatcgataggaattatttatgtcttcctccgcgcccctctccaacagactcattactccttataaatcattatattcaagctcttcattattttggctgctttttagaattcagccccatttctcaacattcttctcagagtgttgcttaactatggtactaaaaattcctgacatttatagtattttccacattctcactactatcgt

SEQ ID NO: 55248 - DNA, 1674 bp, Bovine  19866881001436
  misc_feature (1)..(1): n is a, c, g, or t
ntaaaagaaggcctggattcgaaatgtttcaacctgcttttgagtcctgactctgctgagtagccttggaagatgtacataatcttattggttttcatttgtaaaatgggcatggccatatccacctccattgtttagaaatgacgtgatacacatgaaaactctttacatctgtgaactgctcttcaaatgttattattagtgtacaaatagcagccacatttcatcttgcctaaataatgtcaactatcaacggactgctttgtattaatttcattctggagtgctttttttctgatttgggctagaaattaaaccttttttcatatagtatgtaacataaaaacattgaatcagtaggttgtatacctgcaactaatgtaatattataattcaactatccttcagtaaagaaaaaagaaaaaaacaaataatatacaaggaagcttgtaaaataaaataaacttctaattctgacaccaacatcttgaagaattaaaagttttcacatgatccctagggtttcagtaaacagactaggaagtcaggggaggaactcttttctctttattcccataactgttctcaagaaatcacaaacgtacaaaggtaaaatttatacaggtattttatatttctctcagagtctaaatgacatcaatatgcatattcttgatagaaatacagagtcacttgctcaaagttaattttcgtaacagaacctctaagttgctgacagaaagaaccaccataccactcatgaatgtcttttctacccactcaacgacagggaagtgacataaatgactgacatcttgatgtcctttcaagtggccccactaaactgaaagcatggtccaagccagaacaagaatcattttaagaagtgttctaagcacaatattcctttcagaaaatatgctagccccaagccctcagcacagacaccttctataaggcagactgccttaacccctagaatctcagtactgactgaatcatgacacaacacatttgcaaaatcaaagtaaattaaacacccacatagccagctctcttttctacactattagacaaaaaacaagtggaataagtgaggcattgacctctggcttgaacacaaatggaattatcctgccacacattacttaaaaatgcaaagcacagtctcaagttaatttgtcacttggagatatcgctgggcttttatgatgagaaaccatttgtgagaagctcttagcaccattttccccttaaccttttccatttatcttacatttactactcttccacagcaaacttttatgtgcaattttaaggctgtataatgtaagttacaagggcactagtctttgaaacccaaagaacaatctaatgaaaatgaggtgatgctaacaaactgacaatgacttgccctctcttgatccaacatgctgaaaaatatgatcgggtaggattctctgtgatactcatggaggagaaaagaagaggagctgggatcagcatttatttgactgtgaggtggggagattatatccataaaatctcgtttcaaaactgctaaaatgaggaacagccaaaaacaaaatccagttttaacatgatccattccctttggagaggaatgataatgttgggtgcaaggtgaacaatcggccctttatccataatgaa

SEQ ID NO: 55249 - DNA, 1833 bp, Bovine  19866881154130
  misc_feature (1)..(1): n is a, c, g, or t
naaattgtttccatgtttgtcttgaaataaagtttggggtcccatttgtcatttgtcctgtagatttaggaataggatttaactgtgtggggcagatggaaaagacaagagaaactgcctatcactgaactagattcagagagagatttagagtggtttcacaatctaggcacaactacccagctagcttcctaccttcccctaaatagagacagtacggttgtatcactttatataaaagaaaagatatttatttggctgagctgggtcttagttccagcacgtgggatcttcaatcttcattatggcatgcaaaatctttagttgtggcatgtgggatctagttctgtaaccaggcatccacctggggccccttgctttgggagtgtggagtcagcccctggacaaccaggggagcccaggctgtatcacttttaatgtaggcctttgaagaccagaaatgagaggactgtgtcgataatacactgctggacagttcttcgtgataacttctcgaaattggttcaaaacactttctctgcagagttcttttctgccagaataggaagtcaatagattatgtctgcaggtcagaaagcagatgtacaaataatgttgaaatatagaggtacatattagcagaagcctgaggtgtgactttggaaattatgttcttgtttcacttttcgaaagagaattttataagaaagctccctctctctgcaaatataaaacagagctgctttctctgatgcctgcctagatgccccgatgttctgtgcacatttgtctcattgggtgatacataggcccttggaagagtcggcctctcagattttgaccgtggaacatgatttacttcatcccttacttctcacacttccgtgaagcgtgaacacctttacttcactcttactcttgatgacgtctgcctcttagtttttagcctacataggagaacagtgctcaagtggccaagtagcttcaggaacttcatttatagggatctcttagtgaagacaataacagaaagtaactttttttgtgggtcttgagatggctgacttaaccaaaaaggcagctcttgccatcgcttcttggatatttggctaagatcagatgtagtatgggggcttccctggtggcacagtgttagagaatccacctgccagtacaggaaatgcaagagatgcagattccatccctgggtcggggaagatcccctgcagaaggaaatggcaacctactccagtattcttgcctgaaaaatcccgtggacagaggagcctggcgggctacagtccctggggttgcgaagagtcggaacatgactgagggaccgagcacacaccatatttgtgctttgtgtttcaaccattttgaagttcgtgctattatgttcagattatacaggaggaaaacagatgagattcagagaaaataagaaacttttaggtgcatattttgttcctgtatgtgttgaactcagacccaagtgcagtgtttctgatttagaggctaggcttttaattttttctctgctacattttgtgcggtgtttggatgcaaaatggggtattatttctccttaaccaaaatgcgtgctcgtgggggactacagaaacacgtacttacacgtgtgtgtacatgcatgtcatctttatatcctttgcatcttaacagtgtagctgcaccccacgaggtggggtaggtaaaagaataccctcctagttgccataaggaactttgactaggatctacagttgaaaaaatcagaaaataaaatttaagtgtggggtttacaaatatggaattaattactagaagaaacat

SEQ ID NO: 55250 - DNA, 794 bp, Bovine  19866881164033
  misc_feature (1)..(1): n is a, c, g, or t
ncacgctgggctggaagaccatgttggtgttgagcaggaaggagcgcaggaggggctgcgggtagctggccagctgtgtgatgatgccaatgagcagcaagttcacgtgcagcgagttctccagcatgttctccagcttggataagacgacgctgatgaacgggcctgtggaaggacacgaggctcagggccggctgggcacaggggcagtctctcctgaaaaccaaggagtcagggggaccaccgcggggccactgggggcaaatcaagttcagacaagtgcggctgaggtgaccaggtcgcctggtacctcaaaagcaaaccacaagacataccaaccgccacaaaaacaaagcagaaacccgtgctttgggagctagtattttgactctgtgagcagttttaatactttgaaaattatcatggaccttagaaaaaatgaccagtgatttaatttttaaaaccaaaatgtacttttcatactatttctgtatctcttggggctgccagtgctttaaaacatggcactcttcattccctaatggtgcaggctatagccaacagtgccaagactgtagcccgccaggctcctctgtccatggaattctccaggcaagaactggagtgggttgccattccctttgcagcggatcttccccacccagggatccaacccatttctcctgtgtctcctgcactgcaggcagattcttcacccactgagccatcagagaacccctcatgctatataggctgtcatgcaaacattcagtcagttcagttcagttcagtcg

SEQ ID NO: 55251 - DNA, 1107 bp, Bovine  19866881251133
  misc_feature (1)..(1): n is a, c, g, or t
naggcacttctaaaaatgactagcagctaggctctggcctcttattctgtagcaggatttctccattttaacgctgttgacgttttcggtgagattattctttgttgtagtggttagtagcgtccctggtctctacccgccagatgccagtagctccctcctcctgagctgtgacaaccacagaccgtttcctggcattgccaggtgtccccctggggaggaggagcaaaatcgcccctggttgagaaccactgccctgtagcccgtgagacctaatttcctgtgaaacatggaaacccaacttctgaagagttctgggtgatagagagttaaggaggaggctgtgctggtctcagtgtatttgcagatgtagctgactgctcatttctttcccctccccatcctgttagatgcttttgccaaccatgattcatggaatgatttttttgagctgagtaatttgtggcttttcagtttccttactttctttccttagctaaacttgttttggttttagcaaagtgtttaaaacagcaaagatctttgaaaatgaaataatacgtgtaatgatatattttctaagtagatgatttttaacaaactgtaaaaactttatatgcctgtccttctttgtatctttcataactcctctgtcagacaaattctctcaactctgaaggagagccttatgtaggggaagacacagcaacctttgaacagccctttgtgaaatctgatggtatggcagctggtatttaagaacttcttttctaagactcctaaagagcattttaaaatgtgactttcttctttctttacagatcgaaacgaacgaaataaaccagagcatcgttcttcaaggtatgaatttatagttatttaataactctttataaagcttctcttttaggaaatattatttggaagaagtgcaagtgtccctttttgaaacactgtatacttggaatcttccgtggccctcaggcttcacaagggaaatactgttcattctcagaacattctttataaaattattaactacctggaagacatgttttattttgagaatttgtatcagtgacaggtatatttttacagaaaattatt

SEQ ID NO: 55252 - DNA, 2588 bp, Bovine  19866881267637
  misc_feature (1)..(1): n is a, c, g, or t
ntgtgcatacctgctggttccttgctggctcccagtttccacctgccctctcacggtgtgaggctcacagtgctgaaagcaattcttccaactgaggatacgcatttctgtttatacagcctgagcccgaatgcctcccgcttgttggatgctcagctatgtctccaacttaatgaggaaagtaggttgatttctaatgagtgccttgctaaaggggtgttcaagaggaattttgagtctttgtatgtctttctttatataccgacattagagcttaatcgacagataagttctattccagtagtacagaatcagtttatcaatttttgataaccctgccaggcatagagtgggaatgaattattatgtgtatatgttaatagtatatatagcattattcttgccaaaacaaaaaaagtggccaaattcttcttttgcttccataccctcttctcagtgtctttgattttaagtggctaattagctcttatgcaggatgcttttcgggggaacgtgggaactctgtctaccactgtcttggtcccaggtttctactggaagcgccaactctagggagaaatagtgccaaatgcaaagtttatctgaagcaaaactcaatttaaaacactgtcttcaatttctcttctcttgcttttgctttctctttctttcccctctgtacacaagacatggatacgcacgtattaactgagcagagaagagttttaattaaagaagtatggatatcctgaaaccattccaatctgtgccagtcactctagaggcaagtggagataaattgaagcagaatatgggagagttgtgatctacccagtggaggcttataggtgaatcagtgcccttcctccccatgaagaccgcctctctgcattctgctcggggggctggcagccatccagtcactataagccaccctcgttgtgacagaggaactgcttaatataagttgttaccgtttttacttttatttcttggaagggcattacaataagatgaaatgctgtaccccaagcagaaattagagccttcattaccctttgttaattgcaaatgacacatgacttttctattgtggagtctctgaaaaaacagcaactaattattagcatttaatctttgtgcagagctagacgtttatgtgcgcgcgtgtatagacgtgtgcctctcgatccacgagagggagaaagagtaggtacccgtcacggaggtagagcagtgctccactcaggggtaaccagtctcttaccaggttctgtctcagcactccacagagtgatgcttgtggcaaaatgaggcttcagaacagtgcgatctgctgtcaatgagttgttgttattgtttaatggctaagtcatgtccagttctttgcgattccctggactgtagcctgccaggtgcctctgtccatgggatttcccaggtgagaatattgaagtggattgccattttcttctccaggggatcttccagatccaggaattgagccagcatctcctgcattggcgggtggattatttaccaatgagacccgtggaagccatgctgtcaatgagcaccatactttaaaaagaggaagtttaagaagcttacttgtaggtgtataataatttttggttttcaaggaaaatgatagtttgaaaggttttgtacaagtagaaaaaaatgctacaaaaaggccaaataattgtaaaaagttgttgtgaatgggggtgacactgctccagtagagctatagcaaattgcagtgctgaggtttttttgaatgagagaaaacttgatagtgagctatatttactttgactgattttgttttttctcagaaagaggttctcaaaaagtatcgaaaaccttatttatgcttctctaacatgtcattttcatccatatgtattccatcggcgttaacaacgtacatgctatgaatcaagttcgtcttcctttgtgtgttttctgttaaaacttttcagacattttgtggtcactgtaattgattccaatggcatattacattaatgtactcttttattgctactcatacgcaccaggctatatataatcactgtgtaggccttgccctttcccagagagacggagacttcaagtccgctgtgactgctacactcaagctgaacttatgtgcttcccttttcgttttccatgttcttttgcttttgttaattaaatatgttttcgaaaagtagtacataatcatggtaccaaagtccaaaagtaaagaagggtgcacggtgaagagcaggtctccctgcctctctgtccccagcccccagtgccccccgctgaggaagccgcctcagggtcttcgtgtgtcttcacagagatgggctatgcctttgcgagcatttagagcaacacatgcctttttctcttacacaaatggtgacataatatacctgctgctctgtgtatatcctggcagcctttccggtatcagttcatttagaactgcaacctttttaaaaattttaaagcaatttttaattgaattatgtatgttataggtatacaacatagtgattcacagttttaaagggtacatatcccattta

SEQ ID NO: 55253 - DNA, 1644 bp, Bovine  19866881267724
  misc_feature (1)..(1): n is a, c, g, or t
naaaagtcttgaggctctggcttccctttttgatttgtgcattaatgctgcggagttgacagcctgcttgagagaggctgaagagacgcgtgttctgcacatctgaaatttattcctttcactctggaagatgggacaccacataacggccatggagaagtaatttttaccctgcaacgatcttggcaccagttccagaaagacatatggacataatctttgggacatttgtagaaccttcccttgaggactgtctttgcaggcttgggttcacttcaagacctatggcactcactttagcttgggtctgtttctacttaagagataaaaagctaaattgtattccattggaagaactaaaaatattaatgtaagagcaagtcatcattatgacacatatcaatttctcacttctgaggtggtgcacagaagcagggccctggataataacccagccatgattaggagaaaagaggtctggtggatcttagcacacactgtgaaaatatgagttttcaccatgctgggagccagtatcttcggctataaactcacagagaggtgacaaaaatgtcttcttaggaatgaaaatgtgcttaaatgttattctgtaacaagctattctgaatctaagaccctacatatcaggtatatttaaggtatatttattcatatattatattaatatattaatttctcactggaacagatttcaatctatatacatttttattttaaaatagatgagatagcataataaatccagctaagtttcccctaagtttctgtgtgggtttagaaagtagccacttactcaatttaaacttcatttatggccttcatttaatactagtcctttttttccttgataagtctaatgtggtgatagaaaaaactcagaaaacatcaaagctcagccctatggaaaatgaccacgcctgccccaaaagtcaccccttaagactagctcccagaagaatgccagttaagaggtctgctgggagacaatttttattcatttactagtgttttgtgaatcccctttgagaaaattcttcggagttgtactactgggaaaaggagaaggagacaaactgcagagacagacattccctggggtatgaggtctcctttgctccatggttttcccccaaggaaacactcagaatcaccttgctaaaaaaaattgacttggctaatggccagctttaaaggacaggtttttgctgtttttttttttttttttgtctcagtggtcactacactatcaagatctaagtaaatgactgttctatgaaccttggctgagaaaaatgagtgaccacaaactctcctgtattccttctcatcatggttatatgtgaagtcagtcttatagaatctgatgatagatccagagacttatagatcttaaaaagtctcaagaagtcacctggtccagcctcctgatgctcaaggttagtgaagagcacactgcagggatgctgggacaccagctggctatcaggacttcagatgatgtttgggaatgcacgaacaaaatccccccacccacatctgagaaagactggagggatatgtgttcaacatgtctatagctttctttttgggcggaaacaagacggccaagggtccttagtttta

SEQ ID NO: 55254 - DNA, 1113 bp, Bovine  19866881339221
  misc_feature (1)..(1): n is a, c, g, or t
ntggttgctgtgttgaattaccctaatttaaaagtcttttccttgctattaatgcagattatataattttaaacccatttccctttttccagttcattgtacatcaagcaggtcaaaagctactatgacaaatatctacatccaacaggattttggattttaagccagttctccacacatgctgtcctttgtgcaggttccgtggaccaggtaccgttccttcttgtactcccctggctgcccccactgcagacgtgcagaggtgaccaggggcctcctggaggaagatgggtgaatgctcctcaagtgcttgggtgtgtttaggtagcataatgggtaggttcttgtaccctcacatcctggagcttggtaaggattctagctcctgaatcaggtcagagaggcaactggtggtcatggctttcctagacagggtggggagagagagagagtgtgagtgtgtgtgtgtgtgtctgcgcttgtgtgcagtggggtaggggatgcttgctgagcaggcggagagggcagggtggccatcagcctcctcccttccttcccttttcagctcaggggtgtgattggcatgtgtgatgtgtcgtgagtggaggtttccttctaggacagaacccacccaccttgccttggtattagaaagcatctgttagtgctccacctcagtgacgtttctctgggtgactgcaacactgctgacggtcagatgataactgtggccctgacgggctggggagagaccagtccaagcccctcactgtaggcctggagagcatataagagggaaccagggtctggagtgcacagaaaggctgtttttcgtggcatataggatgcatttcctttagctcactggagcacacactgtgacttccaattatgtaggcgtctagaaaaattagtattgaaaatccctaaagtatgcccatagacctgtttaccaatctagctgtaattatttattgatcgtgtgccatgtgattagacctgtccagcccctgctcagatagaacagtaaaatttggtccagggatttcagactcattctgtttgtgatttaggtttttagggaaagcccatttaccctaaatcgagacagaa

SEQ ID NO: 55255 - DNA, 1406 bp, Bovine  19866881460214
  misc_feature (1)..(1): n is a, c, g, or t
nccccccccccgcccccaccgtgttcgtgacacttccagtttaggcaccactgggttgcttaatgccctgaatgccacttctgaatactctggttggggtttttccttcacaggtgctggtcctttgtcgggtttatgaactgcatcaccttttgtgttcaggtagaaactattttgctcaaagagaagctgtctgttcacttcaggaacattcccatcttctgtgagcattaggtttctggaggagaggggaaaagaagccaacttagggtacggtgaataggagaaatacggccaaaacatctttgaaaaacaaaggagctttttgaaattcactcacgttgcttttaagatttttgcccgttggtgcacactgagattgctgttgcctcctaagaagcatcttgcttgctccatcatacctgactgctttgtttgtttttattgtcagtgtagcagcaggcactgtgtatgctctgttattgattggttgtcactgaattgtttcagaagtgatgatgatttattttaacgagtgatatccaataacatagaacatggatccagggttgcagagggctagggagataatgaaaaaagcgaggacaatgtaggaaatagttttttttcctgctgtattgggatggctttgagtaacctgagcctctaaagccatttgttagtttccgattatgtaatatttactgcttcctgaacttaaataaaatcccaccccaggcaaataccgtcgaaatgaaaagatagtttgatgccagtcatctgcacgaagtttcctcggtgattctcctgctgtcatcagccacttaatcccgacgggcgacgtttggggaacatctgactcctttctgtttctagtttctgtctgtaactgagggcaggtggtggttagtgtgtggtcccccacgcttcgctctgggatagtcctgcattatagaagcacagtagtagaagtcctgctttaaatgcaggggtgttattcatttgggttgactctccaatttctaattgtatagaaccctctccttcaaccactgggggatccctttatttgatttactcagaagaaaattcttagtttctatggaaagtgtgtatttgcaaagttgcaaattccaaatcactatttattctaatataatgccaagctacccaccggtgatatttgataaatagctctattacgtttgatccactgttccattttttttttttttttttttttacttcttcaaataaagagtagaaatctatgtatatcaacttaagtcatgaaatatgcttggtttgagctgtaagtagtcatcaagttcctggagtatataaaagcatcaaagcaggttgtttcttaaataattaatgatgagaataaggatacaatataaatt

SEQ ID NO: 55256 - DNA, 608 bp, Bovine  19866881539308
  misc_feature (1)..(1): n is a, c, g, or t
nacctataattctctttaattcatcagagaatctccatttccttctagcattcccaaaagtatgtcaactgaaaacagtctctttaaaataaggcgatctgctttaaaatactctaaaatgaaatcaagtgggcttttttcaaagtgtacaaaaatttttcaaaataactataaagtaaaagatatgcaggtaatccaactattacttcagtaaaaacataattttaaaagctatgcagggtcaaaattaccatcacaataaccaacacagtgatcttatatgaatccaattcatattgattctttacagaatctgtacaccatctgggctgagaatccaagtatatagatcattaaggtcaattacatagggggaaaaggttgtactccacgatgctgaccacgatttttcctaggtggctggatttcgggtgatatgcttttcttctgtgtggtatacatgcgtgtttcccaagtcttctgctctacaaaaagagccatgactttcattatcagatgaagaatgttctctgtattttacactcctgtacctaactacaattagaggatcagggtacattttctaaaaggccgggtccctcaaggag

SEQ ID NO: 55257 - DNA, 704 bp, Bovine  19866881630560
  misc_feature (1)..(1): n is a, c, g, or t
ncccgcattgcgagagtgtatgtactgcctgtcctatctgggacaagatcaaaattcagaattccatgtaccatttctactgaatgcatgtatggctttcaccccatcataaggtataaaaatctgaagttgaacaattctaagtgggaaaatatctgtattcatttttcaaggtctcatatgggcttaagattttcatgttatggtttgactctggttatccagccaggaaatgcgtgaaagaatttccttctatttcttgaacttcaaagaattttttttttcttgtttggttccgattaatctagacagtggcattctgtacaaagtaaatcagctttattcatgtcatgaaaagagaatttttgcatggctatctaatttttcaggctgattgaaaaactcagtggggatacaaaacacattgatttgttctttttcttccaaatcttacactatttgtcctcttgttccatattgtaagacaagttaacattctcctccttttccagttgttccacaatttcaagttttcattgagtacactgtatgtttacttctagactttgtcattttaattatttggagcatttgatcacatacagtcgccctgatgttcagcagcacggcctggctccgtttgtgtggcctgctgacagaatgacaggcagcgggagccccgtgttgtgctctgtagcctctcg

SEQ ID NO: 55258 - DNA, 1040 bp, Bovine  19866881826064
  misc_feature (1)..(1): n is a, c, g, or t
ncccttgtcaggcttgaagctcaggagtgagcccagggggctggagtgaaggtgcagaagggatgagccccctgatcacgggaatggacctgcagacactgaacgcggccctttttgtcttccaggtatctgatcccttgcaatcacatgatgctgagtcagaggtgggctgtgaaggagagagactgttactctgtgtctgcggccaagctgctcgccctgacccccgtctgttgctccagcgggatcaccctgacacttgggaaccaggagagggattatattctctggtcacagtgcaggcgtgacagcccaggtagggtgttgccaacctgcatccctgaccctttagcgatagaaagtgacaagaggccagaggaggaattcagcagggctttccgggcctcttgttgcagcccaagaacaagaaacagatgcccttgcttgctccccaagccgggggccaagctggtcccttaaacggggtgagggtggggtgacccgatagttaggtcagagggtggcttatgtgggctgccgacgcccctggtggtgctgtgccccagtaccatgctcagtgccctgcttttgcttctggcgccgggagagtggcagttcagttcaggcctttttgtgtggtgtttttcataatttgccccatctgtgcatgcatgaagttatttttagttccttatagcgtctttgtattctgttgctggaggggaggaggagatgcatgtccaggtgtaagcactgaagcatggggtcccgggtcccagcctgccaggcagccctctctagtgataatctttataaaccaaaggataccagattccatctcgccctggatgtgtgtctctctcggtagacagggagtgcggcagcgagtcccgtttcttttatgactgactagctaggggtccttttctgcttcttacagctgtaataagtattcactgacgtgcccagctctcaccccgtcagtgtccccagacctcagttttcactaggctttctagcagcatcctcagtgtacaagt

SEQ ID NO: 55259 - DNA, 1443 bp, Bovine  19866880552674
  misc_feature (1)..(1): n is a, c, g, or t
ntcttgcctggaaaatcccatggacgaaggagcttggtaggctgcagtccatgaggtcgcgaagagtcagacatgactgagcgacatcactttcacttttcactttcctgcattggaaaaggaaatggtaacccactccaggtgttcttgcctggagaatcccagggacaggggagcctggtgggctgctgtctatggggtcgcacagagttggacacgactgaaacgacttagcagaagcagcagcagcagctagaaaaacactggagctgcatcataaatgtagataactcatataaattcaaccattcctttttaccatcctttttaggtctcacaaatatttcctttgactttcaatctagagggagaaagcagactcttcaaaaggcctcattcccaacactatgaaacctctctttcagtgcttttgctattgagatagttttactttaatctgtgagattatttgattaatgtctactccctatgctatgttatcaagcaggggcccagtcttttttcaatttacttttgtgttcagagtgccttgcaaagtgcttgtctcatagtgactatttagtatttattggtgggtggataaacaaatatataaaacaggggtacagaggtagaaccctggcgcagaaatcatggtgacctagactagagaagtgacattggaactgtgggaacatggatggatttaagagattggaaggtaatgcagaacttggttattgattaaatgtatgcagtgaaggagaaaaaggcgacaaggacgacaggcagatatctggtctgagtaattggtagatggtagtgcccttcctcgagacagacggataaatcatatcccagtgcactaaaggacttgcagatgtaatcaaagaacaactgtcagtaactggtgagaaatgaaagaaaatgagaaccgcactgaaacacagggatcagatatgttttgaagagcctctgggagaattattaagaaactctgcagcttgatttagttagacatttaataaatccacttgtattaatttcctagggctgccataacaaatgaccacaaacttagtagcttaaaacaacagaaacttattctcccacagttccagaggctagaagtctgaaatcaaggtgttggcagaatcgttgtcactctgcaggctttagggagaacctttccgtgccttttcctgctctggagccttgtggcagtgtgactccaatctcaggctctacatgcatctcctttctctaagtgtcttcttagaaagacaccagtcattggatttggtctggacaaagacaccagtcattggattagagctctaagctctgatactttggccacctgatgtgaagagctgactcacccgaaaaggccctgatgctgggaaagattgagggcaaaagagaagggggcagggaggatag

SEQ ID NO: 55260 - DNA, 967 bp, Bovine  19866880605690
  misc_feature (1)..(1): n is a, c, g, or t
ncagagtaaatctatgtctactttcccctggaaatgagtatcaacacttctattctgatgtctttttgcacagtattagacattaaacacttgacattaaattcttgcaatccaattgaaataatctgccttaaatcaaggcacctgcacattctgctagtctcaagtatctaccagataaaatgcccagaaagattttttttgagagaaaacaaaggtccagtgatgaatttactaaatgattagatttcataaatatttgaaaatatgaaataggagccatctctgccttcactgaacttatatcatggtaagagaaacagatgatagattcatatacatacaaacatatgcatgtatgatatattaaacacagtatacttatgtgatggtagcttccctggtgcctcagtggtaaagaatctgcctgccaatgcaagagatgcaggttcagtccctggattgggaagatcccctggaggaggaaatggcaactcactccagtattcttgcttggagaatccaatggacagaggagcctggcgggctacagtccatggggtcacaaagagctgactctgacttagtgactgaaaagcaacaaaatttacattatatacaaaacatagttttgttccatagaaaatgaatgcaaaaataatgtgatgtttagatttcccaccccaccctgccaaaacaaaaatcttagctttaaactttttggatacattattaaatttctgagtctcagtgttctgaaatgttacatagaaacagtgataactaccttgaaaactttctgtgaaggttcaaatagacaatatgtaaaaagtttttgccatttaatatgtggtacctagtacctgcttggagaaggaaatggcaacccactccagtgttcttgcctggagaatcccagggatgggggagcctggtgggctgctgtctatggggtcacacagagtcg

SEQ ID NO: 55261 - DNA, 1258 bp, Bovine  19866880642644
  misc_feature (1)..(1): n is a, c, g, or t
nactgcaaggagatccaaaccagtccatcctaaaggagatctgtgcctgggtgttcattgttaggactgatgttgaagctgaaactcccaatactttggccacctgatgtgaagaactgactcatttgaaaagaccctgatgctgagagggattgagggcaggaggagaaggggatgacagaggatgagatggttggatggcatcacagactcaatggacacgggtttgggtagactctgacagctggtgatggacagggaggactggtgtcctgcggttcatgggatcacaaagagtcggacacaactgagtgactgaactgaattgaactgaatgacatggtaatagctgcatgatatgccaaataactggaagtaatattattgttagttttctatttagtttagtaatccgtttcctattaacagacttataggctattttctttgtttttaaaaataatgaagcaaacatccatgcacattattttttgtatatgcatgcatttatttgtagaatggattttcagaagctgaattgctgggtcaaatggtgggtataataaaattttaataaatattctccaattgacctccagagaggatgaaccaatttatataaccactaactatgtgtttgtaattatttccccacacacttaccgacattgtgataacttgcttttgtgcaaagagtaatttttttattgacattattcacaatttatcctctattactctcaccgccccccccgccccagtggaaatgacttgattcaacaaatatttaatcttgtaaaactttgttctgttgaagtatagtatcagatattttcagaagtcacaattcattagataccgtttctgcccctggccagatgctaatactattgagagaggcagactcactgtggcttcagattatttttcccaccttatctatttgtaataacttttgtgaccatcgtgggactgaaataagcaagtttcatgaatattttaagtgagtactagaagtttcatgaatatgttaagtaggtgtgagaatttccatgaatatattaagtagaagaataatgaacatggatagggcatcatagctcactaacctccatctcctacatgttcttttaataccatctgcatctttttttcacggctacaagctagtacaagggaggtgtgactgggaatttatgatttcatgcctctttcacagatcttcctgggcagctgacttacaatctcacctgccaat

SEQ ID NO: 55262 - DNA, 900 bp, Bovine  19866880719069
  misc_feature (1)..(1): n is a, c, g, or t
nccagaatttattcaggtggtcatgtacaacccaacagatttcagtattatatggccaaatgctaacaaagcattgtgcctggtttgccatgataacacaacagataagtacttaacataactcaggagggcttctagagatgaagacattttggcagagttttgaaggatgagtatcataattatttgttcacatgactgtattccctacgtgagcaaaaccctttatttcagccccattcatcttctttagactcccagccaagtctaaaaccgaataaaatatcagtaaacatttgtgttgaatgaatgattaaagtaatgaatgaatagatttattagccacgttgcctaatggatgctggtaggtcaaatggatcattgtttattttctctgaacagctcacttcactgacaagtttaatcaatcaagaaaagagaaaaggaagctattcaaattaaatccatgttgtgccgtttattgtccgccttgttgttcagtttagcgcacagcccactttcacacttaccctggaggaataatctacatacccgcccacactgtgatgtgggagaagccttgagatgaagggaatttgacatcacccagatgggtagttttaaggcagcgtcatactgtaaaagggtagatattcccaggtggcgcttgtggtaaagaacctgcctaccagtgcaggagacaaaagagacatgggttcagacactgggttcagaagattggctggaggagggcatggcaacccaccccagcattcttgcctggagaatcccatggacagaggagcctggcaagctacagtccacaggatgacaaagaataggacataactgaggtgatttagcatgcatgcaatgctatgaaaggatttcagattcaga

SEQ ID NO: 55263 - DNA, 1189 bp, Bovine  19866880888982
  misc_feature (1)..(1): n is a, c, g, or t
ntggcacatttaaaacagtgcaccatcagatattactagtcgggtgacattggcacacaaacctctgcccatcatgaacccatggcttgaactggcagggcgggtgctcagagggaaggctgacctgtttttattactcagaagaaatgaactgttaccttttacagacacatgttttaacgggctcaacggagtggcagacctacgcactgaagtggaggcagcactccacaaccccaataaaggatacagctatatgtacccgcatttatcttctgacttcgctttcttcaaagactgaggatcctcaacattataaattacattaatatttctgaacaaacataagattgatcggtgtgtgggatttacacatattttcttatgacctaaaggggttgaatgctccatgttaaatacaaactactaaagtatgagagatgtatccaaacaatacatgtctaatgaagactatccatcacatttcagatcaaaattaatgtctgtgcaaccaatctgcaagcctgtaatattttagaatccctttcaatgctaagccctacttcactctaggatttgttcttatttactatagtcttaataagcagtacttcattcttcgtgtttcaaataatcactaatggaaaaagaaaaaaaaaacccataacagtttactctgtaactcaaggataggcaagggacagtgtctttcttcctctgaagaggtgtttcatgctaatatccaaagattactcagcaatcccacggaccttccaagcactaagagcaaatgttcatgtactcgatactcatattcagtgtgacacttgaattaagctaatttattcagcacaaacatgaccttgaattatagcataatattttaatgttgtgcttaggaacttaaatccttgggaagaattttaattaggggataagaaaaggcacttagtttggttcattgacttgttgctgttcaggaaataattggcactgtttgcacactgtgtggagggtttcacattaaagaatcatttggacaaatttatcaagctatattttagagtgggagtaagtgagtctgagattcttagttctcttgctcatccatgaatgaaattaaacaatgcccgaaggtttaaaaaaccctcttttgaaagcatatctttggtagagatccaatattttg

SEQ ID NO: 55264 - DNA, 3122 bp, Bovine  19866881139556
  misc_feature (1)..(1): n is a, c, g, or t
ncactggagtgggttgccgtttccttctccaatgcatgaaagtgaaaagtgaaagtgaagtcgcttagttgtctctgactcttagcgaccccatggactgcagcctaccaggctcctccgtccatgggattttccaggcaacagtaccggagtgggttgccattaccttctctgggaaacccagaaatatgttttatgtttggatatagtacttgagaaaattctcacgcagcaggatacatagtaacctggtcagaatagcacacatcttgttggattaaattctccccaccgtttctaatatgatccagttagatcccaagagacttcccaggtggcgcagtggtaaacagtctgcctgccagtgcaggagatgcaagagatgcgggttcaatccctggattggaagatcccctgaagaaggaaatgaacccactccagtatccttgcctggagaattccatggacagaggagcctcgtgagctacagttcatggggtcacaaagagtcagacatgactgagtgactgaggacacacagttaggtcccaagcagtgattgaattatcctacttactattagaaattaccattcaagcatttgtgtatacattttcatcataacaaatgggtgaaaaatatctcatttaaggaatatactttctgctagcatagtgatatctcaactcctgttaccatcatttgactcttgcccatctctcccttacctctatgtagcctgtaacgaaatttgaagttttgtcatagatggcttggttatcattgaagtgaccttccaacttattttctaatttaaagcatcagctccctaaagtgtttgtgaagtgtggccataccgatccttgtaaaatggaaattcattaccagccctcagcttctgagtttcgtggatccctttgccatgttccacagttccatctccacatgcctttggctccagctaccctgtgctgcttacagatctctgaatatagtctcctgcctgtgtttccttaaaggaaaacagccatctcttgcccagtgatgtcacctggaaaattcctactcatctttcaagtcttaactttcaacaccactccctctgagaaggcttcttccactcagctctgacagaatgaggtccttgtgttttcacatttgcatagcagactctgtattccttggtcatagcactttttgccttgaattacaattattattactaattgcacttattaaacttcaaacattggaggaagtattttatatatttatatactttggcttacttcagataacaacccaatgagagttgttcttttagtataaagaaggctcaagaagagcaaagggaatgtcccaaaattaaattattagttgatcaagccagaaataaatgggagtcagtgtacttaaggttatgttttgaattattgtgtgattttgttcccctaccagactttgagttcttaagaatagggacagtataatatttataatcaatctctagcctagcagagtgcctaccatgtaaatgcatgcttaatgaatatttgtggactaaatgaagaaagagtttatgaaagaaatgaagaaagtcctgctaaataatgttgtattaggatagtaactgggcaaccaagaaactcacttaattagaataagttttatgataaatgtcacctatcacttagatttattttattctttgctttacttaagaattctgctaagagagctgcattctgaacactgtagtttttatatgcaaggcttgttaaggcaaagtgttaggtgattatttattctgacagatttaacaaactgaggggatcctgtgtcaacttgctactctaagctttgcacttgcacgatctcacttatgagtggtatcaacaatgcttgagtagaggttttgaatttcttttgatgctgttttgtgaaactgatggtctagaatcagtaagccaaaaaccaagtgactctcaagtgctgttttcacatcttgatttttaaaagattccttacaactggcgttatgtaagaatcaattttataggcaggcattcaaacagtcttcacctcaaggtgctgttcaactactgactaatagcaaatgcattcagacatttatttattgtgcaaaacatgatgtcgaggtcagaattgctaagggaacactgaggagagagtgatgaattctgatgaaggagaagattttctgttagtgggaggcatctaggtgctgaaaatgtaagattttgtaggtggatgacaggtggggaggaaactccatatataatggcagaaaagcaagaaaagttcagggtaaatttggaacatggagaggaataaggtgtgattagagagtaggtgagatgtgaagaaatttgatagaaagaagataggcttttaaactaatgaagttgtggggagaggaggaagagtggcagataatttcttatgtgctcagaaaatgcagatattttaaaattttataattgcatattatatatatgtagttttagttatcaagaggcaatatatgtggcatacaaaatgtactgacttacaggatagaataattaaacatacatactgcttcttatgaaacttgaatactctgcatgagatttctcagtatcatcatttacgcacagcagtgatcagtgcattggggtggccaaaaagttcgttcaggtttttctggtaagatcttaacagcaacccaaatgaacgttttggccaacccaataccactgtaaaacatatgctgcgttgttcaaaactttttttaaagctagtttttaaagacttctcaccatccttcttattcttgaagactcatgatattatactcgtcatggttacatccctgaacaagagcccttatcttagctttagtttacatgtgtatgaaggcaatataaaattactttcttgtagacttattactggttgttgttaacgtgaaactaaagtgtgggttgttgttcaatcactaagtcatgtccaactctttgcaaccccacggactgcagcacgccaggcttcccctgtccttcaccagggctcaaactcaggtccattgagttggtgatgccatccaaccatctcatctt

SEQ ID NO: 55265 - DNA, 1565 bp, Bovine  19866881255482
  misc_feature (1)..(1): n is a, c, g, or t
naccacagcacaacacaggagcaacagagagtaaaggatagacgagatcactcatagatttatgaaccaggaactattagaaactaaggaagggagagactgactaccccaggaaaactgggaaggcgtctaatattggatgcagtgttgtatgtacaaatacaatttgatgcgcaaataaattagctatttaggcaaagaaagcaattccatttaaagaactccagtggaagaagacaggtcatactgtaagcagctcactttcagataaaaactaaaacacagtattatgggtacttttgaaaagaaaaaaaatatttatagtctgacaacctcaaaacaaaagtgattctcaacttacacttctcaagcctatattggaagactagctctgtgagtgctctcttctaggtgctggtatgtaaagatataatccacgtaatccccacttgctcagtctagagatagggagttgagaatatcacaataagaatattgtctattcacagccaagttgcgtttttagggggaagtctctttttgagtaataaccacctgtagttgttctttataagtcttcttggatagatagaaaatacgcaggataacagctgggccagtatagctgagatctgtctactttatcattcagatgcatgtgcacatgtcatcatgttatttatctcatttcttctgagcaaactctcagcactgtaggaaccacctcctccactgatgataccactgctggtattctagaattgattaaagtaggccaggaaagtctcccaggggaagcagatgaagctgtgtaaatgcagcctgcttgttagagttgtagcccatcagtggaatcagccctggcattgatggatgactgctttgttacagactggctggtcaggcccctgaagaagcccaccctttgttcattgccttgtaataaagccccactcttcaatggcaccagccgaggctgtcacctgccagatcagtttgcttctcctaattctcatttagacgggtctacaataacttagcagctgtcttgtgtacttgggcttaactacatgatttcaggggctacacttgctattctttgggactgaggatacaggaaaaataatagcattttatttattcagaattgagttggacaattcttcagagatagtttaggttaattagtcttctgatttcacagatgagggtcagaaaggagagctgactttcctgaggtcacccagcctggctgtgaactgagctggcactagtcagatgatttctttgctagtcagatgatttcttcaaggccagcacattcccactacattttaactgataataatctagtaacattttataattttttttaaatgttaggggatgcaataacttttttgaaacttcaatcagaaacattggtttgggacttttgaaacaggaaggagagaaattaggctgagagacccgaggatggaaatatgaggtgggcatcatgacagcaaaagggaaagattctttcattggtttcgatctgtctactaatatccatggacagagaa

SEQ ID NO: 55266 - DNA, 1152 bp, Bovine  19866881342450
  misc_feature (1)..(1): n is a, c, g, or t
nactcagggattgaacctgggtcttttaggtctactgcattggcaggtgagttctttaccactagcgccacaggatatattaatgaaagtgggggtgggtagtgagccttagtcgctcagttgtgtcctactctttctgaccccatggactccaaggcatcttcccagtccagggactgaacctgattctcctgcattgcaggtagactctttaccatctgagccaccagggaagccccatattaatcaagagactcccccaaactgtggtttgtacaagagagtcatttatatctgcatagtagcccagaggcaggaaggtggtccagagtgaactggtgggttttgttccatgaggtcatctaccaggatccatctattttgactctctgctctctcctgggatgtggttgactaggctccctgacactgtatcaggcttctgttttagggaaaagggaaagagagaatagagaggacagcacttgaagaaaaaagatgcaaagtttgcacattttgctactgggcacttgatcagctgtggcacgttttacgaccagtgctcatagtcccttagtgagaactaggtcattgggccacacctagtgggaagcttagtagtgaatctctgggtgaccaggtgccctgtacaaattcaggagctgtgggcaatctgacctaaaacagtgggtacccatggaacatatagtagaacacccagcccacagaaagcaccccaccaatacacatatgagtatgaatcttatgcgtatgagtatctgcaggtagcacagtgttgaagaatcaggcagtgacgagcacaaaggcaagttctaccatctgtacagaacatgaccttggaaagatgatttcttctttgagattcactcaccccattttctcagacagaaactacaatcccttacctcactgtgctttttacgataatggagggttgcccaatttaggctacctgcaaccccaagtcagattgcattttgattcttttaatcacaatgaaacaggagatattcaaaattagaatgtttcacatgtcattaattccttatcaaattcaactccaagcaacatgctgcaattactgtacaacttttggctctcagcctggagacaggaatcttaatcctaggg

SEQ ID NO: 55267 - DNA, 1873 bp, Bovine  19866881393224
  misc_feature (1)..(1): n is a, c, g, or t
nctcctcccaccttcaatatttcccagcatcagggtcttttccaatgagtcagttctttgaataaggtggccaaagtattggagtttcagcttcagaatcagtccttccagtgaattttccaggttggtttcctttagtattggccagtttgatctccttgcagtccaagggactctcaagagtcttctccaacaccacagttcaaaagcatcaattcttcagtgctcagctttcttcacagtccaactctcacatccatatatgaccactggaaaaaccatagttttcactatactgacctttgtcaaacaactgatgtcttttctttttaatactgagatgattgggtagcatcactgactcaatggtcatgaacttgagcaaactctgggagacagtgtaggacagggaggtctggtatgctgcaggtccatggagtcgcagagtcggacatgacttagcaactgaacaacaatcaaaaattttaaacaatattagttggctctgtgatagcctatattctcagatttttctttacctctgtatatctttcctatctcctttaagggtcatctcattgatgcaatgaatgtatatgatgtataacctttcaattttctttgttttcgagataagtgtacagaaggatggcactgaggcagtggagtagtcgctaccgcttccaaacaagggagcatgagatttagtatcagacacttccaatttcagagtctagctctgcagtttctgagttctgaccttaattattctctcagcccattttcccgatctgaactctaatatgcttgcagtgacagtagtggatagcactgctatccacctcttaagggatgttttgaagcttaaatgcttcctaggtggtgctagtggtaaagaaaccacctgcaaatgcaggagacatgagattcgggtttgatccctgggtgggggaagaccacctggagggggaaaaggaaacccactccagtgttcttgcctggagaagcccagggacagaggagcttgccagggtgcagtctgtagggtcacaatgagtcagacacaactgtagcaacttagccagcacacacggagattaaatgagacagtatacatacagtaaataggtgggcgtttggtaactagcaaaagatctataaatgtttattaagtaaagataaaagtaaactcttctaggactcgaaggataatctttttggtatatactgatgtattctcagattgataacagagtatatcacttaaagtaatatataatgcggaaaatctccaggttgtactctttgtctgaaatagattctcttgttctttctctcaaagcagttttctgttttctttgaaatttagagactgaatctttagtgagggcttcccagatatcctacttttctgagacagatagtcaaagctctgaaaacaaaagaaaacaaaagctctcctttcctcctctgtctggaggaaaggagctgtggcgcttgctgcctgagggaaatcttccccttttcctggcattttacggctaacaatgcctatgagtctcatttcagattctgagtctcctgagtagatacaatgcttccctgagtctttcaggattgaaattaggctgtccggatccatgattctgtggtttataacagaagacataatcagacatggaacaatttgggtcttcttttttaaaaattttgttgagttttgtctgcactgggtcttcgtggcagtgggtggctacctagttgcggtgcgtgggcttctcattgcgatggcttctctccttggggagcacaggctctagaacacgggctcagtacttgtggtgcttagttgctctgtggcatgcggaatctt

SEQ ID NO: 55268 - DNA, 1465 bp, Bovine  19866881433003
  misc_feature (1)..(1): n is a, c, g, or t
nctctggttttagttttataaccttttttccctaatacatgactatttaaaaattgtcagggacttctccggtggtccagtggttgggaatccaccttccagtgcagatgaagggtttgatccctggtcggctaactaaagccccatatgcggtgtggcaactaagcccctgccaccgctgctgagcctgcccactgcagagccaggtgccacaactaaagagacatctgtatgccacagcaaagagcctgtgctccacaacagagaccctgcatgccacacctaagaccacaaaaatccaaacacataataaataaaagattttttaaaaaattgtcctatgggcatcctttgacacattaatttttcaaatttccaacatttaaatttttttttctttttttttctttttttttttttttaaatttattcctttatttctcatgtgttccccatcctgaaccctcctccctcctccctccccataccatccctctatccatgggaaacagatttttaagaactgaagtaatgattttttaataatcagttgacccattcactgaataatttcagtacctcagtgactgattagaaagttagctcaatgatgtttctctttcccgttatgaatgctgtgtttatgttctactcacacacacacacacataatcctagaaacctttacaaatccaacataatgggttaagtttgctaacacttgttttctggtgcaaattctaatacatacatgcacatataaatatgtagaatatatataatatgctgggttagaaaatgtctgatttactgattctaacacctctatcttaactgcacacaatatttacaatagttatcgtgttgttcctttctccttttaaaactaaaatgcattttgtaaccataagtctaagtcatgagacttaccgtgaattctctcagggagaatttctgcctggccatatagcagttcagaggaatgccttgctcatgagagggaatgaaattcccgtgctcaactgtgagtgtgattggatttacagattaacaaaatgagaaagatcaaagccctgttatcaagcagacctacaagtctagagcttgctcttcgaagaaaaattgctctgtacccttaatctttctaatcttgacctcacagtggggttttatacttaagacactgccatcaggatgcaaaattcaacctcaggccacattccactttctcttaacgtgggtgtacatgccctcagtgacttaattggcaactgtatggaaacttcaggcttcaaacagaatttctaattccatctaattccattaaactgatgttcagcagagcacactgatatttgcagttactaaagaaataactaggcacacatgcttacttttaattaatcacagtctcttttttccccaaatggtatggactttgatgttctcatctacactacatctt

SEQ ID NO: 55269 - DNA, 556 bp, Bovine  19866881643531
  misc_feature (1)..(1): n is a, c, g, or t
ngtgtagcctagatagtttcaacttcaattcggaaccatgatcatgctaatagggacttaaaaaaaaaaaataactggagagaggcaccctggagtttcctggcttcatggtacaccttcaagtctagctttcctctcttgtaaatctgcagctctagtgctagaatgaagagtcaagtttatcacccagagcctgaggcactattagatgctaagtgctaaatgggaattcaattacgttctggccatcctatttactaaagcagaaaattgggattatttagtcttcaagcagcgtttctcccttgtgggtagggagtgggcagagactcttcccctggaggacgcatcatattctgcagaagtgtgtatgaaaacaatgtatttaatattacattataaattttaaaactgagacaccacccagagtcattatttttgtgatgtaaactccatcaggaaggtggaaggaaaggtcttttatataagaaaataaactttcctctgtctctcaggatttcattaggaagacaagagcaaggcccctggatgcatg

SEQ ID NO: 55270 - DNA, 1830 bp, Bovine  19866880703352
  misc_feature (1)..(1): n is a, c, g, or t
ncattattaaaagatgtaatatcctagtgtttttttttttttttaattaagagtcaatgcttacatatatacgtaaggactgtccctccagataggtaacttaagagacgatataagagacttcacctcaaaccatttttattgtctcctattacctttgtaagtggcagagagggtaacatgagaggttttcctgctggagaaagtccctcatgctctttccacccaggcaaggttcattgcctctgcaaactgatccatttcacccatgcccgactgaaacacaatgcatcttgttctgctgaccaaaaagtacttcttccacttgaagttaaaagatgtaacttttttcattgtaaaaagggatatatatcaaagtggaagtttgaatgagatgtagcataagggcctattttctctagtttcatggcttgtagctctggccatgtgtgtcttggtacatgatgcgctggctttagaggtggaaggcacaaagcacgttcttcttgggggtggggggtgacacaagcttaatcaagaaaaaaattgtcctgagtctcccctattcaaatcacttgggtggaacgtttgcctataatacaatataatggccaaagtgttcaatgcatagtttatgcctagcaatataccttgaaaagcttctgagctagaatgtagaaaatccagttagctttattaatatttgaacatatatatttccctatgaaatatatacttgcagcgtaaacagattttaggccatatttgaatatgcgtcactttgcagtttgaatatttccattgtgtcatgaatatggcatatttcaatattttgaataacagaggacagaaaacagaatatttgatttgtgtgagcctgctatgcgtgtatattgctttctcagatgaagtatgcctattctggtgacccaattagaaatatgctgaaataatcaacagtaatttggagagtcagtgaaccaagggatctgtaagtaatagcaaagctgattcaatactggtgtttgcctcaagattgccccatgtcctacacaagtgctgttcaaaattttaaactacctcaggctaaaacctgttaaatccattgtcagttcatttgcaaattcttccctctccctaacctgaaaatgtttgagtttgttaatccatttagtcagcagttgactggaatttttgcttaccttaggcaaactggaaattgcctactctttccaaatcccatccgttgactcacacaccggtcattttgcattttgttcccagtaatgttttgtgtggggaggggaggagtggccacctgctctgtctctgtggtaaagtcagacttgcatttagaacatgccctgatttaataacaataagcattctatccaaatctgctgtgagactctgatgaaattctggttcaaattagtcagtgaaccaactattcagaggttgtcagagtgctgaggctgtgactaaagtcatttcttcttcaagctccttggaggcagcataatgaagtctcctggttggaggagggtagaaaatctattttgaggtgtttagaaaagataatgttgcaggtgccagcatgcacaaatggaattccaatcatattgtgtctgaataggcaaaaaaaaaaatgaagaagtagattgtattaaaacaattcccttgctcacaatcatctgttgcacctgccaagttaatgtggtccattagcatccccaaatcattagtattttaatgaagacccaatccctggtatagttaacactaacttagttggtaaatgctgttatttttactccaccatcatcagcc

SEQ ID NO: 55271 - DNA, 1497 bp, Bovine  19866880896422
  misc_feature (1)..(1): n is a, c, g, or t
ntatttgtttatggcgatgggattaagcatagtgggacagattcttggattgcctaactttgataagggaggaaaaggaaaaagaagctctgacaagtcaatgagcatggaaaggggaaaacagaaaatttgcaaatacatttaccacaggatttcctgatgttcactgaggaatttaagtttctgtcatcaagaaacttaaaaatattttaaaggacaaagcatgggcaaaatacaactcaaataattatgcaggttcggggcttcccaggtggctcagtgataaagaacctgtctactaatgaaggagacatgtgttcaatccctggttgggaaagatcccctggagaaggaaatggcaaccactccagtactctcgcctgggaaatcccatggacagaggagcctggtaggttacagtccatggggtcgcaaagggtcagacacaacttagagactacacaacaacaatgagggtaacggttcactctcaaagttagtggatcagagaatacacgggaattcaaagcactggaggtatctttgtggactgatttctcctcatcagtggaggcccaaatgtagaaccaaaaagactgtcctgcaccaacatccttctcccattcttattgttatgtaaaactgtggtaacatttcaaaatctcagatattcttattctgcttattcttgttgttcagtgactaagtaatgtctaactctttgagacctcatagactgtagtatgccaatctttactgtccttcactatatcctggaatttgctcaaactcatgtccattaagtcagtgacgccatccaatcatctcattctctgtcgcctccttttcctcctgccctcaatctttcccagcatcagggtcttttccaatgaattggcttttcacatcaggtggccaaagtgttggagcatcagctttagcatcagtccttccaatgaatattcagggttgatttcctttaggactgaagtagtttgatctccttgctgtccaagggactctcaggtcatctctagtgccacaatttgctatttttctgcttaatagggtagaataactcatgccagaaacataactgtgtcacccaatgggtgggaatatgttatagaattttaggtctctaagacagacagaaagaatgagttactctgtttaagactgacagcagcagcagaaactgacttagctggcagtcctaaattcaagccactcttatttctgcaggttttgtttgtgtttaataaaaatgatcacttctcacatgtttatattcaaatagggactcaaaagtcaataaatgcatctattcattcagttgagaaaaccaattttcccagtgtgtgcacatgtgtttgtggtttgctaactttttttttttttttttgtctttttaagaaatacatatgctgtagcttcaagggtggaaaattttatacacttctatagtgaggaagttaaatggtaacccttttgcat

SEQ ID NO: 55272 - DNA, 1067 bp, Bovine  19866881224364
  misc_feature (1)..(1): n is a, c, g, or t
ntaggcagatgctttaccgtctgagcccatcagcaaaagttatctatgtttgtgaataatcaatcaaatgtaatcacagtgagtgatggattcattgtagagaatgagaaaggaagatgttatatttttaatgtgaatgggaatggttatgagtggtatggccatatttcaaaatggagatgaaaaaacaaagaaaagtattgacaaagaatattatcagcacaattttaaattgactggactttagccatcatttaacccaacttgctgtctttattgattaagaaatctctgaagtctgtaaatatcaagtaatccatagacttagcagaagagccaatcttagaacccagacttactaaaccttaagtccctaggtaacgtttctcagagatgaaataactaggctcttgatgagatggttcaaatggtaaatgaagactgtagaataattgtaggactaaggggaaagacgacagactggagaggcatttgcccagttttcagtgaggatgaagagctaacctagaacttaaaaagcagaaggcagatgttgatgaggtggtgaagtatgtggttatatatgatgaaactcaagttaaatgcttttataatatgaaataggtttgccgtagaaatggcactggatagtacatagagccattcgtatagagtagtactagtcatcaattccttgttgtttcgtcgctaagtcatgtctgactctttgcaaccctgtggactgtagcctgccaggctcttctgtccgtgggatttcccaggcaagaatactggagtgggctgccatttccttccccaggagaccttcccacccaggggtcgaatactgaaggtggattctttacctctgagccactacatactcaactaccagcaatcaaaatctacccggcactgctagcatgtccaaagctgatagtcactacttcaggccatacaaagataagcaatagtgaatgtgaatttggacataatgcagaaaaagaaaagattgagggcaaacactgaagccaacactcgttactaatggaattttttcctactgc

SEQ ID NO: 55273 - DNA, 1796 bp, Bovine  19866880818574
  misc_feature (1)..(1): n is a, c, g, or t
ntatgagctctctgagcagtttgggggtctgtgtttcaggcataagttttctgagcacttttgagggtactcatctcagaatataaggtctctaagtttattgtagaatgtttaatgctgtttgctgcttgggatttgtgcttaggagtgagatctctggactctttggtggtatgtgcttcaatgtatcagtgtgaagtatttcaaagtttgtgttcagggtgtgaagtatctaaactctttaaaggtctgtgtaccaagtttgaatctatggtatttggggttctgtattccagtgtgtgaggtctctgaactcattaagggtgtgtgtttcaaagtttgagtctgaagcatttccagtctgtgtttaagggtatgaggcctctgaaattgttgaagatgtttgtcccaaggtttgagtcgaatgtattcggggtttgagttcaggatctgagattttaaacacttgaatgatctctattgtaaggtctaagtttgaggtaatgggggatatttgttcaggatgtatggtctctgaaatatctgagtgtctgtttcttggggtttgaatatagcatacctgggggtctcttagagcatgaggtccctgaactatcagagttttggtgacaaggtttgaattggaggtatttgcagtctgtgttcaggctgtgaagtctctgaacttttagggggtctttgtcccaagattttagtgtacattatttgaggccactgtttaggatatgaggtccttgaatttttggagggttaagtctgatttgagttgtgtctagggtgtgcaatatttgaatttttagagtgtctgtgttccaagtttgggttggaggtatttgggatttgacttcagagtgtaagactcttgctttttaagggtctttattccaagttttcaaggtctgtattttgaagtacttagaagtttgtgttcagagtgctaggtttctgaacgcattaatatagactctgaacttcgtctatattccaatgtttcagtttgaggtcttttggggtctatgactggagtatgaaatctttgactttgtgatccaaggtttgagtctgagacatttgggcatttctattcagggtataaaatatctgacccctttgaggatgtgtgtcccaactgttttgtctaagtttttggaggtttgtgttcagaatatgaggtctttacatgctctgaaggtctgagtatcaaggtttggatttgaggtatttaacagtcaatatttaatggtgtgatgtctctgaaaacattgacagtctgttttaaggtttgagtgttgtatctggtggtcaggtgtgcggtttctaaacttttaaggggtcaccaaagttttatgagtcagttatttggtggcatttttcagagtgtgaggtgaatttgtaggtttctgtgccccagtatgtgggtctgaggtatttaggggtctgtagtcaaggtgtgagatctctgaacttttagagggtcattgtatcaagttttcactgtgagttatttgggttctgtgttcaggattagaggtctctgttctatttgaaggtctttgtttcaatttttgagtctgaggtatttgggagtccttttcaaggtgtgttgtgtttgaacccattgagcattgtatccaaaagccttaatctgaggtattcaggttcagtgttcagggtgagacatctctgagtttttagagattcttttgtttcaaggtttttagtataattacttaacgttgaggttagtatttttttcgaggatctccgtcccaagt

SEQ ID NO: 55274 - DNA, 785 bp, Bovine  19866881319325
  misc_feature (1)..(1): n is a, c, g, or t
nctgtattaacactcttagcacctaccaaaacatacacacggtatggcctccggcctgttggaacataggcataatatcctccactttttaatgtatgtcttgtcactaggtggtcagtgaatatttttcttcccctcatacacacagggtattttgtttttaagcattggagagcaacaatagaagcagtgtgtctgaatgcaggaacagtctgggaattcaggtgctgtgaattttatgatgtctttgctatttccctaaagcacgattctagaccatttaatttctttattccagtgtttcttcatctggataacagaaatgatgagaaggccagaattgaaagtattataactatcttaaccctatcagtctactagccatagtacatgaatcctcataatcctcataatcattctcataattttctttgaggaatggtctgtataaaatattttttgctccttctcactaagaaaaccagttcatgccctaggctcaggaggcttcagcctgcctatagcttcatctcatctcccatgtacatcacaatttgcttttataaattccattcccttagcctagaatgctttcctgccattactcaaatccccttgttcctggtgacaaatcagtatcaagactgagcgcttctcctcatggtcttcatcaactgcccccatcaagccatctcaaatacatgtcatataatattcttcaacatgggcagttcagattttctcagtcttatgtataaagtgagaataaaacaatctttaataaa

SEQ ID NO: 55275 - DNA, 2165 bp, Bovine  19866880364523
  misc_feature (1)..(1): n is a, c, g, or t
ntcagttcagtcgctcagtcatgtccaactctttgcgaccccatgaacccagcacgccaggcctccctgtccatcaccaattcccagagtctacccaaactcctgtccatccagtcggtgatgccatccaaccatctcatcctctgtcatccccttctcctcctgccctcaatctttcccaacatcagggtcttattcaaatgagccagctcttagcatcaggtggccaaaatattggagtttcagcttcaatatcagtcctaccaatgaacacctaggattgatctcctttagaatggattggttggatctccttggagtccaagggactctcaagagtcttctccaacatcacagttcaaaagcatcaattcttcggcactcagctttcttcacagtccaactctcacatccatacatgaccactggaaaaaccatagccttgactagaaggacctttgttgacaaagtaatgtctctgctttttaatatgctgtctagtttggtcataactttcctaccaaggagtaagcgtcttttaatttcatggctgcattttattatagttctgctctaatagttgtcagctcctagtcttgcatactattgggttggccaaaaagtttcaggtttttccttaatagcttagggaacaaactttttgggcaacccaatataattttccttatttactcttagttctataggtaaatatatatttaatgctcatcattgattccttatgtctttctaatcttgccattttggtgtgcaagtgtttatttctgcattgtctcttctagtccattggtctatacgtctgcttttataccatcctactctgttttgcttattggagctttgtattatgttttagaatcatgaagtgtgagactactgaaaggttgttcctgaaccatgaaagacgccgggattcttggcctctggaggagaagaattcaatccggggccagagacaaggcttgatcactcagagcttttgtgtaataaagttttattaaagtataaaagagagaaagcttctgacatagacatcagaagggggacagagagtgcctcctcaccagtgtcagcaatgaagttatatacttttaattagttattacagtgaatcaaaagaatgtctggaggttgtaaagaccttactagatccactcccataatttacattttaagataacaggattagccagaaggttttttccagaaactgtcctcaagcaggatagattattggtatataatcctaaggaatgtagagggaaaaaaagtgtcctttcctcctccttgagaattccaaacccctctctccttggggatccccggacttcttatcaacctgcctaggaattgactctcttactgggagcttactgtgctgaacacgttgtctgagaaggaggctttctttagaggccacacaggataatagtttaggtgcctaatgtttagagtaacctgatcagcatcctaatataagttctgacttttactggtagatgaatcccctgattttcagtgtcttggtctgttcaatgaagatcagtatgctttccttttaagattgttgtaaggataaaatgatataggttaggtagagtccttaccataatgtaagctgtagggaaaatgttcacaaagagtgattttcatttattataaaatctcaaaagcaaaattgttataggagatataagacagggcaaattctgaggtgaaaattactttttccagactaatgactttgaaagatactttaactcttacatctgtgataagtggtggatggagcaaccagttttaagtgactactgaatcgcattttcctgcttctaaaaaacattttaagttgccccataggcaattctcagttctcagaaagctcttagattctgtttcgatgagacacttcctcttcatcctcaaaatgtggatgaagaagctttcccagcacagaggaacatgagtcaactccaaataggaaggcgctgtttatggagcatatttcttttggaagaatcgttgtcacatatctgactcaacacttatttctagaagaacaagttgttcaggaaggaaatctatttccatatctaaaagaaagtttatttaagaagtgcaatggaataatcacgcaacagaaa

SEQ ID NO: 55276 - DNA, 1279 bp, Bovine  19866880392922
  misc_feature (1)..(1): n is a, c, g, or t
ntgcatctgggttccacaggggtgggatcccaaatggatttcttcaattatttttcttcctccaacacccagaaatcctacatcaatctcatgtaaaattcacataatttatagattagaatgtatcttcctataccttctatagtcatataggatgataatagaacatgtgatactaaaataaaacaatctttccgaaggtagctttgagagactattttggaattgaggaaaatttgcacagtaatagaagtaatttacatgtgatgaggatcctgcacagttactgaaatagaactgatatctaggccatgccaggcaccttttcctctagtgattatcaaccattaaaaaaaaatcagccagatctgcttgtcaactgctgtgtgaaaaatagtcaatctattggtagtattcattcctatttttcttatacttttattgatccgttaggatagattcacttcttcatctctttttagctaaactttgcctagctctctggctcagtaatactaaatacagtctagcaaacacaagataaattctcccagttggcactcaaaaccagtctctgctgcaggtatttttgtctgcatttgttacatgaggagttggctgagagagaccaactaacctgtcaaggtcactcagctcctaactgttgaaccctccaggattcgatttccacatgaaatagctactactaaaatttctctccaagatttaccattttaatagccaccttttcaaggtggcccaaatgactcacatgacacctgggaaaatcaaatactgcctaagtcctgagccatgaggaaagagggtgactgctggcacatgcattttataaactaggggtgggcatagattaaagtcattgatcaacatcatggagtaactccgctgcttgcctttgcaatgagggaagagaaatttgcatttcttatttccaggacaataattgtcctgctgtcaggatgctgtcgcatgcccggtgctgatttataaagctgaagcatcatggctctcaggtggcctctctgcacagcagaagggagcccgcagtgcatccacctttggaggagagttcattctaccaagttagctgtgatttatggtcctgagtcctgctgtgttcctgacaaaccgcatgttgggaacagcaggaagaagcactgaaaaagttgggtgttgagtgagggaatatagactcttgcacttggattgtgtaatctgtgcccctagaaaggacggaacagagcagttagggagagtt

SEQ ID NO: 55277 - DNA, 2416 bp, Bovine  19866880425657
  misc_feature (1)..(1): n is a, c, g, or t
naaaagacccgatgctgggaaagattgaaggcaggaggagaaggggatgacagaggatgagatggttagatggcatcactgacttaatgcacatgagtttgagcaagctccaggagatggtgaaggacagggaagcctggcgtgctgcagtccatggggtggcaaagagtcagacatgactgagcaactgaacaccaccaccacccagtcataaagtaccagatgatgatgaagtcagggcttcccattatggcctgagaactatctgatccaccaaggtataaaatcaggcatccccagcagcacaccaccatcaagcagaatcggaatgaatagcactaaacccaaacacgtcacaagcaggttccaggagcaagtctcccacgctacccgatagccttccccttctgttctgctcctctgcccttgaccacacacattcatggcctcacgagtcctctgttcctagttccctgggaagtgggaaatgagaaacaggctatcaagtgtctctaaccagcatgttggcacagccaaaattgaagttctatagcgttactgctccactcaagggttcaaggccctatctatatttcttcctttactctgatccaaccacatggggctttttgctgtccttcaagcacccccagccccacaagtttgtatccatctcagcatgtcacactccctgttcattcatttcaccacaaatagtcttggggttgtatacagcagactcttggtcggctaaaccaacactcattcctaagtcctttctcccttgcctgcctccactacagaaactggaaaactatcaccgcaccccccccaccccaccccagagtaccttagagcaagaagtattggccatgaaagaaaggcaataagtcataagcagagacttctgggatcatttttgccttcctgattatttaaaaagacataaattacaggcactaggactagctgcaaggcagaatcacagagggttctgctctcagaagggcccgcccatgccttcccactcagtgtaatattctgctattgccctttttaaattattaataaatttgtctctgagtttatgttcaaagtgaagtcctaggagacagtagagtatgatcacgagcaacagagattctccagggatgaactcagcagacaaagcatagagtgcaggcacttaatcaattgacctgggtgctgagtactcttgccttgggcaactagaataccatggggccccagagtggtgggccgggacctgggcccagaataacagcaggcttaggggctgtgcaccgtgatgcaggaggaggacagtttgccatcctctctggagctctttatcgcagcctctgcataagtattaactctgccctcagtacaagaacagaaatgtcagcaaatttttacagaataatagagtatgcatggacattgcaataaagcatatcagagttatttggattctacaaagaatttagaatcaacagtttggaaaactacagaaacattgcaaagcacatagaaatgaaatttaaagatgtgacattccgcagaacagaacacttttcaaatgaagctgcagatcaaccaattattaatgaggaaggcaattttaaaattaatgctttatttttaattgaaaatacaatgacagactgcataaacaggcattttgaattataggcaaatcatgaagccattttccatatcttattcaacctctatacactacagaaaatgtcagaggagacattaaaatgccatggtacaaatttacacttaaaataaaattcagacttatgaaaaacttattttagaaaaattgtttcatgagaagcaactttagatgtcctaaaatttttattttgaaataatttatcagaaaaattttttcatgttgccacagtctataaaatacacttagcagctcccacgacaattgttgtctcagcagaaagatacttctcaagattaaaatattataaaaaatgatttgcagccttgcatttgccaagagtgactggtgttgctttcaattacattgattgaaaatgaacctactttgagtataaattttgatgacctaataaatgaaattgcagaaaagcaagctataaaaagatgatttaagatatcatgttactcagtagtatttattgttttgcataaatctatggcaccaaattttttttgcaataaaatgaaaagctttattttgtgttagtcctttttttaagttcttctaattttgatattctactttctttaactttactattttttaacaaataatttattattttttggttgcactggatctccattgctgttgcttaggctttctcaagttgtggtgagtgaggcctattcttcatggtggtacacaggcttcttactgcagcag

SEQ ID NO: 55278 - DNA, 727 bp, Bovine  19866880469946
  misc_feature (1)..(1): n is a, c, g, or t
naattacatcatccacatttggaaggccctctgccattgactaagagggaagagaatttattccaatgtccctatcactctttttttcttgttttgtttgtttgttcattcatttgtttgattgtttatcatgccacatagcttgggaatcaggctggaagaagacaagcctgaggtgccttctcccaggcaggcatggatcaacccaggcccaatacgagctctttacttacggctacatactttgtgtaatagacttcggagtttcctgtaaaatacatatttttgttcaatgtcctcatatcctatgaacctacttcttgcctcatagaaaagcaaatcccaaagataaagaatgggaagaaaaggcagttgtccattccaattatacaggccaaatccattttctaggtagcactgctactaaaaacatcatggagtttttaaaatcccacatctacccagagaaagactcttgagtcattaagccagcacaaaaaccaagtgggctgtaacagaaaccagcaggcctggcccagggactcactaggagcctggttctaatttggggaagtgaaaacagattttaaaaaaatatattccagacgctacaaaggcctcccttgaaaactcaagaaaagtgacaagacatgcccttagaaagtcagcaagagctaatcaaaagctgacaggcttctgaaaccatcactatgtgtttatctcaaaa

SEQ ID NO: 55279 - DNA, 1402 bp, Bovine  19866880507109
  misc_feature (1)..(1): n is a, c, g, or t
naatctagacagcaggtaccgatgaaccgatttgcagagcagccatagagacacagacacagagacttacggacacagagggtgggggaaagagggtgggatgcattgttacaataacatggaaacatatacatttccatatgtaaattagagagccaatgggaatttgctgtatgactcagagaactcaaactgggactctgtaacaacctagagggctggggtagggagggaggtaggagggaagtccaagagggagaagacatttgtacacctatggctgactcatgttaatgtttggcagaaaccaacacaatattgtaaagcaattatccttcaattaaatttaattaaagaaagaaactggtaagtgaagaaaatatactttgtgtaccgtatgtgtacattacttcttcaaaaaataattttaaaacgtataaattaagctgataaatgaaattaatcagagcccttacatttgctgcttgctttggctggaatgctctatgcctacacttgtgcctggttccagcccttctcatgcctctgtgaccttgcttgcaaactttgtctaaaagcctaaagggcccttcctgcagctgaccctggccacacagcagacatccaagtgtctttcaagaccctgtcttctgggaccccacccagcagactcaggcctaccctccaccgtgggcctggcagacctctctgcattccctgtcctgctgtatcatcacatggtaacccaagaggctgttctttagaccagaaactccttgaggccagggatggggtctcaccctctccatacaacctgtacctaaagcacagcctggcacatagcacacacctgaatacagtttcatcaagatgcggaatcaaacagaccaggggctgtgtccaggctctgctatagtttccaaaggcaatttactctgcgtgggacctgtttgtgatctggaaaatggtgcttgcaatgcctgccttatgatatagctgtgatgattaaatagcaaagaaatgcaggggtggatttattattgcttctgcatcccctgaaaaacctgggtgctcagtagaatccctcagcactcactcagtgctctgcttaccagcttctgggccctgctctccttatcagcccattttcagcttctgctaggagtccagccctccgcctggctgttagggcactgagacctggaattttccttctgtctcttttaataaatgcaggtgtagcttcctttaatgggctgtcagtgagcactaagaatcttgactgtacaattaaataaaacaaatgcttggccatcactgctaacagctgtgaagctccagaaacccttatgtcctgggaaagcagacttcagagtctgtatgttaagggcacagcacactg

SEQ ID NO: 55280 - DNA, 1196 bp, Bovine  19866880544746
  misc_feature (1)..(1): n is a, c, g, or t
ncctgggatttctttggaaggaatgatgctaaagctgaaactccagtactttggccacctcatgcgaagagttgactcattggaaaagactctgatgctgggagggattgggggcaggaggagaaggggacaacagaggatgagatggctggatggcgtcactgactcgatggacgtgagtctgagtgaactccgggagttggtgatggacagggaggcctggcgtgctgcaattcatggggtcacaaagagtcggacacgactgagcaactgaactgaacggagaaatgtcaggaaccctaagaaagatgctgtgagctgttggcatcttcctgatagaaagaaagatgttctgtgccctactgtaagcttttctcttcaaacaaatgctcatcactggagacatttggaaacataaagaacttaaaacaaagctgctacctacttccatttcccttctgtgatatcaatatcccaagtgatgccagccagcttgtacagaatgagacccataatctttggtgcttatctaaacagataaagggaagagaatattaaggcaattacaatatgtaaacaacttagagaatcagagcacattgctgtggtaagtgtattcgatgctaaaatcgagacctgggagaacctgggtccctgtctcacctctgccacttacaggctgagctgagagcctgcaggtaaactgttccctgtctctggagcatctttcttctgtagtaagagggttggattagacaagagcttcttaggctaagatggctggacagataccattacttagtgctaccctcacaaggaggcaaaatacccagtagccctcatcaacttttctaaattttattattctcctagaaaaaaacaaaatagcaaccactggacaatgtggcctcttgtcacattcagaagctgacactccctcaatggttttgagtcaacgctggataaagtactctttaaaggtgggtatcttactcgtgagaggttcctgggcaagagattgggggccaggagccttgtgctcacccaggacagaactgatggggacctttctcctgcccttgaatatatgttcaccaatggctcacctcaaatgctttcccaggctttcactcccttcccgatccttccgctgaaccctcggctggctccctcccgggacactcagagtcagcccg

SEQ ID NO: 55281 - DNA, 725 bp, Bovine  19866880553149
  misc_feature (1)..(1): n is a, c, g, or t
ntccaaaataaacgatgttgttaatggaaattgcagctattcagattcctcaacagaaccaaagttgtgcctttaaaagcaatgtactttccttactgtgagcctatttgcttaaaatcttaatcacagttctttacagtggacagcaaatggcacatgtgacctgttgactgatattaaccttgtgttttatgtcatcaccataaaatactctgctgaatactgctggcaaatgaaaggcagacacaatgtttatcagccactacatatgaatcatgactaaaaacaacaagtatgaatataatagaaattatctatagaattaaattgtgggaaaagagttcatcttcctttgacaattttatactgcccgccagcatatggtcccttaactaccctatatgtttggggaacaataacttgaagtgtcattaaaaaaactgatgtcttaagtgatgaataactccaaaaatatattaaaaaggtaaagggagaagaacagaagaaagttaatgatccttgtaatttgacagtcgggcacaatgttggcttctgactttccactgaaagctttgttcctctgatagaaatttggctgttttgaaaatgatggacaatgagaagcatgagtcagtgtcaacaagcatgaccctcggtgccacatagtcaagagtggggaaaggacacaaaaaaaaggaaagagagaaaactaaaacagacatggg

SEQ ID NO: 55282 - DNA, 1689 bp, Bovine  19866880595481
  misc_feature (1)..(1): n is a, c, g, or t
ntttccattgtttccccatctatttcccatgaagtgatgggactggatgccatgatcttcgttttctgaatgttgagctttaagccaactttttcactctcctctttcgttattgttatttagtcgataagtcatgtccaactctttgcaactgcattgactgcagcatgccaggctcccctgtacgtcactgtcgcctgaagtttgctcaaattcatgtccattgagtcagtgatgctatctaaccatctcatcctctgtcgcccccatctcctcctgccctcagtctttcccagcatcagggtcttttccattgagtcagctcttcgcatcaggtggccaaagtattggagcttcagctttagcatcagtccttccaaagaaatcccagggctgatctccttcagaatggactggttggatctccttgcagtccaagggactctcaagtcttttccagcaccacagttcgaaagcatcaattctttggtgctcagccttctttatggtccaactctcacatccttacacgactactggaaaaaccgtaactttgactatatggacctttgtaagcaaagtgatatctctgctttttaatatgtgccatctaggtttgtcatagcttttcatccaaggagcaatggtcttttaatttcatggctgcagtcactgtcagcagtgatctttcagtttggttcagtcgctcagtcatgtccaactctttgcgaccccatgaactgcagcatgccaggcctccctattcatcaccaactgctggagtctacccaaacctatgtccattgagtcagtgatgccatccaaccatctcttcttctgttgtccccttttcctcctgccctcaatctttcccagcatcagggtcttggagcccccaaaataaaatgtttcaattttcccccatctatctgccatgaaatgatgggaggtctttgagtctccctattgttttcctgtcccttttctctgttgtttagattagaaaatttctcttaatctgtcttcaggttcactgactcttttcttctggtatttccgtttttatattgagccattatgaggaattttaaaatttatattatggttctcaaagttgactcttttttatagctattaattctttgttgagaagttttatctttccattctatccaagagtacttgtccttacatcttgcaatatggttatggaagcttctttaaagtctgcctcacattctaacatttatgagatttcatactttgcatctgatgaatgttaggttttgcttgttctttttgtgatgaataattttgaattatgtcctggacatttttaataatatgctatgagatcctgtgtcctttaaaaatctggagaatgttgatttttgttttactttagcagattgtcagtatagagtagagtgtcctgagccctatcctaccaggatcggaggagtgggaggggtacctgaggtaaactgatgcctgggattggttcgtgagggaagccaggacagccccattcataatattaataactctccaagagctgagctgttctctcactgtgctgactgaattgattcagaaagagaagacctgactagagaagctagagttagggtcccatagtctgggcatgcatccccagaagttggaaacccctagtccacagtgtcctat

SEQ ID NO: 55283 - DNA, 913 bp, Bovine  19866880645164
  misc_feature (1)..(1): n is a, c, g, or t
nagaatcgggagcctctcctttatgttggtttttataactgtttctgtgatcttgataagctacattctctttgggtctcattttcctcatctctgaaacaggatacttagatccactcattccttcatctctaagagtctgagtctatgaaatagttggattcaaaggtaactgaacaaatcctggcagaagagattggtcttaggcccagctgatacagagaatgatgagatacagagtccagcagtttttctatatttggatgctgagatgttctttgttgtttgcatcttggaagctaggagttgtcaacttttcctgattcaagtaagcagatgctcctctggctgtcttcagttttctgcaccctgaaaccagcgggagcaaagattttaatcagatccaaatgagtagttggtgccactggacattatatgattaagtctctaaataacactccagccgaattcaaatcagagagcccggattgcagttgtcatgcatccaccggctatctatgtgctgaataaatattgcacttcctgtgacacaaacttgccaaaatactcctatttttttttttttttttctcctagcaagagggctcccaaccaagaaccatgtcctgggagattgtggcaggctctgttacacaccatttcacacacctgtttttgtctccataaatttgcaatgacttttcctccaggcttagactgattagagcattcttctttctcctccagttgttgcaaaggcagcactaatacgaatcagctcaaatgccagaacaggtcaaagctttagcttttagcctcctctatgagcctagtttaagtttaaaaaggagcctttaagccttgctgtataatgctgggtttggcctctgagcaagaagccaggagagttagt

SEQ ID NO: 55284 - DNA, 2256 bp, Bovine  19866880660571
  misc_feature (1)..(1): n is a, c, g, or t
nctggtaaattcatactaggaactagattgctctcataaagctttctgctaataataataaagaaatggagaacccttccctaaacattttatgaaagcagaacaacagtaaaacactatgcctaaagctgacaaaggatttctggaaattttaaattatagaccagagttagtcatgaacatagattcaaaagttccagatcaaaaattaacaaatgaaatccagacttacatataaataatatggtggtatattcatacaattaaatgctactaagcagtaaaatgagtgaacacatacatataaaagcaaacatgaatgaataccaaaaacagtatgcaaaataaatgagacatagagtacttataatatctgatttttattaaatattagaatccataaaactaatgtttaaaattaatctatagctaatgtatacatagtttatacatacatgtataaaactacttcatagctttggaaatcattgattttctgaagcagcaataagggatgatttaatgcaaaagccataagagaacattctgaggtaatggaaatattcaacatcttgaatgggactgtggttaatgggtgcctaagtttatcagttcccaaatgtcaacttgaaatgactggccttttatataaattatacttcaataaagttgattaaaattgtatattaaataaaatctaagattttatttaacatacattatttggtggctcaggcagtaaagaatccacatgcaatgcaggagacccaggttcaatccctgggttgggaagatgccccaaagaaggatatggctacccactccagtattcttgcctgggaaatcccatggacagaggagcctggtgggctacagtccatgtggtcgcaaagagtgggacaggactgggtgactagcactacaattcagaacaatgtgttctttctggtctaaattgtgatacctcacattatataatagatgatagacagatatagatagatgtgagtgatgtcaaagaaacagtgaaaaacaatatgacatgatattaacaatgatacaaaagagatttcaggcaagttttatctttgaattataactgacaaatgtaatttacaaatttgctgaaaatgagcatgcattaacttttccttaagttaaagaaaggttatgaaaggtaaaagatatatatataatgcatgttatgtggtagatcttcaggatatgttttacaacttcctttcagctctttgttttcctttttatactcttttaccagctcattctatttctagtctcttgtgcatttccttctgtttttccttattcacattgtattacacattcatgcctctaaatccagatccgatgatgtttgatgaaagatttttcctcaatttaattcaagtcagtaccagaaatcttcaaggaactaattatcaagtttgcacaatattgaagtgaacacagccgtacacaaaaacaagatgataggaaaataggatgtgtctccactgtaattgcattttttcatttcttctgaccttaattcagcctggaccacagtttctcacatgcctcctgggatatcaaagcctgccagcactaagagaaactctggctatgaagcacaatggtaaacttataagccagggaccctctcagaggcagccttaaagaaagcactgttttacgaaaacttgtagtaattggccaaatcctgctgctgttctcttttggaggcgagctgagaagcctccccttttctcagctgccctctatgaaagaaaacccttgtagtcctacctttggtaattcaggaagtcactccatccaatctggtggacacggtgctcccagagaggaaaaagacaaaaaagcacatattgactgattgtagtcagtgctggttcaaattgagagaagactagaaaggaaaaacagcaaaaatacttattctcactttataaggtgtttcctcacttaatttttataaccctcccttcaggaatgagttactagaagaaaacagaaataaagtgcacagatacaaagatgtctttatttgctgactgcttgatggtttaggtttaaaatcctaagaaaggaatctgtcaaaaaggaataaattctactattagaattactattattaatgaaagttaaattgtgaatatagtaagatgaattgtatttctatatgttcttggtattgctcagttcctaagttatgtatgactctttgtgaccccatgg

SEQ ID NO: 55285 - DNA, 1607 bp, Bovine  19866880866863
  misc_feature (1)..(1): n is a, c, g, or t
naataattgctgctgctgctgctgctaagtcccttcggtcgtgtccgactctgtgcgaccccacagacggcagcccagcaggctcccccgtccctgggattctccaggcaagaggactggagtgggttgccatttccttctccaatgcatgaaagtggaaagtgaaagtgaagtcactcagtcgtgtccgactctgtgcgaccccacagacggcagccccccaggctcccccgtccctgggattctccaggcaagagcactggagtgggctgccatcgcctgctccgagaatactcactatacgtggggaaatacccaagctcttgtccttagaatcgttcccaggacatgctcgcctgctgtccctctggccagacaccttgctttgcatgcattttacatgccagtgactcacaagtggaacttttggtttgagcctctttctttagagcagattgataactgcctactctgaacagtcagttgaatgccttgttgttgttcagtcgctaagcatgtctgactctttgtgaccccatggaatgcaatatgccaagcttccctgtccttcactgtctcccagagtttgctcaaactcatgcgcattggatcggtggtgccaagaaaccatctcatcctttgtcacccccttctcctccttgaatgccttacgagtgttctgtggccacactggagctctggatccctggtcctcctctaaactgatcctcccctgctgttttctcatctcagtaaatggcaccactttgaccagagccctcttagtccctcaccttttaatttcatctattagcaaattctgtcttttctactttaaaaatgtatcttaaagccatctcccctggagattaggggactggtggggagataattaacttagaacacccatatttgcattttacaacttgttacatgcctagcttttgtaatttgagatctaataaagtaaaaagtaaaagaagagaaaaaaaatcactttgacattgaatcatgaaaagtgcttctcattgccttttgaagccacatttctgagaaagctttctgactggaataataaattgtgcatgaaaaacatataaactgaggagagggcaaggtcaccattgaaatggaaaactaagcgactcatggcttgaaaactctccgagtcgctggcgttcccctgatcgttgactggaacaaataactccccaaacaaaatatacgtcaagatttctttgagaatgccacaagtacggtttctttcctttctccctttcctccttttccgtcccccttctctctctctcataattggagagaatttgtatcagcctatcaggtaagtggttttcaaaaatgcaacaatgttttcaatattgtactacgaaatatgactgtaatattatatgccataaagttttataacattggttcgctagtgtataggctagacaaccatgaagcagttgtattgctgctgcttatcattgcttctaattgctgttatcaatgcgtgaatacctacaataaatatgagtttctttttctcgtcatcttttaatttttgatgtcccagtgttagtaagtatgtataacatccatag

SEQ ID NO: 55286 - DNA, 1437 bp, Bovine  19866880919718
  misc_feature (1)..(1): n is a, c, g, or t
ncatcaccaactcccagagtccacccataactgacttatacacttgaaactatggaacattgcaaattaactacacttcaattacaaaaatgtttgaaaaaagtgttgaaccatcaaataaaacttattatactttaaaacttgctatactttcccttgtggctcagctggtaaagaatctgcctgcagtgtggcagacttgggttccctaggttgggaagattccctggaaaagggaaaggctactgactccaatattctggcctggagaattccatggactgtatagtccatggggtcacaaagagtccgacacggctgagggactttcacactatactttaaaaggggacttattaggtctccagaggaaaagacaaacgaattactggtatatttaatagtctatgaaactcaatgtaccctgtatccctggtctccatccaagcagagtccctcagggtgattcttacccaaaattctccaagcttcttgtcctgtggacctgttaacatagctgggatggcatgtatcagaaccaagaatgcactcagactcaagaggagtagcaatggctcagttttgaggagcagtttaaagagtcatttgacacaagaatgtctagtgagagtgctctgacaaaggatagtgaataacgtgtctcatcagattctctctcttggggaatcttgattccaaatgagagggtggagggagatggatgggagagagagaaaagaaggaaaacagcagaaactaatggagcagagttggagaaaaacagagtgacaaataaggtaacattatcagacatataggaacatcctttcaacagtatgctaaaataaatacgtagttcaataaaacctactgttaaattcctagaatttctgttgttgtgatagaatgccagctatatatttctgagttctttctgtgtgctgggcacagtgctttgctttggcagacgttatcaaatctgacaagtctctagtttttgatgagtgtccatggacactcacattgctctggtacctgaaaggtgataaatactgcctccattccattaaaacctgaccttgacattattgagactgatctctgtgctttctgacttcctagggcatcctgataagtctccatgatctgaaggaagcatattttcattcttaaagcctgaaatctcctaacatactggaaactgacaacaaaaaagaaaagtaagccaaagcatatgatgccgaattggttatcatcactgttccctacatgagtaatgaatcagttaaaatcttcactatctcaagaaatcaccatctgttctttagtctttaattgatgtaagagatgtttcaggaaatctccactgggaaacaattccagtgttcacaaaaacgggctggcagattagtgggtcagccaagcaggggtaccagg

SEQ ID NO: 55287 - DNA, 1602 bp, Bovine  19866880939534
  misc_feature (1)..(1): n is a, c, g, or t
ntgtcatgcactttttataagccaacagcatgtgtggttagtaactcgcaacatccttaggtagggacatttctctgtaagttgccctagacaaggatggaagttgggtgtagaaacaccatgaaaaatgggattctgtggaaatgaacaactatgtcacctttctaagatttatctcacagcttgtcccagaggtttctgtcctcctgaaagaaatgctctgggcagtagtcataaaataaagctttttatctcactgctttcccagtccatttctagagacacataaacattcaggacagtagccacaggggttcgcacaggttggctttgtgccacattgccctggggaaatagagatccaaggttgcaattcagttgtttttaaaggaacattatcttctccaggcaagaggccacatattggtgaaactgttgtgtgtcttctctcctgattaaatcaaaatctcagcagaacaaatcaatcagcttttctccccttttaaaccatcactgcttcaacttcgattttactacctctcacctggatgacttgcaaatattatccttttagttctccctgccctggtctctctctgggcattgaatccttcacattgctgccaaaggatcttcctaaaatgcaaagatgatactgacagcctcttgcttaaattcattcaatggtgcactatttatatagcatataagtgtcctatcaaggcattgagaagccttcatgatccctgcccacattttcagcaccatttctagtcacttttcctcacgctccaaatatttcaaccttatttgccatcattcccaaacaatactgtcctgtatttcagaccctttgcagatggagttcatttagtctaaatgactagactagaatgactcatctttaacatcactgcctctgagatgctttcttgcattgtttaatcccaggtaaccctgagcattctcatgtatcactcaggttctcagaggcagacaacagaatctactcttaagcaggaatggattaattgaggacactgggaagcttcctgagttgttggaaaggctagagaaggggctccagactcgctttcttagaagcagttcctaggtacacgccatggtctggttctggtaaagaagctaatttgtgcccctggtcccagacctggctgcctctgctgccacctgtaccgctgaatgggtgcccggtaccctttcctattttcctatataactcacttccaaatctgggtcttgtgtagatgtgtccagttgataggaacgaagtcacaggcttatattctagcagcaaaggagagttggaatgttttcatttttgattttacattgagaaggcagaattcaaagctagaactagaaatatagcgagaactagaaaaatattgaaaaaatatttaaaagacgaggagggggcagaataaatgacagaattctagggagtctctcttataaacagttcttgcatttcactatcattgtctttatacatgtgcatccgtgctagatcaaccatgagcttgcattaaggggatgtcttacttatttctgtatccacaacctctggcacagtgcctg

SEQ ID NO: 55288 - DNA, 1492 bp, Bovine  19866880944976
  misc_feature (1)..(1): n is a, c, g, or t
nttggggcttccctggtggctcagaagataaagaatccgcctgcaatgtaggagactggcttcaatccctgggttgggaagatcccctggaggagggcatggcaacccactcaagtattcttgcctggagaatccccatggacagaggatcctggtaggttacagtccatggggtggcaaagagttggacacaactgagcggctaagcacaaaccacaaagcagctttgcctgttgtcccttctttgttttatttcaagaggtttgattctattttcatccagcacagaaactggcctttagtgtttgctgctcatcctgaaagggaagttctcgctgtctatttgccttgtaatagatacacaattgattcacaaagtcttcatgctgcttaacatgacagatgaaccatttgcttccaaaatcacagggatctttggggtcaggcaggctaggtaaacagagagagtctcctccagaaacacagagaaatgcagataagcagcgcctggctttgggagccatctgcataggagtggtcagtgccatcatcctcttacaaccctcaagggactggggaattagtgtgcccaagccagcatatggtgcatatcttattaacctaatcgcaggactccagcaagctgctttcaagataatttgggcccctgtgaatagtcatccctcttcccagcccctgctcagccctggaagggatgacgtgtgcacatctcctctgcccaatggactccaaagaaatcttgccagtgtttataatatctgcaaaatccctctgtaaataacacccaggccacacagcaggttgaagccaagaagctcagttctgactgacagctttcccccaagtcgttacttttgcagttggaagggaagaaagacccccccagacaaaagatacacagcagtcttaaggtagacattttatggtcgttttatggaaagtttttttttttttttaatatattttgaaggataaagtgaatgcagcttctctacctggaaacctacgctggtcagtgacaagtggaaaaaaaaaaaaaagaagaagaagaatggtaaaagtaggcctagtttacaaaacacacatgcaacttggtctctattcaggcaaggaccaccctcccaatctcaatccctgtctctccaaccctcccaatcatgaatactaatgtttgggggagactctttagctaacagtgtcctgggaaacatctggtctggaaaatcagaactgtatctttaagatacaaaagagaggtttccttcaaatttcagaagtatttgtgactgattcctaagtaaaaaggaagatctaaaaagaacattataatgctcataggtagaggagaaaagggaacataggggaataaaataatatttattatataactacttgtgaaagtaaagatcacccaaaagaaaagaagtaaaggctattaattcatagctcgttaaagcataggagtcagcta

SEQ ID NO: 55289 - DNA, 451 bp, Bovine  19866880969601
  misc_feature (1)..(1): n is a, c, g, or t
ntttgttacctttatacttgaattgacaacagggctcaagatccgaatattaggtcacactttatttcccacagaatttcctcagaatttattttctgtctacttgaataagtgttaatttagaaagtctgaggcccaaactcgacacaatttgctttgtctgcctcaatgactacccacagaagccttcattttacttttaaatttgatattcttaagctataagttttaatttttctgtatcaaaatcttctgggagttgatgtgtccttttgctctgcaaaaaacaatgttattttagaagaaattttgagtttacatagttcattacatcttatattgtatttggacttttccaaggatatcaattacgtatgtattatatctcttttgccatccgtatctatgatcttttctgtaataaatgtttttgattgtactctaattcatg

SEQ ID NO: 55290 - DNA, 1253 bp, Bovine  19866880997862
  misc_feature (1)..(1): n is a, c, g, or t
ntcggacatgactgagtgacttcactttccttttcactttctgcattggagaaggaaattgcaacccactccagtgttcttgcctggagaatcccagggacgggggagcctggtgggctgccgtctgtggggtcacacagagtcagacaggactgaagtgacttagcagcagcagcagcagctgccatacttacatgagagttggcaccatgattctagtaaagaaagatttgacaccaaaatgcaaactaaaatactgtatacttgtaggtaataaattgacacattgcatcaaacatgtttaacctatcacgtgaggagatcgtttgaagataagcatgccttggctccagggattctggataaaaagctaaatcatggattccctattgccttcattcttcttaacacaccatcatagtaacattcatgaattaatatgaactttccaaaatgtatctctattttaaaatgtttcactttatttcccttaagtgtaatatatatttcattcaagttttaaagctatgggttaggaagagtgcctactacttttactgttctgggactgggtgaactagttacaattaatttcatccatataattataattttataacttacatcatatggccttaccaattaaatgctgggccagtagtttctcattttcatccttgagtaccttcctaatatttgggtggatgctagttcacctcccctagtaatatttctatagtttctttattagttagatccagaataccctgaatgctacctctggtggactggtataattttttttttttttttaatgagggtgaaaatcttacatagtaaagatgagagtcattcatttaattcatgcttattcttttattatccttgagcagtttgttgttttttgtttgtttaaattacggtttaatgtgttctatattttttgctttcatctaataaaaaggttgtttaaatgacctgcagttttagagaaaaataatcaagtaatccagaaaatcctctctgaagaaatgacattaatttggagataggcatggagaaaacaaagggaaaaataggaagaaagactttccagtcagggaaccctgtgggaagagaccatagtctgggaaaattcagccaagttaccgagaagaattctagtagtgagttaagccccatgacagaagacagaagaggcatgaaatgaaatgagatgaaataaaatctaaaaggtagatgtcatcacttgt

SEQ ID NO: 55291 - DNA, 1113 bp, Bovine  19866881039764
  misc_feature (1)..(1): n is a, c, g, or t
ntttgctatgggaagacccttagattaggaaaggtgcttttcaaacaagacttttacatagaggttatttctccttgaatggtcagcattgtgtgggatttttctttctttggaagaatgtttaaaggtgcctatcatgtgacctctaccagttaggctgctttgcagctggccatcctgtgtaaatttatccagacaactgagttcagctttcatctaagtttcatggatgagaatcacagcacgctccccattctcgtgcatttggtattccagaggagtagggccaagtcctgtaccttgttaatggaagaagcaaactgcagaaagaccttggatgtgaatcatggcattctccctcagattgttaaagccatgtctcttgtttggcctccaatactgtttgggtgctatctgtcaggaggatttttgactggtgaatgaacagtcagatattttgcagtttattgctctatgtggacataaccatttgtcagagagccaaccaatagccatctcagacaatgctctctcttagaagattaagcagaattattgatatggacaattatggcagtggaaaaaatatattttgatttctagtagactttacctgaaataccacaacagtacttagaaccaaaaaaacaaaagttttaaagtgccctttaaatgttcagtactacagacacctcaagtaaagtatgcattccaacacttaataaagcttatatccaaccagtccattctgaaggagatcagccctgggatttctttgaaaggaatgatgctaaagctgaaactccagttctttggccacctcatatgaagagctgactcattggaaaagactgatgctgggagggattgggggcaggaggagaaggggacgacagaggatgagatggctggatggcatcactgactcgatggacatgagtctcagtgaactccgggagttggtgatggacagggaggcctggcgtgctgcgattcatggggtcgcaaagagttggacacgactgagccactgatctgatctgatctgatctattcacacttcagtaacattcactcaatgagtccaactctggaccccaaggattacacagt

SEQ ID NO: 55292 - DNA, 853 bp, Bovine  19866881132596
  misc_feature (1)..(1): n is a, c, g, or t
nggatttccaggcaagaataccggagtgggttgttatgtccttctccaggggatcttcttgacccacagatcgaacttgcatctccagtattgacagatggattctttaccactgacccactagggaagcctaattcttccccataatacctcaaatcttttccatctggtttgttctctctcttctcactctactgctcccacactgtcgatttgcctctccaaatttctatgcgcattattccctcagaggtgtgtgtaaagggagactgtcacatggggcctgtgtatcagcatctctcatactgctctttccccgcaggaagtgaataagtgctgatgaagcagcctgtaagaactgtaaattctatttcagtgtgaaaagaataatctctcgagacagcagagactagatgggccacatttttgcttttcttctgctgtgtggctgtcaggaaggtcatttgggctgctctagctttcagtggaaaggaatctaccttacatgccatcagacagttgtcattgacttcactatccttaagtcataattttcagtatcttctttttacaaaagccaggaatttttgtgtttaaccatttcctaccaaacaaagccagacagtcatttataaaacactgaagtctcttagaggggcaaaacatagttcagaaaaacataaatcttgaattaatatttaaagcatggcatacatttcaaaagatattaactcaccatagactccttggaacaccctttttagccgtgaaaaaaaaaagagtaaaaaaaaatactatacactgaatcaacatttcatgtactccattatgaacagaaagaactccacagtaa

SEQ ID NO: 55293 - DNA, 854 bp, Bovine  19866881149978
  misc_feature (1)..(1): n is a, c, g, or t
nattcttactcatcttttctaacccatctcaggaaactgccttctcagaaagcctttccggctcccaagtttgagcaaattcatccccctgtgctctgtagtccttgctcagcctccctttgtacaccatcacttatttgcagctatctcttccaccagattggaagcttcagacatgtctttatttttgcattcaagttgacagcaagcagccatggcctggatccctaaaggtctgggaatgtggaattgggccagggagctgggttgggttgagtggaaacctcctggattgtagggagggcaaggtctggagctttcacatttgtcgcatggtaagttccgcatgaagggcccctagggtacctttgaagctgcagggctcggtggcttaaatagctgcagaagaagtcagcatctttatttcaagacctttctctctgacatttctctctgtaaatgccacttctactgagccacgtggagacataggtccagggagacttgacctattcagagcctggttatcaatcagagggacgttgagttgatactagttctctgctgggggtctttggacagcagcagacatcagttgaggtccactgctatcctgccgggtctcactctgcctgtttgctggcggtctccctcctcaggctctgtctgtgcacagagacaaactattaattaagccaggaccttctttcactccgttcctccctccagctcctcctccccagcaggcatgtgaactggccctttgcggctcagtgaggatgctggcaatagcgctgtgacagcttaaggtcggaggcagccagggagggggatgatgtgctttactgcaggga

SEQ ID NO: 55294 - DNA, 1586 bp, Bovine  19866881281817
  misc_feature (1)..(1): n is a, c, g, or t
naaacagttgcaagagtgttccctttctcccaccctctccagcatttattgtttgtagatttttttgatgatggccattctgactggtgtgaagtaatatcttattgtagttttgatttgtatttctctaataatgagctatgtcttcactttccagattcttgtacatctttacaaagatgttccagcataataaaacatatatatatatatacacacacacagtacacatatatatgtgatatatacccccttctaaaaacactcgtaaaatacccccttctaaaaacatttcatggacgatgcctgtattcttggaagggatttggaggtctggtttcacttcatgtttttggcttatcatcacacagaccccattgctcactgtgaccctggcacatgagccttcttccagtccttaggacattctccttatctcacagagactttgctcgtgttatcccctgtttggaatgctccttcttcctcccctgcctcacgttaatctccttctgacagagtccttgatgcatccttagtaaggacttatttactaaagcttcaacctccctctcttctctcctccaccggatcctagttcaatttgcttgctgcagtcagcatggctttcttttggttcttcacgggcaccgatcaccttgtcatcatcggcctcggtatcagccgtttctgatcccaggatgctcttcctcttggtgatatcatggccggcatcactcagatctgcatttgaacttggtcccagaggctctccctcgccaccttgcctaaagcaggtacccggatgctcttcctcttggtgatatcatggccggcgtcactcagatctgcatttgaacttggtcacagaggctctccctcgccaccttgcctacagcagctacctggatgctcttcctcttggtgatatcatggccggcatcactcagatctgcatttgaacttgatcccagaggctctccctcgccaccttgcctaaagcagctacccggatgctcttcctcttggtgatatcatggccggcgtcactcagatctgcatttgaacttgatcccagaggcttccctcgccacctcgcctaaagcagctacccgctctgtctctctcctatgactcttagttctctgtggatatttttcttgattgactgatttgattgatctctcccactccaccccaaatataagctctgagagaggagaaaattgtctatcattttcatcctgtattcctagtgcctggagctcaaggtacctgatgtctgttaagcgaataaaggcattatgtatttgtgagcacagaagtgcaggatgaaagtggtgcttaaggaggactacagatcaataaaattcagggcaatcaaggacagcttagatgtagagccatcagagaaaggaaactagaggagagcacattcatggtgtttctgccagttacagcccctctgccaattcaatcagaatctgtgagggtggggcccccatatcagtatattttacaagctccccaggagtttcttgtatcagcagggctgagaacaactgaattaggtgacatataactgt

SEQ ID NO: 55295 - DNA, 921 bp, Bovine  19866881286556
  misc_feature (1)..(1): n is a, c, g, or t
natatgggaacctagaaaataatacacaagaattgaaaaaagcacatgccttagccaagccagcttggctttgtccatgacttaaaacatagaaccaatatcctgaatctctctgtgtctcagtttcattccatgagaaatacaccacatggagttttcatttcatctgccaaaatgacaaataaaagtagagagctggggccttcctggtggctccgtggtaaagaatctgcctgtcaagcaggatacacctgtccaacccctgctgtgaaggatcccacatggtgcagagcaactgaacccacgcaccacaactactgagctgtgctctagaacccggggaacgaccatcactgaagcctgcagaccctagagcctgtgctctgcaaaaagcaaagccatcacaatgagaagtccaagcaccacacctcgagagtagcccccactagccatggctagagaaaagcccacacagcaacaaagacccagtacaaccatacgtaatttttttttttgaaaaaagtaagagaactgtcaactgacatatcacagatatgtcataaattccagtgatcccactcccttccaatggcaggctcatttgtttgatgttttgttagcatctttatcaggcatctattctgtctgttgaaacaaacagaaagctctgatatttggctgaactgatgacatttaaaagcccccatcctcacaaccataactgtcacgggctgtgcaggccacactgcacgtcagaaggcaaaaagaatttgattttcatcctccttaagtgagataaaatgtgaagagtgaacaagataaatacggtcatttcccttgtaagtcttgcttatttagatctcattttgaatgcatgggaaactaatctctgctatgttgagattttttttccctcacaca

SEQ ID NO: 55296 - DNA, 2461 bp, Bovine  19866881319583
  misc_feature (1)..(1): n is a, c, g, or t
ntgtgtgagtagaagccggtaaacatgtacagaaactatctgtatactgtgaggctgactacgtttgggccctgaggattgcctccatccttaggtttgtgtcagtctgtgtcttgccccaggagccacatgctggtctctgacatagagagggtttaagatccctgtatgttgtctcagggaatcagtagagacttgtctgggacagaaggtgttaagacacttaggataacccttcttagctacaagagtgttgaactaattattttatgtacattttctcaatgagtccttatgttgtaagctatatatttggacagtgattaaaagaagcattttatgctctaaaaatttgcgagtgccagagccatttcctattacatggatactgcctttttttccttttggcagagatattaagttggagataagaaatattcctttatgaaaagacatttcttcagctgccataatattccatatttttgatgtctgagtcactctctcggatcccgaatctcttttgatttgggatgctgagtctcagtcctctttctcagagattagcttttttttttcttttttttctgaaaattaagttttccttctgaggcaggactgttttgcttataaaatgttttggagaataaatattcatccattatggaaatgaagcctgagaaagattacagagaccagaggggcctgtgaacataccccaagtgtcagcaaagctagaaatctctgtctgactgacttacaaggaatggctgttaaataagatcaagtgaggaactccattaaaaccgtttttaacaatgatcagtgttgtcctgctggtcatggtgtttgcactggcatctcacagtctagaccagtctttcagggctggaaaatagtctcttcctttctaaaaggaaatctttcgtttaaaattggcctcacgtgtagatggaaacaaaaatagtcttaatagtgcattgtctccaattacctgaagttatttatcagagctcagttgtatgacatgagcagtgcaaatttcaggtttcactcattctgagttgaagtgccctttagaattcaaatggtcttacagcaaatgcaaaaatcaaagcagattcacatatggtaatttaccagctaagccttcttactgcatatttcctgtttgctctcccctcaacccattctttctggcaaatgaggttccttggaatggaacctataatggtaatatattcaacatcattatcaatcatttgtattattgtaatcattgcagttgttgtttatttcaaagattagtactgccaggaggtcactgtaaataataaccagtccaagcggcatgtggaaatgctatgaatgtgaagtgtgcaagtttgaggcatttcttctacagactgggtcttagcattgtcagcttaaccataaagatacatctaaaaatcttaagatatctgaaggcagagtacaatttgcagtgggcctataaagacctggattcttatcccagctcagcaataaaatttgtatgttctgtgagtcatcatcttcttctgcaggaggatagatgttatatggaggccttaaatttggactgaagtaagtttgtatcttgctctacccttgatgtaaacttttcaaatactcaaaaaatttttttttcctccatgaaatgtagataatgatagcattattgggagacttgaatgagacacacctgcaaaaacatgtatcaccctccttgatatattgaatgttgttgttgcttagtcactatgttatgtctgactctttgtggcttcatggacttggtagcccaccaggatcctctgtccatgggattttccaggcaagaatactggagtgggtggccattcccttctccaggggatctacccaactcagaatcaaacctgcatctcttgcacaggcaggtggattctttactactgtgccatttgggaagcccataattcatagaaaaagcttaatcaatcttagcccttttaaattttgtgtaatttatttatttacttttgcctgtgctgggtctttgctgctgcatgggctttctcttgttgtggcgagtgggacctgctctccagttgccagatgcgagcttgtcattgcagtggcttctcttattgcagagcacagtctctagggcgtaaggcccggtagttatgactcacaggctctagagcgcaggctcagtagttgtagggcatgggcttaattgtgccgtggcaagtgaaatcttcctggactaaggatcaaacctgggcagcctgcactggcaggcagatacttaaccactgagccactaggggaagtccaggccttggttttattgaactgacagagaatgaataaatgatctggaatattctgagaagatctgatttacattcttactggaaagtgttttggatgtatggacctcatatctaat

SEQ ID NO: 55297 - DNA, 1256 bp, Bovine  19866881401479
  misc_feature (1)..(1): n is a, c, g, or t
ncagcaccaatccccagtcattcaaatcaccagcttggctccttaacagcactgacttaaactactaatgaacaattgcaaactgtatcactgcattttgcaaacactcccataaactctttcatttcactcttgccataacaaattggcactatttagtcctaattctaaataataggttgtgttactaccattttatagctaaagagactggatttcagaatgaggacgtgacttagcaaggtcatagcaccatgacccttccttcaaccccaagtcctgtgccttactttccccctacaacagagaagatcatgtccccagataatgtcataaatcataaaatcacaaaaggacacgtgaatgtcccttgcaaaaagagactggtgggttcctctggctgtcactcatttgtacctaggctgtaatacttactttgttgggctcatcagacagaccaaacagaaaaattgaatcacaccgaagtaagcttgagcatgaccttttgaatcagttatacctattcagttctagatggactgcttggccagcaacaaagttggtcaagtgggtgtaagcaaactacaacacttgttctctcacttattctgaatatagtctaggagaccagaccagcatacttttcaacaattagagaaaaaatatattactgtgtatgataaaaatctcaagttgtgtggcgttccatggacaagagctattggagtccaggaaaagttgagacacttaagacaatgatttattctgtcacctctatttcctataaaagcatgactttgataaaaccagtgggagaagaaaaggaaccatcttggaaacaccaagaataatgcttcactgtgaatgaccttcctcgtttattgagcttcaaactcagccaaatgacaggttttcctgagggaaagataaagaataaccccatccccacagccatgcagcaagcacaaactaaaaaatgaacagataggctcagacagacgagagagagagagagagaatgctaccctaagtagggtggcagcctgcttgagcagaatgagaagaaaaaaaacaggccaagggttagcagcagcaacagtcgaacaaatgcaaagtccagaggtcatggtgacctgaaatcacggcctcaaatttggggatattcttctctgtcttcacttcccttgaagttagcaggcgtgtgaccaattcaaccaagagagtatggcagaaggcatgttgtgagactttcaagg

SEQ ID NO: 55298 - DNA, 1578 bp, Bovine  19866881467405
  misc_feature (1)..(1): n is a, c, g, or t
ntagatgcatatttattaccccaaaaataaatttccccaaagatttaggcagtatgtgattataatactggaaagatgctataatctttttctgagtccttttctcaacataggtttcaggcaaatgttttatagttcatagttcaattttgcttgttctttttttctgattaaattggcacatataacaataacaactatgcattacttgtgtaatagaggaagacaaaatatatttgaatattggattccttatcacccataatattagcaaagtttagggtcagtttagactggtcaagttaatgagactgtgagatgaattttggaaaagcaatttgtatggcagatgtttaatagggcttttgcttagagctggaatgcccacagggaagggagaaggcattagtgctgtgttactcaatgtgtggtccctggaatagcaggatgggcattacccaagagctggctagaaattcaggatttctgaactcagccctgccaatcagattctgcatttaaaaaggtctctctgttaatgtgttcataaacgcgcgatagtttgataatcactattctagactagaacacagacatgacttgaatcaaatcattgattgagtttgaggaggcaggtggaggaaagacatggggaaaaaagagtgtgtaacaaatagaactagggaaatataaatacaggcaaaggagactcgtgttatatttctaacctagcctaggttatataacttctttgtttgacaggcttctgatatgtaaaaaggtcagcagtttctatacaggcgtaccttgttttatggcacttagctttattgtaccttgcagatattgcattttttttcacaaatggaaggtttgcagcaacattaatttgatcaatcctgtcagctccatttttttccaacatcatctgctcactttttgtctctgtgtaacattttggtaattctcacagtatttcatacttttttcattattatatttgttacagggatgtgtgatcagtgattgtcaaggttactatttaaaaaaaaaatttaactccctgaaggctaagatgatggttagcatttgtgggcaatagtgtttttaaattaaggtgcatattttgtttttcagatataaagctattatacacttactagagtacagtttagtatgaacacaacttttatatgcactgggaaatgaaaaaatttgtgtgactctttactgtgatattccctttattgctgtagtctggaattgaactcccaaatattaatatttccaaggtatgcctgtatcttatgaatattttgagcattaaatgttgaacatgcagcagtgtacgtgatgtgtaggagaaaaaggcttattaataccatttctttttccttactgtgaaagtgtagggacatatttggtggctttatagtcctaaagcaaggagaagatattaaaatacaactaagaagacatgttgcttcaggctacaattcttattttcaagttttattaagtgtctctagtattcagtctaatacaaagtcttgtagaactaagctttggcaagaaggg

SEQ ID NO: 55299 - DNA, 1026 bp, Bovine  19866882066092
  misc_feature (1)..(1): n is a, c, g, or t
ntggtcatttttcaaaacttttttaaagaataaattagagaagagtttgtttctgaatcaaatagtataagtaaattatgacaaatccagtataaaaaatttttttccttaagaaagtatttactacttttaattgttagctgtagggctcaggaatcccatgtttcccagtaccagtttctaattattgtctttgtgacatggctttttgcagaaatatcctatgcttcttcatgagtcttgccaatggaaaggtagctatagaggaaccatccccagatcagacacaggtgaagaagcaaaaatagtagaatggtcttaattgcagtgggaataactagctcatctaaaacaggtacttaattctttacagtgtataaaagggtatatgcctttccctagatctctatctgcatacagctcacaatataagattcttcttgcatggctcactatagctttgtccatgattaaaccaggcactggataaatccactggtcctgacacaaagtgctcagcacctgcagacagacaagagtgagggtagattgtctctttctacatattttaaaccccttgtaagtagtcattctttagcccactttatcagtaattatcccagtagaaagcagatgacagagtcaaattagatacttaaagagtgtctaataaagagcctgtgagcagatgtgaaatggagttttagagaaaacaaaagaaatggtgcaatatcccagggctcatgagagcagagacctactgtcatttcctaaacctgaggaggttcccttttctcagtgatatgagctaataattctgaaattaatttccatgtatactagaattggacacttgggtttctaaaggttgaaggaagggattatatggagatgagaagactagaattccgagtgtttgcatgctcagtcgctcagtggcgtccaactctttgtgactcttggactgcagcctgtggactgcaggcccctaggctccccgtcctgacattttccaggcaagactac

SEQ ID NO: 55300 - DNA, 1573 bp, Bovine  19866880438290
  misc_feature (1)..(1): n is a, c, g, or t
ntggttagacagatcattcaacctgggaaatacatgtactaggaggtgaatagtattgaagaatgcatttattatctacagttcatgctgacttagtggtaaatttatctcacagttggatacacaaaattaagttatttaatgggtttgtagttcagttgattgaggtctgcaggtctctgcactttggaagccattttattctttctataattgtcagtcactgtcatttccacttggttgctgttctgtgactagtcagaatataaggtaatggtatcacagcaatgataaggtggtgtttaaagttatctttacacatatgcacatgcatgtacataataaagaagtcccttcagattattttaagtcaatattttttttcatcatagatttgagatgtgtctgcttatactaaatatacaacttcacattgccttctatttaatgcccaaagttgaacatcccagatgcaaaaaaatcataatagagactaatttcaatggtatcagaatttcaatgtagaaatcaaaagattgcaacagtgaagctaactctagcaagcaaatctgtttgctacttttatgtattgagtcatcttaaagttgttatggtcatttaaaaaaaaaatcacatttactttccattcttcaaaaatgcacctgcattttttttttttttttgacaaaccacatcattcgggaaagagatcaaatctaaggaaaacaaatttgactcaaaatgatttagtgttaatagttcagtgctgttaggagtttgcaagaatgcaaggatttgttcttcatttttcagtgccagcagttttgtgattcaaaaatcacaaacacagcattttttttttttgcactgactctatgaggacattagcaagtttcaaataaatagcagtactacattccaaaggagttctgaaaagcaagcggaattccagatggaactctcaagctggacactgaaatgacattttaacaaacaccgtggaagtgaagtgagaaaacttaccaactatcagttacgctcaagagcatcttctgtgggaaaagcctgagttaaaaatgaatatatattcatatttatgataagtattcatgtatatttacatataaaaccatatatatatgaatagaacaatgcttcttttaatgttttttgagttctttttttctcattttaatataaatgtatttattttaattggaagctaattactttacaatattgtattggttttgccatatatcaaaatgaatccaccatgggtgtcaccgtgttccccaccctgaacccctctcccacctccctccccataccatccctctggatcatcccagtgcaccagccccaagcttcctgtatcatgtatcaaacctggattggcggttcattttatatatgatattatatatgtttcaatgccattctcccaaatcatccgaccctcaccctctcccacagagtccaaaagactgttctatacatctgtgtctcttttgctgtctcgtatacagggttattggtaccatctttctaaattccatatatatgtgttagt

SEQ ID NO: 55301 - DNA, 2408 bp, Bovine  19866880521733
  misc_feature (1)..(1): n is a, c, g, or t
ntatgtacctaagaggaaggaaagcccccccccatatgaagagctgtacataaacattgaaagcagcattatgcagtttagctaaaatatgggaaaagactaaatgtatatcgactgacaaatatatgtgtgtgtgtatgtgtgtgtgtgtgtgtggtttatacatccaatagcatatttgtctataaaatgccaataatgtataattctattaatataaaaataatgtatacttctattaatataatccaaaatagataaatctataaagatagaaatagcccctggatctgggggagtatggggtgaataggagtggctgctaatggatatagggtttctttctatagtgatggacatgttttcaattgtgtggttggctgcacaactttgtgcatatactaaaaaattaagttggatgtattttatggcatatcatgtaattctcactaaatctgctaaacaatttaattgaatttgttacattgatttttaacaatcgaatcatttttatcaatttccctatggaatgctcatccattagattcaatttcttatcactttacatgtttacatatcatctcagtttcattgttacaatcagattgaacatgaaataactctactggaaagcacttagatgaatcctacaaagaatactggaaaattgtaaaagtttataggttataacagttatacttacattgtatgaacattcctcttttaaaaattcattataaagcacaccaaaaattacccacggggcaaatttaacaaatgtttcccttttgagagaaataatttttctgtctctttatgagggaaatacagttggataaaagcctttattaatcatactagtttatgctattgtaatttttgtctcatagttttccatttatacatttgtgttttcatacagcaaacatgtgctgcaaagtataacctgaacttttaaaaagagagcatggtcttcccaggtggctcagtggtaaagaatatcctgccaatgcaggagacttgagtttgatccattggtcagaaagatcccctgaagaaggaaatggcagtccactccagtattcttgcctgggaaatcccacggacagaggagcttggtgggctacagtccatggtgtaacaaaaaagttggatgtggtttagcaactaaacagcaacaacaggattgaaatacaacctctggcacttccaagattttgcaagttatacaaccagtaaatctcagtactcttatttgttaaatgggtaaaacactgcatacactgaggtatgatggtgaggatgaaattacatggctagtgtttagtaaataagtctatgccagatatttggcatttttattaagtctgaactttgtgagtgggtctgattgtgtatagtgagtttatatatgtttagtgagtttatatgtgtatataaagtacctatatataaacatatttattgtactttcaattttatatctcaaatcttgagatacatactacctaaaattttactatggatttagatactattctgaattctgtttaattcttaaagtttaaatataaaagagtactgttatagtttttcttggttttgtttctttagcttttattacttattaaggtaaagtaaaagtatacctgttagaatttatcataaccctatgcttcatcaaataatcctatgtttctttacttttatcatcacaatttaattgaagataaaatagtttatgtatatttaaaatcattaattatctgatgccagcagtgattttaaagttaaaaaaattcatttggtttattgatagcaattcataatattttattttagtcatcatagttgataactaaaacattgataattttaacacaaaaattaatcatcacagattaaaaatgatttcaccttgacttctctaaaatgatttatattagttcaaagtaaatcttttgagaagtaagtgaagcaaatccacttcccaagagacagtacatcacacagtattggagcaaacaaacacacagaagtgacagagtatttacacctgcctcgggggaatgggaacttgtgaattttgtgacaaaatctttaagggaaatttgatctttctgacagttccaccaagttatcataccaaaaacagagagaattttaccactttcaggaagtcaaggaaacattattaggagataaaaaagcatgatatttgatacaatgtttctttgtttctaggattttaaagacattccattttggcagtattattccataataataatttaatatatcacttatgccattaggttactctctacgtcttttgatggagttataaaagaaaaaagagagaaggaatgaggagtaattaagagagagtaggaatactcattcacaat

SEQ ID NO: 55302 - DNA, 1557 bp, Bovine  19866880606201
  misc_feature (1)..(1): n is a, c, g, or t
ntagaatggataaactgcacaccccaaaggttatatctgaaaggctgtattttcagccaagcaccaaggtattgctgcttataattcctgataggtacttggagtgcagctaaactcccttgcaggtcacattaaaggccatgtgatatttcttgtaactctctagccacctatgttccctttcattcttcttcataaaccctcttcctttgcctcagctctcaaaatttaaagtagtcctgggatttcatgctgcccatttctcttttcaaacatatgtgtgccatatacgaacaatataatccattttcatattttcagttttttatgctttgatgattcccaaatgtttacctcatgttctcattttcctcttgagctccagaccccaaactttcatttactgactggacacctgcctttgtacctctcagggttattttaaactccacacagctctaccattctgcagaagtctggttctgtggtttgcccacacataatcaatctctaaacttgtgtcattattttaaaacttactaaggttatacttttatactgaacagaattcttatagtacaccctcactgttttactgtgaaatcaaaatcattgattataagacaccatgtaaaacataggtctactttggctcctcacggaaacagtggctactagtctaattagttttgtttttgtgtggtttcagtttgattttattttgtttttaaaattggtttgagaagttataggacttctggtgatcctatagtctggtgcagatttgttttctcctctttcccaaataagttctttctgcactttcttctaatctctaatcaaaaataagtttatattttctaccaggcttttatactgagggcaactattttgatttaaaccagctttatgaaggttgaagttttgccagttattaagaactggttttacttatacccacgccctaatcagagtcatcgacctcttgacttagtctcctttgcaggccccaaattttggaatggacatcctgagcacactaatttgaattgtagagactatggaaataacgggcttccttggtggctcagacagtaaagaatctgcctgcaatgtgggagacccaggttcaatcactgggtcaggaagatcccctgcagatacccactccagtattcttgcctggagaattccatgaacagaggagcctggtgggctatagtccatggggtctaaaatagtcacatgcaactaatacacacacacacgaaaataaacgattcttcccttggtgtcaaaaccaggttatgtttctgcatcctttcctcttatctccttaattgaggccaatttttcttaaccttggatattcatcaacatctcttgagccttctgttactcacatgcaggcagatgcgaagggctaatatatacagctggggacaactgcttcttggaaacatatttgacctcttctcttagatatttctaatatttgctcaaaaaatcactttcacactgaggacaaaccacttcaccacattcagttcaattcct

SEQ ID NO: 55303 - DNA, 1173 bp, Bovine  19866880795732
  misc_feature (1)..(1): n is a, c, g, or t
nttctttttttaattattaaatctatttttttgcatttttcccccagaattttcagttatttgccgaaagagttgccattgaaaatgtcatttggtttttaaattgaagctcccaatatgtatatgtgtgcatttctgagtactattgtaagggatattttgatcaatattattaggtataaatgaaagcagtggacatttggcagggctgttactgcaatgttgcactttgggcagaaggttgcagtattagatcatactgaacatctccagagatcatatttatctccactgaattagcaactagccaaacattttaatattcttacttagtttaattatctcatatttgcttttttcccctttaaatcagaaattcttttgtcactgataaattctgacacacacaaaaaaacaatgagagcaataacttaggcagttcattgcagaggaaaacaactacaaaatcatttgttctaaatatgtattattcctataccaggattggtaaagttcttcatgctcagtggtacaattaaatatttcacatgtattattgtgaaatataaattacagaaagatcaattacgtgaaaggttagtggatccataagaatggatgataaacaagcactttgcacagtgggatgtggcatttattaattaatataatcacttctaaatcacactcatacttctttaaagggaaaacagttttaagtagaaatttcacattttggcattgaagctgtcagaataattttattatgctacaccaaagttttgtaaaaaatatgaaagaatggtaatgatgtcatatttatatagcactttcctcaacattaaagaaaaatcttgccctttttgcctcaatagacatgtgatcctcacaatttcaaaaattcagtgaattacagacttggaattcaggtctatttattttttcattttttttcagtatatttctttttaaaatgcaaactggtaaagttttgctagtctataaaaaatgtctaatatttatacagggcattcttatatcttatgtaaaagaaattttaggtgacttgatactgtataaactcctctaagtggaggtaaactaatttaggtagaaggcataataaaatctgtgctaaatgcattatcaggaaatctagtgttgtgtgtgtgt

SEQ ID NO: 55304 - DNA, 796 bp, Bovine  19866880828750
  misc_feature (1)..(1): n is a, c, g, or t
ntcccgcctgaataagggctcaccttttgatggttgccattttctgcttttcgttctaataactgacttgacatttgtggtgctccaatgtgtctttcttaatgtgaaggaatcatctgtgcattaatgaactggcttgatatatctggcaaacctttcaaagaagcaattaagtctgtgtaagaacttgcaagaatgacacgatttattgtaatttaagaagaagaagtataaacaaaaagtaattaatttctaaaggtggcaatcaagcaatacagcatcagaacaccatcttgtgaaaaccatctatatagcacataataacaacatgctattatgtaaattttgcatcaactttcaaacattacttttggtaaaatgttcaactttattactgttcaaaacaattttaattaaaataatggggtatggtgtttatccatcacactagaaacttaaattagacacagaaagaacatgaatatgcagggttatgaaaggcatagtgaggtgaatactacttgacattgctaatgacagggtgagctgcaatcatgtttgctgataaattttcaatatgtgtgagaagcctaagaattccatatactatagttcctaaactactcttagtaaacatccataaatatagctttgatatttattaagtatatttttaaaatctaccatgaaagcaaaaatctgaaatatctaacaacacaggaatggtaaattaaactatattaatgtgctttgtattcagtcgctcagtcaagtccaactctttgcgaccccaatg

SEQ ID NO: 55305 - DNA, 1324 bp, Bovine  19866881034936
  misc_feature (1)..(1): n is a, c, g, or t
naaatataattatttgtactcattacatttctttgatttcttattttgtgatgtttaatacatgtgctattataatgagagatcatcaaatgtattagaatactgaaaattcaagttgatttattttaggccatgaaaactcaggcagaaattgcaaccactattattatgaagtacagaaattgatctgggatagtacagggagttgaaatcattatcacagtgctaacagactaacagcgataaggaaataaattgtggtggacgttttattaaaaatagattgtacttttgcattttagtagaaggcttatgttaataaagttgttttagttagaaaacttaaaaagaatttattcaaagagtaataaaatcagtagcggccaaggttattcttggctgaaaaatgtttatatcttaaattttaagtttttagtttaaaagttacatatagagggatagatggagatacacatatcagcagcaatatgattatagatatagatataggaagctacattaaaacatgtaatttataacaatctctagatttagaaaatgaattgatgatagaatgtgcaattgatttctttaaaacaaaaagtgtaagcaaatacaatatatgattacagccttctcatggtgaaggggcttgtgtaattcaatgaagttatgagacatgccatgcttggccacccaagatagatgtttcatagtgaaaagttctgactaaactgggtccactggcagaggaaatggcaaaccattccagtattattgctgcaagaataccatgaacagtatgaaaaagcaaaagatatgacagaagagcctggtgtgctacagtccatggggttgcagagagttggacatgacttagtgactgaacaagtacaacctattcaaggagtgagatttgctctctgttacattacttctgcttttaactatcccaagactgtttactgcacaaatattacgggcaaggtgatatttttttgttgttgcccttgcacaagcttttgaaagattgaagaataaagtgtaagtaagacagaggcaatgaaattcagctaactataccagcacaagcagctggaaataagaaaagcaatactaaaggcaggaagaatcagtgattgatatccttgttggaaagatggatgtgatcaggctgagagattccatctaaaatcgaatttcctgctactcaagcagcttaatttcatttattttttaaacaatatgaccttgcagaaggtgtttcaaaatattattttatctttttaagtttataattaaaatatgaaggatttttttcctg

SEQ ID NO: 55306 - DNA, 1875 bp, Bovine  19866881182412
  misc_feature (1)..(1): n is a, c, g, or t
naatgtataagtcaaattttagatattgatccagaaaatcatgtgcgttatatgtatgtagttacatttgtcatttaatttgaactaaaacattcacttatgtattctgaattacactaagtgtcttgtacatattttagttcaaaaaccaaggcaaagcttggactgaatatgtacaaagaaattaatacatgtgtattattggatatttattaaaattaaaaatagcaatatatgtgaaacaattatgtttgagtagttttcatgtttaactatataacatcggcttgagttactgattagactattctttttaagaaaatctttcaatatttatatgtctcacataggccaagttagcttcctagagcataaaacgtacagaatgctctcaatatatatttatgtctatacaatagacatgcaagatacatttttttttcttgctaatatcagtaaagtgttattgagcaaaaaaatttgaaagattatgaaaggtatcacatagggggctacatttgagctaagccttgaaagagatgacataaaccctgcaactatccagaactcaagtttctaagcagagtaaacaaccacagcaaaaagcttcagttgagcaatgcctgaagtctttgcagaaagtaaggagactggaaaaaacaaaagataataactaaagatgaaaccagagttaaagtgctgccagactgcttcttgtagggtgttggttagtttgaatttaggttgccttttatcactacaattaagggagtgagatgcaaagccactggagaactttgaacataagagtcaaaggatgtgacttcagaatttaaaagatcgctctgactgtaatgctgagaaagccctgtggggcaacatgactgattatatttctagtataatgatctgggggataagggtgcttgaattaggattctattggtataggtgtaggatgttgtcaaaatttagatatttttgaaggtaaatgtgagttgagagagaaaaggaggaatcagaaataattccacaagtttatgacctgagccactgcaataatggaattgctgtgtaccaggcatgtgaatacagaagaaggcaatggcaccccactccagtactcttgcctgaaaaatcccatggatggaggagcctggtgggctgcagtccatgaggtcactaagagtcgaacacgactgagcaacttcactttgacttttcactttcatgcattggagaaggaaatggcaacccactccagtattcttgcctggagaatcccaggaacaggggagcctggtgggctgccctctgtgaggtcacacagagtcagacatgactgaagcgacttagcagcagcagcagcagcaggcatgtgaatactgaggaattagtaatttcagagaagaaatgacataagttccattgtgagcatgtggatggaatccaggtttcctgaattgcaggtggattcttcaccatctgagccaccagggaagtcccataaataaggtaggtaatatatatttgactgatatactaagaaaagatccctagtttttcccattctattgctttcctcttttttttttttttttctcattgttaattgaagaaggccttcttatctctcagccaactcatcagaaaatattctgaggctgggaaagattgaaggctaaaggagaagagggcagcagaagatgagatagttggatagcatcaccgattcaatgggcatgtacttgggaaaattctgggagatagtgagggacagggaggcctggcttgctgcagtccatggggttgcaaagagtcggacataacttagcaactaacaaggacaacagcaaaagaattggggggcattcc

SEQ ID NO: 55307 - DNA, 771 bp, Bovine  19866881320166
  misc_feature (1)..(1): n is a, c, g, or t
nttgtgggaaaagtctgtgttatcaaagtcagtaatataatattttgttaatataatttgcctaaaatacagatatttatgatatgccttgaaaacttctctgagctaaattcaaaactagatgggaaaaatttttttttccaacaagaaaagctgtattacaatgtagcttattctttcaaagttaatagtgtaaagtccaatattcatttgagtctgtaagcttgatatggttataaaaataatccgtcatattataatcatatctaatacatttcactaattgtgtctttaaggcttaatagagttatttcttttccccccaaaagcattcaacttagacaacattaatgagatcagacttaatttgtaatagattcagtgaaatgaaaaattaggttagcttgatataatacagttggccaaaaggccaaactaaatccttttttaggcaaattcactgtctctatcctggcctcttgagacatgatacacttgtagtttgtttcaacaattgagtttttaattattatagttttgcaggcatctctgatgacattaactagttatgaccttggaccagctgtctcacttctctgtgcctcagtttcttgttttgtacaatggaaataatatttacttttgcattacttttgagaggattaaaataagtgatgccatcatgttgtttagcaaagtacctcctgtgacaaacacttaaataatattgacatatcattatgatcagttttatatttaattatttgctta

SEQ ID NO: 55308 - DNA, 1406 bp, Bovine  19866881347890
  misc_feature (1)..(1): n is a, c, g, or t
ngctgtggtttttccagtggtcatgtatggatgtgagagttggactgtgaagaaagccgagtgccaaagaattgatgcttttgaactgtgatgttggagaagactcttaagagtcccttagactgctaggaaatccaaccagtccatcctaaaggagatgagtcctgagtgttcattggaaggactgatgttgaagctgaaactacaatactttgaccacctgatgcgaagaactgactccttggaaaatgccctgattctgggaaagatcaagggcaggaagagaaggggacaacagaggatgagatggttagatggcatcatcaacccgatggacatgcgtttgggtggactctgggagttggtgatggacagggagggctggcgtgctgcggttcatggggtcgcaaagagtcggacacgactgagcaactaaactgaactgaactgaatgaacactgcccaaacaggaaataatgtaaaattgaaaattaataagtgactttcacatactcgggaaatcacatacatatatactccattattttgctcatatcactccccaaagcagccatgttaaacatattcaatctctcttcccaagaaatatatttgtatttactcagatgacactattattaaggtattttcagcacagcttcaaaattatgagagtgaaatttatgtacatactgtaatttcattcttagccaatgatttatactaaattaacaaagtacagtaagttaaatgagtaagtctaattctatacaataattactttaagactcaaaatgctgaccccagttaaatattgccttacattataattatatatttcagaatattaaggacatgaattgaagctaaaacaaatttatttctacataaaacataaaattattttcattgcattgtcttatagaggtaagtgaaattatgtcatagtggcaaaattgacttataaaaaaaaaaaaaggatactcctggccatatgatatgaactattcattcccagtatattttttgtatgatttgactatctaaaatattagttcttattcatctttctatttaactactaaatagtcataatcaaatattaactgaacttgtggcaatgttaatacaccctactcaagacagagctatctacataacagtaaaatttatctctaaaaaggttctctttgaaaagtcaaatttacaaaaataaaggcagcccctatggttattcacaatacctaagaaaatatttttaaatgcctggtatatttgtgtgaaaatgtgagatgaagctatcacaccacaagatggcagattaaggccactaaaccgatgtttcttgcaaacgaaagggtttattttctcttttatttacatggtgaaatttttacaggattttt

SEQ ID NO: 55309 - DNA, 2122 bp, Bovine  19866880516054
  misc_feature (1)..(1): n is a, c, g, or t
nttatgatgttagctctggacttacttttatagatgcccttatcatgttaagtatagtcccttctatttctagtttgttgagtgtttttcttatgaaagcgtattgaattttgtcaaatactttttcttggtctattaatatgatctttttttttttttggttttggttttgttctgtattaacatggtatattacagtgagtttattaaaccaaacttgttttcctggaatccctcttgttcatggtatataatgcttccatattttgctgcattttgtttccttgaggattttggtatcactattcatgagtatattgatctgtagtttttgctccttgtctttgtcttgttttggagtcagtgttgtactgatctcatacaatgagttgggaagtgttctttaccttcctagtgtttagaagagttttttaagcattggcaacttttctttaagactaatggtaaattaaaaaaaagactaatggtattttaatttttgtttttatcttttaggattctccttttacaaatgcaggaatggggtccaatctaaatctcttgggtgaaattgaatgtgacgccagtataatggatggaaaatccttaaattttggagctgttggggcactgagtggtatgtaaacattaaagcacattatctctactcttaaaaaaacctgaatattaccatttcattcctcctaaagaacagcccagttgttttcatcattcttgcttgtattaatgttgaaaacaaacatttttttcttttattgaatttaaaacataatatcttacctatagatagttttaaagaaaacagtgaaacagcatatgtccaagtctttgcttagagtgtggtcattctccttcatccccgcaagagattacagacatttaaaattggaattggcatattccattaattttgcaattatttgaatatactaataatatatttttattgttaaaaaattcaaatgatataaataaaatttacctttgatcttccaaatctttccttccaaaactctccctggagggtttaaccagtaaaataaaattcatttatctgtatttatatgtaatagaaatacagttttgcacatattttaaaaaaataaatgtattttgaaactttaatggtaaattaaaaataatgatatcagttattatgaaactttcttgttttctttaaataggatgtcttagagattttttaaacatcactacatataaaatatacataacgtatggtagttcacttattgaagtgaaatatacatgaagggcacagattttaaatataaagcttcatgaattcctacatgtatatagccttgtaaaccaacacccaaaatcgagacgtaaaagatttccgtgtcaaaatagaaaacctttccaaactcccagacaagttctttatgcctctccttagtttatatcactggtattcccatccccctgctcctcctcctccccagattctgactttaggcactatagattaacttgcccttggctcaaattcatatgaatggaatcatatccctctgtgtctggtttcttttgcttactgttacacctgtgagaatgacgtatgatttgtatcacaatagtttttaaaattttgtggtagcagcattttgttgcgtgagtatataataacttatttgctctcctcagtggatatttgaataatttctagtttttgactcttatgaataataataaaaaaaccgcagtgcatatttttgtacaagttttttggtagacatatgcacttccttcctttgagtataaacctaggatttagaatggtaagtttagatacatatgtgtttggctgcagttgaaactgcccagttttcgaaagtagttgttacttttatactcccacgatttatgagcatttcagttacttgacatctttggcaatgtttggtattgtcactctttttaaaatgtagccatttgatatgtgtgtagtggtattactgttttaatatgagtttccctgatgactaatgagattgagaacattttcatatgtcatggccattgagatatccttgtgtactgtgtttttgttttttgtgtactttttatggatttttaa

SEQ ID NO: 55310 - DNA, 1805 bp, Bovine  19866880570131
  misc_feature (1)..(1): n is a, c, g, or t
ntaactatgggaagagaatctgtattccgatttgaaagaattctaggcaactgaattgctggggggagaatcagtaggttcatatatcagggaagatttggttcctaataataggaaaaccatttttgccaagagagttggttgcgatggaatgcatcgccttcgagatggcgagtatctcaggacaggtattcaagcagagtgagtgaagatgaatcacgtgagaggctcattttagtgatgaggagagacacaaacatacagcaatcaccccctctgataagtgttctgtaaaggataagtagaaagtcctctgggaaaacagaggcaggaaacggggcggtacctgctggatccaagggaggaatgttagaagagggagagcaggtggatgccttcagaataaggagacacggtgggcagacgcaaggaaccaggcaagagcgtgtgatttctgagaactgggatgtctagagtgacaagccagagggataagaatggcaggttatggagccatgtctaaggtgtttttgttaaggatttagcatgggcttcctacatgggctggtggctcagctggtaaagaatccgcccacaatgcaggagacctgggttcgatccctgggttgggaagataccctggagaagggaaaggctacccactccagtattctggcctggagaatcccctggacagaggctccatggggtcacaaaaagtcagacacgactgagcaactaacactttcacttcacttagcatggaaaatgaaagctctttcctactatagtccgaatagctgatatgagcaacatttccaatgggctccttgcctcttaatatcagaccttactgacaaaatgaactgagagttagaagatgaggtgaattgggagctggggagggttcctgggcccttcacctgctgggaacaccactagcttcccacccatcatccagacactgccatcctgtctggaaatttgctgaactataatttgcctctatccagatgtccctcattcactaagggccccaagccagccccagggtaaccttgggtaatcccttcatggaaagcagatcatgtgctcaagggccaactttgcccaccgcagggtagtctgtctgctccctcgcctgtagcaccagtgactgcaaacccctctcattgaaagccttgctccttggctgatccttggaaagagagccctttctccagcaacccactggggctctggggggccgtggctgagcaagccaacagccgtggacagaggagccaaggccctctggtggccgtgtgtgggaaggatgaagacgaggcccccgaggagctgggcagcttcctggccccattcaagcatccaccatgattagtctccaagtctttccaactttgtagctcagtggccaaggagtagatttccccaccctgagaccagggaccacagatccaagaataggtaccagaccagccacccttccagaagacacactttgttcctctgtgctgatcactctaccgcggagtcaagcaggttacatccgttttacagacaaggcacaaaaagcccaagaaggtcctctaacctgcccaagctcatgaggctgtgtacatggcaaagctggctgcagcccattctgtctgatcactaagtccatgttcttaaccgtatcccctactcaactctttttctaattcttcccaccacttaggattaggggctttgctccagctcactctgcctttgatcaggttgttcaaatctgccaaatgtccctccaccaaccttcaggatgt

SEQ ID NO: 55311 - DNA, 812 bp, Bovine  19866880716403
  misc_feature (1)..(1): n is a, c, g, or t
ngagactgtgagattataaatgggtgttgtttgaaacctctgaagtttgagacttctctggcagttcagtggttaagactctgtactcccagtgcagggggcaaagcttcaatccctggttggggaaataagatctcacatgctgtgcagcccggccaaaagataaaaacaggaagccctgaaacttgtggtcatctattatgcagaaatagagaactaatacattttctctagcccagagcacagccacaaatccacctgcttaatcctccccagctgtggctggtggggtaactggttttctccccaacttctccagacaagagtggggctagggtacggcccccagtgtattggcgatttttggtgttcagttgaaaatgaacctgtgacaggaaaaacaaagatcaatgtgtaacagcaactccccttcaccctcaaagatcctacacctggaatcatgttcttctccagttggactgaaccgacagaattccatgtgtgttacatcacaatgccccatctccccatccacacaagaggaaacaaaagtgaagaggaaacttctgcaggactcctggtgtaaaaggatatcttgtttgtaggatgggaggaaggaagtggctacactatccttttgccccagtgccatggaaaagacaaacagattctctttacacttgtgccggggaaatcgtttacggcctcaaagcaagtgcagaatttactggtctgccataaacttctacccttggctaactcaaggggaaggaaatgaagggacagaacattatggaccagtttttgagcca

SEQ ID NO: 55312 - DNA, 1436 bp, Bovine  19866880735823
  misc_feature (1)..(1): n is a, c, g, or t
naatcaacatagagaaacttgttttaaaaacataatgaaagactccttgggttcctctggccatcacacggctcttgcaacaacccctggatgagttatgtgcaaatgaatcagaaacatgcgctccaagtaatcagcgcaagatgtactgggcagatgctcttctagctttgccctaactcgacatctgagaggcttgctgagatgctttgccaaattgcaccgggtcatgccaatccctgagacaaacagacccttccttttgtctcaggaatggaaaagtttgaattctactctcttcgacgttcaaaggaggttgccccgctcatggtggccttgtgtggtccagacacgaggtccagggtgtgctcttctaccccagtacacttgggccgtggcaggccgagagcatctcctctggtgtgggatgcctacgagggcaccattggcttgattccatgctaccaccatcaccccagtcttgtaagcatcccttgcatatttataaataattatggaacttttagtaatcccccaaaaggacaaaaagaagaattacatcattcatcttgtatcactgttgtttgctggagggatggctgttggagagggacagtgcccaggacccacatgcaaccctacaaggatgtagtggaaggcatgcacagctgggttgcagggacctgagccagcagagataccataatgcccagcctttgaagacacaacctttctcctatgcagtcccagcccccatgcctgcagacagaacaactgagccgcaacaattgtctgcaaggctattaagggtcttggaggcgcgaggctgccaaaagccaggcaagcctgcaattatggtaataagatcagtctctgggtaggagataagggggaacaggctggacagttttggtattccgtttgtatccaggctggagtcaaagggattgcctaaacaaaacgtgccctgcaatttctccaagctgggaatcaaaacaattccatgttttaagctattaccgtcaatatgattctttttccccccaaactgctgcttggatccaaacaaaacagatttgttgcctggccaggcaatgagtagcaaaatacaaatttactccaaaaactattatcgatgactaaatctcatcagcttagaggtttctttttcccctttcatttctagccactgctccaactgaattaaaaataacacaaacaaacaaacaaaaaaaaaaacccacacaaaaccaaaaccatgcaaaccttaggatccacccttccctgcagttaggaatgtggaaacctcggactgatatcaaaagaacaaatctaatcttgaacgtgaaatttcataggcatccaattaaaaagacttaatgagcatgattggacttctcgaaggaaggaggtagagggagatcagttttagcttc

SEQ ID NO: 55313 - DNA, 1441 bp, Bovine  19866880746164
  misc_feature (1)..(1): n is a, c, g, or t
nctgccagttatattatgacacatggctttgtcatcacttaacacatggctattactttgcaagtattgcattgggggtgttctcccaacaagaaatatttgcttccttgatagcaaggttgtgcttctttgccatttccatgcattcctatgtatgtaatcactttttgtttgaattctgtatcagattgtagtccttttgaagacattgaaaatggcagttaaactcaacacatggagttccaacatggaacgcaactcagcagaagggtcagcaggggttagcagatgggagcagctgacctccagaggcagagctggctgtgtcccagctgctgcctgcagcagagccatgggaagatgctgtcaactgcagtgtgcctcctgatttctgaaaatttaaaatgtgaaaaaagagcatgcccttcttttattctcagcgttttttgtgaaaataaacagtttgaagctttctttaagcagtggtgtaagctcctgagaacaggggctctgtgagtatatttgtgtttcctgagtgcctggcatagggctttgcacttagtaaatgcttcatagacagaattaaaaaatgtgtgtgtatgggcaacaatattataatcatcagccttgttaagagactggaacacaattattccagccattaaaaagaaaggatagttatgtaatgtggtggaggttctaattattgcatgatggcaatcatattacaggaaataaatatatgaaattaacatgttgtataccttaaatgtatacaatgttacatgtcaagtatatttcactgaaaaagagagaaatgtgtacgtgattcttccctctcataggattctaaggttatccaccatgaaatttccttaaacagcattttaaaatttgatttaatttgccagaatcggattcacacataatttttcagtaacacatcagatgtgtaatataagatacatctgtggtctttctctggctatggaagggaagagcagatcgaggattagaagatcagaaggagggaaaaagcaagagattaagtttatgctctggctgaccttaacattcgtcttctgttacttgtctgtgccgtctggtttttttcttaaagagaaatagcaagtccgggggttttgtggcagctgactagtgatcaggagacagcggctgcagtctcccttttctggtgttctgtcatgaagaacagtctgctaccctagaggaaacctggtgatttctgactttctgggttctttgattttcctggtcttagctgtttcagaaatcagagggtggtgagggtgtgcccctggcttcttaagagtaggttcaaagatggatgggataaaaaaatgcgaagaatgagaccaggctgctgctttgatattaatatttctgagccagtgattggagtctcctctgcaagggtggg

SEQ ID NO: 55314 - DNA, 1577 bp, Bovine  19866880777228
  misc_feature (1)..(1): n is a, c, g, or t
ncgcttgatgcggtcgaagatgtcgctgtgctgtaggcccctcggtggggtaggagcaggggcagctaggcaggtcgttgatcaccttatgcatgtatttctttaggaactcgctcttgcaactcatccagcgctcacagctgtccgtgtctgaaaaaggccacagagaaacttctcatcacgtgcaaaactgggagcaggatgacttttaaagtcaacctctccattctgagtggcagcccctggtgtggtgaacacactcactgtctttgaacttgggaatttctttgtccacaaggttctctgcaccaccaattccttagtttatattatgaaaaaactttccgatacacaggagagaaaatatacttatatgactgcctagatgccatcacctagactcaatcatcattatattaccctccttaaaattttcttttggaaatatataacattattattcccaaaccagtcaatgctaaaggaaatcaaccctggaaggttgatttcaattcactggaaggactgatgctgaagctccaatactttggctacctggtacaaagagccaactcattggaaaagcccctgatgccgggaaagattgagggcaggaggagaagggggtggcagaggatgagatggtgagacaaaatcactgactcaatggaaattctaggagatggtagaggacagaggagcctggcctgctgtagaccatggggtcgcaagagctggacatggtttagtgactgaaaaacaagttttagtaggcatctacaaaaaaaaaaaaaaaaaaaaaaaaaccaaggtgtattttctatggtttcctgaataaccataagcccattatctattactcataaccaaatgaacaataattcagagatccattttgaatcttccctttaaataagcaacgagtgatagaaagtacctcaaagtaatacttgtaagactaagttttattctaccactcactgtcttgtttaaactaggcctaacctcttaaccttgggcaggaaacagtaataatcattatatgcaaatctccatgaaagatgccttaaagaagaggctggtggaccctggtttcagagaatttaacatttggcccaaggccactgacctgtaggcttatagccagaacttgtcatcagaggtgtatcgtgattggccgttacagtatttaaaaataatgaattaattgccaatatttaagaattagttgattctatttactcatgtagattccctgttccatttggaaaaacaaaagatatgccgatgctgggcctacattgttcccatgggaacaagtggtcctgtgaacaggggacaagtgaccacttcttggtcaaggcaggaggtcgccggcttgtcaccttccctgcctgatcctgtccctgtgggtgttcactctgggtccttcagtcgtcagagtctagggcttctgggttggtgaagtctgtgttttcccaaacgctgagacaaagatgcagtggagacagttctttgggaggtgattctgggaaacaccagcagggaaggaggcaggacagggaaggaggggggca

SEQ ID NO: 55315 - DNA, 1142 bp, Bovine  19866880953451
  misc_feature (1)..(1): n is a, c, g, or t
ntccgtacaggagagagccaattctgtgcgcaaaagataagtagactttgacttggtctggacaaagtctttgagtctttagaaaggcaatctaaaaataatagtagtgagtcaagtgtgaactttcccattcctcctaatggggttgtcaactgtgaagtttaattatatcactggtagccatttgatggcagttataggactcagaggccagcaattagtggtgacttctagcccaaccaagtacctccagcttcttgattgttgtaatgattgttggccaagcagaaggtcagttaaagtctttttgatcccggtcagtcgccttagttactgagtcattagcttcctaataactggcaaatcctctgctcaactaggtctgtcttgggtgtgttggtcattcttaccagatgagccaaatgtattgtatttctgattgtgatttcataaagaaaaccatgaaatagaattaagaaatggccagtgagcaagttctgcttcttttgtgtgcctgccctttctctgcctctagggagatcctgtccagcgcatcaacatggtggaaactgaatgaagttgagttgtgattgactggggacctcgtaggacgacagagtgcctgggccactcattcctttatttcttcatctattcatgtcataaaatatgttttcagctatactgtgtgctggacactggtgtagggtaagcttgagtgaccagatcctttggaggttacagtatgaaagtgaaacttagtcgctcagttgtgttcgactctttgcaaccccatggattgtagccccaccaggctcctctgtccatagaattctccaggcaagaatactggagtgggtagacatttctttctccaggggatcgtcccgacccaggaactgaacctgggtctcctgcattgcaggcagattctttaccatctgagccaccagtgaagtccatagcttacagtatacaagttaacaatttagagtttacttgtataattgtactacacaagtagtttatgtctttaattaaagtatagctgaggtacaatgtttcaggtgtgcagtaaagtgattcagttatatatatatatatatatatatatatatatatatatatatatgtagctttat

SEQ ID NO: 55316 - DNA, 2575 bp, Bovine  19866881004722
  misc_feature (1)..(1): n is a, c, g, or t
nctgtacttaaaagctttgactcgccaaaactaatacacagttttgatgctgtataaaaattaacctggaatgtaatccttgattcagttttctttttattctgaaaaaattaaaagaataaaaaaaaaatcactgcttttcgttaattaagcagatactttgtgctaaagagcacacttaatgtctagggtcttagaaaaagaacagatgcacctaatgtgtgaacacaaacagtaagttacaagttgccccttattactaaaggcaagaatcagcatcaatactcaaaaacagtgttttagaaagagtgtaacttacttttactgtcccaggctaactgggctgtgtctggtgcttctttgtctgcacttggccacccacagcctgtcttctaattaactcaatgctctagcagcagaacaagcaaacaagctgcctcccatctgtgtacagctcttcaggacacatttgccttggtcagaaggtggaaattcttgggagaggtgattttctctgcctcttcacaagaagaacatggacacttggctggatgcaactccatgaagtgtaactgtgtgtgtacacctcaaaaaataaaacaaaaaatgcagagaaacataaagactctataagcagatggaatacacagaaatactgaagcacccctggaaatactgctaaacagacagcaaagtagagtctttgactgaaataatcaatgataaccaacttgaaaaaaataaaggtacaaacagcatctgaagtcaaaatccaaatttcatacaatgaaaacatttgaagtactacaaagcagaaaaggtaaaactccttgcttcacatacataaaaacaggatctcccccactccccattacagacaataaaatatatggtcaatggaagagaaaaatgagactttagggagttgtgggtctaaaattggactcctcagtcacacagttgagggcatttgttgtatctgtgagctagatgcacggagctatctctccggcgtgttcagccccataggggcgtgagggggagcgggaagcaaggagctactgaaatcctcagctcccttctgcttatgaaaagatcgtttcttaaaaacaaaaaatgtgcagaacagagatgctcacttattttaaataattgttgaactcacaaataaacattaatgacagtaatgcagctgcccctacgtttttgcaacaaagactaaacaccaaagtgggatagggagcaggtgtggttaagcttctaatcataaagaaaccctaaaagcaaatttgttacaggcttggcgagagaaaggcagttaaatcagaccttcccagtattccctctcatccaagatatgcccatgcgccagcagcaagccacaccgtcttcctgaccacgaagcagcccaaggactcacaggccttcggggctctctctcccttcgaagcacacccacaattccagctagaagaataaagccaaaggaaggatgtatggcctaatcctatagctgcgcagagccctgggctgtggtccaccaaccacagggaggacattctggagatccttgctttttagacatgcatgcagagctggctctacagctcaggatgtagaggtcagataaatgcataaaagcattatatatactcatataaatgtacaataacgcaaatatctcctttttttccctcgcaccccaaactttcagccgtctggataagaagttacttctataaaggatttaccaaggtttacaagcaagcaccacattggattatatagagatccaaagacaatggtccatttttagcagacagctgtgcacaatataatctgctctttaaatgctaaagcatctggacaatcaacaagcttccaccatgaagtaccatctcctctgaccataggaagatataaagaatgaatcaactcaacaaaagatggcaaggtccacttagaataatctaagttcagcaaaacatttttaacaaggaggcctgtacaatttacctttcaccatatgaaattcaaaggctatacttatcactattgttaatgcatagtattctgcttaccaatataatcagctttcaaaacatattaaccaaaatctctcaaaggatacacccagccaaccatccattagtttcctcacaagactacaagtaacctcgcatcagtttgccagtcatatttcacctattattccttatcagaactttttaatcctcatcttaatactttcaaaataaattttttgatgtgcaaagagtgcttcagtaagcattttatgagctcattttctatcagaatctatgaaacactctttacttaagcagaggtattatgacttacccagatctaaatccagttttctcacagaaaaaaattcatatcagaaagctgtacatgtgaaatgtacaaattatgtaccaactatggtctaaaatttaaaatccactgtcgttatccaaaccaaaactatttcaaaagcaggcatgaaagcaactgtcttccaaatgcacagcccagacatgaagatcaagttgctgcacaaatttatcttctc

SEQ ID NO: 55317 - DNA, 1440 bp, Bovine  19866881039987
  misc_feature (1)..(1): n is a, c, g, or t
nctcagaaaatctatcttttcatcctctaagctcattgtctcttgtccaagtctggtcagaattctcattaggaaaatggttgtcttgtaaacagtcaatttctataaatttttaaatagaagctacaaccttaaccagactcacaaagaacagactagtggcgagcagtggggagagtgaggaggggcgccatagggctgggatgttggtggggtgtacaaactctcgggtgtaagataagctacagaggtgtattatacagcatgtggaatatagccagtattttgttataactgtaaatggactataacacttggaaattgtgtaactagaaaatagaacaaaaaggacaagcttctctggaacgtagagccacaccccaagtgcacccacctgggcagctgggacggtcacacgtcctagattcggttgcagtacacgcgtagccacaagacctggtccgtttctggttgccattcccacaggtaacactgcaaacagaccagaggctccagtcgccctcaccgtctgtggaatctggaagggagcagggagatggtcaccagcctcgcccaaagaaccctcacagcccccgtccggctgcctgccaactgcccacttgcagcgtccccactgttggaggggaccaggtgccagccggaggcgaaaagttatggccccagagctcattgcagggattagcttcatgttagcagggcctctctctgaggttcggacccctagaagatgcctgtgtgcgtgcatgctaagtcaaatctgactctttgagaccctgtggactgtagcccgccaggttcctctgtccatgggaagaatactggagtgggttgccgcgccctcctccaagggatcttcctgacgcagggatcaaatccaagtctcctgtggcgcctgcattgcatgcagattctttaccactgagccactggggaagcccagaagatgtctgaaactgaaagtcgctcagtgtgactctttgccaccccagagactatacagtccatggaatactccaggccagaatactggggtgggtagactttcccttctccagggggtctttccaacccagggatcaaacccaggtctcccgcattgcaggtggattctttaccgttgagccacaagggaagcccagaagatgcctagtaagtgcttattgaaaatgtacacatccacagagcgtggggccatgctactgctaagtcgcttcagttgcggccgactctgtgcgaccccatagacgacagcccaccaggctcccccgtccctgggattctccaggcaagaacactggagtgggttgccatttccttctccaatgcatgaaagtgaaaagtgaaagggaagtcgctcagtcgtgtccgactcttagcaatcccatggactgcagccctccagacttctccatccatggg

SEQ ID NO: 55318 - DNA, 1752 bp, Bovine  19866881075550
  misc_feature (1)..(1): n is a, c, g, or t
nccggggtcactcttagtgaaatgctggaaacagaaaatatggtgcactttatggcttgtgtatccatctgcatcttccctggtgcatgttcctggggtctctccccctcctaggttatgacctttcaggattttgcagattgttcaaagctactcttcagtgacagtttaaggacaacaagaggtagccactaaaaataacagtgtgcacagcaattcatccctgccccatccctgagcagtgtcttcctccatgttgacctttcagctttaaatgtgaatataagtgagccatgtgaaaatagcatctgtatgcagtagggcctccccttgcagaagtaagaatgaggtaacgtgcttttagaaaactcctattcagcagaactccaggagcattcttgtctagttcttttaaatgtgtatttccaacgttaatgatgagacagatgttctattaaaaggggaaagtactagaaacaagaatctaacagcaagcttcatactttgaaacttgctgtttctgcccctggaaaaaatgtaaagatgcttaaaaggagagacacatgagttgaacatagatttagttaaccaaagagataagaaattattttgaagctgtcccgtgttcacctatcgtgcccttgaattattctgatattccaatgcggacaaacgttagtcctgatctaagtcaccaggcacactgatcacttcctgctttaagcacctgcctccttctgtctaagggttttctgtgcattcaggatcccccaaccacacaaagcaagagttgacgccccaagagcagccctcctcagtgggtgatgagagtcagcagatgagcaccttgattcctttcccatctggaggcatcatttgaaggcaagttctgcagtctctcagagtgccctcaacaggctagagctccagctgctcactgtggtaacctgctcatcagtgaacattttattggctgtcttcttgactacatctcccttccccatgctctcatctcccaaataaactccaactgttcaaatacttgtccctgagtctgccatcaggtgaacccaagcaagatacatcttccctttggcccacaaacatctaagtttgaggtctgtgatcttactgaagtcgcaagaacttgtcctgtctagcatgacgttattataaccttctccaagaaaccaaaaattgacatttccagaggaccgtcttgccacagatgttaccaattacacagaaagtgcccaggctaggtcaggtggatctcagctcactcacagagagaggaatgaaaaataaatgccagggagggaaagaggagtccttcaaaaaatgtctccaaacattttccaccacaaatacctactctccatgggtaaataagaattatttgaagttataatggcttagaactttcaaaaactaatgacaaaaaaaaaaaaaaaactaatgacaaacactaaatcatcacagatccaggaaggtcagagatgaagaataaatacaaagaaaacaaatgaaacccttttgcatatcatattcaaactgaagaaaaagacaaagagaaaatcttgaagaagctagagggggggaaataccttaccaagagaagaaccaggataagaattacagtggacttctcatcagagaccatgcaaagaaaaggaaggtgatatgaaatatttgaaatgtgaaagaaaacacaccaccaacctagaattctgtatccagtaaattatcctt

SEQ ID NO: 55319 - DNA, 1403 bp, Bovine  19866881087653
  misc_feature (1)..(1): n is a, c, g, or t
naggaaagcccagggccatacagaaactcaagtctgctgtgcgtatgcttattccaggtataaacaggctataacactaaggtgaaaggctccaaagaaggaactcttactaagatgtgaaatgaaatcaaaactactaagacaactcagatgaatgaaaacatgtaagacaaatatatggaaaaatatttccattaatattgcatctctcaagagggaggggacatatgtatacttgttgctgattcacattgttgtacagcagaaaccaacacaacactgaaaagcaattatcctccaattaggaagatgggttatgacaataacaggggtagagtgtaatgtttcttgcctatgatccttttttactttatataagactatgaagtcttctacagtagatattacataaaaaattacttacatattttgaactactattaatgcatattaaaactgtattcaaatacaaatcaatatgtatgcctgtgaaattaaatatgtaggctccaaccctttaataaaagctaatggttttggagagagaccagagccaaaaaaaaaaaaaagaatattatatctctatatcctaccaaatttacgctaacattcgaaagaaagcctaacaagtaaagcagagacacatctaaccttcaaggataaggaagaagtcagataaaagaaatttcagtaaatcttaaatcgttactgtcctgtgacataaattttactatctgtcttagtgacatggggcaaatattccgtatttccaggaacacaccatcacatcatcctagcagaatgttctatcatcaatattagtaaacagtgactattatgatagattacaacacatataatttaccaggaaattatgaagaaccaggaaagcactgtcacgtgaggctagaatatagagaaatagatgcagaaaacagtattacaaaacatacaacactgaatcccgagtagcaggaggtgcgctgatacaaagtgataacatccatggcaattaacatatctgtacgtctctcctccataaagaaagatgctccagtcctggtgggaacaggtagacacacccttccaacctgctccctccattatgattccaacccaagtctgatttccaagcccatgacatcccaaccaccttcagagcacaccttctcttccagtcaagagacctgaaatgccaatgaggaatgtaaaaaaaaaatctctaattcctttctgtctaactcagatttttaaaaatgattatccatgttttctactagccaatgcttgtaaaaaaaatttttcatcaaagccaaagacaaatacagtgaacaaatgtactctttcttgatacgaataaaaatattctgaaaattaaaatgtaagggatccttcagtcatga

SEQ ID NO: 55320 - DNA, 1154 bp, Bovine  19866881118987
  misc_feature (1)..(1): n is a, c, g, or t
ngaggaagtcgagcagcttgtcagagcctttttgagccgccttcatatggttcgcagagacagagctgggttttcatttcttctttcattcaacaggagtccctttcatgtttgcaaattgaaaacgcgtgttttgcagtgtggggcgaggatgtgtgtgccctctggcacacctgtttctcatttcctgacttgaaagcgcaacccatcaaaaggagcagaaaaacaatttctttctgacacgctgctctgtgttccctactggaccgaaggccttcgcagctttgccatcttggttccctctgtagaaggttctcgttagaggcagagttcactcgatgccggcagcaccttttatagcacagggccgtttggggtatgattttgttatggtggtggtggtgttcttttgctgcacaggaaatttacttgaactaagattgattttaaaaaatacacagagaggtcttaaacatttttaaatattaaatttagctgggcagcatcttacgttggaagcatctatgtaagccgaccagtgaaccagttggccaggaaaagggcttggtggagcatacaaatgtttaaattccagagcactgtttaacataaatcaaatatttccaaagcattacttcagatttgtgtgtactttaaagtcttgccagcttaaatgactgtgaggcacaatatgttgactttgagtttgtaaattgataatttgttgctatgaaggttgtacatggtataactcatcactttctgaaggtacatagtatgtctgatgttgcaagctgttacgtttgaaaaaaaaacgatgctcaggaattcaggccttgagctctcagatgcttggaactttggttcctcttaaggtttccctggatattttcagagtgaggcacatggttctttagacccaaacttgctttaggttttctacttctgagagtcatttgggataataattttaatgatgtatcttcagaaacagtttctcaagatctttttttttaacactcattcttcccacagtttagcatgtatgaatcacctgttaaaatccagagtatgggacttccttggtggtccggggttaagaaccagggaaacgaggatcccacgtgccacgcagcagaccaaaaggaaaatgc

SEQ ID NO: 55321 - DNA, 1154 bp, Bovine  19866881320459
  misc_feature (1)..(1): n is a, c, g, or t
nactgcggtgcaaaaatcccagtggttctctccagcccacggcacactggagtttatcttgtccttacctccacgttgggtcaatctctcctctcccttctgctgcgcccttacactggaacttttctttatatctttgtctttcttcaagacgcaatcccactgcctcagtggagcttcccgtgtctacttcccaagaagcacatcccctctttctcctctgccttctggtagcctcgctgcgtatattagtctgcatatcttgttacttcccctgccgttacttcttcctgtgcacaagctcatgtactacgctcaaggacaaaaataaaaagacacattctagatcattctttgtaccctcctgcatactaaaccactgctcgcatgacctggatacccaaacaaatgtctaggaggccatttttcctttacacatctggttttgaggttccctcgtggctcagatgtgaagaatctgcctgcaatgcaggagacccaggttcgatccctgggtcgggaagatgccttacacatctcaactccaaggaagctcctatttttgtataccttctatgttgttgagggagaggctgagaagaatggatagaaaaaacaaatagcttagtgatgcgcctggaaaatcagaccacgttcaagaatcaaatgtcctctgctgtaatgtgtggagatgggtccaccaacacagatttatttgccttctttttggatttccctccttcgttaaaggaccttgtggattatttacggactcactcccatagcgctgcttatggcacatccatgagccccccggtagcagagcaaatcatcagagtaatgaaactcatcatgggactagatgggaccacagaaggtaagagggtctgcagcaagcccagctccctttcattccttcctagacccctctctgcctcccttctgccccatcaacctctccccttctcaaatatactgctttgtcttaatgtaaccaatttgtagattaagccatgtgtgcattaatagtacgtaatgcatagtagtacggagtacataaatgtactggaacagccattagcacacagaaagggtgagcagggcaatgcttttttaaagcaatgaacactttctaacttacctcttcatgtgat

SEQ ID NO: 55322 - DNA, 1385 bp, Bovine  19866881336686
  misc_feature (1)..(1): n is a, c, g, or t
ngatggaggcactcaggttccaagatctagataacttgccccagggaaggtaactgagataaagcagaactgggattcaaaccaggtggctctgcagggatagagacccaataaccaaagagtctgcccatgtgcccgcatccgatgaagtgaacgtggaaaatgcagaggcatccatttgaccttcctcatcaacccatttagggcttagtttctttatctgtaaaatagcgagatcgaagtctagagttccatgatctggggttcagaagtacaatagtattgttttgatgttctcatctgcattttccttatttttaaagtcgttctcttctagttttgtgtttctgggaagcccagtagtccattcatggtggtcgagaagttttaaaatcattcaaatatacactacagtcagggaaagtgaaaagtgttagtctctcagtcatgtccaactctttgcaacaccatggactgtagcctgccaggctcgtctgtccctggaattctccaggcaagaatactggagtggatatccattcccttctccagggggtcttctgacccagggatctcatctgggtctcctacactgtgggcagtttctttactgcctgagccaccaaggaaacattagaaatgggagatgggtccaaaataaccttggatataaaccagtatagctggagcctaaattttctaaataaaattaatcaagaaatactatctagtcatatccaaaactacatatataaacaaatgttggaatctcagcatgcccattgtctctaagaatataagccattctcttgacccaaataatgtaagtttaagaactgagaacttcagtagtaaagtctaacctctatccctatggtataaatgaataaagacaaaggaaaagaaaacagtagttacctgatttttaattaatttcagctcctttttttttttctcctctctttccacctttcttctcttggattatactctgggcccaccaaggagatttttccaccatgtaagttggcaaaccagtggcttaattcccagtcatgccagtgggtaatatggtttaaacacagaggagaaggtggtgagagggagatttaaaaaaggagtcttgtcacttagctaatacattatgtaacaaaaagatataaagagattattcattggcttactggtttaagaataatccaaatccctgcagagagatttcaattaacaagtgaaattatttttacctacagttgtattttagttttgttttgttttgtttttcccctctattgaaaccaaaagaaaacatgaccttccactcaagaagaaaatactgttcttaggtttgtttgtttgttttttcatcattttggcacagtatt

SEQ ID NO: 55323 - DNA, 1773 bp, Bovine  19866881430308
  misc_feature (1)..(1): n is a, c, g, or t
nctaattaatagcacagtgagctaagtatttacttgggaattagctttaacaactcaaagcacttaaaatccattgaatgtatattaatttccccccagtgaaacgaaaccagagcagccttacaagattgagagcacgtctcccaccaaataaaatttgcccggttatccctgtttggtatcagggcagaaagggagagtgacacagagcctccctggcgggtgctcactgctgacaagcatttgttcttttgccctagcatggaaggttccatcgtgcatctgcccgatatcgtggctctgaagaagaaatacaaggcttatctctacatggatgaagctcacagtattgggtccgtgggccccaccggccggggtgtggtggagttctttggactagaccccagagatattgatgtatatatgggcacattcaccaaaagctttggagccgcaggaggctacatagctggaaggaaggtaagagacagatcccttgcatctatttaaaacctgaatgccctgggaatgcagtcttgggggtcctctggtttccctgagggcttcagttcagtttagcacacctgactgattaaggcggcctgggcagcatgggttcacaggcatgggaggcccagaaggtcaaggagctcattctctgatagtgcagaggttcttgtgatgaataatcctgtgatcgtgaaacgacaactctggctgtgtacataggcaaagatagtgcaaaggagagaaagactcagaagtctcagaaagactgtcagtcttgtagcccaagggtgacgagggggtgtgtgggtcatatttcaaaaagagaatgctgtttaccaagccacagaagtgatgctgcagaactgtaagtagtttgggaaaaacctaaggtggctggtaggaacagcggcagaggtcagatgttgaagacactgaccctctgcgacaagatgtgggttttcagagttttaacaaaacagtggcaagattggagatcttttttatatattttattgaaatatagttgctttaccatgttgtgttagtttctgctgcaaggcaaagtgaatcagccatacggacacaaaataccccctctcttttggattcccatcccatttaggtcatcacagagcaccgagtagaattccctgtgctacccggtgtgttctcattggttatctacttaatacatattaatagtatcaagaatgtatatatgccaatcccaatcccccaattcattccacccacctttgcccgccttggcatccacatgtttgttctctcatctgtgtctctatttctgctttgcaaataagttcatctgtaccttttccctagattccacatataagagattatgcaatatttgtttttctctttctgacttctttcactctgtatgacagtctctaggtccataagagatttttctctgccaagtaattctctcccacagtcttggataggccatgagtctaatcttgtcatcctctcatatcttatttgtgtgactgaagattctgagctgatggaattagactaagtgttatccctgtcattccactgccaacatcacccaggaggtcaccaaaatgaaacaaatttttgaaaaggttttaaaagaagagggaagaagacgagaggaagaaaatgaaatattaaaacctgactttcagggctcaaaaagccagttctctgctccatcatacaacagtttcaccagagccctgatggttctctcctccagctgtacacctg

SEQ ID NO: 55324 - DNA, 745 bp, Bovine  19866881584958
  misc_feature (1)..(1): n is a, c, g, or t
ngaaacggagtgacagaggctccccttagagtgctgagttgctctgcctgtctgagccacttttagtcaattattttatatttacagctcacagttgccctccaccccaccctctttgccatctccaggatcccttgttggagttttcaagggcccattccgttaacctttgtaatagaattcttcccctgggcatggaaatattgctggagcctctttcaataattttaacagggtgtagtacaaaaagataattatttcttgtgggggaaatgtccctttaatcgtggcttatattttcttcccattttgaaggaagcccactttggatttggtatgaggtagtgggcaatttaagggggggtaatacaggagagggcccaaggtgtcagttagagagcagctggggtgtccttgcccagccaggccacttttaccgtggttctgactggaaggaggagcagacagcgtgcagagagcctggcagccgggagcagtggtttggtcagtgtgtgtagaggccctggaccccacccgcccagcctcccctccaagtggggggctcacggtagggcagctatggtcccttttgctgaaagagccaatgccttggctcccacattttctggaaacttctgttattgaactctggaaacattaatcaggttaaatggctcctctgcttaagaccctttgctggcttcccatctttcttagcagaattcaaacctctatccaaggagga

SEQ ID NO: 55325 - DNA, 992 bp, Bovine  19866881876890
  misc_feature (1)..(1): n is a, c, g, or t
nggctccgtgctgtcctgatctcgtaatcctcccccctgccagtgctgtgcttggcatgtagtaggtgttcagttaacatccccctaagatttgaacaaacaggatctgtctgcccctgagttacccacgagcacagcctggagattctcagaagcaaagagaagccaagattctgttttctaccccttcgtcgcacgtggaggggaggaaacacagctggcgcctctaacggtcttcgtctcccctccgcagactcatatttccagactccctcctggcgcggtggccggacaatccgtggcgattgaaggaggcgtctgccgcctggagagcccggtgagctgagccttccagcggaacccggagcgtcgagggcatcaccgaacccgggctccacggggttctaacggaagttggatgtttaaccttcctcgttccataacttctgtcgcagcctcgtgcgtccctcgcgcatccctcgcgacactagtgctgctgtagttagtgcttggcaacacgcgggtctagggcgggggagcgggatgcggtgtgcgtgagtgtgtgtgtgtgtgtgcgtgtgctcgcttcttcaatgaattagaaactcctccttattatgtaacctcagaccacgaatgattaaatcatcttcccaaaatgcgtgctttaactgtttacaggtaaaacctaaagttgcaggaaatggttgatttcacaaagcagtaccgactgtgttgatgtaacatgtaatgtgtctgaaactgcagagtaaatctacttgttgcaatgatggacagtggccgtgctcctgataacagtgctagtaacaaagtatttttatttgttagccagtttaagtggatcctgtggtgacttaaactgttgttctcatccctcatatggggcatttttctttaacaaagaatgggtttcagtgaaacaatctagcagagaattaaggtcagaacctttttaaataatagtcttattg

SEQ ID NO: 55326 - DNA, 1451 bp, Bovine  19866880164116
  misc_feature (1)..(1): n is a, c, g, or t
ntcttcggcgctcagccttcttcacagtccaattggacattcatacatgaccacaggaaaaaccatagccttgactagacgaacctttgttggcaaagtaatgtctctgcttttgaacatgctatgtaggttggtcataactttgcttccaaggagtaagcgtcttttaatttcatggctgcagtcaccatctgcagtgattttggagcccagaaaaataaagtctgacactgtttccactgtttccccatctgtttcccatgaagtggtgggaccggatgccatgatcttcgttttctgaatgttgagctttaagcccactttgtcactctccactttcactttcatcaagaagcttttgagttcctcttcactttctgccataagggtggtgtcatctgcatatctgaggtaattgatatttctcccggcaatcttgattccagcttgtgtttcttccagtccagcgtttctcatgatgtactctgcatataagttaaataagcagggtgacaatatacagccttgacgtacttcttttcctatttggaaccagtctgttgttccatgtccagttctaactgttgcttcctgaccatatttgagttaggaaagcaagattgctatcattgattcctagttggccttgtacaagggtatgcctttgtatttgtgtaataaacttgtaactaatatcttagtgtaactttagtaaagcctattaaggatcacattatttaagatcatggagatttgcatgtttcatagtattgtcctagcagttaaccaatattactttccaattttttaatggtccatgctattttaagaaagatatatttggacatattactgaacatgtaaatatatttatgattactcattacttcaaattaatactttttatcctgagttcttatttgtctctcagaagataattaatcataacatgtctttgttcaggtatgaggaagaagccattcatactgtggtctttgtcaatttagggtagtgggtcacaagcaactctgcagtagatgtatactcattaaaacaatctgggctaactgattcaggtttatggttgatattattttcccagtgttaaatgttcatgactggcaaggctcacttattcaaatgtagaagctcctatttctattaaatagtgaaatacttctattttactgaataatatttcttgttggtgagaactggataaatgagctaaaattggttgacatctgaaaagctcaaacggtattgagaaaacaattgggttattttattttggaaaataatttgcacttacactataaagacagatgtttgacataacaaatgaaagtcactcttgctaagaaggcgtgaagccccgccgcagcacggagaaagtgcaggtcccgttgtgtgtgtgctcagttcccgagtcatgtccagctctttgcgcc

SEQ ID NO: 55327 - DNA, 1325 bp, Bovine  19866880384052
  misc_feature (1)..(1): n is a, c, g, or t
nattatataaaacaaaaatccagatatgttctctcaaaagtgatgttcataaatatttaaacaaattaaagacaatgttacaaattttctattaaatttcttgagtcctaaaaccagctggcaatgatattgtctcattaaatcttcataaaattgcatttttgcatgttatttaagagaatcaaaacatcccaaaatccttgacaattctcaaaaactataataagtaaaaatacaaaggtgagagatgccaagtaatttcaaacaaactaaagtgattattttgctatattattttttccttcatgcttgtatatattcactcaacaattctttcaagagactgtagaatccagacactatattgataggtcagatttaattagttaagacaaaatccctaggctaatgtgtattaagcatactgtcacagttcagtatgataagagccatggcaaataggctgactcagtgctggaagcacacaggacttgttatgcctgggggttgaaaccagagaagattttatacctggaaaaatactttgtgtgctaagatatgttcttttaaataggtgggagatatgcaaataaaacaaggaattcaacagctatagtctctcccatctcatcctcaaaacaccaatggtatttgccatcaggaaggggtgaaaaaaaaatctagagataccctgggagtagtaatggaaataaagaaaaacaggtttccgggattagtcagtaggtcgttttcctaaattctttatcatgatagtgtctcaggacaaatatttgtcgttttagttttaccaaaggtgagggcacggctgtccattgtagtaagatattgtttctcatgtgtttcccaggtaatgaattctaataaagcaaagcatatgaccactgatttatgaatgagttaatggaaggagcgaacaggaggagagggcatggccaaacatctgagcaaatgactgtcccctctaagtctcacacaccctttagttccactgtttctcagtgtcaacatcgttccccattgaactgcaattcctcagataatctagcccataatactctcacgcccactcccctggccacagtattccctagctccctctttttttttcgcctccggtccatccttccatattctttgctcattcatataataaatatcattcaatgcctctatgcatgaatcattacattgggttctatgaagataatacaacaccaagatgaatttggtgcaaccccttctatccactttctaaggaaataagaaaggcaatgacatgcatgcacacacaaaatacctagaat

SEQ ID NO: 55328 - DNA, 1624 bp, Bovine  19866880460080
  misc_feature (1)..(1): n is a, c, g, or t
nttctaaattctggacgggagaggaaggaaaggatgctgagcagcggaagggagcaatgctggagggtcagggtgaatgcactgggcactcgagcaggccacggcctttcagaatgactgcaaggcttcgaatctccagtgaggagagtctgaccagaacagcatcagtgttagggagtgggttccggcagtggcgagagctgtgtgcctactagagagggacagacacctgggagagaggacaaggggcccacgtggaggccaagacagaacaacgctggctggtgactccagctgagatctcctgggaccctcacctaagtcctgatcctcaagggctgccacacacatctcacctcaactgaacggatggaactggggaaacacttaactaccccaacaaccagagctggaagtgtgtccctgataacgacttgccgcaactctgggttgaaagtccagcttcaaacatgttaagtaaaccaccctcagcaacccatgatgaggaagaatgcatgggcggcatgaagtctgtagaagtccacagtcacaggtatccagagggatgttgggcagggctacggaaatggtgctaagggtcccagcaactgtgctcatcaaaaggctcctgacaacttcattttttgtgcgtgcaagcaacatttataatgttggatttcctgaaactcataaatatttcaaaaaattacaatgaaacctggccacattgctctctatttgcaccagagtgcttttaattttcaagtccaagtaagtaaacagacagctgagagatttaatcctttgtcttactcagatctgaccaattcagaaagtaaacactctcccaagcaaaagtttaaagtgacaacttaaccaaacagagttgagaatttttaagtggtcccattgagaaagacaaaacaaggcacagtctgtacttaatttttcaaagataaagatctctacaaaagctaacctatgtctagctctgataattagcaaatcaatcaccatctcacttgatcagaccaagttagcactaaaggactttcaagtcttccatacacaagtacagccaatgatgcagtaagccttaggacttaaacatttattagcacgaactgcaggaataacggctaatgcagctcctactgtggagctgaaacaatttgtagttggaagaaattcaaagggagttatggctccactgattttcaaaactcagaattacgcaggaattaaaatgctacgatcactctacattcactgaaacatacacctcaatgtcttcccttctttcgagccccataacagaactgcagtatgaatacaaaggcaacttttaaaaactttctgaacacaagaataaaatcctacagctgaaagaaacaatactaaaacaacaggcttaaaaaccggtcattgaaaggaggattcgcaagtgctgccttttcttttctttttttttaaagtggctgaagtttcggtttaggaaaagttcacaggtaacatgtgcaggagtgctaaatatttataccctgggcagaagagctgaaactttcgctgtcattaccaccgcgttatctgcggcagaagaacacattatttagagagcaagtta

SEQ ID NO: 55329 - DNA, 1503 bp, Bovine  19866880618877
  misc_feature (1)..(1): n is a, c, g, or t
nctttgacttacggacctttgttggcaaagtaatgtctctgctttttaataggctgtctaggtttgtcatagctttccttccaaagagcaagcgtcttttaatttcatggctgcagtcaccatctgcagtgattttggagcccaagaaaataaaatctgccactgcttttacttttttcccttctatttgccatgaagtgatgggaccagataccatgatcttaatttattaatgttgagttttgaaccagctttctcactttcctctttcttgacacgtttactccagaatgagttaattatctagcaggttgtgtctttgtcctttctactgactctcaaatcttatgaagtttgatggtaacttatagatcttgtccgttagagttgcaaataatttctgtctgatagaaaagatattcccaaaggttatggcttcttattgccttgcagaacattgatcagtttatatctaacctgccaatctattctaatatttcctttaaaatacttataagtgatccagtgcttcccagtgttctctgagtggactttatcattttgcagattccctcataaatgaataaataaatctttgacatgtgttgattctgtacgttataaaagtcatactctaagcattttgaaactcctgctttgacaaatgaattcaaataaattattcagttcaaataagttgtgggacttccaaggtggtccagtggttaagactcgtgggcttctactacagggggcacaggttcaattcctgcttggggaactaagatccctcatgccatgtggtagcagcaactacaacaacaataacaacaaaaaatgctcaacaaaaaggttgtgatgagctgtgcaaatcttggcagatattcttggctttttttttttttttgcctcttgaggctctgattctgccttgctgagctatacaacacacatctggtccattcactcaagattctttttcaactggtagaggacatctggtcacctacggtccctcccatcagatttgtcttaactgcacaactttaggccctttatcctgtgtcccctccagctgcccctactccaggaccgctctcatttgttactcactagtgcacttaagcatccatatctgaaagtccatatctgaaagtgaaggggaagaatatccccaggtgaaataaataatattttatacttatctacctataagcaacgtgattctgctgcagaatcacaaatagacgtcatctctccggactattctaaccaattgctatctatctacagggcaggctgaggttgaacccaggctcgccctaacgtgctgtgatcagtcggcagtggcttccaggtacccaggattagagtgcttggtgtgaaccacatccttcttgacccagttccaagaggtgatggttcaagacgtgaaataaaccacaaagcctgcggctgataactagcgcaggcgtggcactctgctgcctttcctgcagaaat

SEQ ID NO: 55330 - DNA, 1082 bp, Bovine  19866880662126
  misc_feature (1)..(1): n is a, c, g, or t
ntgtattgttttatgatggtagatgacaggcatgaggtttgcacatttcaaagcaatttgctttccagatatgccaatttacatcccttctagctctgtggaataccagatttatcacatccttgtcagtattgaggattgttaattgaaaaaaaaaacggttgactatttcataggtgaaaaatggtgtcttggctaactcaaaatgcttgtttcttttttgcagtatgcaagagatagttctggggtgatcaatgtcatgctgaatggctcagagccagcaggagcctatcctgtaaaagggtaagaatgcgagccctagcatatatgacaaagatgccaagatgtctttttaattgttttgaatggaggcttaagaggatcgtccgcatatcccaatctagtgcttttgtaagttcagctggggcaaaaccattgaatgacctggacatcagagccatgtgcatgcctttataccactaacagctgaatgcacgaatgcaatagtaacctacaagttaaaactaaaaggtaatccccaaagggcttccctggcggctctgtggtaaaaaatccacctgccaatgaaggagactcggatttgatccttgagtcaggaagatcccctggagaaggaaatggcagtccattccagtattcttgcctggagaatcccatggagacaggagcctggtgggctacagtgtgcatgaggttgcaagacttagcaacagaatcgccaccaacaacccccaaaagtgttaaaagtaacgtgtaagtcagctaacaacggtatgggagcagtgtcatattgctctaggacttaacagaacgtgttttctcagtttttttgcagattttgaaattccctacctccagaaggataaaatcacacgaattgagatctgggtgatgcatgaaatcggaggacccaaggtgtaagttaccgtgctactggtgatggtcatggtacaaacatgcttttcttggatgtgacatgacccagtctgatttacatgtacagttctggggaagccactgtcttctctgttcatagtgtggtgggcagagaaaggcaaagg

SEQ ID NO: 55331 - DNA, 1172 bp, Bovine  19866880668852
  misc_feature (1)..(1): n is a, c, g, or t
ncaggcagggagagagacagccttgctgacggggcgtaagaagacaagtctagagagacgggtgcgccctgaataccagtctgagcagtttctactgaattcatcacgtcatggggagctgacttgcctttgaacttctgttggaaaatcaccaggatgcttcagttcagttcagttgctcagtcatgtctgactctttgtgaccccatggactgcagcacaccaggcctccctgtctatcaccaacctctggatcttgatcaaactcaagcccgtcaagtcgatgccatccaaccatctcatcctctatcgtccccttctcctcccggccttcaatctttcccagcatcagggtcttctccagtgagtcagctcttcgcatcaggtagcctaagtattgcagtttctgcttcagcaccagtccttccaatgaatattgaggactgatttcctttaggatggactggttggatcgccttgcagtccaagggactctcaagagtcttctccaacaccacagtttagaagcatcacttcttctgtgctcagctttctttagtccagctctcacatccacacatgaccactctcactctctctcaccaggatgcttcctagttgtattttcttcacagatcgatggaacgtttaagatcgatattcccccagtgctcctgggctacagtaaggagcgaagcatgatgatggaccggggttttgactctgtccgaagcctgagtgaaggctcttacatcaccctgtttattaccttggagcctcagctagttcctggggagtcggttcgagaaaaggtaactgtgtagtctccggaatcccatatgagatgcagatgaaacgtgagagaggcttgctaggctatgctttcgtaaaattagactgaacagataagcagaggtttcctttcttgagcatctattattacattcagaggggagcttccaaacggggagagagcagactacgactggggccgacaggccgaaaaccagagggccctttgcactgggcattcttcccaggcaactgacctcctactgcaggagttttaagagtcccgtggccttccttccttaaaatgagactatctaagctgtcagctgctgccttcagtggcttttcactgccccactgtggctgcaggtggcatttct

SEQ ID NO: 55332 - DNA, 3651 bp, Bovine  19866880675587
  misc_feature (1)..(1): n is a, c, g, or t
naaaagaagattaataatttgaatatcaaaaatacttttaaagcattcatcaccagtgtttttaagttccttaataacgattaagagaaaacattcccattttggtagaagtttcactttttaattaacgtaagagttcaccccaagtcagacagatttatttcattccatttcctgattacctagtatcttagatgctgataagaagataacagcttaaaaagtgaactgtattaactagcccttagcaggaatttagttctttgcttttattaaattcattcagactaagctcagaatacttagtaattaatgtgaatatcatcatgaaacctaatttttggcttatcttattcccctaagttcctttagtaatgctgttggctttgttagctagctaaaggagtcatccggttggttcttgtgttccagacctgaaatatttaccagatcggaagcagtctgggaagcaggggttttatgttacccaaagtcttgtattttactctctgtttctatttttttcttcttttgtaaaataaaaacagtttccttatgtccccaaagaccactggaggaatttgactatgtctgaccagattgatggtttgaacattttttgaagtttgtagagaactggcatttctgtaggattatattggtgaaagaagtaaatggcttgccagtatagcaccaccctataaataaaatatttatttcacagacattaacactgtaatataatttcatcatactctgactcaaaagaaaattattttggatacatactataatattattatttatatacactctactatttttatgttaaactttttttcagatattaaggaacgattcacaaattatgtgcttttgctaatagtatgtctgagaaacatggagcagttttcttggaatccaggtaaggaagtctttacaattatggtgcctttcaattttactcttgagtgaaaaatcattctcttccatggaataaaatgagtacgcaggaaagtgcaggaaactccagaaggctttagctggtccactcttcacatgtaggatgggttgactgtgctctctatgggggtggtaggagctagaccccccgcagtagtctttggcccagcatggaaccagtgataaagaacctgcctgccaatgcaggagacacaggttcaattcctgggtggggaagatccccggagtaggaaatggcagcccactccattgttcttgcctggagaatcccatggacagaggagcctggcgggccacagtccgtggggtcgcagagtcagacacggctaagcgcgcacagttcccacgggccatgcagcatggctggagccacgcacccagtggccctgctgagcattgcagcgtagacatttttctctctcgcagacgaggaaactggaacttgttaatagaccatttccagcgtcaggtagccagtcagtggcggagctaagtgtcgaaagaggtcgaggtgccctggctaaagctcagcaccacgtgagacaggcagagacctccttcccggtcagcaggcagagccccagccctgcgccctccacccgcagccagctgccccaggcccgggattgccgctggtccctgccagcatttctgatcttcctgctctgtgccctcgtatatcctccttcaaggcctaagcaggttatcctgatgtctgcatttgttaatcaggcacttggtactgagttcacgttttaataaacatggtaaagatgagcaaatttggcaggttacctctgtatgacggtgaaataaaggatggatcagtatcgttgaatcttagtgatgaaagagagaaaaacagttcagttgactttagcaccttgtcctcctggttacccactgtcacaccgaggcagcaccagaggcttagacggagcttcctcactcaccatcccacatcgtcctgtggctctcctggcttcagggagaagctgggctccgctaaccccggcacccgcctcaaggcttcctctgtacccagcacggagtaagcacttgttgaatgacttagccttcatcctgaaaagataggactcttcctgataattaattctatgctgcttctctctccattatcacttgttggaaatgctctagttttgccccatggagagtgcactttcttctggtagcctgtgataggatgttaggattctgttcaaattacgagatgtaatcgtctctcttctcccctactttatagatcatctctgggtgttatttccagatgtctgtatggtggtcgcatcagaaattgctgtggatattgtaaaacatgcttttatcacaaagttcaatgacatcacggcagatgtatgtattttaataggcaattcaatgtttggtgttgacttctgattaagtatcataaggttgtaggatagcaagttaaatttactgaatttatgaatacggtagaaaagaactacatttctaaagttagaattataattttaaatttctaaaaatgattttgctgccaaaagtacattttttcaatattaaatagttctgcttctgtacttttggatagaggtatagactgatcagtagttgaaatcagggtgtcactaaaaccattataaactgttaataccatcataacctgtcttgttaaacttttaaaagtcacattgttcctatttaaaacattagatacgaaaacttctatctttgactagattgtttagtattttatattttaaagttgattttcttttctcttgtgattattaataggtttttggtaagtcctagaagacaaacaccgtatatttttctactgaaaacatttgttggaactttgagcaatttgctttgtcacagccaggcattttgtagcgtttccaaaaatagaaatgtggctgtaggcttgatgtaaacaaaatgaggcctactcgctgagccatcccaccagtcgagttttcaagagcaatgctcattcctcccccaggcccaaaatgaatggtaattcaccaatatctcaatttggtttgggttgtgcatgcttattgtcatattttaaaaggcaaagacttaaaatgcaatgcagtgcagctgctacaatcgatgatgggattatggcatttctgaatgttttaatatccttgaataaaagatgatcacgcagtttctggcaaaggccggatacgacaatttcaccctttactctcttggcttccttttcatgggacattttctcagcagcgcaagtcaaaactaatagccttgattcaaatatttagtgttttgtagtggaaatgacagtttacaagtgctttcaggactactgtgttctccaactcagcttaatatcatacttagcattcactcttctaagaagacatcattatcattagacgtacagtaataatttttaaaactgttcatttaatttaaattttcagaattattttccgtgccttgcactacttaaaatagccactcttcctaaaagtctaaactctcaacaaccataatcattaaatatttatccttctttaaaggaaacctttaaaaggccttgaacctatcaaggggaattgaggctctttttcactcttattgtaggtgaacaaatagggaaaaactacccagaggtca

SEQ ID NO: 55333 - DNA, 2287 bp, Bovine  19866880728815
  misc_feature (1)..(1): n is a, c, g, or t
ntgcatttggatattttcctggaagttgaaaggtctttcccagaactgactcactggaaaagaccctgatgctaagaaagattgaaggcaggaggagaagggaaccgacagaggatgagatggttggatggcatcaccaactcaatggacatgagtttgagtaaactccgggaattggtgatggacaaggaagcctggcgtgctgcagtccatggggtggcaaagagtcggacacgaccgagtgactgaactgactgactgaaagaaggtagcaactgcttgatcccatattctgacaactcaaatcggtgcatcctttgtttcaggaaggatcttcaaaatggacacacacacacacccctgaaggtttaacccatgatggcaaataggttaaaaagcatgaaatgtgttcactgtggaatgttctctgtgtaattggtgtcacagtgtgtgctgtttcttttgtttgacttgcagattatctactatgagatcgggattattatctgtgctgccctgggattgctgtttgttattctgatgcctctggtgggctttttcttttgtctgtgtcgttgctgtaacaagtgtggtggagaaatgcaccagcgacagaagaaaagtggtcccttcctcaagaaatactttacaatctccctcctggtgatctgtgtgttcataaggcaagtagaaccttggacaagagctgagtggctctgaggctgatgagcaatacttgtgtttaactgttaagcacatgagcttgaaacaagaagagaatacagaaacagaaaagtaaaaaaacgcaaaaaacagaaaagagagaaaaaagatgtttgtcccgtgcatcactataaacagaagttggcactgtcattgggctgctgtagtttaggtgataagccaacctcgtggtacttttttcattttgaagacatctgaataaattctgggcctgcagaaagcattcgccttccaggacagcacttccttcctcttaagtagctctctcaagacaggggccatgcgggacggcagagcaagcatttactagcttatctttatgtcccaagggatcttttttaaaaaagttagttttgtttttttttaaattgaagatcagttgatttacagtatgttactttcagatgtatagcacatgattcagttatatgtatatatatgtgtgtgtgtgtatatatatatatatatttatatatatatatacacatttgtgtttgttttagcggtggggaaactgaagtttcacataatccagtctaggggatctggaaccggaagccaaagctagagaatgcagtccatcacctgaagtgtttgtggctgtgacaacacagaagccacagtgtgctcttcctctaggtagcccaggctaactccctgacttgtggggaccctttgtcttttaatgggataaggctttttggccaagttctgctcatcccatcccccaactcattctgacttctaacttgatgagttcccttgaaattctggctgccacaaatcccttccttttccatcttccttttgtccccatcaccatcaacaaaaggctgactgcaagtttccatctgtggaacttatttacatataataaaatattgacttgtttggtaccatttgtatattatcaccatactaaggcctttgttcagagagagggttttaaatcgttaattgatgtgaatttgtgttatccaggcagacactgtttctaagattctttccattctaaattacaattaactggactctcaaaagtgctcaaattgtctagtcatattcccttagttttaaattttttcataaatagctttcttgaattcaaatgatcttcaaattctcttactttactatttcatatatctgtaggttttctctaaaccaggcatctgcaaatatcttcaagtcttttagagcaagaactttctgtaaggagaatacctaaaattgtgacaatataaaaactgccacaacctggagtaatacaccaaaaagaaaagttgtttcttttgtagatttattttcagatataatggatttgcataataaatttgcagtggtttgttggttcctttaaaaaaatagttgatattgtttcttaaaggatatgaatatgggaaaagtgattcactggcttacaaaatataataattaatgtttatacattacttcaaaagtattttatatacatacttcaatttaatctttaaaataaccctactagttaaacgttcttacttctttcttttttaaattaatt

SEQ ID NO: 55334 - DNA, 2714 bp, Bovine  19866880773236
  misc_feature (1)..(1): n is a, c, g, or t
naaacttttctacatgtaaaaatcacttcaattttgcattacaaatatatattgtgatgaaacccttattaatttacatttttaaggaatacccaaggagattctgatgtaggatgtcacaagatcatcttttataaaaccgtgatttaatctcatctgcccatcttaccatgccttacataatatagagtcatgtatgacttccccctgatagtccagtggtcaagaatccatgccttgtaactagcctccaattaaaatttaaaaaataaaatgaaaaaaaaaaaagaatccatgcctccaaggcaagaggcgtgggttcaatctctggtcagggaactaagatgccacatgcctcatggtgcagcagaaaaacatttaaaaacaaaaaaacctgagcttcgtcacttaacatctgtgaaactaagtaaactgtttaacctctcttagtctctgtttccttttctataatgtgtagcgatgatatctacgtacaaagattactatgagaactgaaatgaaaaaaggacaaaatcagcagtgtgtgcctacctatgggaaggcacactcgtgggtaaagttatttttcttcttaattaagcttagcaataagcaaaccaaatggagatcattgctactttttcttaatacccaagctagcgcaaatttatacctaccattttgctggaaactgcagagctgtaggctaacactaaagttttcacagaagtgccaacatacggtagaacattatgaattaagccgtggagtaaacgtttttccatttgtgcaatgctgatagcaatcgactcctctccagactcttctgaaaaatgaattcaaaagtctaagaacatgataaaccagttataatcaggctactcaaggaatcactatgtcactaaatatgaaatactttctgctctccttaaactcccttacatatgcaaagcaaatttaatggacaagttctcatcagccagcacttaacatttaacagtcttgatatcaactgaaaagagacaaacagggaaaagaagtttaaatgggaaggaagggataaagttttcacatgattcaaggttgaaggtaattttctaattttcttctcaagctaattaacagagggaagattaaaaataactccaatttcaggtaccgaaaaaattttggaaaaaatactttgactacttaaagaacagtgcaagttcttcaaaagaatataggaattgaagaggaaaatgaaccacagtaaaaataataaaaagtattttcattatctcacataaataaaagggacatggacctagaagagatttgaaacaagttaggttggccataatgagtcaaggaaggaaaaataccttagaatttttaaaaaattaaaaatgagcaaagcttttgctttttgcttaataacgtctataaagcttagatgtttaaaaaaggatgcaatactgtaacaagtaccaaaaccaaaaaataaaaaacccaatttgatacaaggaaaaaacacactacactaagaacaatgaattaataatcttatcctattactttcttgcttacctgaagatctaactcgaatgtctctaaacataaaacagttcaacagaagctaaggaagtctcatttaacacaaaactgagtgtagcagacaaaaggaatttaagtacaaagagtaattctgaattttgactaatgtttccatgttacagatattattctaaattcttcctttacccaaacataaatgtaaaatatagggataaaaataacttttagtgaaccctatttattctactataattttatttccaaataaaaatgacttttagtgaaccctatttattctactataattttatttccaaatgattcttttgtttctgtggctgtctctaaatatgtactgtttactgtgaaatcctaagaaaaagaaaacaaaacatcctatgaagagtaataacttctctgcaagactagtaaaaacagctaagctgaaaaagcactaacatagatggcagtttagtcttggatatactacacagctaaaaagatatattaccttagaaaggctccatcattataaccttaacccttccctttcaaagtcaaagaaaacaacagtctctttgtctatctttaagagctgagtaaacacattaagtttgataagatctttaaaactcaacacagatattatgaattgatttttttagaatgggtaaatcaagttttcctaatagttcagttggtaaagaatctgccggtaatgcaagagaccccggttcaactcctgagtcgggaagattccttggagaagggaatgaatacccactccagtattcttgggcttcccttgtggctcacctgataaagaacccgcctgcaatgcgggagacctgggcaagatccctggattaggaagatcccctggagaagggaacggatacccactccagtattctggcctggagaattccaaagactgtatagtccatgcggtcacaaagagtcagacacaactgaatgagtttcacttccctaaggtgacataagactaaagaccgtaactccttgaggctttgctcaaatttctcaagagaccttactacccactctatgggaaatggtaacttcttcctctcttcctgacacacttttccattatgtttctccacagcacttgatactacctaataaagtacgta

SEQ ID NO: 55335 - DNA, 1852 bp, Bovine  19866880813826
  misc_feature (1)..(1): n is a, c, g, or t
ntactgggtggattgcctttccttcttcgggggatctttctgactcaggattgaacccaggtcccctgcattgtaggcagattctttaccaactgagctacaaggttttaaaaatacatttaaatatatattttatatatattatgtatatgaataatgttatttgcagtgctgtgtgctgagtcgctcagtcatgtctgactctttgtgacccccatggactgtagcccaccaggtttctctgtccatgggatttcccaggcaagaatactgagtaggttgccattttcttctccaggggacctttctgacccagggatcgaacctgagtctcctgtgtattttttggagtaggcgtttggtaacacactgatataattgactcatttatcagtctgttatattttcataacacctattaagggaacatgcataccagacatgaaccgtttactttttatttctctggaaaaaatgatttatggtacttttaataactattcaatgaagataatagcatctccctcattgccattatatttgactgtgttttctcttcaaatgaaatagtggatgtttcaagtatatccaaaactgttcaacattcaacatcattcccaagaagctcagtgccaagtttccttgggtgaaatctgcctgtcacctagagctttgtatttcctggtttttataggttgctaccagtggtgaatcctacatccctgatttcttccgactcgaacagctacaacaggaatttaactttgtttcggatgaggaattaaatagatctaaacgattcaggctgctgcttcttagaagccaggaggtgccagagttccgacattataagcaaattccactgtatgaccgagaaattatggaaaaagtatttcaggtaagagattgccttagaggggttaataaaataatgaaatatttactgttccattttgtatactattatatatatgtaggtgtccttgtggtgttctcagtagcaatattggtttcttctttattgcactttacatagccttttcattatttttcttgaatccaatgtttaaatcatctctttgtctcagtctaatgacatctaaactaggaaaaattagtgtcatagggctgaagaatctcttcagtgttagtgtggcaaacagtcctgcctggcttagtcaggaattcgatgcccttttttttcaaattaatttatttacttaaatggctgcatcggtctcgttgcggcccgcaggatcttcgttgcatcacgaggtatctttgcttgcactgcacagactctctagttgtggcttgcgggcttagtggctcacatgtgggatcttagtttcccgaccagggttcaaacccacgtcaccttcgttgcaaggccaattcttaaccactggaccaccagggaggtccctcaatgccattttaacccagtaagtatttactaagcacaaagcacagtggtaagcgctgcttggaagatagatgggtaggatctgaacagcctgggtgaaggggtaggaagtggggaacaggtctggtcaggatgctgcaggcagctggagacagaaagccttgggggaggttggagtggggcagggagcctttgaggagttacagggaacaggcctgtggggggggggggcgggccagggaaagctggacaagtttatgtttgatgaggtaaagaaatagccactagaaattaatatcagtatgacttcttttgtttgtttgttttcactgccattactctaggaggtggatcccaaaagatattgctgcaatttatatcaaagaatattctgctttacatttttctctaagagttttatagagt

SEQ ID NO: 55336 - DNA, 1043 bp, Bovine  19866880839713
  misc_feature (1)..(1): n is a, c, g, or t
natcccacatgtacagggcaactaaacccactcgccaaaactactgagcctataaccagagaagcccatgcacctcagttgaaagatcttatgtactgcaagctaggacccaatgtagccaaatgaataaatactttaaaaaaaaataatggtttcaaatcttatttttaatttctaatacagtaaatattaacagctatgactcacagaaacagaagttgttgggatgtctccataatcttgaagattgtgaagaggtcctgagatcagatattctgaccactgagcttgacagtcaagagagcagggtcaaagcccacccagagggatgtgacaaggactagataggcctggcggggctgcagcctgggctgggggcagcagtggggggtgggcagagggcttaggagggtcgcccaggccaccaaggaaagcccccattccctgcccaagacataatgaagggtgagccagctgacaaggcacttagagagcctactttctccaccctcagagcagtcaggaggggtgggcagtgaagaccgtttctgaatttctgacttgctgattccagtgacctaaggaattctcgaaaagcaagtttggatagaaggataagtctgggtttcagaaggtggaggctgaggcgtgtggtcttcttgtaaccacctacgatgtggaaaaatggtttcaagcccccaagccagtcggattaacaagaccatgcttaagaaagtagctcttaaaagttctcatcacaaagaaaaaattccgaactacgggtggtgatgtatgttaaccagacttattgcggtaatgattttgcaatagacacatatctactcattatgttatacacctgaaactaatatgattttctgtgtcaactatatttcactgaagaagagaagatgctttattagtagaaacttaccattctcttaaaaataaaggacaaggagttctctgctggtccagtggctaagactccgctctctgagtgcagggggtggagttcaatctctggtgcaggagctagatcc

SEQ ID NO: 55337 - DNA, 755 bp, Bovine  19866880858367
  misc_feature (1)..(1): n is a, c, g, or t
nggcgtcgggatgcgctggagacggtggagttctcacacgatgctccatttccgcctcattctgttcccacagttttcaaacttcatctgccaaagcattaaaaaaaaaaagataatgataattaaacttaagataaatgttcttaccaccagaatactcttcgaaaatgtatctgaattaatcagaataaaaagctaccttaaatgagacatgatggatagtagcattttatagagggaaagaaaaacaaacccttaagccagtttatttaaaaaatatgaatgaatgaaggtttgcatcacagaaaatgtttcctaatttttcagctttactcttcacagccaaacatgagctgtgtattgtgtaattgcagtggataaaataggaattccccgacagaaaggcacttttatactgagaaaagcagagcagtattcattttcaggtagagttaactgatttccctttcaaattgattgcttcttaagttgttaccattaaaaaggtttggtgttaaacaggctgaggaaccatcagaggacaaaattcaaagatatccacttaactgggtttttcaagtcccagttttaaagtcagccttgtgtgggtggggcatcatcttgctcgggctcctagaaagaactggtctgccccgtctgtctctctgtctctgtgcccacacctggcccggatctgtgctctggaggtgggcaggctgtgtggggaaaaggaaaggaggcgtttggggtgtgcg

SEQ ID NO: 55338 - DNA, 830 bp, Bovine  19866880934605
  misc_feature (1)..(1): n is a, c, g, or t
nttttggttttttttttttttgggccggataagcaccatgctagatagacgtctttatatctactctttgtatgcatccatggtcattattttagaatttatagactttttaaagtaagtgaagggaagtgacattttcagaaaaatcatgttttccatttgctaatcatgtgtaatgccaattagtgttaattggagttctttgcatgtcctgagtggggggtgtctcaaactttaatttaaaatctacaggatagaatactttaagtatcccattaagctgttagtattggggctcaattaaatagctgagtgaaattaaaccatgcaagttgccctgtgccctgagtgaaataggtaacaggtctcctcagctctgatctaataggattttttttttcttcacagagcctggatgctgacaatgatggatcatctattagcatcacatttggcatatagacggagtggtgggtagttaggctggggacagttgattttctaggctaatggccttagggctgtctgcctcttgggtgggggaagcatgcacgtgtttttggaatggtgtaaatgagttgtttttgcgtggttggacctgcgctttaatgagaaatctgtacaatgcttgatgtctatgcctggaatatacttgtccaaaggaaataatcatagcttgtgagaaaagcaattggatagagtttctttattttttgacagccacatcagaaaattaaccagcacactgtaccacttttatggcacccatggggaaattgcaacatcttggaatcacatccagaaatttgccagagcctaggaatgacaaa

SEQ ID NO: 55339 - DNA, 928 bp, Bovine  19866881189312
  misc_feature (1)..(1): n is a, c, g, or t
naatatcctttctcctccctccccaactctttgggtataatttctaagaactaagagactaggaagacaataactttgtttgtttgttttgggctgcagctagaggcaggtgagttttagttccctgaccagggatcaaacctgtgccccggcactggaagcgtgggatcttaaccactggactaccaggaagtccctaactttttctttttttttaacagaaaggaaactaaaacacaggagtgtgagaaaaaggaaatagaaaaaaatacaattgacctctttgctgatctttttcatttcttaactcttcgaaaaaattaagtcagactgaaggaaagagcactttttgcttgctgaaaaagatggaacatgatacagccacaggaaagaaaaatcaaataatcctgaacagaatagaatgttggaagaaaaagaaggcaaaacttgtctgattaataattttctaaaagagaaaatgtattcatatactcttaaaatatctgaaaggttttagacttagtattaacaatagttttggtaatacaattttttacattatattttaagtttcaaatatttcaagttaggtgctttaagaaaataatgctcagaagactttgctttctaaattgctcaaagaaaatatggactgcagcccatgttactgtcagccaagtactccattctgataaagtacacttaaggcgctgagacagggaggcagggtcttcatactctgtatgatctgcctatactcatggagtgcttagaaatgctgacgttctgttataccattttaactgtgcttcacggtatatacatatatataagtgacggcataaaatgtaatttttcagaggatccaaactgcagaagcagcaagacccctctgcccaggaaaactgcacggcggccttgcagcagg

SEQ ID NO: 55340 - DNA, 1097 bp, Bovine  19866881213214
  misc_feature (1)..(1): n is a, c, g, or t
ncggaaagttaagggactgtatggggagaagtgtctgtggtgagtgaaagattgtttcagacacagtggagtaaaaagttactgttctcatttaagctcttccatggaatttaaactcttccacaggcgatataattctgcagctcatgaatgtcttcagaactggcatctgaagaagaatcttaattaccagacatttctgactcctgcattccccatcccccgatgaaaaccagagaggaaaccagttccagactgactctcactttatgttcttttctgttttagaatgtatatatctaagtctcttctttcaggatttaccataatgtattccattatgtaataaacttttctgagatcccgtttcccaggcatcgtgccaaatgccaaagctccagaaagaacaagacggctgtcctccagaactcgccgtctaagtggttggatcgtttccgcttttgtttgttctgtagtttgtttcatgggtttcttatcccatcaaatttgtatcaactagggaaattgcaaagataactacttatgtagggcatgatttagaaagcatagtcgtatttttccccattttaaacttcagagattttaataacattactgtaaatataaactggaaccagaattcagttttccccttgacatcacttaactgccagttttgcacgccatccttataatggttcaagcaaccaccctcaacgtggcttttaactcacacaacaagtccctgctgactatcatgatgtccaataacgtaagtatgagattctactttacatttttgaggttgtatgggtactttaacagcagtattctagatgggagaaaattgtttttttccttaattgttatttattcctctgggaagtttaatatatagcatgtcacttttttaaactgtggtaataataaagatgacttttgtggtttctctttcagtttgtcgaaattaaaggaagtgttttcaagaagttcgaaaagaacaatctttttcaaatgtcaaatagcggtatgtacaatcagcttctgcttgaagctttatgcagagttactgcgtaattcattttgaaactcttaat

SEQ ID NO: 55341 - DNA, 776 bp, Bovine  19866881306386
  misc_feature (1)..(1): n is a, c, g, or t
nacgcccatctctgagcagtcatgtctgcttctcatcttccgaggcgtccatctccgagcagtcctgtctgcctctcaccttccgaggcgcccatctctgagcagttatgtctgtctctcagtataatcaatatctgtttgtactgatgtcaatttggccaagagaatagaaggaaaatcagggtttactcaccacgaggagtccctgtgacaccacattccactctacaaaggaagtgagagtgctcctcccttcggtctgatttacgagagagaaagagagagagaacgttgtaatgtcgctgcgctactgagcgcgccaaggtgaggaggaggaggggacggcacctgaggtgggaagaccctctgacgagaccctgctctctacgagcgagcacggaggccctgccagggaggggcaatgacggccggccctgattgccggagaagtgatgcgagcatgacaggggtagcacaaatcactcaggtcgaaattaaggcttctgtctaaaaagaggaaaaatctcatgtgtgtgcatgttcgtgtgtgaagttcacttcagggagaactaccttggaggaggtaaggcagggggaggaaacccaacgggttaagaaacgctcgagcatctgaaattcctaattcttcagatgagagagatttctgtagggtaaattaccactgcctcaaaaacagaaaggtacctgaagcttccaacaagagatatgcttaaagccagggggagaatcagtaaaatttactcgcacgcatttta

SEQ ID NO: 55342 - DNA, 866 bp, Bovine  19866881320530
  misc_feature (1)..(1): n is a, c, g, or t
ncatgtcacatttctatcataaagtcatgcaggtgcagttggtagaagtcaaatcaaaaccttttctatttctgcacagagcagaaacaccccccactcagactgacttttcaacatgtacttttctcaaataaataagtcatttcagtgaagcatctgggtaattttgacagctaccttttaatagccacatgacaatgtggaattctaaagtacccaaataacacaacaacaaaatcaatatgcttttcagaacatgcttcaatccatatcttttggggaaaaaaaatgacctgcctgaaattccaaataaggtgattgaaaacatacacctttctcattattggaacatattttgagatagactctatcaaaaaggcacggaaacatacggctgtaagtaaggaatagttgtgttgaaattagcatcatgctgatcctgctgcccgcttcattggttactaagtggatgttcagcatcctggccacgtcttaaaaagacaggttcccagtctccacaatagttaagtcctgcttgcccattccatgtctgaatttgacctttcctttggtggcacaagtctccttgtttaagtgtaaagctgaactctgtgtttcaaaagcctattaagtaagttcaagcaacgacaagttcttcagtgaagtttcattttcacaagttccactttgggtcacggaggaattttggaaagacttcaaaaaaaggaagaatagccttcagggctggctcagctctgctttggactgtcccatgtgggtagggccctgaattctcatctaggtgacactcttattcatcatatccccttagcaccgttgtaaacctcaattgtcattatctcatg

SEQ ID NO: 55343 - DNA, 1087 bp, Bovine  19866880366098
  misc_feature (1)..(1): n is a, c, g, or t
ntcctccctcccttctgcgttgttaaaacacacccagaagcccgcctgtactctgtgtcatctgtgctcttctaatggcaccttctcccctcaaactgattacttataagattggagagggacttccctggtggtccagtggctaagactctgtgctcccagtgcagaggaaagggaaagtattagtcactcagtcatgtccaactctttgtgatcccatgcactgtagccctccaggctcctctgtccatggaattctccaggcaagactactggagtgggagccattcccttctccaggggatcttcctgacccaggaattgaacccgggtcacagggcagggggcccaggttcaattcctggtcagggaactagatcccacatgccgccacaaagatcaaagtttccagtgctacaactaagacctggggcagccaataaataaatgagaaggagttggagggttgtgtgtgttgagcctttgggtgctctgggtggggaggcttgtttttactacagatagggaagcatttctgcctgccttgtgtgcttgcttttagaattagcggttgaatagaaaggtgttcatttgacaatttgatgtctttgattttttaaaggatgaatattcactgagtttcctttgtctgaagactgagtacatgcatggcatttctttctaatggtttatagctcttctcccccttctgaacagtctctgttgagaataccttggcacgatcgactttgaatgacttgggttaaatagcaagcaggtctctgtgacgattctcatttccactcagagtgcagagaaccagggtggggacacatgctttcattctctctgatagcagcagttcccagcaaaacacagttgctttcgatgtacataattgatcactttattaactggaaaaaagaggccttattgaagtaataaagcataacttcattatatcctgcatgtagacagcagacgtgttggaacgtggctgatagcttcccatttcaaggctgattctgatcatgataatatttaagtcacatcgactgtcttctaattggatttttcttcctgcagg

SEQ ID NO: 55344 - DNA, 1901 bp, Bovine  19866880369937
  misc_feature (1)..(1): n is a, c, g, or t
ntggatggctcccacgagatggtggccaggtctccagccatagtttgcccaggtaccgatctcttgtcttttgctctgagaatggcatcaggatttccctggtggcccaatggttaagaatctgcctgccaatacaggggacacaggcttaacccctggtcaggaaagatttccacataccgtggggcaactaagcctgtgtgccacaactgtggaaggccacaagcctagagaccatgccttggaacaagagaagcaaccgcagtaagaagtctgagcaccacaacaaagagtagcccccgctagctgcaacttgagaaagcctgagcagcaatgaagatccaacacagccaaaaaaaaaaaaaagacactttggggcagatagcttgcctcttcaggctggctggaggctgggccaaggccaggggtggggcggtgtatgcaaggagaccctacctcgggagtcagaggcctggcttctgtagaccctgagcaaggaacttcccctctctgggcctccagttccccagttgtgaaggagaggggtgattccatcaccgctccccagattctttgggtctggtgtcgcgtgttgatgtgcagggtggccaggcatctcagagtttactgagtgtcagagtcccccgaggatccaccctccctaaactccagttagcatcactgcttaacaggcacccagggtgctgatgggcggccctaacctctctgagaaccatggcagcaagcctcctgcagtggggccaaatccagatgcgcatcaggccccctccgacctggtgagaagcccaggcagcaaagggtaattaaaagtataagctttcagggtacaacacatagagtccccctccatccccccagctctagcgtgttggacaagcttccttccttttcccatctctaaagtggctaaaggaaatcaaccctgaacatttactgggaggactgatgctgaagctccaacactttgggcacctgatacaaagagccgactctttggaaaagaccctgatgctgggaaagattgaaggcaggaggagaagggggtgacagaggatgagacggttagatggcatcaactcaatggacatgagtttgagcaaactccaggagatagtgaaggacagggaagcctggcatactgcagttcatggggtcacaaacagctggacatgacttagccgctgaacaacaacaacaatagtttctaaacccgcttagcttcttcttaaccagtctgggcctcagttttcccatctctcaaatgggggaacatatatcagtggttccccctcatgggattgctgggaaaattaaatgtcttcatggtggaaagtgtttggagctcttcctgcacagggcatccttggaaatgtccaggctccatgacgctaaacaagattcgattctagattcagcagaactgagggaagaagcagccacccaccttctttgttttaagaagagccaaacgaaggcgctaagtttatacattcattttgctacagacgggaggatttaaatagcttcctaaaaggtatttttaaaaactgctcttcaatgctccattaaaagattctctgccttgccttggcgtctccagggctgccaaaaatactatgaaaattactaaaatgcagtctgcggtcggctctaaaagggtttgccaactggcttcaaataatctaaaacctgatcccatatgatctggaacacaagagctcacattgctcagagtgatgatctgggagcctcgtggaagcacctccttacttaagagacccacgtggaccccacgggcctccttcctgaaaggctctcttcttggcttatggaagccacagccgtccgtcctctccagctatctctcctcctccctctcc

SEQ ID NO: 55345 - DNA, 1391 bp, Bovine  19866880371089
  misc_feature (1)..(1): n is a, c, g, or t
nacggcagcccaccaggctcccccgtccctgggattctccaggcaagaacactggagtgggttgccatttccttctccagtgcatgaaagtgaaaactgaaagtgaagtcgctcagtcgtgtcccactcctagtgaccccatggactgcagcctaccaggcttctccatccatgggattttccaggcaagagtgctggagtggggtgccattgccttctccgtcctaagcctttaagaggagccaatcatcataacagggcttgataaggttctcatgtagattcaagacagaaagacttatatagcctgtagccccatgcatggcatagataaacatttacctttattagcactggccaggcagggactcagccctaccccatgctatagactaggtgctcctgaattattcaggtggacttgaggctgcttcctaaaggcagtgcttgcccagcaaccaggcatttttccattgtggccatcagctctagtatcccttactgtcgtctcagctaaccctcgatctcatcagaccatgtggctgaaacatcatctgtctcttgcttctggaccctgtggacagaggctccctcttctatttccacacctatagtgcctggcacagagtaactcaaagtgttacctgagtggtaaataagaagatagcatctcagcccaagctgcttctccaacttgtactaagcctgagcagaccccacgccaagaggataatgttttaggagcaggcagccctcttctccctctcctcttgctctgtgcatggctccagacctgcaactctgcacctttggaagtgctgtcctactttctccatggctggggactctgcgcctgggaactggttgaatgcctttcatgtttccctcattttcaaggctttgactggaaatttggcttctcatggttgatcccagttggttccgatgatattttatagcgccttcctaatttactgcctttttatgactatagtaaaaggccacacgtcagggaacaccatcaaacaggaagaagcgtcccctctccttgtcagctcaagttgagcattgtaatttacagggaaaccttgtggcttagggtgtttacctcctgtggaaccagtttcctctcccattatgagaatgagataattaaaatacttccctgttcctttgatatggaattaggtttgctcagcccaattgcaagtgccagtttgaaagctgttatgttatttgggtttcaatttagagccatctatttcaaaggttttttttttttttttttttttaattttctctttgcctaccctggattagaaatcaggaagggaaatcgggatttattgaaatttggtttggatatttccatcttgagctgatgcaaatag

SEQ ID NO: 55346 - DNA, 1573 bp, Bovine  19866880419084
  misc_feature (1)..(1): n is a, c, g, or t
natcccttggagaagggaaagggctaccccctcccagtattctggcctggagaattccaatgaactgcatagtccattgggtcacaaagagtcagacaccgactgaatggctttcacattcactttctccagggaaaataaacaaaattgtttttcaaaaactatttctatgaaaaaataactttaaaaaacaaaaattaaaaattttgatgtgcactcagaggagaggcagaccacgtctggcttgcggccctgtcagaagcctctgatcagagcctgcagggtggtgggatcaggactcggagagcagcaaacgctctcggaacagaggacaagccaggtggaggtgctgctgggacagcgtggcactggcagggaataaactgcatttaactgtctccactcagtccaacgaaacggtcactctgtggtgatgacaacagctcaccgagctagagatgagagcgtctgaagattcgaaatcttgacgattccaagctgctggtccatccatccagcaaaacccactgtagcactgggagtggagacttccaaacgcttcacctcttctctgagagggaacaagctcctgtcatcttcagcatttcttgatttggaatcatagggccagagatgatcaggctggcaaaaaacctacagttcactgaatctgtggctggtgagtcagggagcctctaaaaatctggaagaaaagctctatacatactctttctccagaaaaagacatgtagggatggagttatgcaaacaattttcagatgccgctcaactccctgactcaaccctggggactcaaaagtgggagactgtccacagtcacaggttaagaatccagacaggaccccgagaggccctgcttccccaggtcccagatcgtgcacagaatattaggctcatccaaccccacccagccccactgatgacggggagcctggaggaggcaccaaagagaagatggctcctttttgggaccgacgcaaatgctgagttaccagaaataattccaggccgggaggccggggcctgtgctcacacagtgtcctgccgcattcaaacgggagcatatttcaacctgcagtcggtttggactttagttaccaaagggtgggtccccgcagccacccgctctgttgctgtggtgcttaatggggcaagctggctcggggagtggggatgagatcacatttctagagggcgttgggattcccggggaaaaggagcctgtctccagcttcttcacagttgactgcacctccaccctgcctcaggcctcctgggctatttatagcctcacacccaaaacacaaactgttgtttgcagcttttccaaggtctagcccaaggctctgcttcagttctgatttccatctgtgcagacacccagctgctgatggggttttaagagcaaggatggggccagaacaggagaccctggaatagagcatgggcctcaccttccccagtgcagacaatgccccgcaggctccagccccccagtacagcagtcccacagagcctgcaccaggggcgggctcccctcccatgtggaccg

SEQ ID NO: 55347 - DNA, 2967 bp, Bovine  19866880592053
  misc_feature (1)..(1): n is a, c, g, or t
ntttcgagtgatttattctattacttccccgggtcatgttcctgggctcgaggtgttggcttaatttgcttctgagatcttgatactacccgttcattgctcctaggagctgctgggggcattctgttaacaaggagcagagtccattttctggaccaagtaaccgtttatcccaatgcattagaattttcagcccccctcccctcgtttctgcttttctaaaagtttcttttcctgaagggctggaatattcaaaggcagtttaatagacattgatttgcaatgatttttagccactgtgcttcaggagagttgagaagccaataattaatcctttcaacagctcgtcccttttgttttaaaatgatctaatagctgaattgctctagcaggctgggccagcgtgacccagttcggctccttgccttctgctgcttcattcaaatttgtccgctatgaattattcagcccttttgcaggggtgagtgggtctcctcgttgtaatatctaattagcaacccgggaggccagcgtcattctgcagacagctgctgctcacctcgggcagatgaatgggcattcttagaacaaggggtcaggttctgccttttcaaggaggatggtttgtcctctgaccccagagcaactacaccgatccttgggcttgtccaggctcccctgtgcttggtcctctgcccatgcccgtagaaagtgacctcgggttcctcctagttgagggactcttgggtgactcccatccctaccgcagtgatgttgtgttgcttccataactgaccaccacacacataatggcttaaactatacatgtctgttattgtacagtctgtaggtcagacgtgcaatacagctctcaccgggctaaaatcaaggtatcagcagggctgggtccccctggaggctctggggggaaagcatctccttgccgtttctgggctttccttgtggctcagatggtaaagaatctgcctgcagtgccggagacctgggtttgatccttgggttgggaagattgcctggaaagggaaatggcaacccactacagtatttgccatgggaaatcccatggacagaggagactgtggagtccatggggtcacaaagagtcggacatgactaagcaactaacacactgccttttccagttgctggaagcatcacagtccttggctcatggccccttcctccctcttaacagagagtgaagcctctacaccgctacagtgtagcatctttctgactctctctctgcctttggtctcctctcctcctctctcttccactttatttggctctgctgggtcttagttgtggcatgaaggatcttcaatctttgttgtgacacgggagatctttcattgctgcagatgggatctttagttgtggtatgtgggatccagttccttaaccaggaatcaaacctgggccccctgtgtagggagggtagagtctcagccattcaaccaccagggaagtccctcctcttctacttttaaagatgcttatgattacattgagcccaaccagatagtccaggatgctctccttgcattaaggtcagctgactagtagcctcaattccgtccaccaccttaattcccctttactgcgtgacctaatgcagttgtggattccagacattaggatgtaaatatctttggggggcattatgctgcatccaacacctaccattgccctggtttcactgttgctgagtttatggaactttctattgggaagagaagctctgagaacttccctgagcagcagcctcataattttaagtgtgggtgttacagacagacagacagacaggacgtgggtccgtcttagttctgccacctctgagctcagagacagcagatggccagcaggcaagttgctccatctctctgagccacagcgttttttcccctgtaagacaggcttataaatgcccatctcccagagctgtggcaaagagtcaatgagatgccgtgcagccgagccatccagaggcggtagtgcttcctgggatctattgcactggccaaagatctgtttgggtttttccataacatcttatggaaaaatctgaatgaatgctttggccaacccaatacatcatcatgtgtctgttttcagtctgagcgtgggggcacctctctctcgggaggaggggttagcgggtcttgttagcttgttccctgaaccctgtgcagggggtggcgccatgcaggggtgctgggagcatctgtctgattctggggcaggtgtgtttcctgcaggactgctggccccctctgcatcacccccccaactgttgtctcccacgtctggcttcattcaaacccattctcttacccttagggacaggaccgtatgccctgagaagcacggactgaccttgtcctctgtctgtctccagatggttgtagataatcttcctgacattcctcttggggtgggttctctcggcttctccaggggtcggggggcgggggttgtaccagctcgtgttttcctcatgagattggtggggatggagatgctcatccccatttcgggcaaaagataaagatgtgaccacctgctcagggttactggctgatgaggggcagagccgatccccaagcctggcccctccaatcaaggtcaagtgtccctttgggttccagttgttctcggaagctcagcagatactggctcctcttaagtagctctggggcccctccctctcccctgtgtatttctgtccccctttctggaagcacatcctgggggccagcagccccctggtcactctgtctctctcttttgttacttgctagattaccagtttattagacaaaggtggccagctggaagagatgcagagggcggggtacaggaagacagagtggagaatccgtgctctgagcacaccagtctctccgaatctctacgtgtcctccccccacccctgttcac

SEQ ID NO: 55348 - DNA, 1086 bp, Bovine  19866880659054
  misc_feature (1)..(1): n is a, c, g, or t
nttctctgactaatgtaaaatgacagttgtcgcaacattctatataaatacaagtctgtttgcgggagcctgttctatttttaatgtaaaccacacctaacttgctctgaaggatggtacccttggaatttggagtcctgtctgttatctcttcatggtcctgggttgttttaggagcagcctggaagaaaaactaaaggcaacccaaactttgtagtttaatgtgagaattattcacctaattttcccgcagctattgtgttccttaatttattgttgtgcggagctgcgagaggacgtggttaatgagtgacacagtgcacttggtgagctgatctataatttaggaggctgctgatggtcttagagctgtctgcagtctgagcaaagcaggcagtaaaaataaagaatatactcacagattatataaatatgcacagatccgtggatacatgcacacacaatatctattagcagcctgttgcccccttgacatcaagggacatgaacttaccctttcacggtgaatggggaaagctgatatagggttttgtaagtttacagtggactctgtggatggccctttggaggaccgtgagcttatggagaattgggggcagccaagagattccatcaaaggcagtaagcacagtgaccttaacaccttgccccctctcctttctcagccatttcttcctatgcccatttgaaatgccactggcaacaggatgccccttaatcacagcagtgggcaccctacagctaattagctctccagagctgaaccaataggagacttggggatggcacccttcacagttttcagacaggaatggcaaccatgtgtcagaacttgactctgaatgggatgatgagcttccccgatgagcctgggctctttggcagttaccaccgagccgtggaaattggcatcagtcgaatccacttgtccttcctgtcaatgaggaaaagaccatggggtgattacagaggtgcaccttcattcaaggtcacacctggaacaaaaagcatcctgagtgggtgcaaatagaacacacttttctttctgctctgaaattccctttt

SEQ ID NO: 55349 - DNA, 911 bp, Bovine  19866880665462
  misc_feature (1)..(1): n is a, c, g, or t
nctgttgtagctcttgaacaaacaacgaacagcttaaagccacagccagacgctcccaggaaaggaccccagacctgctctctccgctcacctgcctcactacacccatctcagtgccccagtacccaatgtcgtgaactgggaatgcagaagaaaaccccggcagactcgtggaattctcctaaactgatggccatgttactcctgagaattcagatactcctctgtaaagatgaggccctaacactctggcaggaggtaaactcacaaagcaatgaccttaacttcgtaaattaattccaaagcacaattgttttcgatctgcatttaaagtcagcctttgttaatctagatttaatgacataggaaatggaaattcccttaataaaataagttatgaatatttatcatcccattttacctgaaaaattgaataattcatcaattaactttactattaattatttaatgcaaaattaataaactgcgaaactctgccatacccctgcagaccctctggcactgggtaaggaaattaaacaccagagaaatggcatgactatgggtaattccagacataccccagtgggataatagggggctacgggtggaatttttctccaagaggaagaattctcaccttggaatgctgtaccacagccagaaaaaaaacctcaaagtttggcgattatttcaaaagagtggttctcttgtgcatccgcctgtcaccatcaccatcatcaatatttttttcacacatgtgtggatggactgtgatgtgaagcctatccagccacagatcccctcgctcttggaggtcctgtcctcccccgcggcctcagacaggaccccggtgtgaggaggatgggtggagaaggggaacacagtacaagggacagagggacaggtgg

SEQ ID NO: 55350 - DNA, 890 bp, Bovine  19866880689414
  misc_feature (1)..(1): n is a, c, g, or t
naacatagaaactttgaaagacacacagtggcatcaaggcagaaaaacagtgaatcccttggattccactattctttgctggcacttgaccagagctcccggcctccatccctccctttctcctttcattcataccgttcttccaccttagtacttcctgagcatattaagagttcagacttctggatatacttcagtgagttaaaaaatgaacacacaacaaacatgttctgttctcgtggacacagagcttacatttaggaggaaatgataatgcacatttaatgactccctactgtatgcctggcacacagcttcagagcaccagagacttgacccagatagactgaaatctgaatcctggttttgccaccatctgcatggccttggacaatgtccttaacttctcagaccctccagtgctgctggaaggaacctggggtccattggatggtaacattcgtgaggtcacagagctccctggagtgggcttggtctccataaatctcagaaatatgtgcacatccctagctgccggggaccgaccggtgcaccactccacatggaatcaatagacttaatatttaataataatctgctgaaaggcacttcggtcagctcatcgcatcaatgctgcactaataacaaatcacttcttaagttattaacctcagttcctttcatgaagctctggttcagtgtgtggtggggagggaggagaatgagcatgggcccctctgcagcccgggaggccaaggtggccctgcacgtgctgtgtgatgggtgcctgggtgtcagcagatggccacaggaggtgggggtgggggtgggggtgatggttggggactgggcattgctgctgagtccaccggcccaggagatccacctca

SEQ ID NO: 55351 - DNA, 3364 bp, Bovine  19866880697981
  misc_feature (1)..(1): n is a, c, g, or t
ngtctcttaagctagatttatatctgattttgcattgaactgtgtcgttatgcggggctgagaaactcttacgaaattaagcataatgcaaaaacatgctgaaaagacagttctgtagaaatgtgaaacattattatgttatagaatattggagtgaagaaatatgcagaaaggcacaattaccatggacattttccttttaatggtccttgtacaatccttggcagaaaggtttgctgacgtctcctcgcagataaaggaaaattgagacaatattgatattctacatccagcttgattttcagagaagaccaggagagcgacccagtctgtttcatgttctaaacactgaggcctggactgtccagactgatgctcacagggaccttgggagcatctgtcgtttgcctttggggatttggccaaagcctacactccatggatggaccaagaggttgagatcacatgttaccttccggatgaggagctggaagcttctagaggctactagattggatgactctgagttgtttgttcctttatctgaagagtttttaggatttgaaagtgtctgtctaggatggtttaggggtggtcttagggattaagctttattgcttgcagctgggggcagggctgtgtttctcatggtgattgctctccactccacaggagaccatgcttagcctcatttcccctggaatccccctgcccagggatctggcttagggcagaaaggatatctgtcatgcatccctggggttttgtccttccttctgcccacccatcaagcccgaggctccagtctccaaaatggctccagagcaaatgcttctcttgctgcctcacctcgcccctcactggggcgcttctggccccttgatacagctgggcggtgggcagaatccttgtttcccatcttgttcctgcagaccttttggctgaagttgtgattccaggaaagggagcgctgtttccttgcttccggattcagtcccaggcctctgcctacccacgagaggtccagctagagcagggctggttggcagcactgtgctcacaggccttctagaaaacctcctccccttcccacccccctacagcctcccagcaggttctctggcagactgaagcttttccaacaacctcccagagcctgtgcccttaagcctggcattgagaggccaccagctgtggggggaggggaacagaggctgaggtgcaccctgggttggagctcgggcgcctttggcattggtgcggggagcatcatctgaggagcccatgctgggttctgctcagggtcaggtgacagccagctcagtcttcagccagcaacctggcggttgctcccatctctcactctctttgcttccgctcttcttggaagctcttaaaggaccacaaggcctttattacttagagttgcttgatattaagcaatttgctgctgctgctgctgctaagttgcttcagtcgtgtccaactctgtgcgaccccatagacggcagcccaccaggctcccccgtccctgggattctccaggcaagaatactggagtgggttgccatttccttctccaatgcatgaaagtgaaaagtgaaagtgaagtcgctcagtcgtgtccaactcttgcgaccccatggactgcagcctaccaggctcctccatccatgggattttccaggcaagagtactggagtggggtgccatcgccttctccggttaagcaatttaggtaattctactttggacctgcaatgtctggctcttgaccaccagaggtcactgtaataaggtagaaagcaggtgtttaagagcgtcttaagttgacagttggatcaaaaagaaaaaaaaaaaccaaaaacccagacagaatccccctaaattttctaaccggcccgggtgtgctatggggtgtgggcctgcagtccctgctcaccttctcacttgtggagggtccatcctgctgcagagcctggcaggacgagggcaggtgggtgcttggggaacatttgagtccgagaccctgtgcgggccctgtgcagcctgactctcctggttctgaagtggcccacacttagtgggaaggggttccgctccctgccctgagcttcatcctcacaacccatttcctgcagcagtcttgggggttagcttctcttaggagtgtgtgtgtgtgtgtgtacactcctctataacgtgggttcagtaatagtgttgtccacctagagctgtttggttaaaaaaggatgatgcacattgtgagcttaaaagctcagtgcttggcccatatctcatgcttgatgaatgtcagccagaataatgctgtccttagggggaggatcaaaggcaacattcacacccctagatggtggcttggactctttcttggggaatcaggaggctcccctccctgccctctttgggcatctttcctgtatgttgatgccattagtgcaaaaaagtcagaaatactggcctttactggcagcagttctgggatattttttccgggaagatgttcttgtccttggtgggtggctggtaggagaacttgagggctttgaggtgggagacaggtgggctgcatttagcaaacactggggttctcttgtctgagcctttgtgaggcttctcatgtgcgtgtttctctcccagttttaaatgcctgagtttcctgaacacagtggaatgagagatgcacacaaatctctgcgaggagccaggctgcatggggagaggcggtttgggaggcaggtgttcacattcctcacagggaatgtttggaggatatatgggtcttggggagggtggatgcctttcctgggccctctggggggccgctggggctgccagtggatgaggtcaggaacagtgatctataggatgccctgctgccatccgccttcaacgggaatttcccctggatgcctctgcaggggtggcacatggacacacacacacacacacacacacggaagatcaccagggctccagagcaggtgctcagtgccatgaccatggggctgcagctgttgggcctgtgaactcaagcccactgactggtcacagggtcctattctgaatggctgggaggtgggagaacggagagagacagaaagcagtattcttggggaacccctggcatctgcaatgtgtgttctggtttgatgggtggcatgaactgggaggggggcttcagcaggttcaaaaggctcaggctggaaaggcacaggcatgattagcacatgaggacgggcgtccagtgcacagatgtagcagatctgagagaggagccgtgcttcctgaccttgaagacgtggtatttagagcctgaatgagccccgggcaggaagatccc

SEQ ID NO: 55352 - DNA, 2332 bp, Bovine  19866880713782
  misc_feature (1)..(1): n is a, c, g, or t
ntgcaaaaagttggacaaaactgaataactcatacgattcattacagagtattaagtagagttccccatgctatatggtaggtccttattagttacctattatatatatttaaaaaatgctccttggaaaaatagctaggtcaaacctagagagtgttttaaaaagcagagacatcattttgccaacaaaggtccttatagtcacagctatgatttttccagtagtcatgtatggatgtgagagttggaccataaagaagctgagcaccaaagaactgatgctttacaacttcggtgctggagaaaactcctgggagtccgttggactgcaagaagatcaaaccagtcaatcttaaaagaaatcaaccctgaatattcaccagaaggattgatgctgaagctgaagttccaatacttgggccccctaatggaagagccgaactcactgaaactaataaaacactgtgaatcaactatactctaaataaaaacttttttaaaaaaggctgactctgatgctgggaaagactgagggcaagaagagaagtgggtgacagaggatgagatggttggatggtatcactgactcaatcgacatgagtttgagcaaactcgggcagatagtgatggacagaaaagcctggcatgctgcagttcatggggtcgcaaagagtcagacatgacttagcaactaaacaacaacaacaacaattttatatatagtgtatatgtgtcttgcaaagcccaaggagctttagaatctgggaagggaaatgaatgaccccgggacttcacgctacagcaatggggcaacaagagtgaccacgagtggcactgctttaagccccttttttaagtgaggaaaaacaagttacagaatgaaagacaacttatttcaggacctaaaatgaattaatgacaaagctaagatgaagccagaagtggctgtttaatatccaggcttcttcaaatcaagaaagttcagtgtaacataacacctctcctttctggcccgttcttggctataacaccaggggggcctgagcgccttcctgaggtggcccccctcatatgaactgccctgggaatttttttttttttttttgaccaagccgctcaacatgtgggatcttagttacctgaccagggatcaaaccctcaccccctgggtaagaagcagggagtcttaagcactggaccgccaggcaagtctgagctgcccaggttttgctgtctttcttttggcagaagaaaggagaggtgcctgcagctgctgaagctctcatgcccagggaattggcacttccggctacttcccggcccgcctctcaggggagccctccttcctccagagaacacagggcacatcgtcccaaggaaccacacttggaccctgaggcccgagagcctcagaagatgagaagcaaggctggggaaaggaggggccaaggaaacgagcagggagccgcagaggttctcattaaccaagacagcctcacgctggcgtcagactttataagtctcaactgcacgatgctttttaaaatataggtgcaatttgggcctgtggttaatactgtttaattttattttgtaccatgtaatattttcccaagctgggcctggagtaaagtcttgagtttcaattcagacctgggtgtcttggcaagttcacccagtcagcagcccgtgtgcacgcccacggccaccccactgcctggcccacttaccgagtttcagtcaaggcccacagtgactgagaatgtggctgttcagatcctgcggtgctccccctcccagcccaccctccagaggaggagagacctggaggcctgagacggatggcccagaaatgtccactgctgcacatctatcctgttgactgaaccgagctcccattcctttgtttattccttcaacaactatttatgcctcctgactctgcgccaggcagtcttcatccaatttttggtctggaaaatatgatcactgtcatctcaatgaaaggaggtgatgctccaagagagaaattgcagcttctaaacccagttccagcacttccaagctgtgtgaccccaggcaaggcccccaaattctcagcatctcttgtctgtcttctgagggtctccgtgaggtctgggggaagggaagccggaaacaccctggcacagagcatggcacgaagctggggctcaataaatggcagccgctcctttgtggcaaatgaagtcagactttcccagttgcatttgggttaaggcccaaccataaaaatgtgacgtgaatcaggaagacacccataagccaccaggggcctcgcggggtcaaggag

SEQ ID NO: 55353 - DNA, 1820 bp, Bovine  19866880716968
  misc_feature (1)..(1): n is a, c, g, or t
ncggcctaccggcggctgtgcatgctttaccaccccgacaagcacagagacccagggctcaaatcgcaggccgagcggctgtttaacctcattcaccaggcttatgaagtgttcagtgacccccagaccagggccatctatgacatctatggcaagagaggactggagatggaaggctgggaggttgtggaaaggaggagaacgccagctgagatcagagaagagtttgagcggctgcagcgcgagagggaggagagcaggctgcagcagcgcaccaaccccaaggggaccatcagtgttggcattgacgccactgacctttttgatcgctatgaggaggagtacgaggatgtgtccggaagtggctttccacagattgaaattaacaagatgcacatatcacagtccattgtggcaccccaacagcttcagacacagccatcctctctggaagcctctcaacccagaatgggaatggagggggttccattaactttgcgctcagacgagtcacttctgtgaagggctggggagagttagaatttggagctggggatctgcaggggcctttatttggcctgaagctgttccgtaatctcacaccaagatgctttgtgatgacacactgtgccctgcagttttcatcccacggcatccagccgggcctcaccactgtcctggcctggaacctggacaagaatacggtgggctacctgcagtggcgctggggcgtccagtcagccatgaacaccagcatcgtccgggacaccaagaccagccacttcactgtggccctgcagcttggaatccctcactccttcgcactcatcagctatcagcacaaattccaggatgacgaccagacccgagtgaaggggtccctgaaggccagcttcttcgggacggtgatggaagcagagaggaagatctccaggcacagtgtcctcggggcggctgtcagcgttggagtcccacaggccgtttccctcaaaatcaagttaaatagggccagtcagacctacttcttccctatctacctgacagaccagctgctgcccagcgccgtgttctacgccaccgtggggctgctcctgctgtacttcgctctgcaccgcctggtcatcagaccctacctcagggctcagaaggagaaggaactggagaagcaaagggaaagcacagccaccgacatcctgcagaagaaaccagaggcagaagctgccgtttggttgatgcaggaatctgtccgaagaataatcgaggtcgaagagtccagaatggggctcatcatcgtcaatgcctggtatggaaaatttgtcaatgacaagagcaagaagagcgagaaggtgaaggtgatcgatgtgaccgtgcccctgcagtgtctgatgaaggactccaagctcatcctcaccgaggcctccaaggctgggctgcccagcttctacgacccgtgtgtgggtgaagagaacctgaaagtgctttaccagttccgcggggtccttcatcaggtgatggcgctcgacagcgaggcactcaggataccaaagcagtctcacagaattgatactgatggataaactacttgagaagccagattcaaaaggggctgcaaaagaatttccccaggagtcaacaaattttggaaagaagcagggaaaaaaacccagaatcagatgtttattttgtatttgcatagaaagtggtactggctcaattatgtgaagggacacacagatgccccaaggcaaccccaccaggaccggaaccgcagctgggcccgagtctgtttccaaggatcatgtccccgcagggaaggcccg

SEQ ID NO: 55354 - DNA, 1949 bp, Bovine  19866880767238
  misc_feature (1)..(1): n is a, c, g, or t
ngatcacccccacattgaaggtccctttcacaaggacagagggctgagcaattagagaggcaggtgttactatgccaacctccaagggggacagaccctgggaagctgaccctggtcaaggtgtcgaggaagttgtgtctgcaaattagcacctccttccttggacagcctcaggtgctacccattaatgaacgtattgaaccacagacagttatttttggggactaaagagaacagaggtgtttgaaggcaaggggcttgattcgtggaagtaaggcagatctcatgggcagaggctgggtctaggtgtggacgctgaggctgctctgtgcctagaagacatcttccaggctgccttccctggaactagctgcccttctgcactccatggcgtgtgcaactctcttgtctcagaacatgtgccatgagcagtggggggcttgctttcccatctgctggaccccttccaagtgcatcctccaggtcgaggagatccccaaaccgctgggacccagactaacttgaaccaaagtggatacagaaagtaagacctatggagggaaaggccagaggcagcaattcctgggcagaggcagtagcaagaagttgcagtgatgcagacaaggccccccaaggaatgggttctacagagagcagctgaaaatcacaggacagggtttggaaaggacccaggttcaggctgactgggtggatccctcagaccctcccactcacacagcaacaccttctactaggcaagatcatcaacacaatcaattggccagaggctgggtggcctcagggctgtgcatcagcaccatggacagaggatccaggagccaggcttcgattggagcttccagatggctcctccactcccctctccacattgctccacagcagacatcacagatcgattacagagccccttccccgagagccaggggctcctgctctgccaacagctgtcccaatcaatccgacagccaaaggtgtgactctggaagccaattttacacatgtgccgacgacaatgaacccacgtgagaaaacaaacatgtgattttaagccaaaaggcttttctcagtcaggggcacagtgcccagccttccctgtcctcatttgaaggaaactgaggtaccctggaagcacctggcgggactttatcctcacgaggcaggcaaggactctccccgccagtttctccttttcctggtacctgacattgcactgggccaattgcacagctggcctcagtgccacatgtcaacatcaaagctgaccagggcgcctgggcccgaggccgccgcacacaggagccccgcccgactcagccccctccgcagacccttccccagtaccagagacggaagaagaatccagtcccagccacctacctgaaggagccagtagcacctccggtggaaggtggggatgatggaggaatggacatagcagccgtacaagcactagggagagaggaaaaacgagaattcagttggaaagagggaaaggaggaacagagaacagagaaggagcaagaaagggccacgcacactgccaccaccccagggagaccgaggggtgggtgcctccacgtctggctctacgaccaaggctaaggtctggggtacacctaagaagcatagttggaacaccccagtgggcaaacaaggatggacagctggggtgctcacccttgtggggccatggggacacgtgagaacccagacaaggcaggggccaggagaatgcgcataggtgtacattatgcccatcactttagggcagttaccctgggagttaccctggtgctcatgcagagagtctgggttaagaccctttggtgttcggggagggactgaacagacacacattccagacctttcctggccaaggagagtcctccctggaggcccctggctgggaggagcttgaaggctggggg

SEQ ID NO: 55355 - DNA, 1211 bp, Bovine  19866880768753
  misc_feature (1)..(1): n is a, c, g, or t
naaaattaattactttgtcaaaaatgaagatcatgggacttcccttagtgctccagtggttttaagaatctgcatgccaatgcaagagtcacgggttcaaaccctggtccgggaacattccacatgccatagaacaactaaacccatgtgctgcagctactgagcccacgcttgctagagcctgtgctctgccacaaggcatgccatcacaagacgcccgtgcaccgcaacaaagagcaggccctacttgccacaactagagaaagcccacacatgactacagagacccaggagagccataaatacaaatgaggatcatggcagtacctgcccatgctgggtagggatgctgccaagtcactgaatgagatggtacttgccaagtgctagatacaggagcaggtattcactagatggtcactaaatgatgcacagcatccttgctgttgagtcatcggctggctatggtcaggaaggagggagcccaagaagagaagtagaaccagcaccctggtcaggcctccgtgagctggcagactgtgaacagaaagggtgctctggccacttcaaaatgtatctggtttatgttatttattagttaaaaatttaattatatgaattgggtagggacgtgccaccagggatgctaagtaattagaaattaaggaaagactatggatttgtgttcctgaattgattccaccaaaacacacccaggtaacaggaaattaagtttaatgtctgcacgtgccagcagaatgtggcacaaaaattcagaggattaaaaggcagaagagagccccgggaggctctcccagctgccatttgacagactagctcccagggcttccctgatggctcagtggtaaagaactcatctgccaaggcaggagacacgggttcaatccctggtctgggaagacccaacatgccgcgagacaactaagcccatgagctgcaactgctgaaaccgacatgccctacagcttgtgctctgcaacaggagaagccaccgcagcaactagagaaagcctgcgtgcagcagtgaagacccagcacggccacatggaaataaataaatcttcaaaaaaagggactggctccctgaactagagacagtcataagaccagataccttgatcacagctctcagaatcagataggaagcacagatgagactggtcacccaagacctgggttcgattctcata

SEQ ID NO: 55356 - DNA, 2231 bp, Bovine  19866880787874
  misc_feature (1)..(1): n is a, c, g, or t
natggcacacttagatgggtaagagggcacatttcacactaggcctattctggcacaattttaaacaaaattttaaagtgttctaaaatttattgtttagatggggaaaccatggaaacagtgacagattttattttcttgggctccaaaatcactgcagatggtgactgcagccttgaaattaaaagacgcttgctccttggaagaaaagctatgaccaacctagactgcatattaaaaagcagagacattactttgccagcacaggttcatctagtcaaagctatggtttttccagtagccatgtatggatatgagagttgtagcatcaagaaggctgagcatcaaagaattgatgcttttgaactgtggttttggagaagactcttgagaatcccttggactgcaagatcaaaccagtccatcctaaaggaaatcagtcctgaatattcattggaaggactgtttgctgaagctgaaactccaatactctggccacctgatgtgaagaactaactcatttgaaaagaccctgatgctgggaaagattgaaggcaagagaaggggacaacagaggctgagatggttggatgacatcaccgacttgatggacatgagtttgagcaagctccaggagttggtgatggacagggaagcctgccatgctgcagtccatggggtctcaaagcatcgacacgactgagcaactgaactgaactgaaaatgtattgtattgatggctgcacaacattataaataaatcaaaaccactgaattgtggatttaaattggatgaattgaatggtctttgagctatatctcaataaagttgtttttgaaaaaatagtgatagtcagatgagggtggattatttcagaacagtgggcagggaagaacaatctaagaaggcaaactttggtggaaattaccgtcttgcggaggttgatgccctgcccacagtggcaggtctaagatgcaaacccaggcctgccacctctagagctaggactgctctgtttgcccattctgagttctgtttgtttttctgcttttccaagcctttcataccaatcatctcactctgctctgttccaggcatcctcactttctgtcttttttccagcagacagagtgagaagcagatgctcagggcttgacccaagtcccactgtcagtgccaggaacccacgcaatacagtcctggaggtcagcagacttgttctgcaaagggccagtgaggcagtattttaggctttgtatgagctctgtggcaactcctcaactttgctgttatggcacaaaagcaaccatagaattgtaaacacacagaggtggctgtgttccaataaaactttatttacaaaaacaggcagaaggctggatttgacccaaggaccatagtttgccaactcttgctctagcttgtaatcttctcttctctggaaggactccctgttaaggaagatgcaattggagggagtctctcccccttaaacgtgtgtccaggagaaggcatgtgaagtgctccaaccagctggatttccccagggcaacaggatgaaggaggaatatacacacagaaatatctgcatagaggagaaggttaagggaaggcctaggaagtagccctttgtggatggttgctttcttccatagacagccaatgagatgtcatccatccatccatccatccacacatgtctccatcagtctgcactaccttattctcaaacattctcagctcctattctgcacctggctgtgaattagaccttcaggcttcagtggagaacaggacagagtccctgctctcaaggagctcccactacaaacaatcccatgcatagtctataaacccagggaatggatgataaagataaggcatggagtagccagaatggttcaccctgggatcccttccttctcagaccaaactgaggccgactcttgtcagcagtccctcgaattctttcaggactccagctcctcaaccctaaatggtctctgagggtagaagttttcccataggactgtaggccagcctgcccactgagctctggatctctgtcccaggcaggtagaggcctgccattcagtcatgcagggccctcaggagctctgtgatctggagtgggaagagaagtcggtccccaaggacacacaggtggtgctgaggagtgtcttggctgttgggagggaggtgggaccatgaagaagagaagcaatgtcac

SEQ ID NO: 55357 - DNA, 1626 bp, Bovine  19866880787875
  misc_feature (1)..(1): n is a, c, g, or t
naccccatggactgtagcccaccaggctcctctgtccatgggattctccaggcaagaatactggagtgggttgccatttcctactccagtggatcttcccaactcaaggatcaaacctgcatctcttacttctcctgcattgacctttaccactagcacctcctgggaagccctgaaagtccttttacccccttgcaaaagaagggggccatgtagtggtcagaatacacacctggtttaaaggctgcagagaggacacaggcccttggcgtccatccctcacaggcatcgggcagccggctccaggccaggcctccaggaacagccgcatgcctgtggacttgccaacagtccgctcaatgatctgtcatagcctgtgtaagcaaccactcggagagtcaaatcctcagaaactgtgttcattatgaattggctgctgcttccgtggcttcaggaacataaaccaaacagaaatatggcctctgggccctgcccccgccatgcactctcttcccgaatgggccctgggagctatcactcggagcaagatgtgaaaggtggcttccgtttccttaggacacagagggatggatgagagaaggacctgctcgaggggctctgtggaccaagcccagcactgagcctggatggttcactctcagccacccttccgttctcaggacatgaaatgtggaaccatgatcattcaaggcttcccatggggggccttgccctggccatgtccacctcaattgcgctgctggtcacttttaaatagaactttctgcacctcttcagccttcccaagtagcttacataacaagccctgtgcctggcaattaaccatttctgggcttacatgctcgttctaaccaggttggttcccccatgccaggtgtccatgtcagagtcccaccaggcagccctgggctttgtggacagcccaggcctctggtgcgcacacatacatgtatacacactctctcctgtacacacacacacacgcactctcctgttccagccccaggctgccagctagcagagctgctcagtcccacttggggcttcatggcaggtcagctgcgctcaccctctccagtgacctgaaccaccccaagtaacccctcctgacatacatccaggttggcaacagccaggcagacgctgggagtgtctactccagacgaccaagccaggcctttgttgttgtgtgtccttgtgggacaatgaatgaagaaacatccccaggtgcccagaacagggctgctttttgggcgggaaagcctagttattggagtcagtgagtcagtggttacattttaattaatttgataaataattatgcctttgagatgcccaatctgccttacaggtgctcttttccatcgcagataaattaatcttatttaaccacatttcactcactacacaaacctatgtctgcctctaaaacaggaaggtggcagaggtctcgttttctgcattatctgtgaatacatctacctcccctgactggcagaattcctatgccccaaatccacctgccaggtttcccccctcccctgtcctggaggacacacatgtagtgcgagttgccatctctctgaatccaaacaccggcttctc

SEQ ID NO: 55358 - DNA, 697 bp, Bovine  19866880803882
  misc_feature (1)..(1): n is a, c, g, or t
ngcatggtcctgccccccagaagcacccaagcacacctccagagatggtggtaaaatgtggactcggtcatgggaacaactgggtttccctaggtagggaaaagacaacgaggagggcctggcaggctgcaggggccgatagacccctggagacctaagggggacagtggtcccaccccatacctttatccagggcatcggaccggtgccaggccgcccagagcagctggagcccatgtgagaggatttctctctgctttgcagtgtggtgacacccctggccctgagctgcctggtatcatcatttattccttctctcataaatcctgcccttctttctgcgagctttgcactcctgttttatgggcgcctagcctcgttcgtaaagcacccaggtatggggaagcctctgcctgtgatgatcagagggctctcagaatctgctcagacgacaaatgcaaccacagaatggactcgcgaatgctgcagacttgctctctgcctcccgcctcctcccaggccggtggcgctcagtcccggcccccaccccctccccccagccctagtgggggaggtgtgtggccactattacatgctattatgactttctgggtaatgtatacattttcaccatcacacggcctctctccttcatttttcatgagaactggcacgagattaatgaccgagccactga

SEQ ID NO: 55359 - DNA, 823 bp, Bovine  19866880817299
  misc_feature (1)..(1): n is a, c, g, or t
natggaggtttttgttgtgctccctggaagctggagacagggcctctgggaggaactggcagggcccctgtgtgaccccaggcccttgctgccgctctctgggcctttccctccattgagaaaccttaaaggttcaattctacctccagaggctgctgggagagtaattaaggttacttctaagtatgtaaagtggtctttggagacaggcctagtgtaaataaggttggttttattattaatagtaaacatttcttaaacacccaccgagttccaggcagtgcacagaataccaaagagacccccgcccagctcctgccaaatttcctgctggccccgtctacctccctctcccgccatggttgagagcagggcctaagccacacacaggcgggcccaacttcagaaagatcttacagtcatggctctgcacacctggttaaactggtgtgacacccagacctcagtccagccaggatgcagagtcccccatgggagctccaggtccctgggctgtgtcgcacttagtaagtctcctgccgtctccgggcctcagccccctgatctccacaaggggaggaggtgggatgcccacacaggacctcccacagccagggagccctattctaggctagggagctggtgagaccagttcaagccccaaatctgtgtggttgatactgggagcacttcacatgctcggacattacccagacagatttcctaaggctcctcttgctcacacggtcctggtgccgggggatgttaaaatgggccttgtccccaaggacgttgcatgtgatggggaaaggctgaaaacatg

SEQ ID NO: 55360 - DNA, 1341 bp, Bovine  19866880820031
  misc_feature (1)..(1): n is a, c, g, or t
ngatgagatggttggatggcatcactgactcaacagacatgaccttgagcaaactctgggagacagtggaggacagggaagcctggtgtgctgcagtccacggggtcagacacgacttagtgactgcacaacaccaccatgtttctcttacgtagaatccccagaaggatgaaaacatcatgtacggccataacaagcaagaactgacctctcacccaagaccctcgccgtgttcccaaacttgctgcatgttcagctgtgcttccttctagaactttcctccagccaagccttgagaccctgtctgtccctttacgtcccagaggctgcaggctcagtctaaacccagggcaggggtgctcatacttcagccaggaccctgagttcacagacctctgctctggaccccaaggcgctgtggccaccctacacccatcctgtgacagaggctggctggcccacctgacgtcacaggaaccctctagctccgatccccaccacactggtctgtggctctaactgccccttccgggaagctccagcttcgctctgtgaaaaaatatgaatgcaggcagccaggctccctgcctccctctgctctctgatcctttaatctgagactattaaaacttcatcccactcctattggtaaaccatcaatcaccgtcaccaagcagcctctggcttccagagcccagcaggggagggcagtagggggagcgggggaggccacagctggtcactgaaggcccggacgcaggacggaccccctgcaagtccctctcccctggatgcagcccaagctccagagctgctgtgaccttgagaaggactgagctgctgggcgatgggaggcaggcaggaggctcatgtctggggtggagaatggtcccatggccttccatattggtcactcagggccccttgcagtgggggtggttggcaatgcccatgtctggcctccgggggcaggctcccgggggcagacggtgccatcagcacttgcagcctcctctttcctgagctgcagacacatcgaaaaccttgacctttctttctgagcggcccccagcttctttccgggttcagatcccaggctcccgtgtccttcttcccagagtgatcctgacctcaggcaggagggacgggggttctgggctcagctcttaaaggttaacttccgaccaggcagccccagcccagtgcttacaggattatgggtctttttcttaattaaaaaaaatccaattaaattaagatatcagaactaaataacactcaagtcattactgtgacttttatcttaatgactacagctgctgaatccttttccagtcccga

SEQ ID NO: 55361 - DNA, 729 bp, Bovine  19866880880349
  misc_feature (1)..(1): n is a, c, g, or t
ncctgtgagcccaactactgagcctgtgcattctagagcccatgctcaacaagagaaaccactgcaatgagaagcctgtacaccacaactagagagtaacctcccgcttgtaacaactagagaaagcctgcacagcaacgaagatccataaataaataagtacaaatttaaaaaagtaaagctaccaggctttttattgctgaagcctataaatttcaagctcaaacttccaggctatatctatattactgtatctcagcaacaaaacctccacaaactatgttcttttggattgtgggaagtctgcctaattactgcaattggagattcatgactgcccatatgctccacgacaatctgatcgaaataaactgcatcagctaataaaaggctgtaattttttatgatactttgtgctcacagaatttaaaggaaaaggcagatttcagagctaattaacagcaagacagcatgggtactttgtgctgagcgagagccgcttcacgaagagaaagggcgctagagtatgtggtgtcgttgagtagattctgatcacacagagagactagcttgtgtgaaggttcccacacagtatgcagcttcagaagaccagaaaactgccctccgcatggccctaccctcttctgatgccactttccctgctcagcacagtcttctactctttttagttacttatggggacatctttggaggctctggaaataagtt

SEQ ID NO: 55362 - DNA, 1157 bp, Bovine  19866880908076
  misc_feature (1)..(1): n is a, c, g, or t
natttttgtatattcccaagtatgggaattaattatactgaattacaagtttttaaaataggacttttgttagttgtaaaaaaaaacccaaaagagtcatgattagtaaatgtgaagatgtagaaacaaaaaacagcttttcagctggggaactggtaacaatttagactataattctgccacatagcagaatcaccaaacttccagttccattaaagatatggataaaggcttgacacatcttcctatgttgttttttttaggaagcagacccccatcagatgaaaactcctgaccccaagaacatagagccttgactgattgaaactagacaactgatgacactttaaacttcaccttgatgccagccaatctgagaattatgcatgagctgatcacatgctctgcagccccctccctcaaactgcctttaaaactccttccctgaaagctgtgagcggggttgggtcttttgagtatgaactgcccattcttcttgcatggtgccatgcaataaatgctgtaccttccttcaccacaccctggtgtcagtggattgactttactgcaaacagacaagcggacccaagtctggttgggtaacattctgaggagtagagaagatctcatgagcagagcttcagccctgcgcccaaatagtgtacagcctacccaaagttctctcctttccttcctgcaggaatgccccaaagctgaactgcttgaccgccagtccaatctccaagcctgctccttgcctagaagccagaagaaaaggggtggggtagagaggaggggagggctgggaccattcccatcagtaacctaaaaaccaattatgatgcctgttacctctgagcatgggtctgggggaagtggtgagacagacaatttttattacctatccttttgtactttagttttaccaggtgtgtgtgctttcataataaggtgtgtcttcatgttgaaataatcattaaatgagatttcatttcattgtctattaaagtgacatttttgcaagccttggcattataaaacttcagtagcaatgaatttaagggtacacatagaaaagatagtggatcacttctgtcaccaaagggattgcctgcagcttcccaataccactccatgaatatgaagtgttaagtaga

SEQ ID NO: 55363 - DNA, 1933 bp, Bovine  19866880928582
  misc_feature (1)..(1): n is a, c, g, or t
nctgcatatcagtaaaggagactctgaaggttgaatgacgtgttcaaggtcacccttgggggcctgagtggcctgaaagccctgctcttaaggactatgctcctcttcactgacaggcagccttaggaatgtgaccattgggctaagtcaggtttctggacaaccaaggctcacactacttgctcagcacaagcgggttcactgttgtaactatcagactttgaacctaaggcagcaaatggaaaactcattaaaggaaaccttcgtagactcaccttcacatccctcattaagactaatcacctgcccatcaggttagataaatacctcagggctttaggtacctacatgtgccctggcttaccacccttttacattcaatttctgtggatggccctgccaccttggttgggggttgggtgactgtcccccaaggtcaatcttggctgtgacgggtagaccttcctcatttgctctagccttttcgtctgcagtccaaactcagatttttcagccccaactctgtgactgtaacctgcagccagagtaacccagacaaccaaaaactgtggagaggatgagatgctctacaccagggaaggaatgaaaatgcagggactttgggaaaactttccatttaggtgatgattttgcacttccagtttcatggctactttggaaggaaggatgaagattccagaacactgacctccatatgtgggctacaagaaaagacatttctacttgagtttgttttttatttaatgactgttttttttttcttaacaaaagtatctacaacttgaaaaggagactggctcctttaaggctaaaattgattgggaccagagatcttacaacaggttataaacgttgctgactgacatacataaaaatgaaactctttcaactacaacactggttaaagtaggagttaaactcaattatttaggaataaattaggtttaaaatgtgtcaattataatgtcgataaaaagtatgtacatcaagaaaatttcactaattcttcaggaatcctttctccaaataaattttggaaaatcatctcagaaatctcagatcagagtttgggcctctgatggtgcatatggctacgtaaaccagagatgccaatccagtttcaatatgcctagttaatgataaattattccctcccctcaacgtgtggcaggcagataactactccactctgcagacagacaatgtaggaacactagagaaagggaattagtaaagatcatccaagttttatctagctgcctacttcactctctgcgatacaatttaaaggggatattttaaagtttaaaacatggcaagggagattcttacgcagatttcagacatttctgtattactccatttgttatcatcatgtatcatgcttataaatttaaaactttacttaattagagttccctggtttgggttcagcttgcttccatctgagattcttggcagaaagtcacgaacctcctgaacatgagacttctgaaagcgctctggggtgctggtgggaaagaggaccttgcctcctagttacacttcaatgccatcaagctgtagacctgacacatcaacagggttattaccttcttttgaccacacgtgtaagataaagattacttctattttcttctctaatcttcagctaaatcatggtctttcaacttcaggttgatttctaatttcaccaaaaaatcttagttaaaatcaagtccagagatcactttccgagcttcttttctaatggaaccctggaaaatcacaccacagaggatggtgttctatactgagtttgttagcagcagcaacacaaaatgatttaagccagaggacttgtttcacaggactttcacctacagccagaaatgtgggaggtgacttcactgttccgggagaagtgaaattt

SEQ ID NO: 55364 - DNA, 600 bp, Bovine  19866880933639
  misc_feature (1)..(1): n is a, c, g, or t
nccagctgcttcctgagcaatctgtcaatgccacatgctaacctgaggctgcggttgccagtgccagctgggaggccatctccctcgcaggggccaccagtcaggactccatccagttttctggactttgccaagctcagagcagtgagtcctccctgttcatcccatctgtgagagcgttctttatcacccccaggaaactgaggatgtccagtggtgagggaggaataagtcactgctctcagctaaatggaggagggcggatctgctgggcatggctcctttgtcatcagtgcaaataatgaagattccatgcgctgaggacaatgaaatgagcccctgaactattgatggggtatttgtacaactccgtgagttatgtttcaaaaccaggctctattaaagatgcagaacccttttcagaagcaaaaagactaatattgctctccaaataatttataagtttccccacaaggcagaaaagcgaagttgtctggaagcaggcgatcgttgtttggggtttcctgccgtctctgggctcctcgctcagctccgctgggctctgacagaatctggctgtaacactccccacccgtggtg

SEQ ID NO: 55365 - DNA, 1150 bp, Bovine  19866880937522
  misc_feature (1)..(1): n is a, c, g, or t
ntggctgggtctcagcctctctcttacagggaagcagaatgcagacttttttaaaagctaaatgttcaaaaacattccctcagtgctctcctactccaaatgggtacggttttctgcttaactggagtagaactgacatacaatgagctgcgcacttaaggtacgcaagtgatgagctctgacacgtgtctacacctacaagtgcagagtgctccttcgcgcagtcctgttctggctctttgccacccctcaggctatagcccaccaggctcctctgtccatgggcttctctaggcaagaacactggaatggattgccacactctccttcacgggatcttcaccacgcagggattgaaccctcatctcttgcatttcctgcattggcaggctgattctttaccactagcaccacgtgggcagcctcctacgcctacaaaaccatcacctaatcaaaacagtgaacttatccatcttccccaaatttccctcctgctctggtcacccctccctcccgcctccactctcgctgttcaataggggctgggggtaattataataaaattaaaaagaaaataaatctgacaaagaagggaagagaaaggtggaaagagagagggacacacacacaggggaagcaaggaagccagagaacatgtgtttgatggccccatgacagcccagagacacagagcgagaaacagaacgatgaagtgtgcagggaacagagagggacaggcgtgcccatctgtgcgcttcccctccgggacgggagaggcacccaccacttccggtggcttgaggcaccggctcagcagggaccccgccatcacgccccatcgcactgccccatttttcactgtcaaggccctgcttgagcacaattcatcacggccacgttcggaaactaccccgtgtaaatgccgagctattccacctggcaagggcctgactgccctgaaggggggtttctcaaagcgtctccgacaccgttctctggtctgcatccgccatcacgaccccagcatcagggcgggtccacggactcgctcctgagacagagcacagacaagggttaggagcaggggctgaggaggccgcaacggcccacgcctctgcaggatgcaacagctcaggcctgagcctggaat

SEQ ID NO: 55366 - DNA, 2097 bp, Bovine  19866880940936
  misc_feature (1)..(1): n is a, c, g, or t
ntaaatgccagtgtgtaaaaagaagatgttcatgcctagcatgctggaacataagaaagagcctcagtctcaaggaaggccctgggacagccaggaggggtcccttgatggagagcaaagcccacagctaactggaacctaaggagcaagactgggctgaggttgtgtagccatgaattcttccgaatcccaataaactgccttttattttatttgtccagattatttataaatggatttttcaataaaagccagagctcaggagacatgatggattttccctggcactttgcagggacttgttcatccccatggcgtcagcccagcccagcagtagaagctgtcctcccttcaggccacagattggctttcagtaatttctcagaagccctgggtagtcactaaatttgaactcctgtcctaaaaactcaaactcaataaacacgtattgatatcctactgcatgcaagacctgaggctggccaggtgcggtgctgggtgggaaacttacagaagagagaagcaaagaggaccctaagcactttccgagttagaagagaaaatgcttgtgcaaaaaatcaggcacaacacaaggagccacaatgaggattagaatgtggaccatggtgacaagtggatacttttagttgcaaaaaacaaaaaaaaattctagaaatccaacctactgctccttggaagaaaagccatgacaaacctagacagcatattaaaaagcagagacatcactttgccaacaaaggtccatatagtcaaagcaatgttttttctagtagtcatgtacagatgtgagagttggaccataaggaaggctgagtgccaaataattgatgcttttgaattgtggtgctggagaagactcttgagagtcccttggacagcaagatcaaaccagttaatcttataggaaatcaaccctgaatattcactggaaggactgatgctaaagctgaagctccaatactttggccacctgatgtgaagagccaaatcaatggaaaagaccctgatgctgggaaagattaagggcaggaggagaaggggatgacaaggatgagatggttggatggcaacatcaactcaatggacatgagtttgagcacattcagggagatggtgaaggacagggaagcctggcgtgctgtagtccatggggttgaaaagagtcagacacaactgagcaactgaacaacaacctaaacatcaaacaagtgagcatctcagatcctaggaggcctggacgcagagttggcatcaatgacatcgttgggaacctgggcttctctttccgctgagccttcctctgacttcaggcttgacccacgaagccgcccagagatcacaacagcaccccctccccatcatcacatcttccaaaccctagaggacacaactcacagactgctttttaagaggcaggaatttctccaggagctcctacacatctcagtggcaataactgggtcacaggcaacccctaaaccaatcattggcatgaggggctgagactgatccaaatttactcccttggactggagaggggcctgttccccctaccaaagaatctggccactgatacccatgagcaagaaaggagaggggtttgctgttgggcaaacaatcaaaagttgcccggcctggagaactagatattctctgaagaggttctgcattaaactggctaaatattcacacaaggaaatcagggaactggtctatgttgttctttgcaaggcatatagtagacatccaaatgtttgctagaaggaaggaggaagggagcgagggaggaaggaagtggggaagaaacagagatggcattaagtcaaaagactgcctggaaataggctagagaattcaaacccctggtcgtgcccagggaatcagaatagcaaataccatcatgtagagaaaggaaggtgacgacaccctactccagtactcttgcctggaaaatcccatggatggaggagcctagttggctgcagtccatggggtatcgaagagtcggacacgactgagcgacttcactttcacttttcactttcatgcattggagaaggaaatggcaacccattc

SEQ ID NO: 55367 - DNA, 1698 bp, Bovine  19866880950554
  misc_feature (1)..(1): n is a, c, g, or t
ncatctcccaaagcttgctcagactcatgtccattgagttggtgatgccatccaaccatcttgtcctctgttgtccccttctcctcctgccctcttcttccaggccctaaatgtgtggcattctggccagaaggccattccataggctcttaggatggggtggcccccaggacacctgtcagcccagctccctcatttatggagaatgcttggtccaagcagaagtggctggcgctgagcacacccacaagcacataccacagccctgggatgggagctgggaaatgctggccctgtcagcccccagctgtctctataccctcattggagtcctgaatctgtcctgtggctcctaatgctgcatccagaagggctgagcagagcaggtggtgctgagatctttagaaatacaactgattgcttcccaagccacagaggcattctgcctgtccctgcccccaccggtcggtgcctctgtctggggatggctcatgggtctggctggggatggacccaggactccaagctgtgagccctggctgcaccttgtaggcatcaaggcctcccagcttcatacggtgtgaatgcctccctgactgtgggaccttgctcgccgtccccgccttactgtttcctggtccctgttgtctgtttgctattaacaggacacttgattttagttggacagcagcaagcaatatttccagaacaaataaagctgcatggacgtttgctctaggcgttttacatttcaacttgaatatgtttatttcagccttgctgtttgaatagcatctccgtgggggatgtctggggatgtttaaatttcctgctcacatgccagtacttgaagtgatgagaaccaggcaggctgggggagggtcctgaggggcaactatgcacccacaaatgggcagtgggagaagctgccacagaaggatatgcagcagaccccaggatatgggcagatgaggctacaccagcccctgggagatccccaccaggtgcttggccaggctatgacctggacatctgatgccatactcactcctcctgtgcggttggcactctcaaggcaactttggggtgtcttctctaccccttctgctcccccaaaagctcagctcaggctccaccctgccagccactccatccacatcctgcctcccggctccaagtgcttctgacggcctgattggaaacccgaggctcagctggtggttctgtaccatcctgtgcactttgggcatctttccatgtgcccagggggtgcatacaactccaggcacccctggcatcacaccacacctccctctttactgcgaggaaagtaaacaatttacagactacagatgaggaacatgtatacactcctgctcagttgtgtctgactctttgaaaccagctcctctgtccatggatttccaagacaagaatgctggaatgcgtttccatttcctccttcaggggatcttcccaacccagggatccaacctgcatctcctgcattgacaggcggtttctttactgctgagccacctgggaacccccagattaggaacagttgaagtaaaaactagtagtgatcaggcctattcactattctgtttatcttttttgttctcaggaaagggaaagaagagaaaggaaaatgcatttctcttttttctttttcactgcaacattatcttgctaccc

SEQ ID NO: 55368 - DNA, 2117 bp, Bovine  19866880962264
  misc_feature (1)..(1): n is a, c, g, or t
ncatgttcttccagctcctccttctggccttgattcggtgtcattctctccatgaggtcttccatgaacacatgctttaaaaatcacacccttcccatccagcaggaatttctttcctctgttcctgtgttctgtttctctagagtgcccttcactacctgagacatggtgtagtttccctgtttatttaattcacttattcaccacctgacctcctttccctccaaaagtacgacaaggagaaggatttccagtctggcttgttcaaggagtctctccagtgcctgcagcgctgctggacatatagtgggtgctccgtgaatatttgtgaaatgaatgagagtgagtctgaaggttgtggagggagagatctggttttatttcactttatttttgttttgtatagatttcctagtgctgtgctctggggcacttccgtgatgggcttttaagtctcttcagcagctctgccagacatgagatgcagaaagggtgtattatctgtctaagatggcacagccaaatgtgagagctagaatttgaacccaggattatcttacagcaaagcctacaatcttagctttgaggctacacttccgctgctgtggggtgtgaaggtggcccctcaaatggtcccactacttttttctacctcccgtctccattgattctgaaccacctgggagacccagccttcctctgctggtgagcttggctctgggttcctgtgctgacctctggagttgatctagcctctgagttgcaggcagtgtggaggagcacgtgctcccccacagggcagagagcagagcccagcagagcccaggcaggcgggctgcaaaatttagcaagcccaataatgtatttctcctctcctgggaaacatgcaacctttcttggaagtcggggacacatgaagctcaaaatggaattgaaaacacttccttcctagggatcttgtctgtatttgtttggaggctggaaaatgctattaattatctaattaattagatttatgtagatagcaccttaacactgaaacactaaaggtctaataatagaatttttctataatgaacactgaatgcttcttggtcaataagcaataaaagagctaagtagaaggaggggtccggagggaaaggagaagaaaagtgagacctgagtttcaagaagacccaagggactcagcgggagatccaccctcgtctctgggctctcaggaccccacaggtccattgcatattccaccctgggtctttcctatgctgatagtgagaccaagtcttgggtcttctgctcttttctccaaagttctccctcccaggactcttaagaactacagggtttgactactgaccctctgtggaccttccccaagcttgaactctctcctggacacctggctgtcatagtatcatctcaaactcatcatcttccttcttcctcctgccctcgctctggctctgtttctgctctctgatttcccttgctctcagaagagccacctcatcttaaaggctccagggcttaccacttgtcctcctccatggctttgtcttcctcccctggatggaattagtcactggttctgccagtgtttcagactataattcacatgcttactttcctctgtctctgtggcctggccctggccatctgcatcagtcttgggtaactgaacagctccaaccacatccctctccaggctggacttcctccccctggtttccctaagacactcctttccgcatcattgttcttgaaaacctatgggtggagtccagtgctgggttcagggtcctagcgcatttcctccacctccctttctcattcattttctctgactccccaccacaaagcacccactgcagttaggacgctgatactgctctccagacacaccttctgtgtcccctgctttggcttttactcggccactgatctcccctccaacaccccatgtccagccccatctgcccatcttttggcttttgaggtcttcctggagccccccaggcacaccagctctaggggagtctctttgctgtcagcttctgtagcccaggttctttgtcatcaatttttgacaactgagtgatcacaagtgtttaagc

SEQ ID NO: 55369 - DNA, 822 bp, Bovine  19866881013808
  misc_feature (1)..(1): n is a, c, g, or t
ntggtgggacctttcctccacacaggcctggccccagctcacagcctatctggatggggaacccacatccccatggttacccacactgtaggatggtgataaataaatacggggaccccagttccagccaagagatgtgagactcaggtttgtttgtgaatttgaggatcagatagttcccacccttatggtctttccactgattaaggtaaatgtctctttaaaaaaaatatttattgtttgtttagctgcttcgggtcttcactgtggcatgcagggtcatttttttgttgttgttgttggggtgaatagacactttagtcatgatgcccaggctcagtagttgtggtgcgtgggtttagttgcttcaaagcatgtgggatcttagttccccgaccagggattgaacctacatcccctgcattggaaaatggtttcttaaccaccaggccaccagggaagtccttaaggcagctaccttgctaggaccatcttcctccaagtcccccaatgctagcagagatggagttgaggggagagggccctgggaggatggagttgggggagctgagggcagggaccaccatcggctatcctaagtggttctttcctgtgggagcttctagggactccccctactaggggctcctcctacctactaggggctcctccccaacttggaccaaaggccttggaccaaaaggcccgtaggttcttggcttttaaactgctaatggggaggccaaataaatatttcaagggtcacccaagggctcccttgggccttgtttattcacagcacctcggccacctcagtgtaga

SEQ ID NO: 55370 - DNA, 829 bp, Bovine  19866881022516
  misc_feature (1)..(1): n is a, c, g, or t
nctttaagcatcaaagagagatggagccgtgcgcactgtatcatgaccctcattaggcaggaaacagtatctgtgattgaggaaagagtctccagcaacactctcgggtgcccatcaaagctacctactcctcatttctcagctctccatgtcttctttgggcttttctgtactcctctatatcacgatgctgtttgcagttctgccacagtgagtcatttcttcttacctagtttaattctatcgtttgtctgtaagattccgtcctagggcatacggtgtccccagactgtgggcttaagatggcaaatccgcgctgtgatataaacataaaagtcattaccattctcctcgagtatatgttaatgacaccgcggaatggtgataattagatgaagcatcatttcacaccatcaccagtgtgctttacatttatttatcgccatttctttctccaaagtcagcaaaatggagactcgtacaatatcccaaagcatccgatgagaaaaatatcctgcgactgttaattactgtcttatgagcctgccgatcccaacattcacctccagcctctttctggggatctccttctgtccctcccatcccagaacccttggacatgtgccctcagctcagccaccaggaatggctgtgtttgtctgctgcatttgactgacaaagcaccacaacctgggcagcttaaacaaatgaaatctattttcttacagtcccggggactaaatccaaggtgtcctgaggcctctccccttggcttgttagatggccatctacatccttagtccatacatggccatccctctctgtgtgt

SEQ ID NO: 55371 - DNA, 1328 bp, Bovine  19866881041852
  misc_feature (1)..(1): n is a, c, g, or t
ncagagttatcagctgcctctgtcaacactgggtaatgaggtgcgaaagctggcacctcgcagtaaactgtgagcctgcagacattctcaggcacctgcagctgtggggccctccagtgaaagggggtggtacctggcagcccctgtgaggccctcagggggtggggtctgttctggggactggattggcatgcatctttggaaatctatttatgggatccacggagcattcccttatttagaactggaggaaactgacatcttggattgacagaaacctcccccaaaagcaaaggagcatgtgtttccatttttgaagtggtgatgcttttcttggggtgcacctgagcaggacccaggagggtagctgggactggaacccaatcccaagcctccatcccatctccttcgacagggtcagctggtttcctggtcccctatccacctgcaatcttctcctctgccttcttcttttcccttcttgagacccaaggttggaccctcctgcaggcctactatctcctaagtgccccaggcagatgggatcagggtcccagctcaatagtcaagctcctggcatgagtctctccaaaccaggcctaaaccccagaaggtactcatgccacccccatctctctgtgtccttcatcaactcgccatcaagtctgtctgtcttatcttctgaacaactcaaatccaacactggtgcccacccactgctaacctccaccacagtccttctgatttaacacataggctttataattattccagtggggtggggccaacagatctagagatgactgccactgaaaagatggtttgtgactcacaggtccccaagccagaggggaggacacagcacagggaggtgccacagggaggcagaggaagggaggaaaggtgggcaggacatttattgtggtttccgtgggctttcctggtggcttagtgataaagaatctgcctgcaatacaggagacttgtgctcaatccctgggtcaggaagatcccttggagaaaggaatggcaacccactccagtattcttgcccaggaaattccatggacagaatgggatacagtccatggggtccccaaagggtcagacacgactgagtgactaacactttctctttattcccaagtggcactagtggtaaagaatccacctgcaatgcaggaaacctgggtttgatccctttgtcaggaagatcccctggagcaggaaatggcaacctattccagtatgcttgcaggagaatcccatggacagaggagcctggcgggctacagtcccaggggattgcagagtcagacacaactgag

SEQ ID NO: 55372 - DNA, 1033 bp, Bovine  19866881058046
  misc_feature (1)..(1): n is a, c, g, or t
ntcagtgggtgctattgtggttctgactgtggatgtgatggtatctgcggatgcccactctctctgggtcataccatttatgatctggggacagttggcctgaagacactgcagagggtcattgaccatgtttaggaaggccaagaggacagaacaaatcacaaatcctgtcttagctcactagaagccgataggattaatgtcacatcttctccaacagatgatttttctgggatggagggtgtccctgaaacactctcgtgggtgtctttgtttttctttggaggggacaagacaagcagcacccatctatttgatgggatgtcttctttgcttagtccttgggaagtgggtgagtgcagctgttggacttcagggtccttctaatgggtcttttagggagctggctctctgaatatgagaacagggctgcagtggaaagggcttggcacagtggggcccggattccagctttcttgccattcagaaatgaaagagaactgtaaggttttcagtacagactggtaagagcaagacagatatcatcagctgacaggttgtgacaagcgtgccgagctgtttccagattgttttagtcggtgcagacttcagggaggaaaccaacactgacacaaaccaattgcacagtgatcggcaaacaatgaagtgctgggagtcactgctgaaagtctgtaatttccaatggagtcgatggttagtcatcacctggccgctgaacgataccacccggctgggtgggaactacaattagccgctgtcaccctagagtgatttttttcttccctacagacaatggaatagtaagagatcaatagtcagtggtctgtgcccaattgtgaaatggcccatagttcaaaagaaaagaaaagaatgggatggaggcttttgccctgggccccagggaagactggttgcctacttcctcacctctactgcagcacagaaacagcagccagcttgcatcaggaggaatctatgaaacagaaacagaatcctgggcacagagaacaga

SEQ ID NO: 55373 - DNA, 1187 bp, Bovine  19866881091010
  misc_feature (1)..(1): n is a, c, g, or t
ntatttaagaaaacctgcttgcctaagactgcaagctgtcttgctgtgggccaccctgtttagagtttatcttacattaaatctccaagccagagaccctccagtcggtctgcataaagcggagttattggtccaagtgtttttaaaaatagatgcaactccagaccccaagaaactgaagggatattatgggaatacacaactttattattgtgttactctatgaaaaattgagttctcagctcctctgttcccctcctgctcctccctctcctggatcctcacctgagagtgcagctcctggcaccaaagacagtaaatattacaaaccagctccccatcagaacagtccagagcacactgcaggggaccaagctcccctgtgcaccataaaaggggggccaataagctccagaatgccattccagctcaaatttcaactaatggtgagcccacaaaaaaatcagtcacagggcgtccctggtggctcagtggtaaagaatctgcctgccaatgcaggagacacagttttggtccctggtccaggaggatcccacatgtcacggagcaactaagcccgggagctgcaactactgagcccatgtgctgaaagtactgaagcccacaagcctagagcccgagcttcacaacaaaagaagccgctgcaatgaggggcccactcatcacaactagagaggagcccccactcgccgcaactagagaaaagccctcacagcaaggtagaccagcacagccaaaaagaaataaatacaatcatttaaaatatatatatatatatatatatcagccacaccttcaagctggattcgtgaatcacatttcatcacaggcctcccaggcaagctggtcttgacaggggaagtccatctggactctgagatttggtgagaaagttccttccagggccagacgtcctgggtgtggcagcctctccaggccaggctccccgccagccacagcagaagtcagaagagaggagcctttattcccgaaaacggccccaggaacagccaatgcccacaagccatggccacagtcacagttcaggctgtgtctggacacaggaaataaagtgcacctgactgggcttccctctactctcagccccagctataaactcacacagtgaaatcataacccctaaggtgacgcgttaggtgatgggg

SEQ ID NO: 55374 - DNA, 890 bp, Bovine  19866881099948
  misc_feature (1)..(1): n is a, c, g, or t
ntacttgaaaaccattttcaagcgacataaagtttaacataccggtacatctgcctacccactagattctacatggaatttaaaatttaattatattaaagctttgttacagtgtgcattgcaagcatgctaaccaagtggaactttcacaaaatctctgcagatagcttttttttttccttttaaactcagtttggtaaaagcaagggtttgacaaacagttgatgattctgtccaaagtgtttactgcttacataaccaaaccacttgggacctcagtgtttattctcctgggtataattcatgagttcatcttctctttgctaaagcaagaagcagccaaagaaatcaagtagtcagggagctgagattgaccctttgaatccatttatggtctggttttgtgtttttttgtttgtgtgttgttgacaggaaagattgggagagatttacttattctggagagggtcttttcactgctagttttacatgcaaataaaagaattaccttctcagggtgacaagttgtcatattaatctgttaaccacaggttgggtgctttctgcaattaataatgcaaccagttccaacaggaagaaacaattccttgcaaacttggttcccaacaaagaagagcaaggttaggcttgagaagttggcagcctagctttgatccttagctctgtcattaaccagctgtgcatttttgagcaagttacttcacctccctgagcctattttacaaaatgaaaataatcatcgtatctaattcacatagatggttggaaaattaaagaagacaatgtatataaagctttgaagcatagtgcccttacagcttaaacactcaagaaatggtaattgtatttcgactgtgttattgttgcta

SEQ ID NO: 55375 - DNA, 1234 bp, Bovine  19866881100887
  misc_feature (1)..(1): n is a, c, g, or t
nctggtgatgagcagagctgaaagcactcagctgttctgatgggcatctcggggactgtgggcgtcccaaggaactgacaggtggctgctgggtaaactgtgatttaacctacatgtttactttgataaatacgccgataggaacatgctgcctataaatttcaattctctgcacaagaaaagaaggcttctgtttccaaagacatgggttcccagccctcagctctgcagggcaaaccaggactgcactaagagtctgagatctaaatcacttccaacttactgagaactttcacagcaaaaaaatcaaaacggaaccccagaagggtggtctttggtctgacttgcccccacctccctgttggtggtctcttgtgtttcagacacttgatgtgcctttttgttcacagggctcaggtccagtcgaatcatggcaggtgcatctcaggcctggatttggcttgaaaaatggtttgtcctaaagggagctgtatgagcttcagcaagcagactcatcagtctaaactgtctgcagagtacaaaatccgagcttcctcctaagtcatgctatgacatgttctagttagaagcgagagtcctgaactccagatgccaggtgatgagaattactgatgcattgctttcaaagcagttggttttatggcttggcggggctggcttggaggttctgctgggcttcatttgcataccgaatgacagcagaggaaaaagccacgggaggcctcagacacgcttagcctcttctatctctgctgccagttataggtcattttaaactaacatctggtgagtgtacttttaaaccacctctgtagctttaattggggatctcctgggaatgtcaggggaggaaaaaaagagagacatccccaggggaagattaagacattggcagttccactgatgcaaagcctgggaaactgccttggcccgattttagtaaactgtatgatccactgtgataagggggccctttgtacaagaggatcttaatattagtgagatgctgggataagcagaaattctgtctccacatctgaaagaatctattgtgtccagaaagtaccttctgtgccccaagatccaagaagggtttcccttatatgttgtggtcattcagtagctcaattgtgtctaactcttgtgaccccagggtcggtagcccaccaggctccctgtccgtgggatttcccaagcaagaatacttgagtgg

SEQ ID NO: 55376 - DNA, 1338 bp, Bovine  19866881105188
  misc_feature (1)..(1): n is a, c, g, or t
ntgctgagcagggcagtcgtcagagggccgttcgagttttggacagctcttaacatctgaatgtcttctgggggctatggggtgggctcccggtgtcctcccttctgaaaacaggggaccaaagcacgcaagaagagaagggcaaggacggctatccaggaatgcacacggaaaacttccagcaccatggatgcagcccccagccccctacagaggctcagtgaccctcccctctaattagtcaccacatagtctaaaaccggcaagatccagttatgatgtgtccgcctaaacagatcggtgggcaaggggaacaccagccagaccgagaattcctcgtaggcgttcattttcctcatcagagtctccactcggtgcaggtgggggcccgtgggcaatgcgggggctctgaaaccactggtggaaagcagcggggaggggatggagggacagagctggggaaggaggccgcgatcagtgcaaaccacgttccggatccgttccagccacctggctgggctccaagaaacaggtctcagcaatgcactttgatgagagagaggaaatttcactttatttatttattatttatgcccagtactcttaggaagtatttgggataaaaacagcccagacacagtgaaacaggctaaaagaacaggaacttcaaagtgggaaggtaaccagatcagagtatggagagagagagggagagagagagaggaggagagggagaaagagacagacaggcgttcctactgctgctggcagagtgtggggtgctgcccggcgcacccagtgggaaaaggtgaatgaacaccctcgtgggggtcctgggaaccaggtgccagaagggacttctgagacacagaaatgcctgggtgacgtgatttcccagagcagtttgacaaatgctggggacagggagaaggagaggagatcacagacccagctcagagtccccaggagatgggaaagggggcaggttagagtggccaaatacctggacagaccccagcagaggctctacccttggggtcacgtatgggaacagacgctggtagagaccacagagggttaagcccacggccccctcccacctgccctggtctccagctggagattcatgactcagatcaagtccttccctaaatccaaatttaccttattatcaatttttagccattattccattttatgcccactaatttattaatcctggaaacccccaaaaacaataaagctgaggctccaagggattttatttatatctttaaacatgatttttatgcctttttatctaaaaattcatttaatttttatcaccctcctcattca

SEQ ID NO: 55377 - DNA, 832 bp, Bovine  19866881137568
  misc_feature (1)..(1): n is a, c, g, or t
ntcaccatgtagaggtgggcagcactgctgtctcgggtacaggagtggacagaaatctctcctcgggttgtattaccgatgcacacaaacgtggccttgaccagagatagagccgggggaaactgacctcacagcttaggcagacaaccacctccttctgctcaccacctgggcccaggaactgaccagcccccagcactggttctttgggactgggaattggggggatatgggggacctttagtcaaagaggcactgctctctaggaacccaggcactgcctgtctttgcaggcgcggctctcatttgctctggtcattatttttctaaccagaacaaaaagtgccacatgcttatttctgcccacaacactcgagggtcctgagattacagctccacccgacgctaataaccttcactgtaaatcctttatttatagacttggcccggaacaacctccgcctggcgtgacactaagtgctgacgaggcagaggtgggctgagcatccctggcggctgggagctggggtcccaacccccacactaggtctgcggattcagtgacaggctgtaaaccccatgctccttccccacggagtctggatcccagggggcacatagttggagattctcatgcaaaataaattgcagtgcgttttcattaaaaaaaaaaaaaacaactgcatctgactcagcactttttgggtataggtgggggaggcgctttgtagtaaaatctaaggacgaggaggaggctccgggccccacagttcaccccaatggttggggccccactgcccactgcctctggccttcactacagctctggttt

SEQ ID NO: 55378 - DNA, 1385 bp, Bovine  19866881149359
  misc_feature (1)..(1): n is a, c, g, or t
ntcctgttcactcagttccactgcacaatctcccagccatccttcaagggggctgggcacaatcccatcagcaggacactgcacttgctgtacgctctcgagtggacgtccttccccagatgtgcacatggctcactcccccctcccaggctttacccaaacgctgggggtggcatgctgataacctgactcccatcctctctattccctgccccatcctttctattccctgcccgttccttacttgctctcatggcatggtcgccctctgagacatcatgaaatctagctatcatcccattgactgtccccaaccccctcctcccactagagtataagctccatgaaggcagggacctagactgttccaactactgcatccccagaattcaggatggtgcctggcatacactaagggcttaataagtgttttggggatgagtaaacactttgaaaagcatctcagcttcttggctcttagttgtttctttgtaaacaggagacaccaaaaaaagatggaatcgatcagaacgtgtagcatcattcatcacaattaccccaaatcaaggatccaagtgaaggtgggagagagggtgggctgtccacacaggtagggagtagtcttcctgaccaaagttttcagctttcagagacagaccaagcagtgtccctctgtattgttcgtattgaccccactgacctccagcttgggccaaaatcccagaatcaacaggcaatgagtgaccccccacactgaaacccactgagctcatggtccagccaacagctgacatttggggtcaagttaaccaacttgactttcaactatattcccctcgagtacattattgaggagctacttgtgaaaatgaagccgcacactgtacatttctgagtcggtctgggacttgggagatttggcctgtctgtaactttaattttcaactaattcctaaagctggaagagatttgcaatacaggttgatggatcatctccaagtctcagaagtcttatgaagagtttcaagtgcatctggggaaagtctcatcgcaaagctgagcttccaggggtcgttcccacctcagaagatgcagagaccattcaggcatcatgtctccacacgtgtgctgagccatctgcacaggcacaagccactagcccagtgacagatgaaaagaaggcaagggctcggttaggaatgctcaagatgcttctgaggaatgctggatttctggaagagctcaacaggatgacaactcatgggtgacatagagaaagcctctccaggcaaaggttgccaggagcagtgcccaccacatccccagctccctggcccttccagagcaatcagtagatccactcgtctctctagaagacacatttt

SEQ ID NO: 55379 - DNA, 1085 bp, Bovine  19866881172475
  misc_feature (1)..(1): n is a, c, g, or t
naggagatgactgctaaaatgcaaaaacaactatttgtaaacaagaatccaaacatgacctgtttgttttgacttaaagagccgaattctccacaaacacagaattaatgattccactgatgaactttccagtgagaaattatccgtgctggcaaacatggagatgttctcttctcacatctccccaccagttgtttttccacctgaacactgtttttagccccctgctggcagccaaaattatattaaagacattagttcagtttttaaaacacagactcgtaacttctaaatttataactaggcagaatattaatcttgcaaaccaattcaggaatctcttaaaaaaaatggccttctgggcttcaaggttgtagatatatatttaataaattgaagtgctttccagttaatgtgtcaaaggcctggtctgccacactgagaaaataaccattggagaaacaagagtaaaacctttttcctgggtaagtaaatgccctgaaaaactggactccattcccttgagtacaaatccctgtgaattaaatattccagcaaagagatgtcaaagcagcaaagtaggaaaacaatcaaaaacttgaaaatgagtgtgttcttaagtgaaaaattaatcatgctaaattagaaaaagtattaaaatagttttagattaatgcaggctgtgaatatcaatataattgcagcagcttaatttggcataaaaagcatctaatgaaatattttaatatcactgtccattcagtttaccagcttgaatttcatggagtattaagtgacttttaaattgtcattgcaagtcttctgaatgcgtgtagtttttgttattgttgtttacagaaagagtaagagaaatacatgtgtgtgtgtttgatgagtccacattcaaattcctactttgtaggatagatgagaagcagtccttcttgccactggtgccaggaatcagcatttctccaggtcaggagctctctgtgttttcccaagaaactgttgcaggaaggaggacccctttcagggcgcaaaactgggctctgtctaacactcagaaataatgtccgagaaga

SEQ ID NO: 55380 - DNA, 944 bp, Bovine  19866881173366
  misc_feature (1)..(1): n is a, c, g, or t
ngggatttcggaatgcatgcccttaacttcctgcttgtctaccatattccagcccacctagtgaaggaagcatggagtggcctgggaacaccccagatcttctcatccctcattcttcaggctttcttttagttttggcatgtgcatgtaaatgtcaacaggtgaagtgagatttgctgtaaataagcagatggtggccccagggtaggctgtgggagagaggcgcgttctagcaggagatgtcagaggcagagtctttacgagtcgaaactcatcctttgtcagggcatcagaaccagtgagtgaaagaaacaaggggacacaaggctaagtgcttgtccttgtgacccttagcacaggggcctggagttcacacctgcttccagccggtcccaaaggcacagccttgaacatgcacagatttctccaggatggtttagtcatagagagaagcagactgtaaccaatcctctaaatggctcccagtaatgagctgagtgtctggtggggcagccccgggtgaggattctgagtcactgcagctctgcatattcccttcacgggagatgccacctggttactcttacttcagtgtagatgagatgtaggtggggtgtaggtggggtgaccatattatcacccacactggagcacttttcagagtggaaggagccactattaattatcctagggccataagcacagttggaactgtccctggcaaagagggtaacagctctaggaggactgtactcagctctgccatagatctcagtgttaaagcgccctctgactccgggcgtggacctctgcctcttctgtttgtttttatttatatgtctgtgctgggccttagtcgtggcacgcaggatctttagttgtggcatttaactcttagttgtggcctgggaatctagctccccaaccagggcttaatcctggga

SEQ ID NO: 55381 - DNA, 1141 bp, Bovine  19866881175570
  misc_feature (1)..(1): n is a, c, g, or t
nacttgtgcttgttacaagtatcaacctgcatcttttgcagatggatctggtttgagaaaacagttcgagccaggatggagaaggtgggtgaggattcaagttcagggacagcaaagagaggggacatgaggagggacagctctcatggggcttgtctctcagacccaggtgagctgactgggactgaaggagggacacaagtcaggacagcacattatgtcctgggcgctgtgggggcctgcctgtcagtaggggtgagaaaaaaggagctaatgagaacagtcagatccctcctgaaattgaactctcagagtctgagcgggaggaaattgttcttctcttttggagcctccaattccaaattagaatgaacttcttctattttctttggagttcccctagcttcccatagcacaggttccagaaggggcagaaagagaaggcaggccacagagcctcagaggacggaggacaggaaggtgttcccctcccctctcaccgaagtcccccaacacccacaccaactctgcagagagtgatggccagcagctctgcgtttacagctttcatcagttatttttcacaccctcaaaaagaccaagtgcaatttggttcaactacgagtccatttgagccctgcctgtctgattagcagagctgaaagagaaatcattttggactatgggactctggctgcaagaaaatcagatttccaatatgttagaacttttacagattgctgtcagctgggacttaagccctgtacaaaccaaacaaacaaagcggaaattaatttaaacgattcccttgcaattcttgcccacaaaatgtgtatttattattaagaaggcaatattcttttccgacttttctggttttcaataaactgtgtttctttcttaaaaaaaaaaaaaaaaaacagaacaaaactatttttttgatagctcattccttcctgccaaaggagcctcatgtctggacagttcctatgagcgtttggttgctgtggaggagaaagccacctgcaacttacatcagccccttcatttggatgctgcgtgtccttgtgggcagtttcattgctttcagtcaggccatgagccggaggagggagacataaactgtgggagaagtctctcc

SEQ ID NO: 55382 - DNA, 895 bp, Bovine  19866881211707
  misc_feature (1)..(1): n is a, c, g, or t
ntgccattaaaatttagcatacaccataataaccaagctgcatttgttccatgtttaagtcaattggcttctgagttttatttctttcatatacatcaaacccaataaagttgttgctgcagccggaggtgaggaagacgccgttgttctgtagaccgatccccctaaccaatccccctgttttgtcgcccccaacagagggctgggtgggtttcagagcagctgctgcttacaggggacagtatggatggacgggggcagagggagagtaggggggtgtcgatgtcgagagcccattgacgaagggagtatgtgtgaagtgagggtggtcttcactgactctcacacgtggaaactggggtgtggcagagagaattcaagtctcaactccatcctgcccccggccagccaggtaatcttaaacatagggccagaacagccacatctgaatgccatcatggctcgcaactcagaccagcgtggcaactgggagtcccccattttgctcctgggcttcccaggtggctcagtggtaaataatctgcctgccagtgcaggagtcacagacgcgggttccagccctgggtcaggaagattccctgggggaggaaatggcaacccactccagtattcttgcctggagaatcccaagattggaggagcctggtgggctacagtccatagggtcgcaaagagccagacatgattgagctcacacacacacatcctgctcctaggggaaccggggcttgagggtccagttcagacccttctcaccatggtcaccaccctacctcctccagatccctgggatggggtggaggaggggcaggaagcaactcacccaacctaggacctggccaagtctcctctggtacccatgcctccacctgtt

SEQ ID NO: 55383 - DNA, 2963 bp, Bovine  19866881257702
  misc_feature (1)..(1): n is a, c, g, or t
naccttatgctctgggcctacggcaaacctctcatttcacacagggagaaaccgagctaaagctggagaagtgactgggtccagggcccagagctgggggtggagtccaaatccagagccccagtgccaagtgcgaggctccccaggctgccctggcacacgtggagcctgtgcgctcgactgggtcccgccggcgacagggccagagggaaggaggcgcctgctggagctggcaccactcccttcttcccaccccgcagcactgcccacagcaccctcacgcaaggcaggactcacaggtggctagccacatggaaggcactgcacttcggccaagggagcagggggtagtatctgtagagggccatttccagaacccaactgacagatttccttccaacaaacccagctactgggggcaacggaccacccgagtgaggcgaatgctttccacatggtgctgatcgagatactgaagcaagttcttcacccaacctcggtatgcataccactttgcacttacagagcagccttgtctgtctctaagaaattaacatcgatgtcatattttcttcaatcatttaacaacttggcatggtggttaggataagcatccttattttacaaactagaaacctgcacagaggtcaaagtgtgagctctgcatcccacatcactgcgtcagaggcagtatttccaaactatgggtttctcccacttgatctttttgcctgttcttggtacatactccaactggaaaattcctccccagtgaactcttgtaaaaatggagaaacacccacaccagtttcagaggcagtataacaaacattatccagtctgccgctcccctcccctacaaagccatggtcccctgtggggtccgggtgacagaccagtgcaagccccccggtcatcagaagggtcctcctccttctggtcatctcaaaagagatcacccctctcattttaggatgagaacatgctaaacctcaccgctcatcttgcaaagcaaaacacttggaaatgaaataagaaatccagctcgaaacctctcttcaaaatgccgcagagccaacatctggttatcactcagtacttctggttaggaaatatccttatttatccggcagcactttatagaagtagtgaagtattgggaatcgtacaatatcccgcatacccgtgtggaatggtcacagctgtgcttcctcattccacataaacatggcctggagacacatctccatagaagcacaataaatgatcaccacacacccccagatggaccatctcattccaggacacagaggcgtgggttgctgtgacactctttccccctcactgctctgaaaacagcagaacttcagccagcaaagcaaagacaccacaggaacggcccgctccagccaggcacccctccccactccctgacactgacctccacctgccaacactgacatttacccagaacccctctggtgtgctggctggaccctcgagaagggaacctgtcagcatggatcagagcaccttggagattttcaactgtctgaacatctcacagcccctgacctggtgcagcccgtgtctcaagtctctgtcttggttgacccaaaggaactgttccactgaagctgtcactcactgaagggttggggagaggccctggcgtttacgaatacaccctgcagtgtaacaggattcgaagagatgggagttttctgaatatgtggacctttaagtaatgtagggtcttagaaaagttcattttgtacagtgcatgtgatcagaaactctgaacatcaagcttccctcatgtaagccagcatttgttcttctcctttagaagatcttcaggctgcctgccgggctgtcctggccacactgacagagcccgcctgccgagttctcttattattaaacactgtggagcaggaaccctgagccaagtgcagtcagtcattcaataccactggcatcgtgaactgaccaagttatcctgtgtgtcatgggaccgaggtgcacacgcagaacaatctgcctctctaacgaatcacaggaaagagagaccataactggactgaaaagtaactctcagactcaggcgtgtccctgggttatatgactcggcctccattggggacctgactgacgggtagaagaggtcactctatggctgcagaaacagtctgttacccggtgttcacagcgctgctgtcctgggtgatgcacacacggcccccacttaatgcggtttggaaatggcccatggtctgggctctctggccctccgtatcctaactggtttgcaaggaaccctgggcctcagtgtgcgggcaggaggctgtcctctcttgacacgggcctctggctgattcttacagtcaagagctcgggcagcgtgattataaggatgggtcttcaccagctggcctgtgcctgtactcgggatgtcccccgttttgccttctccccaggcatcaccagcaggcctgccagtggccctccaggcaggtggcactctgagacctgataagcgacactcggttcctcccaattctcacggcctcactataagagcccgcagcactgaccacatcagaccgctgctccccccagaaccagccactgaccttggggttggtgcgctgctgcagtctcctctcctccctctcacgctgcagccgctcaaactcttctctgatctcagctggcgttctcctcctttccacaacctgtggacagaagtgagagaagtcagctgaggacccagatggtgaggaagacacaacagacccgagtgttaaccgtgtcccggtgctcctctcccccgggaccgtgagagcccccagtgagaccaggggacgttcctgtccaaccgtgtgggccccggtaaagccaggttcgccttcacatctgctcagtccccagtaccgtgctctccctcagcactccagaga

SEQ ID NO: 55384 - DNA, 1147 bp, Bovine  19866881274773
  misc_feature (1)..(1): n is a, c, g, or t
nccccgttctcagaaggggcccttccccagaaaagtcaccctcacccacaggagcccgataggagtgcatgtccccacagcaggggaaggggttaagccatgaactccaggcactggaaacagacctcggtccaaccctgatgcccaacaggagggaactgtgagcgcctttccaaaagcctgcagtgcatcatgggaattatggaaaagtacagcaaactcctcataagtctaatcacacttggctctgtggtgtccgggggcgggagcagcacggtgcagtcactcaggcggtgtgtgtgtgtgtgcatgcgtgtgtgtgtgggtctggttacacgtgcacagcctggaaacacggcccaggaaatatggctccaataaaagctttagatgccgatcgggcttggaacacacacacagggcaccagctccccgtgtttggggaaagcagaggtgtgtgctgcgagccaggaaggcatcagatttggttccagaatcaggcgtgccacccaacgccggagccaaacacattagcttcatcacattttcacataaatcacattccttcaaagacttcacagtttgatttcctgatgtttccaaatttccctgccctacagcagagctgtcagtggttcaatcaaaatgttgtgcgtatcaggggtgaagtgaaactgctcctcagcctctgcctcacctgttgaaggtgggtgggaggatctcacagaccccagcttcttgccagactgactccaagaactccaccttgactcttgcagtggtgaccttttgttgcatggggactttccttcagtctgcaaactgaaagatgcctcctccagatttaaaaaatgagagagagagaggaaaaaaatattcagataactgataggaattcccagcatgtttccaaggatgccttctgtcttttgcaatcccttcagcagtatttagaatatgggtcctgcttctgtgacaaagataaaaggaacagtggcttaaatcttatttctttttcacagagcaattcaggattgatagggcagcctcacagggacaggaattcggatcagccatcctggctctttccagctggttggtctgccattcctagggtactgccatcttttatgtggctccatgatag

SEQ ID NO: 55385 - DNA, 1318 bp, Bovine  19866881281714
  misc_feature (1)..(1): n is a, c, g, or t
naatatagcctcaactgggctacgtggccatctccccacctccacccttaccccggtacccctcccgacgggaggctactggaggccccacatactgatttgtctttgcacaggaagcttccagaatggcatgtgttcctccagtggtctttcactttcatcttgacaaccctgcccaggggacaggccccctcattttcatttattattgtcgtatatttggagcatctggcagtttttctgctgcttaaacgacgaggctatagccattgtgaaagtgaaagtcgctcagtcgtgtctgactctttgccaccccagggactatatagtccatcgagttctccaggccagaatactggagtgggtaacctttcccttctccaggatatcttcccaacccagggatcgaacccaggtcccccgcatagccgttgggtttccactctaattgtttctggcaggcgtgtgtatctactgaccccaccctggagctgttctcttgtaaatttctaccttatgatttagcattggagtcgaattgatttcaaccttgtgcctgtgacgtggtgcgttgttgaagatgtctctgcaatcatttaaacaatttaaatgtcttttaaatgatccaattatcaagataaagtggacaagagagtgcccctggtcttgtcacctgtttggttcatgccgacttgtaccaattcttcgctaattctcagtaatgtttgctctgtaactaaccactgacttagaatcatccttgctgcccttcctaagccagtctcctgggaagccccaaacacctgtctgtggatttgagaagttgatttctttctcttcctaatttttgaccagatgtgcatcatgtgggcttgtgtacagtcccttgcaagttgcccagccctcttaaggctctcttggcatgagtcacttaggtgtgctgagactggttattctggagtgttgagtcagtctggaacaaactgtcagccagagttgtaaattaagacctatttctttatctgtgtgagatttcctcacaatagctttctttcacacacactcatattccatcagccagtccagaaatttttttgttatgatctttccttttttctccgttgcagagcagtgattagggctaaactgcacactgacatttgctggtttttaagaatgtcttatcgagaggctggggggaaaactagaatgttgtgatattccttttttcctcccgtttgtagacattaattgggctataatgctcagttgggtagaggagctctttgccatctttcctctgctttggaaaacactg

SEQ ID NO: 55386 - DNA, 1105 bp, Bovine  19866881318230
  misc_feature (1)..(1): n is a, c, g, or t
ncttagaagagggaagaaaagtgttagtcgttcagtcgtatctgactctctgccactctgtggtgtaggctgccagtctcctctgtccctgggattctccaggcaagaatattggagtgggttgctatttccttctctggaggatcttcctgacaccgggatccaacctggattttgtgcattgcaggtggattttttatcgtcagccacaagggaagacctgggagcttcctgggaggcggggtcatgagctgagctctgaaaggtggcagagttggtgtcagctgagaggaagggatagtttttcaggcagagtcatgaccttgaccaagcctccaggcaggagcctgccaggctcctctgtccatggggattctttaggcgagaatactggagtgggttgccatgtcctcctccagggaatcttcccaacccagggatcgaagctgtgcctcttacatctcttgcattggcaggtgagttttttaccactagggccacttgggaagcccagataaagggcagccagtagcaaagaggaggaaacagatcatgttcgggcttatgttgttcattcattggatgttaagtccaagagatgctgtactgcggctggcagtggcctggcctggcctgctcccctgccttctagaacaaggtgggctctgcctgcagcatccacctactcctgtcatccagccaaatggaagagcagactctgagcagactcagggcccaggggaggccttgattccagaagttttagagggctgcttcgtgcccgtatcactcagcaggcctctctcaagagacccctccactggctcctggggacctccccggacctcccagcgctgccctcacccctcccgtttccacggagaagtgctgactgttttgtttccgctctcccatcactttctggaattcatctacatcaaagcacaatcccttctgttcagcactcaacaaggctgtggtgattaagcacttaaattgattaatcaaatttcctgtgatgagaactactgtcattcattaatctgagcgggattataaataagagatggcaaatacagaaggcaaacgtgttgacagatcgatg

SEQ ID NO: 55387 - DNA, 1164 bp, Bovine  19866881320872
  misc_feature (1)..(1): n is a, c, g, or t
ntggggtctgacctccacccacccagcacatgaccgatgggccagtcctgggcctgagaccgaagactggctgctccgggttgccggctccacagctttggaattaataaagctccaggcagcgtgaggggtgccagctcaaacatagaccatgctggcagccagccgcctgcccatcaaacccctagcacttctctagaatcctccgattaaataaatatttggcaaagcaccactggcaaagtgataataaattcaactcaattcccaccaccaactggcaaactccttcaacaacccaatccaatctgtctgcctcaacttccaaatagctagtaatggggccagctggggcctgtgggatcctcagagctctgggtcaatatcttatgcctcgttatctgccagaatgtctgagataaaatgcaggacagcccggacttctacacgcgggtcagaatgctgaggagctcaaggagtgggggatgggaaaggctctgatttgaggtgcccttcgccccccggaccctgcaccctgctagactcacactgtaacagcgtcaccagatgtcaccacccacacccctctcctgcactcattcaacagatgtcacttagcccatactaggggcttggcggtgcagtggtaaagactcagcctgtcaatgcaggagacacaagagacaagggttcaatcctcagctggggaaatcccctggaggaggaaatggcaactcgctccagtatgcttgcctggaaagttccatgggcagaggagcctggcgagctacagtccacggggtcagaaagagtcggatacgactgagcactggcttcaaaggtgccagaccctgtgctagaagctggagaacaataaagatacgttccctatgaaacagaacatccaaggaattccctggtggtctagtggctaagactctgcactcccagggaatcaggttcaattccaggttggagaactagatcctacatgctgcagctaagactttgcatgccacaactaagacccgccacagccaaataagtaactatttaataaagtctaggggagggcagtcatacaacgccgtcaatccgcttccaggtctgctcttaccccaggaccctgtccataccgggccttcccagatgctacctttctct

SEQ ID NO: 55388 - DNA, 1170 bp, Bovine  19866881347912
  misc_feature (1)..(1): n is a, c, g, or t
nctatgaggttgcacagagtcggacacgactgaagcgatttagcagcaacagcagcagtgctctttattcctttgtataaatatgagttttcatctactgacattttccttcagccggaagaactttctttaatatattttgtatttttgtctaaaaaggttttcatttcatctttattttgaagaatatgcttatttgaatatagaattctttggttgagggtttatttttttagcaatttaaaaatgttttgtcttctagattgacatgtttatgatgagaaatcagtaaaagctcttaattttatgatgtgtcttttttctctgcctaattaaaagatttcctctttgttgctggtttttagcaatttgattataatacttctctgtgtgcttttatttgtatttctcctatttcaagttcaagttcattaaacttattggacctgtggtttttatagttttcatcaaatttgggaaaatcttggcctctgttccttcaaatatttccttctgagcctggccctcccccatccgtggtctgggtctccacttggtattgttcactgagtttctgttacttttctcttaccgtttcttttctggtgctttagtttgaatagtttctactggtatattttcaggtttactaatcttttttctactgtgtctaatcaactattaagcccattgtgatagctagactctaaaatggtcccaacaacctcaacttctgttatccatccccttgtataatccccacctcctctttgcagacatgttaatttgcttctaatcaaacaaatacatcaaaagggatgggaggtcactcctatggttagattaccataggcgctgactcctgtctttctagtaaactctctctattgtcttttcagctcacatccttttgcagaaacaggcttctgtttttgagaggcccaaatggcaaagaactgaaggtagcctctggctgaaagccagaaattgaagccctcagtccaacatccactgaggaattgaattcttacatcaactaagatgggtacatgtagatcctccttaaaaagggaaccctcccttttcaaccctacactgttgacaggaatataagttggtgccgcctatgtggaaaacagtatggagattcctcagaaaactaaaaataga

SEQ ID NO: 55389 - DNA, 2097 bp, Bovine  19866881364095
  misc_feature (1)..(1): n is a, c, g, or t
nctgcttggttcccctgcctggaattctcagctccaagctcaaacttctgccaccttctagtatttctcaagatatgggacctgtccaccaggcccttctcatgttgcctgtgaagggatctgtcacattggggctgctggtctctgggctctgccctcatcatgccctgtcagaatttccatgaggccttggagagtctgctcagccatgtaggcagatgaacaagaaccatggtatcctatgcagaattattttgatactgtttcagtttgcagagtaagcacccagaaatcaggctgtgtacgctgtgcggggacaagcccaggaggcgccacccccacaagctgtgatggggacgtgtccctgcgaatggctcagtgcagtggctccaaaaggagtatccttctcccacaaagaaatatgctgtgcacatttctcctgaaacacatggcccgcttgctctatctttcattccccactttcgaaagagacctgggtagaggaaatatttctctaagaaaaaccacagtgcaggcaccatgagaaatggcaactgctcccctgggcccgagctagggaggtagcacagagaggtgtggacctggaagctgaccgcctcatcttgggagccatggttttcagcaaccctggctggttgctgccaggtggggattcagggcagtgaggccaggtcttcaggtttttcaagaaagtcagaaatcttgagttataaatctttatgtatacgttggctcaagtctttataaaacattatgtcagccaaacatgttggaaggcctggggtctctgtgtttgcaaccctggtctgggcaggtacagactcctgaaaattagaggtcataatttccatgatgagctctgatccctggtagggaggtggggggtttaagacaagcttagaattcagacgcctctacctgggacttgctggaaagtggtggtaggtcagagcttggatgtgtttttgctgttattgttcagtcgcccagatgtctccgcctctttgtgaccccatggactgcagcacaccaggcctctctatccctcatcatctcccgaagtttgcccaagttcatgcccattgtcatctcatcctctgatgccctcttcttctgccctcagtctttcccatcattagggacttttccagtgagtcagctgttcgcatcagatgaccaaaatactggatatgttttgggaggctcaaaaaactagaggccagggaacccatctccccaagtagagtagaaagttggggttcattggcagtaacaactccatgctctttggcctgagcccagcctggtgcagggttgtcactggggaaccagcaggtcttactattacctctttcagaaatcctacttctacgtcattattagggacagactcagcttgttgggtatgaggtttatacaacttgacgggtctctgttaagaaaaagaacacataactggagaggacctgcaaccatgatgtgctggcttttacagacacaagggagccattgacatggattcagtcccagctctgtttttagcgacttcatgttggtagcttgaaatgggccatgatgggactatttacaggctttccaggtggctcagtgatcaagaatccacctaccaatgcaggagacataaaagactcaggttctacccctgggtcagaaagttcccctagaggaggaaatggcaacccacttcagtattcttacctggaaagttccatggatagaggagcctgggcaggctacaatccacggggcagcaaagagtcagacaggactgagcgatgggcgcgcacgtgcacaggagtatttacacgatggaaattggcaaatgacaggaatcaagcaccccacccccttgccagagagtcaaaccagcacaccactgcatgtccaaatgaggacccctgaagcttatacctcattagcttcatggtcaacctgcctctgatcaaaatacattgattaggcaggaatgcgctgaaagacagaggggaagaaagagacagagcagtgatgtccaaaaaggaaggatttccttccacaatagaagaaagtagaaaa

SEQ ID NO: 55390 - DNA, 878 bp, Bovine  19866881571911
  misc_feature (1)..(1): n is a, c, g, or t
ngactgttccctcatcctcccagagcccagatgtctggcgattcagcaaatagttgctgctgctgctgctcaggccaggatggcccataactcttactgtttcaccaactcaaggacacattggaaaccacaggccgaatttgtaaaaagcaaacaaacagcaaagcaatagagcagacaaataaaaaatatttaaatattgaggcctaaaattgacatctctatttcctcttccccctgccccagggaccctgccagcgtacagacagcgccagcccccacctcctcgtgggtcacctccgctccgcctctgtcacctgcagcggctcagccagggaggttttcaacttcactaaaatgcatattttgatttactgaagaaacctgcagtggccccaggcaaataataactgtgtgagaatatttcacagaacaccttcctccccaactccctttagggagaagactgccgtgcttaaaaaccagggggagggaaaatgaaataaaaaatacatcgaagtaatggccactaagtggggaggggaagcagatttctgagccaacttccaaactcctgtggctctggtgtgcctttgagacaatctcactctgccttctgttgcttaaatagtaattattaaaggcatcagtaaaaaatgcccgctccagcatccctgaccgtccttccttgccgtgtcagtggagtagaagctagctacaatagagtcccttctctggctccaagttccacttcatttaaggccagaagagggaccacagcccacccaaagccctgccaggagcgaggaaggagcagacatgactgttcttggcgtggaagacaattcctctgtaaggagaccagacttcccatctcc

SEQ ID NO: 55391 - DNA, 643 bp, Bovine  19866881622964
  misc_feature (1)..(1): n is a, c, g, or t
ntataattttccgcgagacttctgctctgaagaagttgatcctatggtaagccttcctttcagaggggagcatttgatgctgcatctcatgaacctactcctaaaattatccctaattggcttggaaagtggcttccaacaggcagctggctcagtatcttgactttctggttgtgactcagggaggtgcctgggttcgatctggtttgtgatagtggtcttgttaactctgagggcgagatgatatcgcgaaggtgcagactgaagtgctgtctcaggggaggtggcgtggaaactaccaggggcagcctgtctcatcagggatgctgactggcaggtggggccaggagagggggcgttgacatgcaattccagtgtgcctagcatcattctgccagtctctcttgagtgcctgctgcatgcatgggttgtactgggcaccgtgcagttacaaaggcggtggaaaacatggcccctaatccaatcggagagacaagtcacacgtgtcttagataactagtgtgattcccagagagtgcatgggagcacctggtgtgtgtgtgtgtgtgtgtgtgtttgtggtgtatgtgtgtgtactcatgtacttgctccccccacacagagctataggaagaatgcaaaa

SEQ ID NO: 55392 - DNA, 687 bp, Bovine  19866881775498
  misc_feature (1)..(1): n is a, c, g, or t
ntttcaaagatgctaccacccctctatttctgtgaacccaaacaaaaatagcatggaataaaatttaattatgctagactgaaatatttcatgtggaattaaggggcaagacttgcctttaaaaagcattaggtttggaaagaataaaggctttgtaagttctttggaagatactataattaaaggtttgctcagatgtatttttccctttttgaagagtttaaagaaacccagccctcccttccaaaattgattacctctcagaccacagccgtgctcggcaggaagtactatgagactgttgctgtgctgatttgatggcttctttctgttaaatgtaaaataagtttttaatcttctgatttagatgtttaattgaaagcaaacgtgtgactctctttggtttccactgaacctgtatttaagtccacacaaacagtttgaataaagtgaaaacatcgctggactagctattttaaacattttaggatgtaagaatgcaaaatggggttcccctttaaaaatagacatggctgcttgcatttacataattaccgctaaccagcacagcattttaagtggtgacaaacttaagggagaagaagtatctgttttttataaagcctggttaggggacttccctggcagtccagggttaagactgtgcttccaatacagagtccaggt

SEQ ID NO: 55393 - DNA, 735 bp, Bovine  19866881777234
  misc_feature (1)..(1): n is a, c, g, or t
ncctccctttacccactccggggtgcagtggttcccgcgctgcggcccctggtggggaggggatccgggcttcctcaggagaggcagtgagcaggatgggctggcgctggtggcttcctgaccccagataaataccactttgaagcccccacagtatttttcgggcacaaacagtacagtgaagctgggacatttatatgcgattgggagacagttatcctgtgacaacattctattccaatgacttttctattaccgcccatgattaatgatggaaattctgtcacttgggatgatggatgcggggctgagagcctggcatagattacccaagccccagcttcccattggctcccaggacaatgaggcctgtgcttcggtcaagcataaacgtaaagttcctttagattaaaaaaaaattcgtcttctcctctggaagcagctggctcaggactaggggaaaggttccgcccccttaaacctgctttctctcgcagggggtggggtggggggcctggggcggtagagctgctaacatgccctccggttaagaataagtgcatagtgcacaattcttcacaaacaggagctgggaagaaggcctttgctacagcaggaaagttaagagatggccaagcagggctcgggcattcagggccccagtgctgggtctgacatagtccctccttcccaagcctaggtcccaggcagactttccctccttccctgccacgc

SEQ ID NO: 55394 - DNA, 1417 bp, Bovine  19866881895190
  misc_feature (1)..(1): n is a, c, g, or t
ntatattactgcatatatgtgggatctagaaaaatggtatagatgatcttatttgcagagcagaaatagagacacagactccgagaacaaaggcatggacaccaagagaggaaagtgggggcagtggggtgaatgggagattgggattgatgtatatacaccactatgtgtaaaataggtaactaatgagggccttctgtataactcagagaactccactcagtgctctgtggtgacctgaatgggaaggaaatccaaaatagaggggatggatgtatacgtatagctgactcactttgttgtacatcagaaactaacacaacgttgtagagcaattatcctccaataaaaattaattgaaaaaaataatttggccaacttcaccccagtgatcacttttatacttttaatatggacagcaagtttttcagtacgtaatcgacagcttatgtattttgttttagcttggacccttcctgagtgttatgaaacattaggctcaatttaacagaatctccccatttctgcccccgggggtccctggtgtgtgcggtgctgagcctccgcaggccccagtgaatcagcaacctctgccgaggggcgtcctgtgctgcagaaacaccgcaactctgcatcttttctgcaggagccgctgagatgttagaacgagaagatgctgtagtttgaaaaagtgataaatgggccaggttcttgaaaagctagcagaacgtcttatttaaacatttattaggtctgaacagaaaacaaaaatgagtctcaaagaaatcttttgtagataagttgaggtagatgctttacattcgaatacctgtttctgtggcatgaaagtttaattttgtgtcacatttgtttgtttggtttgagttttggctccctctccattttctgcagctcacttaactcttgtggagccacgagttcagaggaacccatcggtggctgtagtgacagcttttctcaggctgttaagttctcaccaaccacttggctgagtttggtgcgtggttgtttttaaaatcaatgacatagggaatttcctgctggtccagtggctaagactctgcattcccagtgcaggggcccagattcagttcctggtcagggaactagatcccacatgccatgctgagagttcgcatactgcatgacacagctaagacctggtgcagccaaaaaaataaaatcagtatcatagatgaacccataaagccaaagtcaagtataagaattaagatatattttattttttaatttaaaaaatttaagatatattttaatattttaaagttctaacagtctcattaaagaatgatctttttttttttttttttaatgctgacaaagcatctgagtatttgcttggttctagcccggcagctctgaactggaacagcat

SEQ ID NO: 55395 - DNA, 1857 bp, Bovine  19866881186566
  misc_feature (1)..(1): n is a, c, g, or t
ntaaaaattacattacaaatcaactaaattttttaaaaactacaatgagacaccacttcacacatgtcagatggctattatcaaaatgatgacacatagaaagtgttggcaaggatgcagagaaaagagttttcttatgaacttgcactatggaaaacaatatggagattcctcaaaaaagtaaaagtagaactaccataagatccagcaatttcactttggggtatttttccaaataaaaatactaactcaaaaggacattaagcacccccatgttcatcacagtagtatttacaatagccaagatatggaagcaaatagccaagatatggaagcaacctaaggtacccactgatagatgaatggatacaggtgtggtgtatataaacaattaaatactgttcagccataaaaaaaagaaatcttgtcagttttgatgacacagatggacctggagggcattatgctaagtgaaagaacagaaagacaaacactgtatggtttcacttatacgtggaatctaaaaaacaaaacaaatggataaataaaacaaaacagaaacacatatacagagaacaaacaggtggttgcagggatggggagacagggggaaggagaacgagtgaaatagggagattaagaagtgtaaacttccagtgactaaacaaatgaaccatgagaatgagatgcactgtgtggggcacatagtactaataacataatatctctgcagggtgacagatggtaacgagacttatcctggtgatcactttgtatagaaatattgaatcactgtgttgtgcaccaggaactactatagtgttataggttaattacacctcaaaaaacaagtaacaaactcatagaaaaagagatcagatttgttattaccacagacaaggggtgggaagggggggaattggatgaaggtgattaaaacatacaaacttccagtcagaagataagtactaggcatgtaaagcgcaaccatgatcaatgtaacagtagtgtatgttacatacaaaagtcattaagagggtaaatcctatgagttctcatcacaacaaaaataatttatctatatgaaattatgggtgttcattaaacttattttggtaatcatttcacgatgtaggtccagtcatgctatacaccttaaacttacacagcactatatgtccattacttctcaataaaattggaagaaaaaataaaattatttagaaataaatagggggcagaataatattatgtttcattttttcccctacatgtggtctcaattgtttcatatggcaaactccattaaggatttagaacgaataaataaagggcaaacaacgtcagccccgtagaccatggacatgaactcagacacctctgcaaacacatgacagtaaggagagcttctgaattcatattccctaggttagcaagagaaatgacttgtttgtttgtgctcaaagatgtggtgtggcaggatgcattaaacacccacgaaagaagaagctggtcactcaactagagaccagaaaagaggaagagcaatgcttatggcttagcagttacaagaaaggaggatgcagaggaatttcatcaacacctatttctccactatcaatttctagaatctaaaaagcctgaaccatcagcatttctccctgttgtgcacctagatttataagttcccattcactacagccaggaaaagccatagcctcagcagtgctgagggaataacacccaccgcaaggtgtccctgacatgtagggccattaacactttctaagacccactgcttttccaggaacaagtcactaatattgagaatccaacatgaagatgaggttactactg

SEQ ID NO: 55396 - DNA, 1093 bp, Bovine  19866881321145
  misc_feature (1)..(1): n is a, c, g, or t
naaacttatttgtaagtaatttcccctagagatgaaaggtatgttgtttcactccatgtatatcttaagttcaggaattagaataaatgaagtcatattatgacattaacacatgataaatattgatctacgctgacaaataacattgaataatgacatttatagcactctgaaaccttcccacatttgttcttcttttttatattctcataactactctgcaaggtaatcaaccaagggatatttaatgagtttctagtgttgttcaggaacagtgctgggtatacagggaaatgattattggtcccacattacacattaggatatggattgtgagtaattaagtttccagggtcagttgatggacgagtcaggacctgcaatgacagcctggctcagcacatcctaggctttgctgcctaaaaacttgccagttcacctattgctgctgtgattactctggggagtctcctaaatatcagtgaaagttccatatattcatctttcttacccttttgttctctttctattgtattcaagcttccaattatatttgaaaaaaaatattcttttttcttttccagccagctgccagatcgtctcattttccttctattcttttagaacagatgatctgtaacaataaactctagcatcagctttctctcttagtcttcatagtctctttcctctcctcgtcactccacccagataactctaattcaggtcacacaaatcccgttcccagttaatcagaacagacacttttgaaatcttactttcttcttactcttctttctgaaagaacctttctctccctgtcttccaagtcctctgtctgcatgtgctgtcagtctttcttcagcctctccttttccttcctattctttcaattgtttctctagtcgttcctcacatggggacctaaatgggtcccctgcttctactttcctcattcagtcccacttcacacacagcttccaataaataattctcttcaactagtcattgtccaacccagaaggctacgtgagctctctagagcctgtgctattagatgaagtcttaccccttaagattttcagaaccctca

SEQ ID NO: 55397 - DNA, 1280 bp, Bovine  19866880383399
  misc_feature (1)..(1): n is a, c, g, or t
ncctgaaaataatgataaaaaatattctcagtttgcaaggaaaatagactcttagtaaatgacacatggaacgttcatatccacataaataaattgtatttcatatataaaaatatagcgctttctcattcttcaagagaaggccaaagcccaaataaccaaaccaataacattagaagcagtgtttgacttggaaagaccacaagtatatctggcttttgaccatattaaaacagtcgtatttctagggtgatgttattcatctactcatttaccacctgaccaaataccatccatgactaaatcaataattaaaggtttcagaatagacatggaactactcaaaactattcttctaggaaggatacatataaccccacatccaaagaggtgtttcattggcttctgtagtagcagtgtagcactgttagtcactcagttctgtccaactgtttgggaccccacaactgtagcccaccaggctcctctgtccataggattctccaggaaagaatgctggagtggattgccattccctctccagaggatcttcctgacccagggatcgaacctaggtctcctgcattgcaggcagattctttaccatctgagctacagggaagatacatttactgttcatacacaaggacatttgttgttttcttattctattcccaactttgggaaactacatgctatgagcgataccaataatgctgctgctgctgctaaatcgcatcagtcgtgtctgactctgtgcgaccccatagacggcagcccaccaggcttccccatccccgggattctccaggcaagaacactggagtgggttgccatttccttctccattgcatgaaagtgaaaagtgaaagtgaagttgctcagtcgtgtccgactctagcgaccccatggactgcagcctaccaggctcctccgtccatgggattctccaggcaagagtactggagtggggtgccactgccttcgccatatcaataatggatgaccaataatggatgaccttcaaataaggtcatttggaaatttcctttccaaagtaaagaaagatttgtagaagtatcagagaagtgtcttcttattatttaatggagtgctaatttttttaagttctcttttatcaacactttgactttcctcaaactctaaggaactgatactgctttaaaaggttctaaccttctaatacagaaatgtaaattttcattatgtagtagctgcaaatgttttcttggctctcaatctcagaaaactagttttta

SEQ ID NO: 55398 - DNA, 1940 bp, Bovine  19866880450517
  misc_feature (1)..(1): n is a, c, g, or t
naaggctttggcatagtcaataaagcagaaagatgtttttctggaactctcttgctttttccatgatccagcggatgttggcaatttgatctccagttcctctgccttttctaaaaccagcttgaacatctggaagttcacggttcatgtactgctgaggcctagcttggagaattttgagcattattttacaagtgtgtgagatgagtacaattgtgtggtagtttgagcattctttggcattgcctttctttgggattggaatgaaaactgactttttccagtcctgtggccactgctgagttttccaaatttgctggcatattgaatgcagcactttcacagcgtcatctgtcaggatttgaaatagctcaactggaattccatcacctccactagctttgttcatagtgatgcttcataaggcccacttgacttcacattctaggatgtctggctctaggtgagtaatcacaccatcgtggttatctgggtcataagatcttttctatatagttcgtctgtgtattcttgccacctcttaatatcttctgcttctattaggtccatactatttctgtcctttattgagcccatctttgcatgaaaagttcccttggtatctctaattttcttgaagagatctctagtctttcccattctcttgttttcctctatttctttgcattgatcgctgaggaaggctttcttatctctccttgctgttctttggaactcggcattcaaatgggcatatctttctttttctctttcgcctttcccttctcttcttttcatagctgtttgtaaattatgtaatgttatcaatattgggtattttcaattcttttcatctttggaaatctaatatgtgtgtaaaaaatgtcactggagtttgcatttatttgattacaaatgagggagaatatccattcatacatttattgatcatacacatttcttctttggtaagttgcctgtttagggtctttactccccttgctattggtgtatattatttttttattaatttgtaaatacttctcagggtcttctctggtgactcagtggtaaagaatttactctccaatgaaggagacataggtgtgatccctggctcaagaagatcccctggagaagaaaacagaaactcactccattattcttgtccgggaaatcccatggacagtggagcctgatgggctacagtccatggggttgcagatggtcagacataacttagcaactaaataacaacaaatgcttctcatgtcttccatatattaataattgccatatattatgccaacatgaaacttgtgtgcagtttgccatagtttgtatatattttattttgattatacaaatttataatgcttatccatttatttactctttcctttatgtttgcctttctgtatgtaaaattataagacaatttatttttattagtattatgatttcttatatacattgaaatctttaacctatctggactatatttagattttcttgctcccatttaaggcaaacattattctgcaatagtttgaccttaatatctgagtattcaacaaagtccaaatggcattacattaatactgtaataagctgttttgcatttattcttatttgtttaatgctattaaaatatagttttctacctcattctttctcacactcctttccttttcttcttcttgtcagttttaagtaagttctattaattatacatacagttatttttttaaagtattttttaaaaatacagttattaaattattctgtttccctgtattccacatatgaaatgtaggggttaatggttttttcaaaagtgatttaatacatggcatgagccacctcttggtttcccatactgtgacacattgcagatttttgacaagggtttggaaaggctagatttacaaatcaaacaa

SEQ ID NO: 55399 - DNA, 1955 bp, Bovine  19866880499224
  misc_feature (1)..(1): n is a, c, g, or t
ntctgtacctgaggaaatgaggagttttggcctctgccatggatcagtcatgagaatgtggcaaaacagcgtgatctggagactggcagatattctgctttcccaagcatttattccagggacgagaccccgtcattcccctgcacttgtgcacacttgcgatgggattctttcgccagttataagataaatgtttgattcggcaagagtagaagtctttaggtttgcacaatgatacatagctttaggttagtggaaaataattttggaaagcagatcttagtttccatgtcataaaaatatttctctctagtattttgtcctgacagctcaaacaaatataatatgagaatactacctgtggcttttttttttctcttttggtttctaatgctgaatttataatcttctctaactttgtgtgaccacacatatttaaaattcctgtatcaatttgattcacagccacatttccttgtgtgtagaaaaggaagttacagacctcaaatggcttttacattgtctggggtgataggtgtcctgtatgtatgggatatcagatgttatttcaaggctgctcttgacattgctgttgttaatgtctctttcatttgagaatgtttccattctgtatcaaaaatctatctcaggagtgaggggaagtggtggaaatgggtaccatgcggatgccagcaagtttcccagtgggttatgatcaccaaattcttccaagagggatgcctgggggtgggggagattcagagcggggagggaggtagaaaaacaaattttggcagactcaagtttagaagaaaaacaatcctttcaccgaatttagcctctgctctctgtcatagaaaattataataagtacaagagaattgcattcaatttgggtcaagtattattgttggaatatgcatcagtcagaattggcctcattaggagggcactttctgaacagctatgcagtggttctcaaagcatgcagactcctgagagggtgcgatgcggagtttaaaacaagctgatttcacgtctcgtatcatttacatttcaatctaggactcaaaccagggcttatacagaactttcaatggcaagacatggagcgaaatatctttatgtataaacatgcagtaacattatcagaattgccatcgcctgttgattataaacatagacccacctattgacactattggcttgggctctgggcctcttttttcccccttctaataagctgacattttccactgaacctacagatgcgttgaatttacataccagtctacactgaggcacatgtttttattttgcttccctatttataatctttattttgaaaacaacaattgtggtttggatttaccgtggggctggattttacacatgtatagtctcataatattttctttttcctggaggctcttaaatcatttttagctatgttatcagattcaccatcatcccatcaggacatagtagatacagtgtatatttccaaacacatgtaatagatgaagaaaatgaggtagaagattaagtagctagtccaaaccgaagtaaaattttagggggtatttgattaagttaaaactgggctaagagaggcagaggggaaaatcttgcctactttctatctagtgcagaaagtctgaacaaatcaaaacttgaacatattctgtatcttgatactaatgttaaatcagaaattctataacccggagcagagaagccaaaagctcagaaaatctcaaatctatttacctgggagaggtgctctggagaggatgcgggaactcccacaaataagcaaaggccttgccagtaggtttgggcttccccctaaaacatcgttgctgctcttttctttttccaggtaaacaaacaaatgctcatgcttggctgttgccattggttggtttatgtcttcaaatcagggctctactaat

SEQ ID NO: 55400 - DNA, 1681 bp, Bovine  19866880547852
  misc_feature (1)..(1): n is a, c, g, or t
natattttccaaatgttttctttcttcttctatagcttttaaaactgcatccttcaccacttctttctcaagcttcaaaacaaataatgaccacaacaaaaatatctgagtgaatgaccacagtaattccttgaataagacacactggagttaacctaaaaaacacaacactttgatcttactgggtttatttctgacattgttttttttttttttttttactcttatgtaataactgctataaaataaaaacaattatttggttttacacaaataaccaacttattttcatggtatttctaaacttcagagaaagccttaaagtagcagttttcaaattattttgccttaggacctctttacactcttaaaaattatagaggatttctaagagcttttgtttacatgggttatacatattaagattttccaccttagatactcaaaccaggagaagataaacatattaactaattaaaaattaataacattaaatatatattaataatgaattttatgaaaataactaattttccaaagttaaaaagttataagaatatctgcaaacctagttactatctgacttaatagaagaaagcttagattctcacatctgagttctgtattaaatctgccatgatttttttttggctgaagtgtataagaacaacccagcctcacaaagatatgaagtagaaaataaaatgtattttatacatactaaatgtatccagttgagatcactgtggatattctttctgatttcacagcaaaacttaacaaggagtagttcttaaaggtaagttgcaataaggaaaataaaatcatgtcaatgaacttcttgtactgttacattacaatcttttcttaccttctgaatgaattctttacagatgattttttgaacattttttatttggaaaacattgattcaatgagttatgcatctctttcagatgttgacacatttctcaatattataaccaaaacagtcatatttgttcataccaccatcaatctcattagaacagtctttaagtattaaaaagtagaaataaatcttccaaatttctaatttttgttttaaatctctaattttatcattggcaacaaaaactgtcaggttttttttttccccttaaggtgttgggctcattctgagtattttggagaaagtgtctgcctcatactaaagtctgtataaccctagtaattcagtaaaatggcattccatgaaaaaagagtccattttggatggaactcaaacagctgcctaagaattttcctcaagaaaatcatcatactttggtacacagtaaagtccatgggcctcccactcctgagagagttaccactttttatcttgttttcagctcacaagcaagtttgacaaaagccattaaagctgacagtcatctttttttttaactcttgctttatttcacagttcttttgaatcactcccttactgtgtacaccaatgccttccatgttgtttatactaaatggtactttttgttctttgtttaatccttattttcatgacctcaagcaatgttctacatagctgattatttctgattttgtaaagccctctcttttcctggtttgcatgacagcatgctgcatatatccttctatgcatcccgctgagtggtttcaattctttgggaacgtcttc

SEQ ID NO: 55401 - DNA, 1169 bp, Bovine  19866880718867
  misc_feature (1)..(1): n is a, c, g, or t
nggaatattgataacaggggggccatgtgtgtgtggatgcaggcagtatatgggaaactgtccctttctctcaattttgctgtgtacttagaactgtctttaaaaaaaagaaatcttttattaaaagaaaaaaacagtgagagctaactcagctgcaaactttctaatgctgctcccttagtggtaagtaactggaaactctatcattacactaaaaacttaaaacccagcggagcagcagctgccaccccagcatgttctgactcactcacacagacagcacaaccaagagccatattcaataatcatattcacagtggtcttgggagatattttagccctaaataagcacaatatgtaaggagggaaagaactctgaatgttgatgaacaaacctgggcctctctcccatggaatcacaatgagcgtgctcagcaaagatggaacagatgctaagaacttagagctggaccacagttggcttggccagcatcaaagcagaaggggtggtcggaccctgacctggcgtgagacgggagattcagctgtgggacagaagggcatattctgcactggagcaaagtctcacagtcacaaaaccctggtgtcctattgtgagaggtggaggcttagataagcaggagaggggaaaggcgccagcaggagatggtaaagtaagggaacaaggtctcagacaggaaagcaggcagtggtttggagaaggcctgggaagggcttttagtgtctgaaccagggttgatcatggagagttctcttctaatgccattagctcccattaataagttacatcaacttacctgcattttccatcctaagggcgcagcaaaaccactgcctcttggcaccacacttcgtggtgctgatccgtttctgtatggtttttctaggaagggtagagtgtcatgatgggttgaggctgcactgggacaaccatcaggcgctcgacttgctggtggccagagagatgcctgcggtcacacatcagagacaagttaatactggcaccagtcttacatttatttgagagacagggtaaccatttacaggctcccaagcactttcatatcccctctccctgaatcctcggatcacatctggtgttgctcaggcacatctggaaggccaggcgcgggtagaccacatctgta

SEQ ID NO: 55402 - DNA, 1632 bp, Bovine  19866880735005
  misc_feature (1)..(1): n is a, c, g, or t
ntggaaactagcaagactatgtcttctatcatgcttactgatttgcatgtcaattatgtttttagtttactaaaattttattttgttttcgaatatgctatgtctttttagttattgcttttaaagcattttaattagttttgttatatggattagaagagaaaaaaaaacttgttagtagacttggagtcaacttataatgaaaataaaatgagattttaagacattatgtacattgagcatgctgattttaagtgtttcctcatgttaggactaccaagcatgtttaaagaagcccctttgatagtaaagcttttgatacagggtatgtttatttgacctaaaacacaaagccattaaacatcaggatatttttaaatgaccaaataatatgcaagatcattgctatcacctcaggagttgtatcagtggccttgattccactccatcccaatccttacctactagagaaggtgtggtatggatcaggtagggttacccacaacctgcagataaacaacccaaagcaagtatctttatcaatccttttaagtggatgaaactttaaaatacaaatgtagtcaaaacctgatgaaccaagaatgtttaacattcaattataagaaatataaacagtataaacattaatgtagttagttgatattttagggaaattttaggacgtgatgataggtttctgggaaagaagagaaggtgactttcatttattcaataagtattagtcaagcaaaaactataagaaaagagccttagacaaaaagctacagcctttgaagaggaaaaacttactgaagttttggctcacgaggctgagaaattcaagcaaaaagctatgagaaagacacttttatcttgtttattcttctggagcaaaataatctttaaaattacttaaaatggaaatttttctctttatgccttacttccaagaatttcaaagctaaattttatgtttaattgtattattatctaagatttgaaaattatcttgatcttccatctgttgaattttgaatccttttttcaaatgttatttcagctacatagttctcttaaattatttttggaattaagatattagtgagtgaactgaaaaaaatgaaaaaacagtattggagctgtgaggggaaaagctatagagctgattgaaaactgagatcaacactctctcctccctcataaacaggaaattgttaaatgtatttgtatattaggtaatgtgtgagcttccaaggtggcacggtggtaaagaatatgcctgccagtgcaggagatgcaagagatgtgagttcaatccctgggtggggaagattccctggagtagggagtgataacccactccagtattcttgtctggaaaatcccatggatagaggaacctggcaggttaaagtccacggggttgcaataagtcggaaacaactgagcaattgaacacatgtaatgtatatgaataactgctatattcttaacatttcacttccttctcgggagctcctcaaatggaatttatgtctggttaggagtaatacagtttaagaaggatggggatatactgggagagggtacaatggaaactatttaaaatgatgggcattctaggtttgtaaa

SEQ ID NO: 55403 - DNA, 3470 bp, Bovine  19866880874635
  misc_feature (1)..(1): n is a, c, g, or t
nacttttaagaacaactaattgccttcttctgacatagaaattgtgttacttcaagtccgttgggttaattatcttctgagaatagtctgataatggtgacagcctatcaccaaaaagctctaacattggccaaattgtcttgcacactatcctccttctaatcccctgtccctgccgcccgcccccgcctcagagcatctctaaagggtaaaggaattaagggcaggtgaaggaggaaagaaatggtatgccttcctttcactgagggaaataactactgattgtaataaataaataacctaattgctgggtttgtctttctgaggttttaaataaacaccaacaaaaaaggaatacacattctataacaaactgtatttacctggtaataccaagttgcattaatttgacatttttttcttcattgttttttaaaagagagcacttaaaaatttaagtgttaaaatccacgtagttgtgtaaatgccaatgaagaggtgaaaccatgaacttgggtttgtaagcagacagaaggctgaagtgatagatttctgagaatcagcggctagacagccagctatactttagcagctctgctctgatcccttctcactaaagcaaaggctgctattatgataaatggaaattcttctggtaagtttttcaacataattattgaaacttgtacgtggtactctttttcctaattctctggtttataagtttttttttttttttaagttttatcttttaaagagaattgctagcttagtgtactatctaccaatcaaaagtattggcattttgatggcacattcaaatgtgttttatattctctcttccctttggcccttcttgggtaggtttaacttggtttcatataaagaatgaagcaaaattaggattttttttccattcccttaacagctataatcagaaccactttccatcaattttgatccatttcccccctttttttttctgaagtatgaaaatctccaaattaaataattgtaatctgaggtatttctcccgtgtattgtagattatttcttcttatgaaattttgagagctaaacaaaggcattgatggtaaaaaaaaaataataaagatacaaaataaatacacaaaatctttacttatatttaagattaaattagtaagaaagcaacatcaaaaaagaaaagcaatttctacatgaagtcaaagtattttttaaaatatttaaaagcaaagaattcaggtaagaatggaaacaaaaaatgaaataaataggtaagaattgactatatttggggaagagtaactttgagaagaaatgtacccaagaggcagatatcatcacagtagttttttgtgatactctatttctgtgatttctttaagaatttggttttaattatcaaaggaatgtttaaaatgaatcattttatacatgtgatactttaaaaaatctattgtgaatactatatatcaatcattttatacctttgaagtttatactttgacatcctcaaagcaatgaagaaaaactaaattcaagccccagggtataaacagtaatgaggaaaggtcaagctggatctttttccacgttaatgatggtgagagtgggtttaattctttattgaacagagtggacctttattttgatacagtttctctccttagaaaattggatgaaaacggctgacttagagcagacaagggaatttcttgctgtaaggaacaaatgtaatgctcaatcaaatttctcatagcctgaaaagcgccacagaaatccatacagatacagtagaatgccaactggctcggcacaaagctcccagttttgttgaaaacatccaaatgcagtgaaaatatgatatttctttaaatatcttcctctctctttttttgtggtttatcgcaaatattttgaatatgggtttcctcccacgctctctcctatttactaataacatcacaaatattatagttctaaatttcttggattgttataactgacataatgtttattcttcttccaagaattgttttatgtctaacctttcttcatattctgtgatgtataccggtaaccaaaggttttctagtagtttttgtgtttcaggttggaaaagaaaaaaataatatcacacattatgtactgtccaaagtaaacaaaactgaaatacttccaacatttgttttgctgttgctttcaacgtgctgggactttaaaggagattcttttaaaaaggactttaacaatagaatattaaaagaataaagattgatattcttcatcaatataaaaatccagctaaactttttaaaacattttttagtcacttatgctcagtaattttttccgttcttattttaaaacttgtaaattcttatttcaaataattacgataatgtttctccttgattgattgaaattatcctctagattcaagaaggatgatgatagaatttattgatctaatgctatgtttagctttcaatgaaaaataatagtcttaactattacatggcccagagacttaacactggcatttccccttttccctcatttccaaaatatgttgctgttttaattgtgaagcatttataaaattatttcttccccacatgtaaggaaaaattgcagcttccaattttaagatttagagatttttcacttttagcagaaatcgttttgcaacaaaaagctgaaataggcaagatctcattgtatagacagagttaaagatatataagtttgtcaaaagatccctcaagtgttttattttaatttttaaactaatcattaaataacgtagggctatttggtaattatgggttcttcagatattgattgctgattattctggttttttaaggttttcatagctataatattatgatatggggttcagttgagcagaatttcaagtttttatcttttaaacaaaaatcaaatttatattgaatcttaatgctatgagtaatgtgtttgttgattataattttttattgttatatgtagaaaatttttttcatactaacttacagacacctggttaagttttatggagaaattacctttgtattcagtataacacctaattcagccatatacataataaatgtcaggttagccaaaagctcattctggtttttccataacataattgctcagtaaataactgttctttgacatgttgtaaaattgatataatttcacataaaatgatctcatgcaaattttcctgttcatgtccctgaaaaaaaaaagactttattgaataactgtgtctctgcctggccttatttcaactgtaatcacttctcttggcagacatcaatgtagatatttctccaacttcaacgtttgtttgctaattaatttactcatatttaatggttcatttatttgggctgccatgtattcattctctattcctcttaagagaccattatgtatgtaaggatgattat

SEQ ID NO: 55404 - DNA, 1773 bp, Bovine  19866880892018
  misc_feature (1)..(1): n is a, c, g, or t
ncccttaatttccttctgctcttgttgcccgctacttgaaagaagttcctcatagtcctggtctgctacatctcacttctcattcattgctaaaatctactgtaatgaggtgtcaacacccactactcctttgaaaccctcttactcaggccaaattgttcttattagggccaaagtggccttttttattgttaaatccaaaggcattttcttaaagctcattctacttgacttttgactcttggcaatggtcaatcttctttttttttaaagtatctcctccttcacttccaaactaaactaccattttctccataatttactcttattatgttaacaattccttattttctttctcttgtcctttaattctacttacacttaaatgttgatgttccccagagtttaatccaccatcatcttttcagaatatatattcttcttaaatgatctcatttatttccatgccttcaacttctattgataactccccaaataaaactccagccttcaccttgttttaaagttcagaactatatatattttttttactaagtatgagtagctacctcttaatcacttagagatcttgcaggcagctaaatgttttcaaaatatcaaatacattttctctctcattgtttatcttctcttattctcataacattggggcaaggaagcttggaatctttctccattaatctttttcttttatgttggtctcacattggtcatgatgttgattttatctaccaaatgctttcctaatcttttccttttgtttcctcactactgtcattgcctttccaaaaactttcaaaaccacttattaggattattttagtatagtctgggagaaggcaatggcaacccactccagtactcttgcctgaaaaatcccattgacagaggagcctggtaggctgcagtccttggggtcgagaagagtcggacaggactgaacgacttcactttcacttttcactttcctgcattggagaaggaaatggcaacccactccagtgttcttgcctggagaatcccagggatgggggagcctggtgggctgccatctatggggtcacacagagttggacacgactgaagcgacttagcagcagcagcatagtctaattcccttcttccatcatgtctcctgttgaatccatctttctcactttggtcagcattaactttctaaaatcccctttgcattagcagccttcatgttaaccagttgacttcctgcaacccacaagataaattcagatgacttttttcattttattatattttcattcccttaattagtttttcccttgtctatgtttctcttctcttgtccatgatccagaaattttaatcttctcttccttccaattgctgtattcatctttttattggtatgtaacaaattactagaaatttaaaagcttaaaatgacataaatttattatctcataggtctgtgaatcaggacgctggcacactttagctgtgtcttccacccagaatctcactaaagtgaaatcaaggtgtcactcatctgtatccatatatggaaagttaactagggagagagccagctccatattccttcaggttgtttgtagcatttatttccttgcagtatgagtgaggtagtcattttattactagttgctgtaggggccactgtaactaggatcactctcaggttcttacaggtgactctcagttgtccatcacaggctgtctgcaccgtggcagtgtgcttcttcaaggtcagtagga

SEQ ID NO: 55405 - DNA, 1036 bp, Bovine  19866880905835
  misc_feature (1)..(1): n is a, c, g, or t
natatcttagttgattgtcaaatagggttagatagtattacaatgcctgatttacagattaggcaacagagttgtgaagataaggcaattgaggcttggaacaaggattcaaactaaggtttttggaggtcaaagtctgtgtctttcccattttctttagtatattggcagcagagatgcagatcaatggatgtgtgcctttgaataataactttttcccctagaattcaggtctcctttagtccttatccactattatgacctctgacggagcacatttggagtttctgttgtcaggagaaaaaggcaggagaatatgtgtggtaagttttggaaacaaaacagattaggtccattttcatacttgacaggtggaaaatacactaaagtcataaaatactctttttttcctctctgaagtcttcttcaccaaacaggtacaaagtgaaaactcaccacttttatttaaaccacagatctacttctattctttctgtaaaagcacttgatccctgtgatgaagcccaaatccaaatcaagagaaaaacagctcttatttattacgcagtttgctctcattatgttcttcccagaaatgaatccctgtccctctcggactttctttcacaggacactctgatctggctctccttctcagcaccaggagagttgttttgcctggcttatcccatcaatagaaggctcagctcccttttctcacactcacagtccagcagaccattttcctaggtcatcaacagagaaatggggagtcttctcttaacaggctgcacttctgccaagttccaaagtgctctcgcccttccttaaggatgcagaatatttactttttacccaaaacatctggataccttgtgtgtgtaaccctctcctgagggtggtgggttgtttgaaagcagatcattccagtaaaaatgttcaggcactttcagacaattctgataggactccataacaaaacaaaacagatatcttccccactgcagtttccactcaatagcaggtaaacaataaa

SEQ ID NO: 55406 - DNA, 2115 bp, Bovine  19866881048905
  misc_feature (1)..(1): n is a, c, g, or t
ncagtcctgtggccactgctgaattttccaaatttgctggcatattgagtgcagcactttcacagcatcatctttcaggatttgaaatagctcaactggaattccatcacctccactggctttgttcatagtgatgctctctaaggctcacttgacttcacattccaggatgtctggctctaggtgagtgatcacaccttggtgattatcttggtcatgaagatcttttttgtacagtgcttctgtgtattcttgcacagacagacatggatggggaaatttctctggttgcttcttatctattttccattctgaataaggagacatctaagattctgttactccagccagtgctttgtatttttgaatatttttttttaataatagaggcagatcatggacagatgaaatgctcagtgtaataataagagccaatatttttactccttcattatacatttatattccccacccaactcactttctcgagggactggtcaagatcattcacagaaaaacagaactttgattgttgagtttggcttatttgactgtttagaaggtgcgacaattttattcctcaaacgaaagagacagactttgtaagccagaacacacaagggaaatccactttccttgaaaagtctggcttctttttaacctggcacttaaatcagttctacaaaaggtctactttccatttctacacagtttcaatgaagtttaaagttggttcaaaggcataactgtatagaatggactaggatcatcaagaaatgaagagtatttgctcactacttagatgtccttaggagctttctgtgtttatctggcactccctttgcattaggtctggaagagagataccatatgcttcaaccctggaacagaacataggcctttatctttgtgtgatatttcaagacaactgggtgagccttattgtctaccaatgccaacatttttccccagaaaattatgctacttcttatttttaaatctggcagtgctgtggggttttctcaaactttatttggtaaattattataaaatattcaaataggagaagatagatgctaaaaatataccttatatttttatagcacttcaaagattgttgaaatattctcaacattaaaccataaaataactctcaaagcatcactaaaacttttatctgcaaatccctgaaaatggtgatatttaataaagcaacctctgttatctatccaaatagctctgaatcttggcctgaaaaacagtatttcaaataagtttttagtctgttatacaaaataacgtatcaaagatcttttattcaaagatatagaaaatattcatacccaaacatactttaggcacctgtcacttacatatttgaggtcaaactattagacatgtaaaaactaactaagctctgtaggcattcgtactgagaggctctgaatgttattggataccaaccaatgaggcaaccattcttactaacatccttttgcaagggtatggaaattcaattaagattaaaatgtcaaattctttgcttcctattcaaatttcattctgtgtagacgtttgattgtgctagtgtctacatgatatgaatgcaactagttgaaaaatgagctagttgcctatttcagggctaggcaactggtttgatggacactcttcaagtgaattgactgacttggcttgttatttggccaacttctttttcatgtagacacaggctaagagaaaaaatagccccacttatttcctttggcacttatcaggcaaataggttcctgtagtcaagttgttctcaagtaatagaacagctaataaatctgacctgaagattcttcttgggataccaattatccctcagtatttgaatcctgtttttacccactcacagtttatagctaacttggtttttctaccatttgtaaatccctactgttcctggctgtacagggatagaatttggttctctctgaaacttcagtcttaaagaagaaaatacaatttcaaggaattgaacattcactatcctaatggtttaattgtttttttttttttttttaactctcatgaattctcctttaactatctatgcaaaaattttca

SEQ ID NO: 55407 - DNA, 1297 bp, Bovine  19866881169840
  misc_feature (1)..(1): n is a, c, g, or t
ncttctcagagacatctacttttcaaatgggcatttatcattgatttcatcaatattagtcagtattttacatatttaagcaactatctgatccctcactcataaagcatttattgagcactttctgaaattacatatgacatgcttcatcaaaaggcctacatataaaatttttaattcactgtttacctgaagttctttgtatctatcttgaaaagaaatggcctcttgctctttttctttaaggaaatctttttctaagatactatgtttctccatcaatgattccacatcctaaaagaaaaaaccaagcataaattgcgtaatatttatggcaaaaaatagactctgatttttcaatgacacaatataaaatatttggaaaggaaagaacccacaggaagtatggtctttaaatttcaacaatataaaatgtacgcttaactcccatttccagaccaataccaaacactaacattaacactaaccttgatataatactaaaagcattcatgctaaataaatacacaaaagcatttaagctaactataaacaacatgctacttcaacatattgtacagaagacaggaatcaagaccatcccgaaggaaaagaaaagcaaaaaggcaaaatggttgtcgaggaggccttacaaatagctgtgaaaagaagagaagctaaaggcaaaggcgaaaaggaaagatttgaatgcagagttacaaagaacagcaaggagagataagaaagccttcctcagcaattgatgcatagaaacagaggaaaacaatagaatgggaaccactagaaatctcttcaagaaaataaaagataccaaaggaacatttcatgcaaagatgggtacaataaaggacagaaatgatatggacctaacagaagaagatattaagaagaggtggcaagaatacacagaagaactatacaaaaaagatcttcacgacccaaataatgatgatggtgtgattactcatctagagccagacattctggaatgcgaagtgaagtgggccttaggaagcatcactagggacaaagctagtagaggtgacagaattccagttgagcaatttcaaatcctaaaagatgatgccgtgaaagtgctgcacacaatatgccagcaaatttggaaactcagcagtggccacaggactggaaaaagtcagtattcattccaatcccaaagaaaagcaatgccaaatgctcaaacaatcacaattgcactcatctcacacactagtaaagtaatgatcaaaattctccaagccaggcttcaatagta

SEQ ID NO: 55408 - DNA, 2778 bp, Bovine  19866881270446
  misc_feature (1)..(1): n is a, c, g, or t
nttttttgatgatccagcgaatattggaaatttgacctctggtttctctgccttttctatttttctaaatccagcttgtacatctggaagttcacggttcatgtactgttgaaacctcacttggcgaattttgagtattactttgctagcatgtgagatgagtgcaattgtggtagtttgaacattctttggtactgtccttctttaggattggaatgaaaactgaccttttccagtcctgttgcctctgctgagttttcaagtttgcaggcatattgagggcagcactttcacagcatcatcttttatgatttgaaatagctcaactgtaattacagcacctcctctagctttgttcgtagtgatgcttcctaaggcccacttgatttcacattccaggatgtctgactctaggagagtgatcacaccatcgtgattatctgggttgtgaagatcttttttgtatacttcttctgcatattctcgccacctcttcttaatatcttctgtttctgttaggtccatattatatctgtcctttattctgtccatctttgtaggaaatattcccttggtatctctaattttctttagatctgtagtttttcccattctgttgttttcctctatttcttttcattgattgctaaggaagggtttcttatttctccttgttactcttttgaattctgcattcatacgggtatatctttccttttctcctttgcctttagcttcttattttttcatgggaaaaaaatagtttaaacaaagaaataatgacactagtgatgatgtcacaagaggttgcctaattccccagtgtagagttcagagcaaatattctttagaaattaaagggttcctcattttctgagtctacacaagcatgaaaatgatgttgcttcatggaaaagctcattaattaaaaacattaaattcaggctgaaagaaaaaataatttctactgtattttctaatttacctgctactttctagtctattaaatagcaagcccccaaaactactcattcagtctctgctttctcttgtcctctcattcttctttgcacacatagagctccttagaaatcacagaagaaaatctaaattcttcaacaaagattgcaagattcatcacaatccagctggagactgtttttcttaccttctctcttcatgctggtcccacacaccctagttttatcctgtcggcacaccagccacctttcacaacaggccatggtacctgcatcatgtggtccttttgctactaatgctattaatatatgctctgatcagaatatcttcccgttttctccatgtggcaattttgtttccatctctgaagcagttgatatatcacctctgtgaagcactttttcctcctcttcccagtcaatcatctgctcttcaaggatcctcagggatgcatattctaccatggtgctgatgacacatggtagccgttgcacacaggtaggtttcagccccgagacaagaagtttctccagagcggtgtcctaaatgcatcacagcacctgcctgacacagtgccttcacataaactctcagatgcttatttgaacatacgagtgaataatgaatggaggaataagtaaaaatcaagacatacacattcattattgtgtatttcacagacagaacacaaaagcttgtgtgtccagagacaggaatgaaagtgaagtttcattttgaaggaagggagcagtttttgtacttactggttaaatgtcaacctgacttacaatacaaaatcatttactgtatatctgccgggcagggcacactaacattacagatgagagggctgtgaaaatcaattcacatcagttgactgctttcaagctgaaaagtaaattttattcaatatataaaataaaaataatgtcctccagcattttttttaaataaaaagaatccctttcttcatagaaaatgcgtggtaggaaagtaaatagaattgtttccacttacaatgctttcaagttttatccctggagccatttggcctgagatataaaggtggaaagaaactcagttttatgcatacacatgctcgcacacagtacaccctcacgagtaaaccaggcagtgacaagttacttggatgctaaatcgaaacttgtgcaccaaacaaaattgtgcactgtgtgggagagcattaaggctgctgggtttgaaggtttgccttggctggaattcactgcaacaccacccacctctctccagttgcaatattataaccaggtcacctagatgctgtgaaacagatgttcattgaagagaaaaggaaataggtggtgtccattgaaaagtgatagccagggcagaggagaaagcatatttttacctacaacacaagcttaatattctggaaaattctttgtagggcaaaaattcctagctctccaggaatctgcagcacttagtaagcacttcagtataccaggaggcaagaaagcagagtggggaatggctcagactttggtatcagcctggctttgactcccaagtcttcatttcctagctgtgtgcccttgggaaaattttgttgttcagtcactcacttgtgtccagcatgccaggcttcactgtctttcactctctcctggattttgttcaaactcatgtccattgaatcagtgataccattcaaccatatgttggccccttctcctctgtcttcaatctttcccagcatcagagtcctttccaatgagttggctgttcgcatcaggtgaccagagtattgga

SEQ ID NO: 55409 - DNA, 3156 bp, Bovine  19866881314041
  misc_feature (1)..(1): n is a, c, g, or t
natgtctttaatcctctacctcctggtgtttatcgggttcctggcacaaaatggaatcttaagaaaggaagggaaaattggaaagggtagcgagagaagagaaggggaggagcaggaaaagggcagagtgcagagaaggaaagtatgagacagtaatcaccatgtattacaactactgttgttttgacctggtatctgcaacaaaatgaccacataggcaatctctgttcaaaaaaggaagtacttggttcttagaagcaatttggccatgggccctggggcctttcatttcattcagatatctcaagatatcttttccattttctttttctaatacacataaataaaaatagatgagaagataagaatatgtcatcccataagactctaatactttgaagtcagaatatttttgaacaaagtcaactgaatactacccagaaaactgctttttctgggagaaatatcaataaccacagacacacagatgacaccaccctatggcagaaagcacacaagaactaaagagcctcttgatgaaagtgaaagaggagagtcaaaaagttggcttaaaactcagcattcagaaaactaagatcatgacatcctgtcccatcacttcacggcaaatagatggggaaacaatggaaacagtgacagactttattttgggtagctccaaaatcactgcagacggtgactgcagccatgaaattaaaagacacttcctcctcggaagaaaacctatgaccacctaaacagcatattaaaaagcagagacattactttgccaacaaaggtctgcctagtcaaagctttggtttttccagtagtcatgtatggatgtgagagtttgactataaagaaagctgagagctgaagaattgatatttttgaactatcgtgttgtagaagactcttgagagtcccttggactgcaaagagatccaactagtcaatcctaatggaaatcagtcttaaatattcattggaaggactgatgctgaagctgaagccccaatactttggccacctgacgtgaagaactgactcattggaaaagaccctgatgccaagaaagattgaagtcaggaggagaaggggatgacagaggatgagatggttggatggcatcaccgactcaatggacgtgagtttgagcaagctccgggagttggtgatggatagggaagcctggcgtgctgcaatccatgggatatcaaaaagttgtacatggctaagtgactcagacccagcaaatgggcttcccagtgctagtggcaaagaatccgcctgccagtgcaggagacacagaagacttgggttcgacctctgggtgggaaagatcccctgtagaaggaaaaggcaaccactccagtattctctcctggaaaaatcctacgaacagagaagctttgctggctacagtccatggggtcacaaagagttggacacgactgaacacacatgcagctatgcacccagcaaatctagaaaagagcctttcttagcattatactttgtccaatacagctcatgttttaaaataggagagtaaagagatcttattctaaatatgcattttaaaacacaaatgactcatggctcccttaaaacaaataaataaataaacaatgccagtaccctagcattcaggaacagccctacaacaacaaaccagtgtgggcaaattaaaaaaaaaaaaaattatttgcaaggaaattaattcattcccagagtttccaagaggttagtataaaaaacagtgactacatgttttgttaagacaagaaaaaattgccttaacatgtttataactattttctaaaggaagttgcatggcctaatgaactgcatcttggattgggagtcagaaatttcaaattctgctctttctcaaacactgcctggctgtgtggccttgaataaattacttaccctctctgtgtttccttatttttttaaagtgaggattacattgactgactgcatagaagaggtattgtgctcaccaatgaattagtgactagaatgaatcgttcaaatatgaacaaagaagcgctatgtctaacctgaaacacacattttaaagtagttgggaacagttccctcattaggtaaataaagctgtcccacttgttaatttttgaaataaattccaatttaaaaaaaacaattattgtgaaagccacatttctaaaactaccctagaaaattcataatttatttttgatattgaaactacatacctttttgcatagtttcttaaagaagatcacctatttctaaaaaatatgtttttcaggaagcaggatgagaaagaaattactttagtatctgtgccctcgtctacttctagcaaatcttattaatcttcagaattctgactctgacttattaattgaagtgaggcaaggtttagtcactcagtcagtgtctgactctttgagtcgcatagactgtagcctgccaggttcctctgtccatgagattctccaggcacaaatgctggagtgggttgcaatttccttctcaaggacttattaatgacccacagtaaatagtcaaatagaaaagaacctaggaaatggtttatgataccccataaaagcccactaggataagcccatcgtgttctgaacattctttctgatatgtctgttgctccggtaggttataaaataatccagggggaagactcccttatcgatctctacacacacaatatctagcataatgcttggtgtatggacactgttaagtaaatatctgttgagcaaaactgaaattggagtgggtaagctggtttattcaggaaaatttgagtcaaagtaaatttcttgaattgacagttttctaacagaatcacagataagcttcagaagcttcttctatcaattaattgctggattggagaatgcaatgaggcatagctaatttaataatttctgtaacctccatgaactttccactgcttcacagatagtctaaatttagcatgacatgtggggcccatgcagctctatagccgtcctttttgggtaaaaattctctccatcttcatttcaacactgccaactctgcccaatgcactttgctctagctgattaaacttgttgctaatctgcaaacacatcaagcctttctccatcctcc

SEQ ID NO: 55410 - DNA, 789 bp, Bovine  19866881322008
  misc_feature (1)..(1): n is a, c, g, or t
naactcagtaggaattcaaccatctggcccttgtaacttttgctttgggtctcatattagaaaaggcttttatctgaccaggtcatattaaaatgaataatataccctcacattcaatcgttgtctatactttcagctgtacctcattttttatgtcaaagggaatttaaagatttgtataggtatgatctaaaaggttactatttttctatcttatactctgaaagcttatttcatacagtacaccttaaaatcaaatttattgctgtttttcacttcatattttaacagtcttcttgatcctctttcttattctcctggactcacttacatgagaataatcttgaaagaacttactgataggttaacaatcatggacttcggtaaagcaaatctattgaccgtttccatttcaacagtggggtcattaagaagatactatagacataacaatgcttagattaagtactataattcctgtttcagggaaaagacataaatatgttctaacttaaaattaaaatttattttaattttgcacttaattggtttggcccagcaattaatttagtactcttctttgttctttgtcataacatttttgtttaagacaaagcaaaacttctaaatcagagtacagtaagtataaatattttagttagagtcagtatctaaaaatgcctattctgtttttgtgtaacttaaatgttcatctaaataattcaatcacttcttgaatcattatagtgatagtgacaattagctttattcttcattaaaaggttttag

SEQ ID NO: 55411 - DNA, 1767 bp, Bovine  19866881333636
  misc_feature (1)..(1): n is a, c, g, or t
nctgaaggagatcagcccctgggatttctttggaaggaatgatgctaaagctgaaactcccaggtactttgaccacctcatgcgaagagttgactcattggaaaagactgtgatgctgggagggattgggggcaggagagaaggggatgacagaggatgagatggctggatggcatcactgacttgatggacgtgagtctgagtgaactccaggagttggtgatggacagggaggcctggcgtgttgcgattcatggggtcgctaagagtcagacacgactgagcgactgaactgaactaaaggagaaaatctgggcttagatatgtaattgaaaaatggaggtgtattttagtaccttttccaataattatggatattctgctttgatgctatgcccaaactcaacaagtgctagtttcctaaaggttagttacaatgtagaatcttaaaccatatcaatgaatctttgcacttgtgggagaaaaatgagagtgaaaaagacaaataatatcttagtattaatatgaaaatagttttgaccttagagacttcctgaaagtgttttgggagcttccagggaacttgatttacactgagagaaccacgggtatatatataatttgtcaatagtctttcccaggttcttgagtgttctttgcatgctaagttgcttcagtcatgtcatactctttgagaccccatggactgtagatctccaggctcctctttacatgggcttctccaggcaagaatactggggtgggttgccacttctccaggggaccttcctgaaccaggattgaaccagtgtctctcatgtctctgcattggcaggcaggttctttaccactagtgccaacgggaagcaccaggttcttgagagttgttccaaattttccgtaccagttttctctgtttctctttctgatgtcttttctctttgacccttatctatccactatccttgcatttttttttctcacctcctgtcatttccttattgaatttactatgtgaacaacccccttcagtgtctaccggtatcttgtaagtgttatcattttagttgatgagccacctgtatttttctacctggttactcctatattaatagaagagctggatggtctaggtctagttgatttatttattggtgattcttttatcctcaggcttacctggggaaaaatttgaattctggtcatctggataaggaagggtaaagtattaatataaatgggagtgtttttcatactgtgtctactttttctctagagttatttataatcaaagaggtctcttttactattctagcctaccatctctattaactttctaacttcttaaacttctaaaaaatttctatattatttacttgatttatatctgtttttcccagtagcatgtcagctctatgagggaattgacttttttcttaaatgttttattttcagttcttagaacaattcctgcacatattaggagctcaaaaaatatgctttgaatgtctctcctcactaagaatattaaaaatgaaaatcttgaggtatataaaaaaaaactcatgcattctatattcatgactattcttttgaatccaaatatcttaggctttactttaatgatgaaaggctgtataatagagacaaacaactaaactatgaatataagatacctaggttcagatcctggttctctaaattttcaacattgtgatcctgggtaagatgctttgcttcttactcttgtctgtaaaatgtgagtgc

SEQ ID NO: 55412 - DNA, 761 bp, Bovine  19866881334782
  misc_feature (1)..(1): n is a, c, g, or t
nataattttctcagtttaacaagataagagtttatagaggattttttaatactatcatttagaatacctacaaaaaagcacttacaagatagtcactgaaacagattcattattaatttgaattatttttctggttgatcattttaaaagctttctttgaatagtttgattacacacaaacttttgattattattatgaattggactaacagtatcagtattatgtattcaacttagtaaataatttaggatgtaatttcagtataaattttgattcacataattagtatataggtagtataggtataggtaatcccttcatctgatctaagatgtttagatggatgaaggtgagtatttataaagtttagtgacatctctattgataacaaaaaaccctggtaaatgacatttaaaacattttctcaatataattttaatttaatcctagcataattctgattctaattctgaatataactgtaatactcaaaagggttggatcactgattaaaaacttgttgagtccagatacccagaaaaaggaatattatcccctatagtgatttgcaattctactgcacttaatattgtaggataaattataagctatttgaaaagatcatcatttcagatatttcattctgtttttcttttaaaacactgaacttttgactttcttgagacttgaaggctaagtcaaagatctctcttggtaaatgtcacattgcatgtgaaaatatgtagttaccttttaacta

SEQ ID NO: 55413 - DNA, 1421 bp, Bovine  19866881402758
  misc_feature (1)..(1): n is a, c, g, or t
ntggaagttgttttgttatgtttccattccccctacaaggaatttttaatgcttagaaattaaccaatcatactaggtgtgatgaatttttatgagtttttcatagattctgtgtaacagtttcaaatttatgacaaaagctttgggatcactaaactcaattctcctctttagatttacagatgcataatactatccagaggtaagtaaattcccttcctttatctatctcacacttgaattctcaagggtttttaattctacacacagattaaataattaagagaatattaattgaacattggaatgtagggtataacaagataaagcacctattaaccttgctcaaaaggaacttgaaatatatcaatgcattaaagtgcaaatgaaaatttgaatacatgatcaaaattatacaaagtaggtgatttatataaacttctatgagactttggagaatggaaagatcaaggctttgggggagagttcagagtcaaaatttagtcttagaaatgagtcaaaattcatttagatgtattgagagtgataaaaacacatcttctatgaaagtaacatcatggatactaggattttagggtatataaaaggtagttgtgggaaataatgctagagggctgcattgtaaataggtccttgagagcattgcatatcagccatgttcccaaaactgaactgacaatggaaatttataggagcataaagtcagcattagtattgtttaccaagaaaattgtgtagtatggtgcaggagtggactggataagtgagaatctaacacatgaacatcaccagatggtcaatactgaaatcagattgattatattctttgcagccaaagatagagaagcactatacaggtcagaaaaaacaagaccagaagctgactgtggctcagatcatgaactccttattgccaaattcagacttaaactgaagaaagtagggaaaaccactaaaccattcaggtatgacctaaatcaaatcccttatgattatacagtggaagtgacaaataaattcaagggattagatctgatagaccaagtacctgaagaactatggacataggttcatgacattgtacaggaggcagtgatcaagaccatacccaagaaaaacaaatgcaaaaaggcaaaatggttgtctgcagaggccttacaaatagctgtgaaaagaagacaagtgaaaggcaaaggagaaaaggaaagatatatccatttgaatgcagagttccaaagaatagcaaggagatataagaaagtcttcctaagtgatcaatgcaatgaaacagaggaaaacaatagaatgggaaagactagagatctcttcaagaaaattagagataccaagggaacccagataaccacaatggtgagatcactcacctagagcccaacatc

SEQ ID NO: 55414 - DNA, 812 bp, Bovine  19866881442466
  misc_feature (1)..(1): n is a, c, g, or t
natttcagagcatggtattgcatctaaagagttattatcactgactgtgatagaaatattcatttaaaatatttctgtagttaaaagattagtaactgaaaaattaaaatattatactcatccttgcaagtaggtactccaccattagctaggaacatgtgaggatttactctgggtaagggaaatgatgatttaatttgctaatgcttgcttatctgtttaaaaaatatttatttatcaatttggccataccaggtcttagctgcggcatgctgactcttagttgcagcatgtgggatctagttccctgaacagggatcgattccaggctccctgaattgagagcacagagtcttaaccactgggccaccggagaaatccctgctcacttatcttgagatgagaagactggtaaaaatgttagtggaatgataaatgtactacactcctttttaatgggagtggttatcagtttcttatggcctggttttctcagtgactatatttgagtatatagtctgcaatgcaggaggaccccagttcaattcctgggttgggaagatcccctgcagaagggataggcaacccactccagtattcttgggcttcccttgaagctcagcgggtaaagaatctgcctgcaatgtgggagacctgggttcactccagtcttctggcctggagaattccatggactgtatagcccatggagtcacaaagagtcggacacgactgagcaactttcactttcacatatttgaatataatagggttttgctgtatcactcttttcaggtctcaggccataaaaa

SEQ ID NO: 55415 - DNA, 1297 bp, Bovine  19866881631741
  misc_feature (1)..(1): n is a, c, g, or t
naaattaaattgataactttatgatattgataccttcctacttagaaaaaagtgaatctaaatattcagtctgcaagtcttcaacagagtacctacttcttgtgctttacattgtaactgctataaatcatcttgtcatccatttgtatacatgaaaagtgaaagtgttagttgcttaatgtctttttgcgaccccatggactgtagcctaccaggttcctctgttaatggaatcctccaggcaagaattgggtaatcattcccttctccaggggatcttccgaacccaggaatcaaatccaggtctccaacattgcaggcagattttttaccatatgagctaccagagaagccctatttatatacatatgtataaatacacataagtatgttttttgtatatgtatttgttgtcataatagatccatggcagtctctaaataattgtctgcctttaccaggaagatggcaaagtgtaagaagttaataaagacataaatacaataattatataaaaccaaataaatcatcacaatttaaataatattctaagatttagcttatttccctttatgtgaaatcaatatatcttcatttgtaaatattggaatgaaaagaaacaaatgatgacctttattttgttattgatgttaataactgtgtcccactgcctcacagctatttcatggtatttagaagaatacagagaaggaaatattttctaagagcactgtgttgaaaggctgtaatggagtttaatatagttttggaagctcaattccacttactttgtctggtgtgtatacgtgcataagattaggttactgagaaagaaaaaaagtacactactcttttcattgtttagacaaagagtgaattacagctaaaagaggaggcgaggatagagggaaggaatgagcagagttggtggagtcaggagagataactaagatagccttggataaggatagaacaaatggttgatttgtagaggcaacccttatgtcttatgagcagaatcatttccaaagaattcattcaatccatctctcattgatgattttttcccttatgacctatgtgtcttgtatgggtctctctttcaaaatgtatcacataccatgttacctctataggggctgtctggcttattacaaccatgagcatctcaaaaactatatcaactaaatatttgtgttcacctcactgtccttcactgtgcgtaagtccaataaatcaagaaacatttttaaagaaagttatgatttaaaggtaatggaattttattctttttatt

SEQ ID NO: 55416 - DNA, 1984 bp, Bovine  19866880418686
  misc_feature (1)..(1): n is a, c, g, or t
ngttggtacgctgagtacgtgtgtgtgtgtgagggattttcttacacatcaatggggacccagaggcagggttctcagactgtcctacgaagcctggggtaggggagtgcaagaggcggtttttacttaaagcaaaacaagtggttcccgctcttaagaaaaaagccatcgaattaagagtctccacagggcttaggtttaagacactctgaagaactgccctctcctcaggcaggcagggtgggtcaggagggacagacgtgggcctgtcaccgggcgttgtgagaaccacgggggttctgtggcttgaggtcagttcatccccagacagcacggcttggtccctctggtagaaaacctagacaccctgataaaagctccagatggcgctgcacgatgcgttggactgtccttgtttcaggagacagacctagaacagccgaggcccacagaagcggtgacccccccctttcttgcagagaccccgtccctggcggtgccgctggaggaccgcgtggtgtccgtgggagaaacggtggccctgcagtgcaaggcggccggcagccctccgccccgcatcacctggctcaagggggaccggcccctgagcctcaccgaacgccaccacttcacccccggcaaccagctgctggtcgttcagaacgtggtgctggaggacgcgggccgctacacctgtgagatgtccaacgccctgggcacggagcgcgcgcacagccagctgagcgtcctgcccaccccgggctgcaggaaggatggcaccaccgtgggcatcttcaccatcgccgtggtgtgcagcatcgtgctcacctccctcgtctgggtgtgcatcatctaccagaccaggaagaagagcgaggagtacagcgtcacgaacacaggtgagccgccgtggccgaggggactcacgggaggggaacagccaggatgtttgggaaggaggccacagaatgacaccattttctcttttgagaatagcacattttaatgggcatactcttaacgcaagtccattacaaactgtgcagttttctgagccatcgggctttgctgctgtgtggtgggttgtggctgcagggatttcaccaggctgtttttctcttgggagagatgtcagtctcccttctcatcaccgtgccccacgagctgggtaaagtcaggctaagcaggtgctaggagggcttctccagggcacagatgccacgcagtgtctctgcacagctttacagaggctgcccggtgcccaagtctgcttgtgtcatcaccacaaagggtcaggacccctggtgggtgaccatcttgtctccttgcagatgaaaccatcgtgcccccagacgttccgagctacctctcttctcaggggacgctttcggaccgacaggagactatggtcaggatggaaggtggccaccaggccaacgggcatctggagagcaacggtagggcctcagcccgggcgcatcctcttaagcacagggatctggcagctcgggtgactcaagtctactggtgggtctttggggacttaacctgtgcaagttccacaaggtctctgttgggtttaccgtctcctaatctggataaggtaggactgcctgcagtaagagcagcagaggacaagactgcttcagagacacaccccactcccatccctggagcagggagactgcccaggtctgctcttcagtctctcagagtaggaagtgcccacagaaacgggggaagacagagcagtggtttggagtgagtttatccaaaccaagaactgctcactgtcatggcacccaaggcctgcctggtgtgaaggcagtgttagaaaaggggcctcagcccaggaacaaacccctgggaacctcttgaacagtgtccctgtgctggtcgccttgcccgttcttttcacacagcatcgtctgaagcgctaagcccacctcagaggaagggcatctaaccggatgggagtctgttg

SEQ ID NO: 55417 - DNA, 1544 bp, Bovine  19866880483024
  misc_feature (1)..(1): n is a, c, g, or t
natatttaattctttttgttgcaattgtgaatgggattgattccttaatttctctttctgatttttcattgttagtatgtagaaatgtcaagtgatttctgtgtattgattttgtatcctgcaactttgctaaattcgctgattagctctagtaattttctgatactctgtggactgtctactaatcttggaagaaaaaagaaaaggagagatgtctcaaaataaatacgtgaatgtttctaaagagagacagaaagagaaaccaggaaacatctctgaaaactaagcatgttgttcctaaaggcaatcccacagaagagcgaaaatcatgtcagaaaaacagaagctctatggcattctcaatatttttttcgttcaatcgctcagtcccgtctgactctttgtgacccctggactgcagcatgccaggcttccctgtcctttaccatctcccagagcttgctcaaactgtggatagcttaattcatgattgtagtcatctggtattaagacaataatttcataaaaggaaatttcaaaataagttataggtgtccactcatttaggaattaaggtctgtagagtctttctctagctagaatctaagataagaactctagggaacaagatgaccatttttcacctccctggtttacaaagccctggtccctttctgtggtcagacactttggatcaagtcagatgggttttcaaactactttgcctcttaatttttaaatccttgtttattttaaagaaaatttaatccatatgtttccgattcatttacacttaactcatcaaaatgctgtttcataaaaagctctttgatgtttaaattgcctttggagctatttttaataagtttttttttttttttttttttaaggcttccctacttagaaacagaaagtttcatttcattgctatttaacaacttggggtccagagggttgggtttagtttattatctaaatgaaataatgtatgtaaaatgcttcataaattctaaagcaattgacacctgttagtgattagagttgctattgttattaccaccacacagaagacataaagtttgaggtttctccttcccatagttggctggattagctcatcttgtggctccctcctacttataacattttcttattctacgactttctcatccttagtaacacatacaataaacatgttaaatgactaagtaatgacagagttaagtcagggagagactcacccacacaaattaagccccttttaaatgagctcctggttggacctactatgagtaatgtggtcagtcttcactgaggttcaaggtctagctgggtttcactgactgaggggtcagggttttcctggagtattatgggcaggaatggttagattctgttagaaaaagaattcactaagaagggaagttttgagaacagacacctaggggcaggagggggacaatcaaagcaagggggggggtctcttccccagtcttatgaagcgctacatggaaaagctgcagttatcctgggaagctggtggt

SEQ ID NO: 55418 - DNA, 2648 bp, Bovine  19866880508063
  misc_feature (1)..(1): n is a, c, g, or t
ntcgtctagtcaaggctatgatttttcctgtggtcatgtatggatgtcagagttggactgtgaagaaggctgagcgccgaagaattgatgcttttgaactgtggtgttggagaagactcttgagagtcccttggactgcaaggagatccaaacagtccattgtgaaggagatcagccctgggatttctttggaaggaatgatgctaaagctgaaactccagtactttggccacctcatgcaaagaattgactcattggaaaagactctgatgctgggagggattgggggcaggaggaaaaggggacgacagaggatgagatggctggatggcatcactgactcgatggacgagagtcttggtgaactccgggagttggtgatggatagggaggcctggcgtgctgcgattcatggggtcatgaagagacggacacgactgagagactgatctgatctgaatatgatggtccatatttcaggtgacatggcaccctctctcttacttctcttgacctcaagagacttataatcaaataagtgggaaaaaaaataaaaggaaacagggctttcctggtggctcagtggtaaagaatctgcctgtcaatgcaggagacatggattcaatccctgagttgggtaggtcccctggagaagaacccactccagtattctttgcatgggaaaatcccatggacagaggagccttgtggacaacatgtagcccatggggttgcaaaagagtcagacaagacttagtgactaaacaacaaacaagaaccattacagaaactggagaaattgctagtttttcttctccaggaaagcctgttgtcacaaatcaccatttatttaaaataatgagacattcctgaaaggtatgtctgtgtgatgtttgcataattttctttctttctttttttttttttggtggacaaaaaggaaaataaccttgacttcatgggattgtctctttttttggtgggagattatttcgtaactaatgaaataaacagttttcacaataaaagaattaacatcaacttttttttttttggcttgtaaagcgaaggctttaagaaaagaacatttagggggtacaatagcctgtctgctgtggctgactttcttacccactttgttagaatcatgttaaattgactttttcctgccactggaaaccactacagttctgagcaccaatcagattcctcatctctgttatgaaagatcacaaacataatgcttcatattcagtctcaaagagaggaacagaaaaattgtacatgtcaagaaagcattacagaatgacattgttatttggagaattgctttcatctctgagattcctcacacctgcttcatttggcacagactgtttccatctcatggaaaccagtctttgctcttccccaagtcccagagtacacagacatcacatggcaatgagaaaacttggaacagaaaaactcacttaaaggtgccatctaaaatgcactgtatgtaagctgaattcaccacattttgttcaaaagggactcttagttttgtgtgtgtaacagcatacacctaaatacacttacacatacatatgtacacacacacatatatgtctggatgtgtataaacacatttccatgtatgtgtgtgtgtatatttagaacaatgcatacaacaaatttttgtatatttggccctctaatactgttttttaactgcttctaaaatctgtgttaactctcagtaactaacagtgctgtaggccgaatttatcatgctggttgcttttactttctcttaaaaatcttttaaaaagatatttacttattttctgcttttaaaaaatgcaccaaaaatataatgaaaaggtacaaaatatatgtgtgtgtacgtgtgtgtgtaatgatcctctaattgagagttagatatttccaaatactaataatacaataaattctctgaagtcttcttttctttggataaacagtttctgtcttttaggtaataggtgtttttgtttctgtttttaattaaacattatgattacttgcatgtcatttaactacttgacacacttcctccatgctagggatttttgaaaagggagtattgatttgcttcagtttttcaatgggtagaatcagacttcttttttacattttatagatgacatatttggctctccctggacaaaatccagttgaacataatagtatttaatatttaataaactacccagcttttggaaccatctggaactttattttctttgcacgcagcatctgagtttcagctgttagcatttctcctttgctctaggaagggtcaattgcttttaaagtctttgatgcttgctgtgtcagcccttttcgtatttttcaaatgcccgtgtaaaagggcttttcatccattcatgctgataattcttttgaacttgaggtttcaaccaaactaatcaaatttaattataactcaaatcctgctacagtgaactccagtagacttatagcctagataattatttatttttgttatcctggaatttagcgattaccaatgttactagaagtgggtgggccctagattgtattttgggagatctttttgtaatttttttgttatattccagatttgttatatgacatcggta

SEQ ID NO: 55419 - DNA, 2958 bp, Bovine  19866880635070
  misc_feature (1)..(1): n is a, c, g, or t
natctgttctggaaggtctctcatggcatgtgtattctgaggttgaagattcaggacatgctgctcaagaaaaacacatctgacttgattaaaagtgagcatgtgagcacaggttacccttttacctttaaactattttttttattgcacaagtgacacatgagtattcctgtacaaaatcaaaacagaattaagacttaaatggttcctacctcctaccctaaccctatcacctccatgctttaggataaaagaaacacaaacagacacacacacacacccaaccccaaattttattcacttcacttctttaggggtttgatctgtccttttcctggtggtttcctgcttttatacacatataaatatccaaagaaactgtatagtattgttttgtgaggttttacaaaatgaacacatgctgtttctgcacactctactgaatgtcagaagctcatcaaaatgagagttgaaagctaggcaactgtattctagcagcactttggtgctgctatgaatttaataataaaagtataagtggaatactgtgttcagtgcctttcacttgcttctgtccttaatatcagttgctacagaaaaaccgtagatcattctttgtaatagctgtatagtattccctgtaataataataagtacaatttattgactgttgacagtttgccaagaactgttcttacttaatcctcaagaaacttcatgaaataagcagccaatactgttcccacttcacaaacaagaaatcttggaaccaacataaaaatgccatgctttatttcatctgctgctagacatttatgatgtttccagttccctactataacaaacatgctacgaaatctccttgtccaggtgtaggtaggatgaataggagcaggcaagagctgagggggaaggtatgtgcatttttagctttaagacatactccaaactgtgatggggtatggaatggggagtgtgctgaaaggatggccagaaaggggtggctgcagggacaaccgagattccaacttcatccacttttaagttgttcctaagaacaatcctgggtagaaaaaggaatttgtcactatttctcctaagtcccctaagccccagggcatcgtctcacttctcttcttttcccccagccctgaggaccttccacccacccagctggtgcatctgggcaccagctgtgccagctttgttaggcttaggagagatgtcaagcccttcagtatttactttatcccaagaacattaaggaaggtagacaggcctccatccttgtgcaccatttatacagatgtcaggctggggatgtgggttcatttttcattctttaatccgcaggtatgaattaaaccataacttgcctcgctgacaccatggcatcaatattttctcagactggaacatggtctccctgttcttgcccaccctttaaaaataaacttaacatatggtgtttgtcttatggcaaaggaatgcaatgtgtttttcttgacatgtgactcaattcaaacactaaggaaaactttgatatttcagaggaggtttgcagttggagggaatatgcttgctaccttccccattaaacagggtaattcctgaagcacaagatgtcccaagtttctcagatgagtaccttaaatcatcatacatgtcatgtagatcctagagtagtactgtagactccatgtgatgtcttaaaatagtcagaaactaacaagtaaaatgcatccagtttgagaacaaccctgatgatgtttatataattttctcaatgaccatacaatgcttgactaatcatcaaacacaccccaatgtcacaacacaaacagacagtaaaagtttgaaggcagagacaacattaaaatacagacagacaatgatttttaaaagtgactgaacaatcatattgggcacaatgcttaattgctactagagcctttctgggtctttgaatcagtttctctgagctccctgctcctttctcctcactgaaaagcatatatgctatatacgatatatgcatgcgatgttgatctaaggcttacataaagaaaaagcaaaattattttgataatttaaaatgctttttatcatcttcagaaagggtaacaccataatgtaagccagcacttcatgggccctgtcttgagcagtatcacattgaaagaaaccagaagtttaaatcaatctaatgttaactcacatctcttgagaaaccttaaagaagatttacttcctaaatgaaagcagcatttcctcacagatgctaactctctcacaacttcaagctggctcatgacttccttcttcctaacacgcactctctacgttctccccagactcttctttgatattcccagatggtagctcagtcttttctgccctcactctttgctcttccaagtgagttcttctttgtttgtttgtttcccctctctagaagtggctctcagagctctcaaagacaactcctcactgagtctgtcttcctcttgatgagcttatggtttcttcactttcacactaatgacactcgggtccatacaattcctcgttgtggggctgtcttgcgcattgaaggatgtttatcagcatccttggcctccacctactcgaggccagtagcactgccccttagctgtgaaaccaaaaatgtcttcagatactgctcaatatctcctaggtggtaaaagcaatcccagttaagaaagagtggattactccaatctatgtattaaaagccctgggagattggggaggagtggctttgcccagagcagtggctaatgccagagcttttcatggtgggaggggaagggaaataaatgaaaaatatatttaataatgtgtgtctttattatagtacatgatccgacactgtggtcaggaaatgaaaatgactcaaatatgagttaaaatcacatgttctcagtcatcaagaca

SEQ ID NO: 55420 - DNA, 950 bp, Bovine  19866880675386
  misc_feature (1)..(1): n is a, c, g, or t
ngtgctgagtagtattccctatatattatgcaccacatcttctttatcctttatctattgatggacgtttaggttgtttccatgtcttgactgttgtgactagtgctgctatgaacatagaagtgtgtgtatctttagattagagttttgtctggatatatgcccagaagagggattgccggatcatatagtaattctgttttcagttttctgaggaaccttacactcttttccacagtggctgtaactttcctactgacttatgattgtagattgtatcttcaacctatccatctatgtcagcaatgtgctagctagatctgcatcaagactacctatcctatttcaatgattatctttttattcttgtaccagtgctacactgttattataatttcattaattttcaacttttaatttttattgtgagaaattttaagaatatacaaaagagataaaattatatagtcttgtgtattcatcaaaaaacattattttaaaagcatgatttagaaaaagcaaaaatgaaatggcaaagaaaaaggagagattaataatcctaccattacatcttgttcacttatgacttagtgtctatcaataaaataagtataaactaattagccccctgtaacatgataaaggaaaagcagttgttctgagaatactagctaaggagagccagtgacacaagagccagaacaaagactatatgaggttctatatgaggttcttatattcctgaaaggcatggaaaaaagaaaagttgtataagaggcatgtgagttcataagaagtgatgaaccttttctttacatgaaattcaaagaggaatgttttatttaaacagcatggaacaagcgggcagtgtcctccaaagtaggactgtagaagctaacaaagcaaactttagattactttttctcttctcaacttggataaaaccaaag

SEQ ID NO: 55421 - DNA, 1076 bp, Bovine  19866880729427
  misc_feature (1)..(1): n is a, c, g, or t
natggcattcttgaggcaagaatactggagtggattgccatttccttctccagggaccccaggattgaacctgggtctcctccattgaagacagattctctaccatctgctccctgagggaagcccaatggatgaagaggtaaatgaaatgtggtatatccatacaatgggacattattcacccactaaaaggaacagaaaattctgacacatgctacaacatggatgaagcttgaaaacatactaaatgaaacaagctagacacaaaaggacaaatattatataattccacttatatgaagtacctagaataggcaaattcacagacatagaaagtataacagaggttgccaggagcttagagggtgggggagaggatgctggggagtcattgtataatgggtacagaatttctatatgggattataaaagagttctagaaatacagatactggtgatggtgtacttaatgctaaatgtacttattgttaatgtatttaatgctatactaaaaaatggttaaaatgctcaatttgatgttatttatattctatcacaattaaaaggatggaaaagggagaccatcagccaaatgagaagagacagtgaagcaaagggactttggatttgattcagattcttatctcggctctgggcattttatccagataatcaccctcattgttatccattccaatgtatacacagacacagaggggataactttatagagacactactgaaatccatcaaatgtttatcttctcatagagaataaaagttattaatgttaaaaaccattaaaaccattttaaaacactaaacttccaacaaatcctaagcaatacaatccattaagatgaacgaagtccctctgattcttggagaggggctcaccacagtgttactatgactacagtgggtgttgtaatgacccattcataaatgcaggcaccccaattattggttcatccaggcatgtgttatgggaaacagaaatgtgcaaccttgacctccaaaatgatgaacccttgccaactcaactgaaagatcaacttgtagactgtatccagtga

SEQ ID NO: 55422 - DNA, 967 bp, Bovine  19866880741768
  misc_feature (1)..(1): n is a, c, g, or t
nctgagtcacaccctgtcctcactgcagagtcacggttatgggagaggaaataggagtgcttactcattctagggtgcaagggggccagcttctaggagccctgggctccctgtcacacgttaacagtggctggttggtgtcttcggcacacgggcttccatggtatgtctgtgcttcccaggacctcctactgagattgtcccaggagactgcctggtgagggctgtggggggtgcatgggtagcggatgctctgaactgctggcctcgtctctttagggacctcaatcggaatcggattcggctgatcgagggcctgacgttccaggggctcgacagtttggaggtgctgaggctccagcgaaacaacatcagcaaactgacggacggcgccttctgggggctggccaggatgcacgcgctgtgagtcagagccaggcgccagggcttcagcagggccttgagtgatcctctagggcccagcccctgccctttgggacctcagcgagggctctcctctgtgtctttgggatcttttgctacccctgtggtgttatcttgcaggctaggatagtctcttgggggagtttcagaggatttggtaaagggagcttgttggtgaggatggaaggcaggggctcctttgtgggggctgttcctctctcccatttgcactccccgttactgaatgcacgctcaggtgcccagctcacagtgcaggcaaacagtgctctagcgtcagactttggaacagagaaaggtttattacagggccgtgtgaggtgggtggctcatgccccaagaacacccagagtcccaaaggctttcaggaaagtatttttaaccgccaagtgagagaggagcatggttgcttgttacaaccaacagccctggtgtaggaatcccttgatcttgcagccatccattgaaggtcaggtcctgatgttcagtaacctaccagacaaaa

SEQ ID NO: 55423 - DNA, 1253 bp, Bovine  19866880755377
  misc_feature (1)..(1): n is a, c, g, or t
naaatgagtctactttataaggttgtgaggattcatgagggtaacaaaggggaaggacttgctgagcttatgacccatggtgagcccttgagaatggtggttgctatttttcatattctgggggcataatctgggttgtggtgatgctggtgtgtggatggggagtatttagggactgacagtgtgtttatgaaactcaggctcttttcaaagctctggcaggtaaaacctcaatttctgcatcagcttttctatggcaggacagccactccttaaactatgaggcccttgggaaatcttgggaaggtgctgataggatgtctctggtcattgctttcagtgcaaaatatttccactgtttgtaattattctgagagatgcttcttgcaaaatgattctgaggctctgtatttgaaatgttcttatttcttttttctgacatgatctttagtaaccccagcttttcctggtgatcccagttctacttcctgtgggcatggagtgaaaattctgatggctgtcccagtgggaacctgatgagactggcctgcttgtaaaagtggggtctgcatgtgcaaagtctctacattctgcaacttttcaactgtctgaaaatttcagattgttgaaacaacttctaaaatgtaaaatgtgaaaagtatctcataagagctcctgtccatatttaaaatacttttgggaactggaacattcctctgatttttttttaggccaagaaagaagttgtgtcttcgattatgatgttttgtttatttaatgccatccatctggttgcttgtggatggccaggtgacttctgcatgtgtgctctggcattttctggagtgttaggacagggagtcctggcgtgctgcaattcatggggtcacaaagagtcggacacgactgagcgactgagctgaactgaggattattgttttataaaaataaaatgcaacttttgaggcattttaaatgtgctaaacaaaactggttacaaaaatgtaaagcctttgtccttttaaacagatggggggaaaatccatctttttgctcttgcaaaaagatagtgatacatctaaataaacagggtgaaaaattctaaagtgaatttctttcagggaataatcttaaaatatttataggctatcagttctaataatttaaaatctcggttgtagttttgcaacttgcacataaatgggatcatttcttgagactgagctattgaaggtcagagaaatccagaggta

SEQ ID NO: 55424 - DNA, 2025 bp, Bovine  19866880801423
  misc_feature (1)..(1): n is a, c, g, or t
nttacacagatggttgtttacctgagtccccagcaagtggcttctgtgactcattgactgtcctctgtacttccttacacagaagactgagcgaatttatgttcatgtgatgttctgagactctcctgttgtttaacaaggtagttagccccaagcagtgttctctttgcctccaaatagattctggagaaaccttggccctgactctgacagtgacagacacctaattcaaaaccgtcctggacttgctttgtgcttagttgctgtttctgtggagcggagatacatttggggggctgcttctcattagcttgtatttcacatattcagaagttacaaggtcattaccacaggaggtggaatcacacacagtcacttcatctataaaagcagtctccacggaacacaggcatgtggggccttgtcgtgtgtattagctgaggaggggcattttttacctgcaaaaagccgcagggattgcataaccaagagcagacataaaacacagaatctcagtgctgtatataaaatggaaagaaagccacaagagaaaaataggattcatcactgatcctgggctctaagttgtctggatagtttatgatccttcattagttattcttcacagcacacttaagggacaaagtattgggttcattcagaggaaggagtataaactttgaatcagacattttagcctttccgatgcctcttccatcccaccctgcaagaatccctggaaggttgtaaccctcaaatgatgggagagcccagattaatggaaaggttggaattttctgttgacaacttgcatctgttggtaataggaattctccttcagagacctaaagaaaatagatctgactgtggttcattggagttgaggatgtttttattcaggcctccaaccattatgcttctagatttgggaactaatatttctctttaggggattccccggtggctcagcataaagaatcagcctgcaattcaggagacacaggagatgcacgtttgatccctggatcagaaagatgccctggagaaggaaatggcaacctactccagtattcttgcctaaaaagtgccagggacagagaaagcctggcgggctacagtccaaagggtctcaaagagtcaaactcgactgagcacacacatttctcttcaaagacatactacccctgggttgtttaccattgttcccagtggtggaaactctccctgtggattcagtttttaaaaaaccaatttgtcaaggtatggaatagtcgagagttggacaattacttggctaacatgacctctggatcattcatctgaagtttttgcataagctgttctcgaacattgtttcacctctccactttactcttcctggtaaaatactgtccatacatgtgtgatctggagacctgtggggtgtgattgtctgagagtggagcaaaatgaggtctgttctgaaggctaacctcagaggtagccattccagggagccatactgcctgtctccaaattaggtcagatctgaagaaccagtaaatagcttcctggaagagggccaggggcagagcagactctctgagctctggattgaatcaagggctttatgagtaatttggagtattttaggagagcagaggcctgcccatttgaggaaccaccctccccctaaatgggggtatgttctgactcaaaggaaaattaactcctgttaactgtgggtctttaaaatttcctcttaacgcctcagcccatcaactcctgctccctgagcagaacacacagctcggcgggaggggaggacttggctttgggtggagcagtagagtttcattcattcaaaacaccaagtcatttcttagttttgccaagtatttctcatgtatgtggggtatttaatgcttctaagtctctgtttccggatccttttttttttttttttttttgagtaataatagtctactttgtagagttaaaaaatgaaagaacaagaacagtgtgtttcctagtacataatctgta

SEQ ID NO: 55425 - DNA, 1927 bp, Bovine  19866880994695
  misc_feature (1)..(1): n is a, c, g, or t
nacaggtagttggacacgtggatagtggctggtgcccctgagaccctgaagtcctagttttctgtaatcttgattagtttaagtatgaatgtcagggtcacttggctgggtgctgctggataggagagcaggggtttacagaacagtgggggatttctcagctatttgaagacttagctcttctcattctgtgaggtctgggtaggggtcttgccaggaaaagggctcagcaagcagattattgccgtgcactgttgaaccctttgctcttcagctgcagataaaacctgtttaaaacttgagccggtctctgcggaggggcctctggcatgttgggcaaacggtgggccggacagtcatctctcagcagattagcagaaagagtatctacggctgggctccattgttggaagagtggtgcgccctttgtgcaagtacaagggaaatttgtgttatgacagtggctgacaaactgtttaatgaaagctgcagttggcagtaactaaattccctaaggtttctttcctctgcgctttggtcctgaaaggtgcagaagtgcttttgacagcatctgtcctgctgatagatggattgttttgacaggagaatctgaaaccttcaaccaataacacactcagatgtcgggcctagtaaggctgaccatgtttgccgaaataagtgagatgccttagacctgtgtgtctgtcagctgccacctgagaaaaaaggtctcctaggtaaaagtttttcactaattaactcttaaattgttattcagacccttctttgcacagttcttggaccaaagcatatggatatctttcatcttggagaaatggacgttgtcagaaagtgtggcagtcaaagagtttaaaaaaaaatctttatatgttatgccggggtgtgggtgggggatgaccatgtacacagcagcatgattcacaataaccgaaagatggaaccaaccctaatatctatcagcttttatagggagaaacaaaatacggaagatacacgcacacacaggtgaataatggaatactattcagccacaaaaaggagcaggaacgcatgacacgtgtcacagtatgggtgcaccttgaggacactgtgctgagtgaaatcagccagacactaaaggtactgatggctccactcgtgtgaagtacctctcaagtccaagtcacacagacagcatgtagagtgaagggaggtagccaggccctggagggaggggagaatgggaagtcagtgtttaatgggtgatgagtttcagttggaaaagatgtacaagtgctagggagggagggatggtagtgatggttgtataacagtgagaatgtactttatgtccctgagctgtacacgaaacgtggtcaagatggtactctataggttatgtgtattttaccacaataggaaaatatttatactgagagtgtctctcccagagatgagcaaacaagaaaaatgtctgcggattttacttcagattgtgcttgtcagggagaagaaagtaaatattttccctggtttttgatagagcagttggtaatcacataaaagttcagagctcgagcttctcttggaaatgaaggagacttggtcttcacccgcccttgttttaggaaccaggtacaaatggccctttaggtggcaggcaagtgagtggacacggctgtgtcagcctcattccccgctttgtaccaggatttatttttcagacttaaaagctctttgtcccaaagcagtgtcattccaagggacctgagcctcagctactgtattctctctgtgttggtgaaaggtgctgagagcagaattactcttagaggcagtctgggttggcgatacgtggcttttccagttgatcgagaatcgaaaaatcgcttcatccaggcagaccaagtgaacgcttagatttcca

SEQ ID NO: 55426 - DNA, 2803 bp, Bovine  19866881038873
  misc_feature (1)..(1): n is a, c, g, or t
nggggccatgaaccaaggaacatggcacctttagaagctgtgaggggccataagctttaagatggcaaaaaatctgtaatctcagtcctgaaactgcaaacaactgaatttggccaacaaggcagaagagcaaggacacaaatccttcccaagaaactccagagaggaacgcagccctgctgacaccttagtctcgtgagagacgtggcagacttctacattccagaactgtaagagaatacatttgtgctgtttaatctatatttgtggcactcttttatggcaatagtagaaaataagtacagatctcaatgagtgagtgatatttactgagaagcaggagctgaagacctctcataagcttcatctccctttccgccacagttctgtttccctgctacagggaaacacggcttcttgtcctgatggggtctctacccaccgaggtgattttgaagaagttagccaacctctctgagctttggtttcctcctctgtcaaatgaggagactgagcaagaacagttgctcccaacttaattattactatttttaccatgacatgcttcatagagaatgttcccatccaccaggcaaggatggacataatctaagttggaagaaatttccaaggttctagagataacagtcttccttcgccccatcaagaaatcatctcagaatataagtgatgtctggacagaataacctcagatttactccagtttactgagctttaaaggtagctttaaaggtaggcagtttatgtaagtgctctcattttacaacagaagcacagaatttcattagtataacacaagacacaaaactgatcatatattataaacatcaacagtgaattattactgctagtgacttcactttcacttttcactttcatgcattggagaaggaaacggcaacccactccagtgctcttgcctggagaatcccagggacgggggagcctggtgggctgccgtctctggggtcgcacagagtcggacacgactgaagcgacttagcagcagcagcagcagtgttacattactaatagtagtaggaacactggattagatgttggctacactcttcctagtactgacattgaacagagactgaagaatggcctgaattagtcaagggtgaaccacttacagttaagaaggcaggtggatagagaagggaaaaacaaagttttctaacccttaaaaaaaaaattcagtctctacataccctctgccttcccatcacaccaaacaacttgaacacatccttaacatggtaatatattattagacttataattatttaattaggaaatgacacccaaatgcaatcttcagtttgtagagggagcacaggctgagatcgtccagcaattcttaatgaatttcctactgaacaagaaagagtgaaaaaatggtagaaaggaacccagcaatatcgacaacacaggcctgagttgcagtctatttaatgtttcatgttgaacagctgtaccaggaaaagttctaaatctgaacatttcaatattttcaaggcaattcaatttgagttaggcatcctgacagagcatgtgaattcctagaaaaagagacaagcagttgctggaggagggaggcccttatgttggggacagtgtaaaagtgtgcctacggtgctgggtcctggggtcagacaacccccgtgaatacatcctacttctgtcacttactatgagtctgacatcaggtaagatatttatttctctcaacttcagtaacctcacctgcaagatgagaatgacagcactttcttcacattctgagggtttagactgatgtctggtagatacaaaggactcaacatcagctctcactcttgttaataagaccacagatacctcaagaagaaagctgacaagtggactaggttgtttcttttattaattaatataatgctatgcattatattcataaaattccttgcctgccttataaaatattagggtacttctacataaaattccaaaccctgcatctatgcttttaattaccttttggaattctccacagcctggctttcatgtcatttccattgttaaatattaatttttggaaaagttgaattgagcaggctttttgaggacaggatgacacagggcactcctggccccatcctcagagcaagggatgtgtgagtcgttttcaccgccctgcaccctggctctttttctgtcttaaaaatggtcctgttacagaaggtaggtcggttgccaggggtcaagtggaggaggggatggggaatgactgctagcgagtactaggattcttccggggtgatgaatgctgtggaattagatagtagtgacagttgcataacttcgaaaacgtactaaaaaatactcaactgtacactttaacgggtacttttatggtattcggattacagctcaatcaaaaaaaaaaaggtttttttcttcttgacacacttcctctcctgtcaaactcatacctgtcctgtgtgactcaatttagatactttcttctcccccaaggtttttatatgcatggcctatagttactatgggcttccctggtggcttactggtaaagaaattgcctgccaatgcagaaggcgtgggctcgatccctggattggtaagatctcctggagaaggaaacggcaacccatttttccccccagtatctttgcctgggaaatcccatggacagaggagcctggtgggctacagtcctgtgtgtgtgctcagttactaagctgtgtctgactctttgcaaccttgggacacgacttagcga

SEQ ID NO: 55427 - DNA, 1792 bp, Bovine  19866881107750
  misc_feature (1)..(1): n is a, c, g, or t
ngggcaaaatgtttgactttctgagtttcctttcctcatgtgtgaaatgaactgttgagataatcaaataaggtgataactgcagaacaaaggttagcctgcctcttctacaacacagaatgattcacaaggaagtttttattttcaactttgaaatactcttctagtatgtatcatgtgtgaaattcccttaaatgtatttcaaatattactcatttcaaatgttacttattttatcattctgacaattttatgagttaagtactactattattgttattattagttatcatcatcctgttctacagatgaggaaatagaggtgcagagacattagcctgcttgccaagcttgtaaatagactaagtggaaggactgagacttgtgcccacatggctggctctagggtgtctagtcctcaaacactaagctatcatagaacacagtctgaatggagacacgtgggatcagatgctgtctgccttcttcactggtgcatcctgagactgcccagggggtgctaccacatggtgacagacagcccatctgtctctcagcagcctgacatcaccaagaccctcccacatcctagtccgctgtgtttcaaatgtttgattctcactcaagtctcaaaaccatcctgtaagttgaaccaaaatactttcttttcccacctggagaaatcagaagacacacacagagagagcttaacttctcaaagtcatacagctaatcagaagtgtggccaggatcagaacccctggattcccgctttcaaaaatcagggtttttccagtatatttgcaggttcccaaatgagatcattgttgggtctacattttttcacagagtggctccttccttcacttgagccagttctctgttagataccacctcacagtgagtttccctgacctccctacataaactgtacccccctcacttgccatgctgttactctgcttgttcttcacgtattagtatttgacatcatattgcattggtggtttaccttctgtcttcccactgaactggtaggttctaagaggcaagggactgtctgtcttggtcacagtgtaccctagggcctagaatcatacagagaacagaccccagaaaaaaatattgctgaataaatgaatagacatgtaggagattccaataatagtttgttattaaccttattatgattagtagtatctccttttatcagttcagttcagttcagtcgctcagtcgtgtccgattttttgcgaccccatgaaccgcagcacaacagttaggtaacccagttaagacaaaggtttatttcctaagacaaaactgatgggaaattgagtgaacaatgttggtttcaatcagatcaaagcacaaattccaagcaacaccattaataaccaggagaccacacacttgggacaaggatgtcctccaagcacagaacagccagcatcactgagtcaccaaacacggccctggttttcactgtttctaaatcctcctaagctcacaaacagccctctgctgctcatcgtaatgtttttaattcatctctcctttttccatcaggaaacacctgccttggtttactttttatcactttatttacatgttcactgaaagaccgaagcattgattttcctgagatgatgacagtaggatcgataagccacaacgagaagtatcaaagggcagcttcttcacccctatagcctgcggcagctggtgctgcaggcgaacagcctttgctgatacccagccagccccggcgattctgaaggggcaggaggca

SEQ ID NO: 55428 - DNA, 1265 bp, Bovine  19866881109027
  misc_feature (1)..(1): n is a, c, g, or t
naaaaccaatattgaaattatcaagaaccagataaacagatgtcaagtagtatgggtggatcaaacatattattttatgtgactatttatgaaggactttcacctttaagcctttaaactaaaatacatgctcggtatagctaattctccacatcccgtctctcacactcttcatttgttacttttgaaaaaaatcagtgaaattttccgcagagatcagatgtgaagaaatctgtggcagggtgaaattttatagtctggatgctgcctttttattaaggtgtcatttcctttccttaagaagaatgaggctcttttagggtgggtctccgtgaatgactcaaacccttttagtttgggaagtccaagtaccaagataattttcacgctgggattacttgtccagatggtttgagcgcagttttcttggcatgcttataagaacacaggaattttcaggggaaacaagagaacatagtagggaggagaagaagtggagaggataagtgtggctaagaagtcagaaaaaattttggattccacaaaatggcactggttgaactggaatcagttcctagttatatttggcaatggtagccctctgccttctccaagagcacagacttttctttgtcatagtgggaattacaggactctcctaacagaggacagaggaggaaagaaccagagagaaattcacagtgctgatggaggtaagcatggaagggtagcagagaacctcactagcaggaaacctgggggaactcctgtatgcctgcatggggcactgagtgaggcagagaaggaaggctgtgaacggagatatcatttcaaagagcttcttagaccccaaaacatagtatgggaaggagactttctctgatggcttcagcagtcatagaactaaagtgtggcagtaggaagaatgctgagatgccccacaagattcccctagtaggcacacactatctcctggtcaggcagtcaactactgttctaagcactgctgtgaaaaattttgggagatgtaatttaggtcccaaatcagctgactttaagatcaggttttggtccagcaggatctaagacactctacatgagtcctttaaagacagagtggcatagatgagagtcagagaggcctggaggaaagcaaacaaccatgtttgtgaaatgcccatggaggtcatatggcaagcagtgcaggcgacctgtaggagctgagggtgactcccaactgacagctaggacatcagtcctacaac

SEQ ID NO: 55429 - DNA, 1854 bp, Bovine  19866881114254
  misc_feature (1)..(1): n is a, c, g, or t
naatcttctcaaaaagctgtaatgctaagaaaaatacggggacagatctttcaaactctgaggaaaaggaaagagcgacatattaatggtagaattacagactttttctggactgagtattaaaaacacatgagaatgtaatgactttaaagattgagaaattccaattctaaatccaccctgtatatttcaccagtgtgaagtatgaattaagcacataaattatggatgcaggagtgaggtgagggtgtaggcctatggaaataaaaacttgtgattaatacatctgtcagaaattagaatgctatgccagctggtgatttgttttaagcttgtctcactgagagttcatgttgcaaaagatgccagctgttcaattcaacatcaccatttgtttctggtggaccacctagaactggatcttagactcagttctgcatcataagaagaaaatcaccttctttcttagcttgaaagaagtctatgggctcccatataacatgcatggctatggctaggtggaatctttgggccaataaccaaattctacttttatgaaagtaccctatagaaaacccttggtgagggttgcatggctgtttcccaaaatttacttacaacctctaatggacctggcccaggaaactggtcccctcagcaattacagagccccctaaaagactaggtgtgtagtctgatgatttaaattctcagcagttcagggcacctccatgatgtgaagtccccaggcccacatgaacagacttgctctgaaatgacattctgttttctctgcctctgcttgtctttatcctctatcccgataccaggtgccttcctgcctctgtaagtggtgggtttctttgcaacatgactcttgtaaagagcctatgattaattatagaagagacagaggcttggataatcaattgtgcaatgcacctgtttataaccaatttcatgcttgctctcatcctcttaatggcacatggccaatttctcaaaggcttagggtgaatttgcacatatgtccgcagaaaatcctgtggacataacgttagtggcagtggagagctattaatacttgcctacacaatacttaacaaatgacagagaaactctatggaaggaaatttggcaaaattcaccaacattagaaaatgtttcatagtatttgacacagtgttaacactttctttttaccaacgggtggaagaaataacccctataataagaaaaagtacatatacaaagctgttttttgattcactcacattatagcaaagaaatgaatacaaattgaatggcaaatagaggaaatgtaaagtaagatatggtatgtccacttctggaaaataagtagttagcatcaatggtagttataaagaccaggaagcaaaatgaaaacaaaacaaaacaaaacaaacaaaccacttacaactaacgtaaagagggaaaaaaaacagaataaaagttaaatgtacatgtgaattacaagtaataaaatacacaataaactgcaagtaggaaacacattaaacgtttcaacaaaagtttttaaattgtgggtatattggctattttttaaaattttattttaattggaggctaattactttacaatattgtggtggtttttgccatacattcacatgaatcagccatgggtgtacatgtgttccccatcctgaccctccctcccaccgccctccccatcccatccctctgggtcatcccagtacaccagccctgagcacactgtctcatgcatcaaacctggactggcaaactatttcacataatatacatgtttcaatgctattgtctcaaatcatcctacccttgccttttccc

SEQ ID NO: 55430 - DNA, 1158 bp, Bovine  19866881117791
  misc_feature (1)..(1): n is a, c, g, or t
nctgccttactgtttgcgctgtcgttaacacttggctactacgctcggaccagtaggagccaaagttagtaactttgtaagaattattatttctctttttattctgtgtcttaggagttcttgatgtatagcttcttgaaaactggttttaaaaggctgtgatttaaacaaacaaagcaacccctttatatcgaaggctggagtgtttccaggataacccttcagctcaccagggcagagggtggggatggaggtgggactgcgtacacctttcagattcggtttctgcacgcattacactttcattttggtaatcaaggacatattgctaaatttaaggggtcaggaacaagtcaggagctgaaaagagctcccggttgtgagagaggaagacggtcacccctaataaaataactaaagatgcccccagcagtagattagtgaagttttaaatctgcatacatctggaaaatgggtgtaaacgttaagtcgccggccctgtttgcagactggaaggagggaaaaaaactttgaggccagaactctccaaagcgggggcattgccttctttaccgaagttttctcctcccgtacacccagagggcatacttttattccctctccccattgcgcatccccctcctccatcagtcagtaagtctcctttaagagccagaggccgactctccctttctcctcccagtcccccgcccttcacaccttgggtgggaaaagagactggggtggggtggctggagaggcgggaggggcgggatcatggtgaacgctccaatgggcgcccaaattggccgccgtggaccccggcagccaatgaacagcaggcgggggcggggcggggcgctgttgcaaagcatccaatgtgggccggcaggaggccgcgggcggctgagcccagggggtgtgtgagggcgagcggccgggggcggggcttcgggaccggcccgggctgggccgcggggaagcgagcggcgagaggctgattgttcggccgcgaggtctgcggggttctagctaagcggagcagcgtgcggagtccggaactgcgcgggcgcgctctgcctgaggcgctgggacagctaggcgcaccgggcccttggagcactgcgggggtggccgcgtcttccagcccggagtctg

SEQ ID NO: 55431 - DNA, 2449 bp, Bovine  19866881126862
  misc_feature (1)..(1): n is a, c, g, or t
nctctggatgcttctaaacaaatgttttcttataccgcttgccttgacactggagtggatggcaaaaccttctaaggagactcgtctttaatgcctgcaaaccttcttagaaaggggcatatctacttttcaggcctttgagataatttctgttctgatactgaccaaggtgactctttaagatcatttctgcaagaacaaggacattgaacaatgttctgaacctctcccaggcatctgccacaactcattctagaaatcctaaatcaaaaactcaactttcccatttatggtccatataagggtggcacatttctgccaaaaataagtgtagggtctggtgtagaatttccgtttgattcttgaagatgactggccaaataagaaagagaaaggaaaacagtttatgaagaaccccggttagcacctgctccactgtaatgtctgcttcttagctgccacagagttctataaatgtgacttcataccacacatgcatatcgtgcacccaaatgtaatgtgctatttgctgttgtcatatagctggccgtgtgcactctggcatttaaagaaaagcagcttttaaatgttagtatggcatttttcttccagctttttgaatttaatttttgcaactgaggtcttaggtccttatgccacagccaatacagttcattttattgtagaagttgcattgatcttgacagttctcttctactgagttggctaaagaggaagaaaagtgaaagcatgtcagtgtgtgatgttctagctttggaaatgaggataatttaaggacctgttttgaaaagatgggtctccctactctaaggttcactattattgctattattacagtcactttggagttgataacttaaccaaatgactaggaagctaagagagtccatagcctaagaaggggattaaccaaaggaaaaaggtcctaacttaacctgttgcaagcgccctccccaaaatcttcttctaaggacgagcattgtctgtatagaagtatttagtgataatgataatttctgttgtctttgaatacatctttccttttgtttttcacagcaactcagagaaatgggctcattctttacaaatgaggaaggtttaggggtcatgcttacagccactcagatgactggcaagattggtactcacatccagacctttcagtgtggagatttagagctttttcctcacctaggtcactactttctaagaagcagaaaatgggctcattaaattgttaggccttttaagagttaccatgctggcagacgaatagcatcttcaaaatccagctgtctccttcattgcaagagagttcataaaacaggccttttctcctcacttacactgtcagctgtgagacataaaacttcagaatgccttaaaggagtaagttggaattctgatgctgtgagccttttaaataccccattgtctcagaggagagggacaatccaggctttgtactgcagcacatttttcctcaatccccgatccctggaaggccccctttcctcagaagggctgttgtgtttttcctgccacaacatcactgtgacatatctcacacttaaggcacagcctactcagccccattcatggattcctctggaaattaatgtccgctcaccaccaccccctcaaaaaaaaaaaaaaaagttctggctttgtcaaaagagttattggaaatggaacttgtgaaaaaccttactatgtgatgtgaacccagacaataatgttttgtaatagttctgtttgatgtgtactgatgggaattaatcattttagttaacagaattgctctttgttatgtaaacttggtaaagtccgcctcatctgacctcttgcactggggaatccactgttcaaaactgtcatctttctgtgggcagcaggattcttttggcaacttctggaaccaaattaccccgtgaacttgaagttcgtactgccactgagttggatgccaaaccaagcgaagactaaaatactgtaaagtatgtatatccccatgtcccattccctaagaattggttaagtggagtgagcattattttcccatttctccatttcatttgttggtgtctcagatagccaaactctatcataaatgatcgcaaccctagaaatacactatttctagattagatacatttctgttcactgtagatatccagtgcttgtgtatgtataaattgaatccattggagaaaatagttggccctgggttgtatgcttttagattagctctttaaaaagcaaataaagtaggttcccaccttcatcaccacctcccaaacccctgaaaaaggaattcccttaccatgtggtttcccaggcatctctgacatggcttgacccagctcttgcagtctcactcaagagagctatattccataaaatcaccatcaccacgaagacagccaga

SEQ ID NO: 55432 - DNA, 1152 bp, Bovine  19866881149247
  misc_feature (1)..(1): n is a, c, g, or t
ntggaggaaaaaaggtgcaaaatggaactgtgtactttgctgtgtttggattataaacaaatattcacacctgtgctgggcctctagctgatgaagaactcagccgactatttgaaacagacacattttcatacttttcataacttccagtcactttcgctcagattgccaagactgaaaattaaaagacgaagaagaaaaagagcaaacattctgtggataattaaccacaagaggaaaattgctaaattggttgaacttcataaccaatctgtgatataatcatttctgtattcaccaacttgctggaggtagaatacctttaaaaggagtctttacacaattaatggcgctgatagattgctccaacacgtaaagtgaaagagcaatgaatgcatttcaccacaatattcatgccaagtactaaagttggaataagaagcaaagtgaggaaaactaacatgatcaattgagtagaaaaatgtggccaaataaacctcaccaaaggtagtctcttggtctcttgtttttaagtctggtcagctgagtagcatagtaactccatggcatccaaatattgattgggtatccaacattccaaagtctgctgactacatagggacagcttctgtcaacaaacaaataagccctttgctgcttcagtctgtgcagttaagtgaatctttttgaaagatcttcaaaggtaattgcctggctatttttagagggcactgttaccttgctcagtttcctctcagatctgtacagagttatttgctggattttaatttcctggaattcagagttggcttagggactgagttagtttgctcagagctgccaactggtagccagacactacagcagacacagccaatgaggttgttcgtgtgatggtggagcaccatgggtggtcgtcgtgttcacatggctgactcacctgcacagccccaggcaggtccggaagcaactgtgatatttggcgaatgttaaaaaaaaaaaaaataatacatagccattttcttaaatgaaacctgaaagatttgtattagatgtttagactggaaattatgcccctgagtcttccttctttctgtaaacactagttgtggttatcactcacagaaccattttgggtcagtcccaagggta

SEQ ID NO: 55433 - DNA, 684 bp, Bovine  19866881155763
  misc_feature (1)..(1): n is a, c, g, or t
ncaaatgcccataaaggagcagccgcaggaggggcaggcagggtctctgtcaacgtgctgtgtgtcttctcttctccaccgtgaccatggggccaccgagagagggacagtacggactgtggcggcaccaggaaatggctctgatggtacccatgaagcacagcactttgttttctgaatccatctcctgggaaaatttcctgagccttccaggagctgggattctttttcagggaacaggggaaagtgaagacaagcgtgagactcttacttggaaccacataattgctggagcatccccaaatcagggctcttgttaacacacactagagaacgagggggagggggaagagcctcgagtggtgaaagggtttatcgtagctgtcggcaaggccaggaggagggggtcccctggaagggccagtcctcacgctgtctcttaaaaccaaacaacaattatggggcagaaaaacttcaccctgcacgctgataaccactgcttttccatatgcaagaagaatgacacttggagaaaatgtcacattcccaacaagtccaagggaaacttcccctcttatttccaaaattctagttactctctgtgacctgttgaaggggccaattccaaacacaaccctcacagaataccaatgaataattatccacaggaatgtcaggaccaga

SEQ ID NO: 55434 - DNA, 1515 bp, Bovine  19866881174375
  misc_feature (1)..(1): n is a, c, g, or t
nttaacacagctaaggacatggatcatgtggaaacaatcgcccatcataatcaatccgagctggcttcgtatctacaggcaatagtcttattctggattatcaattctgcaagtcagatggatccaattattactacaggatcctataaaaatgtatgttttctgttttcctgattactataacaagaagtccatccaacgaccattaaattggaaatgaatttttttctttcaagctggtatcctaagcccatgtatctgtcagtttatggggtctacatcaaaaccagcagttcatagttttctgacaaatctccatttcaatttatttcaactataattctcacttacctttatttgcaacaacaaaatgcctttctctctcagactgttacacctctcactcactaaattctttccagtctctgcgtcctccctaaaacctcactggaaaatgcgtatgacaaagtgatggatagcacgacattgcatattgtcactctactctttgtttaatgtctagaaaaatgcccagatgtttagatctccgtattttctacaccgtgcagtttagccttcggtaagttgtggagcagcctctgctctcctgacactagttaatctacgaggctgtcaaacatgtcacacggaccgtgaatcactgcctcctgcagaattcgctgaagccccccaagaagtgctcgaggcagacagctgcactgggagccctgcacccatagctcggctcttcgcagagaggccttgctacattatcttcaagataatccacgggcctgagtgaaggctttcataaaaagaaaacgaaaaatttgtcaaaaacaaattggctgtctttcaggcagacacctttttagccggaggtcctccccacacaacacccacccagacactcttttctcaaactagtggaactctctttttctaaacaatgtggaatttctgaagactgttgtttttgcatagttaatattttcacattttcctcccccttcttggtctttcccagtataatataatcctttgcacctgcaaaagccccacagactgctgcctgccaagaatccaccacacgatcttgcctccaggaccagagggcctgtggtagaggagaaagaaaaatacaagttattaaatatttgaatttatcagaacctcctgtgggttagctctggggatgggaacttaagtgagaagctattttggtggcattcctcactgatgacataagtgattttcccaaggacttaacggccttctaaaataagtcaaagaaaccagggggacagggacattagagtgcccaaaggaaaccattttcagggaatacgtgtgatacacatacacacacatttatatagaagtataaaaataaagacaactttaagacaatgtaacatttaaaatacttcccgtataattctaaacatgtaaataccataatacacaaattagtccaaagcagtgtataccaaattccacagttctgttttcagt

SEQ ID NO: 55435 - DNA, 1856 bp, Bovine  19866881322166
  misc_feature (1)..(1): n is a, c, g, or t
nttgtctctttgcatcaggtggccaaaatcttggagcttaagcttcagcatcagtctttccaatgaatattcaggattgatttcctttaggatggactggtttgatatccttgctgtctaaggaactctcaagagtcttctccagcatcacaattcaaaagcatcaattctttggcactcagccttctttatggtttaactcttacatctgtacatgactactggaaaaaaccatagctttcactatagggaactttgttggcaaagtgatgagatccattaccttttaaccaactctccataacttaaagctaactttgatcacaccttgtcatccacatttggcttcttcctatacatggttctccagtgaaaacgaaatttatttgttcctctctgttctcacacaaaattccaaatgctcaccaactctatttccatttgaaatgacacccaaagtaattgttctttgcacaatgtttaagatcaggaaagccagcttccacttataatagaattctctaaacttctgagcacaggatgtcaactctgtctctagatagtaatcaccgagagctctgtggtcctcattcctgcacttttgttgggaagaagaacagcagaatggaaagagcatgggtttgaatcctgcctgtgtatctcaatagttgtgtgtccttgggataagttattggaactctctgagtgtccatcttctcatttgtagaagggtgaaaagaactgtattagattgggaggattttattaaatgagtatctgaaacctgctttttaaattattttctttccaagcaaagctttatcaccagaacagtgaaggaggatcccgtttttcagtttctgcattgcagtaaagtagagagaatggccaaaagcttcagcccttctttgaaaatatttatttaaaatttttaaaagtcaaggctgggttttaaggaaggtctaggaggtctggacacttgggtctgatgaactcagtgagggacacctggctccaaatttttacacagggaggtaactttaaaaacaataaaggcacaccgcctgctgatttctttattgggaaaccaagaattatgtaactccacatcataaacaacctgcatgtgaaatgcgaaggcagaaaaaggacaagtttcatcacggttatgggcattcggagacctataaccacaaagcaagcacaggtgaagaaatactcagttttaaggcggctgaatgccaagtcaaaacctcagagtacacttgaggcagtgtggttgtattgtacaaccctgccttgggagagtgaaagggtagtgcagtaggaagcctgaagggaggatacttttatctgtcaacaatttagtttatggaaagtgatgtcagatcattaacttcgtggccatattgcagcaagagttacagaaagcagttacatattgggagttgatgacgttatgggatgaactgttggctactttttgttgatagggagagcaggtgtataaacatccatgaacttggctcagcgtgaggagtgttttcctttagaggctctcattgggcatcagagcatctttcctttagaccagagatcaggaaactttttctgtgaagagccagatagtaagtaaatgttctcagctttgcaggccatacggtcactatcaaaagtgttcaactgtgctgtcatgaatgcaaccagagataatttgtaaacggatgagcatgactgccttccaataaaatgtatttgtaaaaacaggttgtgggccagacttaggccgtgggccacagtttgctgactcctgttttggaccagtggtctctattttggtcaccccagaccctgaa

SEQ ID NO: 55436 - DNA, 847 bp, Bovine  19866881339577
  misc_feature (1)..(1): n is a, c, g, or t
ncctgtagtagcaggttgattaaaagttaatgacaaatcaataaaactataattacaaccttctaccttatgtttgtaatttggaatacagtaaaatcgatcaaataagatttaatatgtaacaacagcaagaagagtcccatttgtgccatttttattaggaggtttgctgtaccaaatctctaaatccctgtctcaattattttatggctcagttttcatcagacacagaaaaagccctgtaagaagtaaatagaatctgtaattagaccagaaggcttggggtgcgtttactttagtataacagatgctatgacattgcagtggtaatgattttttttttaactttagaatttgacttttcttgggtcttattgtacttatggccttagtcaatattgttttcagaagcgaaagaacattaaagtttcttggctgttgaaagcagcccctgtgctttaacgtgctcacgggtgatgtgtgtggatgggggtagatttttcttttcattcccgttccaacttgggattgagaaagctaggaacacagtgataccatgttttctttttcctttttttttttctggccacaataggtggcatgtgggatcttaattccctgaccacggattgatcctgggtcccctgcagtgaaagcatagagtcctaaccattggacttccagccaatgcccagtgatactgttttctgaagtacttctaacagtacttctccacatagtaatatggcccagggagcaccgactttagaatcagttgcctgggcatcagtttacaaatgaagtttttgggaagtgacgctgtgggtcctgcattttcagcacgatt

SEQ ID NO: 55437 - DNA, 985 bp, Bovine  19866881409925
  misc_feature (1)..(1): n is a, c, g, or t
ntgaccgtgacagaccatcaaatgctcctgattccagggtgctgatccggttgcttgccaggttgctggaaggattcaggagagaaaatgcaggggtcagtaggaggccttccttgtcctgttacagacgccagacctggctgagttgggaaaacaagctacaacacacccagcaggctgggtttccaacgagacatttgtcattctgaggctgcaaagcccatcttcactcccagcctcaggtattaggactgtcttcttcagacgtgacagaagcctggcttgttcgagcccagagctcaccctgctttcagccagggtgactaccccaggaggaagtcaatgacctccactccagctgggccgctgcaggaatccctccttgccagctgctacccaaggggcagggttcaaggttggtgagaagagcctcaggaagcagaaagtccactgtgaggcaaggtcggagagggtttcacaatttggggaaacggcctttaattctgaagtggatcccattgtatgacttctaaatgtgcataaaacatttcattttaaacatttcaaatgtgtcagagcaacattctagtgaaggagagctgcacgaatggttcccagcggggaagagggaagggaagcggggccacaacacttctccttccaccttccctggaccgatgctgcttgttgtgcctttaacaaaagagctaagaccagagagaattttctacatcagagctgggaagggaaggaggcattcttcgtctccatccggcagaggcccagtacagggcacgtgaggattctttgcaaacggagctggactgtttgttcttaacactccagattaaagaacagtctgtgtgatgaagatataccggccagcttctgccaaaacacagagtccccctactttcgtgcagagagagagaaggtcactgcgaggcggttcagcaggggaggtgtttttgtcccaagcagggtg

SEQ ID NO: 55438 - DNA, 875 bp, Bovine  19866881420038
  misc_feature (1)..(1): n is a, c, g, or t
ntagtccagggatccagtagacccaaaaggaaagctcctcatccctacaaaggcaggtctggccctggccaagcatctcctttgtcttactttatcacccaaagcagtcacacactggagtcaagacctccacttatctatgaaaggatgtcaaaagaacctgaggacctctttgaaataaataattttctagttactttgttccatacctgatctctcaaagactatgagtttgcagggtggtccatttagtggctgccatgggattccctagtggctcaaatggtgaagaattcgcctacaatgcggaagacctgggttcgatccctgggttggaaagatcccctggaggaggccatggcaccccaccccagtattcttgcctggagaatccccatagacagaggagtctggctacactccatggggtcacaaagagatggacacgactgagtgactaagcacagcacatggtgtctagcacatatcttggtccataacagataaatatgtttagcagattcttcttgccaaatgtaaccatacctaattttatatccattccagtgagtaagaaaagattgggatgggaggaaaagcagggatgggaggctggggggacgggggctcgaattgtttgcttgtttgttttaaaccacctaaagattttgaaaatgaccatgtgatacatagatgaccatgttctttagagggcagaccatgggcatgacgatagtatttgtgacgtgaattatgggtaatcagtttggggttatattgaaccaatctttctaattggattccaatgaagcacctgctttctgtcaaactccaacttgtgcataggcaagtcacacagaaacccatttacatga

SEQ ID NO: 55439 - DNA, 807 bp, Bovine  19866881507007
  misc_feature (1)..(1): n is a, c, g, or t
ncttgcttagaacttgtcacatagcagatctccagaaatatctgtgggacgatgctggaatgaatcctgtctcacgtagtgtgttgtaggcatgtttagtaaatgtttggggaatgagccaatgtatgaattttgacccaaacttattctgagtaaccaaactgcctgaaaaagcacgggagacatactcaaaaactgaggccaactgtaagtagatttttgaacacacagcaaggtagtggctctattaagagtggaaactttagctgtgaacctagaatatgtattctgagaaatcgagtgaaatgttctgtctagttctatttcagaacgaacttctgatcctgaaagttgcattctacagttttcctgaaacatctgactctggtatagatcttgttaaaagagagttaaataactcccatccaccccaaattggtgtacccaataatgtgtgttttaaagcaggcttctcctttactagatactttctatctcactctttctcatgttaagtggggagaaaaaagttttcgtcttggtcaccatgcagcaatttccttgggaacaaaaatagtaagtgtagaagggaaaagcacaaagccccttcttaagtgggtggtcaataccaccttaattctcggttgtaatcctcacaaacccaaagccctgtgaactattaaattactctggggatttcctctgggctccctgccccagctggtctcacgatgttcttggcaacaggcagattggggtaatgttctctgaacacctgtcacctgctatgtataataatctaaatag

SEQ ID NO: 55440 - DNA, 700 bp, Bovine  19866881520605
  misc_feature (1)..(1): n is a, c, g, or t
nggtgtgtctatccaagaaactgaagactcctgaaaggcaactgttaaatttttggatcaaacttagaattaaatgaaagtggacatgttatacatttcctcccattcacctagaaagatggcctgattgattatatttaaaataatgaaattattattgccccccataagttacaatattaaagtcttacaacctccttcttggtgcacacactttttttattttccaagataggctcccatgtgtggttaaaaaaaatactagttcccttccccttttcccatctctgttaattttattttttctttgccctccccctacacatacagcatgataaaatagagtcagtgcaaatgtaccatttttcaaatgaaaaggaaatctaaagtctccaaagagatttggtaagcatttaggaaaagcgtatgaaatctcaacactgacaaatattccatacccagtcctctttttagtcaggggacaatgtttctacccacgtggtcttgctgcagaacaaaggacaatgttcttcctaaaccctggtaaaacagagttcaagtgtatcacagtaagcaatgatctcattatgtatattgtacatgtgaaggaagcaccagatatttccatctgtccatctttatctgcagcaaattgatttcacaacttttccggatgttaaatgccaagccccgtataaaa

SEQ ID NO: 55441 - DNA, 723 bp, Bovine  19866881598268
  misc_feature (1)..(1): n is a, c, g, or t
nagaggagcactgtcataggaaatcacattggtgtgaaccaaagcctcacatgccagcagcgttctcaagatgacagcgtctatcacatgactcagaattacatccctctccccttcagcccatctgtgaccccattctcagagggagacaaggaccaagcgggacaatgtttgatctgctgagcttcccagagcacaccctcaacccagaccagcttgatctttcaggaacagaacccacacagatgtggtccacacgggccctcactgtgcctcactctctgcaaccaaaatacatccaatcctgtgtgtgccaaaggagctggctacatttttcatctcagctattaattccactgccattactgccaattaacaagtactacgaatcgagagttcaaagtctcttaaggggcccagtatcacattaagtggcaactttcttttaagcttcctccagagacattccaatcaatactaagccagagccgagagccatttcactgtcaactcaagacatttatctaaataaaagtcaaaccacccttgaaattaatggtacatctgtgttcggggcacagcctgaattaaaagcaatttgtccagggattatgttaccataaaaattgaaggtggtaatttttaaaccacctattgaagtcaagtgtgagcttgtctgttcttgggagtatttacaatgagatacttacacagaaatcaaca

SEQ ID NO: 55442 - DNA, 1149 bp, Bovine  19866881764337
  misc_feature (1)..(1): n is a, c, g, or t
nattaaagcaaatcacccagtggtcatgtagttattgctttccggtgaaatgcaaacacataagccagaggcatcaggggattctgtcacctttgaaaaatgattcgttttttgtgggcttgtttttccctcatgggaaacctggtaacatttcagagcctgaaatccttccttaaactaaaataacctgttgaagataaatttaaatctaaggtaaaagaggagaattttttttttcttgaatttagaaagatgtctggtcatgctattgcaatttttttaaaaaaagaaatcataattggatttcactgagtcacaatttaccctgaaattgcattaattaaagacatttaagactggtaaataaacttactaacacatctgttctagactctgtgccatcattaatcaatcatagggctccttcactgggcctcaaaatccttctcaacacagagcaacaagagaaacctaactgccatttcttgttctcagtgaataaagaggacacaccctttggccattttaccagccaagctaatgctaaacttatcccttcagtgtaggttctagattttataggtgaagcaagttcagggctcatctcagaagtttggtaatacttgctttctgtgtttccttttaacagataatctatttttcacttattctgcctctgtcataccataactgatttcctgctctctttataagagttcaaacacaaaaataatatcctgtacaagaataaggaaattcctagcagcagagaagcaggcagtcagataaacgaaattgccttattttccatacagtgaacttagtggctgtagtccctgctgaacaaacataccagaaggtgagaagctctgtaaacagatactgtgaaagttgtgataacaaccagcaactgatttttcctcagtgaagagattttccatcagattgcacttgaccttgagcactgtgttactagccatgaagtaatttagtggtacttattacagtaaggtcccttttaactgacattatcagggaattagatgccttaaatgagtgaattggctagatactaagacttgctccctttacaggataaagaaaatctttattataaccggttcggtacttatttttctcagatgtatg

SEQ ID NO: 55443 - DNA, 806 bp, Bovine  19866881890102
  misc_feature (1)..(1): n is a, c, g, or t
nccctgctctgagaatgagtccaaaggttccctaaggttctcatctactttccgaccacctagggtcccttccctggacttgatgagagactccataaggcccacagaggagggggatggtgaagagcaagcccctggcacagggccctctgtagccacctccaggctggcaagcgggtttggcaccctgaactcccacctccccccagggcctccacaggtgctgactcctagccaggcacatctgggtgctgagtcagacttgtgacccacttgccaggatgagaggatgaggccaacttctcgggctggtctcctccaacaatgagaatcacaaggccgatgactcagcttcctgcccctagcttccaagggcaggtcaccaccgggcaagacaccccacctggtgaccatgcccccgtgccgctccggtcggccctctctgactttctacaaggtctcccacaccttcctttccggaaccctggagacgtgggccaggaacaggacgggatgctgctcctggctcccgggagagccaacggggcagggagcttggaccatggagtgcgtcgcttgctctgacctttattttacagcagcatgagcagagagctgcaattcggaggccggaagggcctcctccttggcatcggttcttccctattcgtcctgaaacatccgggacctggggctgcagctttatgtgcctgtccccctgctccagtcccggctgccagttttctctctcttctctggcctgtaccatctgaatatcctggccatgtcagtcagcaccaccaggg

SEQ ID NO: 55444 - DNA, 644 bp, Bovine  19866880503495
  misc_feature (1)..(1): n is a, c, g, or t
ngtggtgagggcggggcacgttcagttaaccctgacaccctgctcaccagggtgatggatgccctgctcccaggaactgtctcctcttgacaccaggtttgactgtgagccagagagaagccggtgccgcttctgcaaaacatgacatgaatccaatttcctcctgaccttgtcttgccgtgtattttacttctcttgttttatttatatttctttattgccagaagctttttattttcaagcctgaagttgccacccactcctacaaaaaaaaaaaaagggagtcaaaaaggttagatacaggcaagagttaggaaatgaacctctgggcactgtcctttttttgtgattttgaagggggctgttttgatgttgtttttttttaatatttatttggctgcacccgatcttagttgccaaataaataaatattttttttaaaaaaaccgcttcctgcaaaaatcaccaaaaaagtcttagttaccgaatgtgggatctttgatcttctttggtggcatgtggaatctttttgttcttgtttcagggtgtggaatctttagttgtagcatgagaacttttagttgctgcctgtgagatctagttccctgaccagggactgaacccaggcccgcctgcactgggag

SEQ ID NO: 55445 - DNA, 1774 bp, Bovine  19866880611286
  misc_feature (1)..(1): n is a, c, g, or t
ntccccctggggagggagcgggccctggggtttgtctcagatttcaagagactggagaaggggttgaggcaggggcagtggctggagtctggcccacgggctggggtttggccctcgcctcctcgtccgccaaagcctcgcggtactgcgccggccagtccttggggtcctggttgtacattttagccacgaacttaagcaccttcatcttgctggtctccaggttgctgcgcaggccccactggagcttatagtccacgggttctgtgtgcaggatgcaccagtaatccaggtatcgctgccgcaggacatcctcggtaatgagtttcttggggtccctgaagacaaggtgcttcttggtggggtgtacccctaggcgccgcaggaagtcccagatctcggtctccttgatgctattgcctttcatgaagatgagcctcagcaagatcatgaggagcccaatggtgggcatgccctggtcgccgtgcacctccgcatcctcttccaccaactccagcgtgttgaccagaatgtaggtgttgctgcggggctccagctccaccagccggtacccgaacactactccaggtgcttagccgcccgccacagcagctctgggagcacgtccttgtcgttgccgactacatgccgcaggatgtcagtgcggcggatagggatcttcctctgatacttgatcaacaagaactgcaccagctccgccaccttcagctccagctgcttctgggagcgtggctcgggggcgggggaggcctgggcctgcagctgcgccgcagcgccacccagcccgcgagacgtgctcggggcttcctcactgccgccacccagctcccgctagacctgggagctggggcagccccggctctttggctttggccacatgttgcagcggcgcgaccccaaccgcgcagattcccagtaaccggcagcagtggcagggattgaaggttggttagcggttagtccgtgtagctgtgggcgggccctgaggagacgcggttgtgtcaaggaagctgtgggcttgcgtcacggaggctgcgcgttgcgtcatcgaggccgcgccgcgtctaggggtcgctcccgtctggccagcggccacggccagcagcggcggtaagaagctggtactccttgcagccttgtgggttttattatgactaagtgtcgtccttattcggagaaggcaatggcaccccactccagtactcttgcctggaaaatcccatggacggaggagcctggtagactgcaatccatggggtcgtgaagagtcgaacacgactgagtgacttcactttcacttttcactttcatgcattggagaaggaaatggcaacccactccaatgttcttgcctgaagaatcccagggatggcggagcctggtgggctgccgtctatggggttgcacagagttggatacgactgaagcgacttagcagcagcagtcgtccttattaccaaactctgcagatggcaaacaggaagcagagctcctgagcgagtgtgcagctttgatcaggatcacacccaggccagggctgtagaaacttgagagtcaagagctctgaaatcagggctgtttgtaggtgaaggaaactcccaggatgaatatgggagaaaaatacggcgaagggtgtggaaaggaagtaagagcaatttctttccacacaaaactgggcgtaaagagaattaaaagaccccaaggactactagttggccttcgccagccccttctcaccattttccgccaatta

SEQ ID NO: 55446 - DNA, 2076 bp, Bovine  19866880964841
  misc_feature (1)..(1): n is a, c, g, or t
ngaggaagcctggaaggctgccgtccatggggtcgctgagggtcggacatgactgagcgacttcacctttcacttttcactttcatgcattggagaaggaaatggcaacccactccagtgttcttgcctggagaatcccagggatgggggagcctggtgggctgctgtctatggggtcacacagagtcggacacgactgaagtgacttagcagcagcagtagcagcagcagtgagattgtattcgtgtgacactttttgtggatatacttaccaggtttgatgttgagtttttttcttttttttgactgcactgtgtggcttgcggggtttttagttccctgaccaggaattgaacctgggccctcagcagtgagagtgcagagtcctaaccactggactgccagggaattcccaatatttttaaaatagtatttgtctttcagtattgtgggagtctgtcctttgaattgtggggtctgtctgtcagcattagttgggagcctgtcagccttgctctcccacagatagcaactttattttatccctttatgtaatatttaattaaattgcactaaaatttttattggaaataaatactgttgtatgtctgacatgtggtcagcataacaagagtgttggcaggcagacctgagacagtgtgcagtgtgccgtgggtcccgtcactgtgttctgtggaggcagtagagcttttgttctgtgtttaatacttagtggaagctgtttcatgaggccagactagtaaggcttagggcttattgcttccccaggtggcagtagtggtaaagaacccacctgccaatgcaggagatgctggttcaatccctgggtccagaagataccctggaggagagcatggcaacccccttcagtaccttcagtattcttgctgaataatcccaaggacagaggagcctggagggctacagtccataggatcgcaaagagccggatatgactgaagcgacttagcacacacaggactttactattcattcagttaaaacaaaatgaaaagtcagctttctacttcttacctttcttttaaattttttaaattaatgtttttggctgagtcaggtcttggttgcggcgtggggatccttttgttgtggcgtgagagcttttctagtgggaggtgtgtgggctcagtagttgcagtgccaggcttagttcccctgaggtatgtgggatcttagttcccgtaccaggattgaactctgtcccctgcattggcaagtagattcttaactaccagggaagtctctccatttcttaattgcttctataacaacctgaaatagaaactagatttcatttgtgtcaactgtatacattagtgatctagatttttgtgtgcttttggctatatggattattttcagacatttaaaaggcttatttagatgtacagctatttttacttagatagtttgtgctttttaggtcaggtgtggtcctggggagatggcgactatgggaagctgggcagaggtggcagtgatggctgcaaaacgccaaagctgattgaaaagctgcaagacttggatgttgtcaaagtccgatgtggaagccagttttctgttgccttgacaaaagacggccaagtttattcatggggaaagggtgacaaccagagacttgggcatggaacagaggaacatgttcgttatcccaaactcttggaaggattgcaaggtgagtgcaaaatgtaaacttttaaaaccatttgagaagttttcttcagtaatcttttaaagtttgcaggtattttcctttacatgacattctgtgaatgacccatgaaattagaagcttttacccacattttaatagatacagataataaatggaacgtggtttgtcggtattaaaaagtgacctagaattattctcagcaaatttaatttgaaactttaaatttttccaattttggagagttgttttttgttgtttttttctattttattggagagttttttttgtgtgtgtgtatgggatcggggggcaagtactcatttcattactcattaaattggccttggtgagattagctt

SEQ ID NO: 55447 - DNA, 1529 bp, Bovine  19866880996150
  misc_feature (1)..(1): n is a, c, g, or t
naccaagaacagggcctggaagatatgtttacaacaaattctacgtattattactttaaatccacattctcattccatcctttcctctcacaaatgcaatacacttgtaaaaacattaatattttccttatggaaattcaccttgatttaatctctcagaattatgccaagtaacttgcctcaaaaaactacgaagcaggaaacctataacctttcagttcttcctgaatatgattaagaaacaacaagcccctaaagtatctaccaaatcatttactaggatttcaagaacgctcacccattcctaagcacactatggttttggtggtggtatggaaatcaaacccaggcgacacaactgcacagggcatatggcgtcactcctgacacagcccgctctgaagaggcggaggggggctgctggtaagcaacaggtgtccccaaggatgcccaagggcttcagaactgatgagttctacttctaaggtacactgatatgatattgactcgataccatacattagccacatgcagttgttcgaacttaaagtgaaatacaatgaaaacatcggtgcctcaggtgcactagctacacttcaagagctcaagagccataccgtggctaggagtcaccacactggatggctcaggtacagatcatcatcatggcagaaaatactgcagaacccatgctaccaaacagtaaaacctactttaaatagttaatagttaaaatactctgatattaaagcataaaaactagcataatggaaccaaaaaaagtctataaaggacccaaataagtacagtttacactacaataagagtggtcttcaagtcactgggaagaagatggatttagtcaataaactgtgttgttgcaacatgtttgccgtctaggaaaaagtaaagctgaatccctactttatcccctatatcaagataaatttcagatggttcaaaaaggtaaatataataacaaatgaagctcagcttggtgctctgtggtgacctagagaggtgggatgaggtggtgggagggaagctcaagagggagaggacatatatataaatatatatccctgattcatgatgtttgtgtaacaaaaatacaacattgtaaagcaattatattccaataaaaaaataacgaaaacaaaaatgattaaaagaaacctgagaggatttcttaaacaatgtcatgctcgtaccgtatttacagcataatacaaaatccagaagccataaatgagaaaatttggcagatctgactttgcaaaaactagaaatttctaaattctaaaatattaaaacaatgttataaggcaaactgaggagcaactcagcacagatggcagagaagggactcattttcaccagaattccttgcagcacaagacggctgcagcgcctccagcccacgcccctgcagctcagcccacgcccctgcagctcacctgtgggtaggcggtgcccatgccggacagcaccgcgaaagcacgtcccggcccttgtcccctgcccggcca

SEQ ID NO: 55448 - DNA, 1198 bp, Bovine  19866881190673
  misc_feature (1)..(1): n is a, c, g, or t
ncatctcctggcacatatcacaccctgaactctaaactgtagcactctgccgtctcagtcagtctcgtggggtcttgtggtggatggcatttatccagctcagtgtcctgttagataatcctgggtagaatctgaggcaaatgaatccacatcctcattctccgagtcgtcactgctgtcatctgcagccggctcccctgtgagggctatgcgagcataatcatctgtgtctatcgacttgcaaaagtggatggcgtatttcagtttctcctccagcacctgcttacaggaatacctgggcaacttcaacaagaagaagcatgtgtaggattcaggaaggaaatggtcaggtgggttgtatttatccaatacctgttaatgaaaaatgttaaataatcagagaccatatacaggacaggtaaaactgcaatctgttttattacgttcattagagttgacttctcatttcacatacagcatgatgtttttggctaagaataacaaaatatcagaaaaaatatcatctagtcaatttcagaaataaaaaggaacaactcattaattcttaggactttcagtaaaaaatagcaattggttgctgtgatttcacccccaggggctggcaggtaaacagagcctgattctgaccagtaagaactcaaggcagaactcttatcctcaatcgaatgggcactctgatttttctcagtaaggagcattatttattgattcgcctaattcaaccagagactcaaacaaatgcttttttacatgatgtatgtgctcagaatctagaatatgctgacttaatagcaacatattctgggggtggccagatacattttttagaagtaggtagtggtacccaacacctgtagtcataaaattctgagctctcatatcagagaagttaagtgtttttcattttgtttcccgagggtaggaaaaccatgtaacaggaaagaattgttttctcatctgtggcagagctctgtgtgaggggcatgactctcagttgatcccaaaggacatgcaggagccacacctgaatgacgaagtctctgccccgaaagtcagcgatggtcctgggcagccttgtgcggccccacacaaagcgaaggaagagggagcgctcagtgttggagaaggactccatcacctcccagaaccacggatcaggggcgcagagggctccacc

SEQ ID NO: 55449 - DNA, 3569 bp, Bovine  19866881266840
  misc_feature (1)..(1): n is a, c, g, or t
natttgagatggaaagtccgcattcacagacttttttaagtagagtgatcctggctcagggagcagcaggtcctaattttactttttggcatcttagttccccaaccagggatcgaaccctcacccagtgcagtggaagcagagtcttaactgctggacctccagagaagtcccttattattattatatatatattttctagtgtttcaacagacctacacagttcacttacactgaagacaagtaggaatatattctacgggaagttgataaagtttaagtccatgaacaggcagactacttcatattacattttcaaatggatgaggacttaatgaagatctctcaccatagcttcagaatgggcgtatttataaccctatcctgccaaaaataattacttcccatttttttcttgccaaccttttcaatgcctttcacagaaaatgggaaaagggagctggtacaaataggggtgtttcccacaagaaataaggaaggttttggaatctgagcagtttgaatgccttgtctgttctggaacattctgtcttggaacgttccctgtttttatgtttgtttatttcacatctcattcattctcttaagccagttgcacaacattcctttccaaatgccacagttataaaagactggactggctccttatggtacacatggttgtctgctgaggatccccagtgtggttctggaactgagctcatgacccagggggcctgatcctgggttctctggggaaggagcagaccagtctaagcagcctcgggggcgggagtgagggtgggggtgcttctgtttagagccctcttgctcctacttcaccctgaacctccaagagtctcctcaaccctcctggtcccctccccaggggctgtgtcatcttgccccctccacccccctgctccagggataggagcccttggcactgactctttccttctctgcccccagggtagcctctaaaaagaaggcagagagtccatttttaatgttattattgtccctcatttttaatttgtattcatgtgcagttatttcagtttttcagagttgtattatgtgttccgaacacatattactatttgtttttcagctcatgcatggaaatgcttcatgtttctcagggatgattccaactaaaactggtctttgattttagagtctcagagttttttcagatgaactctgggcattcctaaattaagaaaacatgtctaaatgaaaatagattttaaaagaaattaaaatgaataacattagaaataattttaaaaaggtaaatgagctaccattgtcagaaaccattgtgaatcaccataaacaacatacaaagcaaaaagggtgggtaggggcaaggctcattgcatggaggacagagaggagggaaattttatgttttgcatataaattacaattaagaaagtatggctttctcagcttggtaactgagttgaagaaattggagaatatgaatcagggtatcctttagaaaaaaatgatatccatgtacaacctggatcaaatttcatatgcatttgtcttttgtggctaagtataataatgttatggacacaaattttgtattaaatgcagccacgaagttaagagatgcttgttccttggaagaaaacctaggataaacctagacagtgtattaaaaagcagagaccactttgccaacaagggaggtgaaaccagtcaatcctaaaggaaatcaaccgtgaatattcattggaaggactgatgctgaagctgaagctccagtactctggctacctgatacaaagagctgattcactgggaaagaccctgatgctgggaaagattcaggtcatgaggagaaaggggcaacaggatgagatgtttggatggcatcatcactcagtggacttgagtttgagcaaactccacgagatagtgaaggacagagaagcttggcttgctgcagtccatggggtcgaagagttggacacaactgagcaactgaacaacaatagaatcaaaacatttgatgagaggaaagataattttgcttctttccaatcttcaaaatttttcttttatttcactggctgtgacctcaaataaaatgatgaacagacatggttatggataggtttctttatttctcacctcagaggagacactttaaatatttcacaataaagtgtgatgtgtaatgcagactgtttatagtgactgtttaagtttctgtctatttcaagactactaagttttgtgtttagtcagtttctttttttaaatcatgaataggtattgacttttctcttatgatttcttgctgtcttttgagatgaccatatgagagatctcctttattctgttggtatactgaattacctggatttgagttctcatgttgaatcttgtgattttgtgcctttttaattcaggggttttgattatttatttatgagggagaatgggctttcatcttgatttttcaaaatgtccatgtcagatttttatgttaagtttatgctttattcataaaacacatgggaatagttccccgttttcttttctggaagtattattgttcatattatttctgttttaaagttcaatagaattcactagtgaagacacccagatctggggtttcctttgaggggaagtttcgaatcacagattcatcagctcccaaaaccagtcaaactcttctgtgtttttgtaccagttttgactggttgtgcctttctaggaatttcccccttccatctgttttcaaaggtcttggcaaacgtagcagtaatactctcgttaccctttttctgtctgcagggatgcgccctgctgttgttcacaccttcgggagagaacagtgagctggttctgggagagagtgggggctgatggaggttgctgccagggcgggggtattgctaggaccatactgaccacaggccccacttcacccccctgtcaggcttccctcatggccactgcctggaaaaacccagcaggaagccttctaacaagagagaaacagagctcccaaagaccccactccaacatgaggggtctggagctgagacatcacagctcccaccttgggcttctcagtgtcctcaggaccccaccccacctggaggagaatccgtctccccactcttcttcttgttcctggggcgagctgaaagtgtttcagcccaggctcttatcaaaatatcccttcttctgttttgagaatccttatgaacaactgtgttataatttacattatcactgtccattagggttttaaaataaatattacaaaatgtgctcttgctgttactcacttcactgtcttcccctcccaaggatccttgtttgattgcgttctttggtgtgagtggctggagtgttttcacagcggccacctcagaagtcacactccccaccctgcacatcctataatcagttcctttgtgctgatatgatactttgcctggtagagaattcttaggaaagagtcccatcttttctctagtcagtaactgtgattctattatctactagtttccaagactaaaagcaagaaa

SEQ ID NO: 55450 - DNA, 878 bp, Bovine  19866881323329
  misc_feature (1)..(1): n is a, c, g, or t
nagggtggcctgtgtgatgagtagggtctccgggtaaatctctgaacctctacaagcctcaggctcctgctgtgttcaaaccaacccagggctgttttgaagtggattcaatgctcaaacacccccgaacacagggaaacactatatatggacatcaccatgctatcacttctccccagcacgtagaaacccagatttccatgcacccatccagagaactgtgctccctggcacctcatttggctatgcaactcattatactaattattctttaaatctgcggatgttccttgaaaagctgctttatttataaacaagttgcctgacagcaaaccttggagcagaagtattagcttcaaaagccgccaattcaaacatcagcaattcagaggaaaaaccataaatggcctagcacctaatcccagtgctgaataataaatccatcattagcttgcagcaatatctacgaccaagatttctaatctctggaggcaagtttctaaggcaaaaacagctcggattttaaggcaaattttatgatgctatggagccaggaggtctggtcccaaggcagctgtgaggccaagtctttccatcctcgatggtggggccaggctatcggacaccttgctgcccggccacggaggtggagctggttggaagaagtagagaagcctgcagagcccaggctcagggcagctggctcctctcgaggctgggggggcagttccagaggcctgggtctggtgcaagagagatagcggagggggagcgatgaccactccctgatgctctaaggagagagcacagcccctcaggaacagcccggtcctctctgcctctgcacacacatcgggccatgcccttgaggatggatg

SEQ ID NO: 55451 - DNA, 2779 bp, Bovine  19866881512141
  misc_feature (1)..(1): n is a, c, g, or t
natggcagtgctcccagcagacgccacctcaggatcctcgccgacacagtcttccaggtgccatgactcagaatttgcgttggcaggtcacatctcgcctacttgaaggtcctcaaagaacaggcaggggcagacagtcttccaggtgccatgactcagaatttgcgttggcaggtcacatctcgcctacttgaaggtcctcaaagaacaggcaggggcagttgcgggtgcccataaaggcagtcatgcttacagaggtcttccacgtccaggcagcacggagaggtcagtagcacatcagtgttctcatcaagaacaacctgaatggcttccctggtggtccagtggtaaagaatctgcctgccaatgcagggggcatgggttccatccctgttccagaactaagatcccacatgctgtggagcaaccaagcccgtgtgccacaaatgctgagcctgcactccagagcacatgctccacaacaagagaagtgaccacacttcagctagagagcagcccctgctcaccacagctagagaacacccatgcacagcaaccaagacccagcacagccagatcaagtttaaaagaaaaaaacaaaacgtgaaaagctagacaaactatggaaatcaactccttgaaacagcttcaagcaatgaaattcagagatgccacagtaaggagagaccctccctgctgaagggattctagcctccacagcttctttaatcctacagacacaggcaggagtcctggcctgactggaagagacctggggtccaagcatggggttggctttcccctccggtcatgtgcaaaagacataaatcttaaccaaagagctactgaaagcacagtgaagacaaaaatttgtaatccggaaaccccagagggctgtgaagaacacaaaagactcttgtctggaagccctaaagggtcggtgctcagaacaaaatgcggtttacctgggctgcagaccagctttgacgcagcagagcctggatggttgaaggtggtggccaccaggtaaggaagtcagccaaccaatttcaaaacagttaccgtgcccaagaaaacagagaaaaagatgagcataataaatgagaggaagactttcaccaggtaattccagtctttaaacatggaactaaaaaaaaaaaaacacacacaaaaaaacagtatctaaattcggtaactcaacagaagggtttgacagaaaattagacacaacaggaagattggactagtcaactagaagacaggtcaattaaaacagacactcaaactaaaacagaaaacagggagtctggaatgaatatgcacatgctgctatattttaaatggataaccaacaaggacctactgtacagcacagggaactctgttcaatgtcatgtggcagcctggatgagagggaagtttggggaagaatggatacatgtatatgtacagctgagtcacttcaaggtccacctgaaactatcacaacactgttaatcagctataccctgatataaaattataagttaaaagaacagtattatagaggaagtataacataacaaaaggcctcacatttgtgatttagaccccagaaagagaaaacaagaatagggtggaagaaagaatggctgagaattttccaaaataaacaaaatatcaaatcggccaagctggcttactacagaaacagacagacagattacataaaagagaaaatcttaaaagcagtaaagggtggattttgacacacacacattatcttcaaagaagtaacaaaaagactgaaagtcaatttctaacagaaatgatggaaaccacctttaaagttcagataaaaaaataactgccaatggaaaccacctttaaagttcaggaaaaaaaaaacaaaaaactgccaacgtagaattctataacgaagaaaacatccttcaaaagatgaagatgaaattaagacttcttctaacaatccaacagaatttgtcaccagcaaacctgcaccaggaaaaaggaaaggaaaatgaccctgagggaagccagatacaccagaaggaataaagaccgatgaaaagggtgaaggaatactgactgcagccaaatcttagaggctctgaaaatgacaggtggtactgaccagttagtcctaaaggaaatcaacccctgcatattcagtggaaggactgatgctgaagctccaattctttggccacctgatgcaaagagccgacttactgggaaaaagactctgatgctgggaaagattgagggcaggaggagaaggggatgatagaggatgagatggttggatggcatcaccaactcaatggacaggagtctgagcaaactgcaggagatggtgaaggactgcagagatggtatggtgcagtccatggggtcacaaagagtcggacatgactgagtgactgaacatcaacaataacaatatacacataatatataagcacaggaaaggaaacagttcaactgtgaataactgggccttctccaaatatgaccttggactctttttaattcaaatccatatttaacactgtgcatagcggtttctgcactgcacactctacgcagggaatgctggcacaggaaatcacagtgggaactcagaaagagataggatagagtgcttttttaaaactgaaaacctttctctgactatataaatagcatatactcatgttgctgaatttacataacatgaaaaattatacagaggagaaaataaaattcacccatctaccacattcagagaaaccaacga

SEQ ID NO: 55452 - DNA, 1364 bp, Bovine  19866881729158
  misc_feature (1)..(1): n is a, c, g, or t
ntccatgggatcgcaaagagtcgaacacaactgagcaacttttccacacacacccatgtaggtataactgaatcacttagcaactgaaaacactgtaaattaactatatatcaataaaaaatttatataattataccttaaaaaagaggaacactatctaatctactcacctctgtgcagtcattcagaagagataccgttgtgtcagtggggttgatgttgattgtctttaattcaattaggttatttagtgaatttccacctaggaaataaagggacaggagcataaaggaatcagacaaagaagttttcattatataatagaagatacttttttgagtaaagtaactcaattacctgacacaacaaccagggaaggcatgtagctactgtcagcaggatctacaatcatttttaatctatgaacaagaacatctgggaaaatctccaaacgaatccaatgctttaaaagaaaaagaaataagtattctactccattacttgtttattagaagaaagcctccctctatgccccagaaatgatgtgtttatagccttttgacatagggtggtccattaatatccatcaatgggtgggttacagaaaacattagaatcaaagtagaggaaaagcaccattctccaagtctaaccttcatggctagatgaggcacacccaaatataagtgcaattaaaataacattctaaaaaataaacatatatttattagggtatattagaaaatcttctaacaagaagcagaatctgaactcatacattttatgtgggggagtaaaacaaaacaaagccctatttaaccctctatcagttagataaaatccatcatttatattttttaaaatctctgacaatgaaaactaaatggcatattactctgtaccattaaaataattatgaactaaaatataaaatgagtactgacaggtgacatcccagtataccttcataggattttcaaagtttgtgttcaagctctaaaacgtaacacttctaaacaaagtgtctttggacatgcccccatggcacactacctttccttgtgaaccagaggactgccagcagggctcactgccatcaataagacgagaggcttggttcacagaggatgacacgtttagactcttcaccatccgtgcccagctatccagcagcattcccggctgactgttgtgacagcgtttcagctgttttccagaacggccacaaaatattgcagactgtcctatttaatgatggccaaacagtgttaatacttgtagaacagaaacttcacaaccaagaaataaagaattttttattgaggtccttacttcaagaaaacagtaagtttccaaattagaag

SEQ ID NO: 55453 - DNA, 1841 bp, Bovine  19866880117930
  misc_feature (1)..(1): n is a, c, g, or t
ntgctttcctctatttctttgcattgattgctgaggaaggctttcttatctcttcttgctcttctttggaactctgcatttagatgcttagagaaggctaagtgctcagtaaatccatttctgtgtcttctgggcacaaagctacactatacttcccagccagcctgctggttaggtggggccacatgactggttttggccaacagaatgggggtagatcgtctccaagcctgtgcacaaagcctcctgtgggatcctcgattccgtttctgtcagcccatatagaggacactggggccctggccaaagatggcacctcaagatggatggaacctggtcccatgtgaaagcatgtagcagactctctcaaatgtgtgttggaaatgaaggtaggcaaagaaatgaacttctactgtgttcagccactatgatttggggatcgtttgacacataaagttagcccaccttgatgaagagagtaatattccaagaccatttcttttcctaaagtctagtacacatgatattttcctcatgtgtgaatccactgaaataacaaacaaaaagttagaaagctatcagtgtgatttgcatttcatttcatatttagcaaagcattttttttaatgtagaaaattggagcagtgcatgctgggagatcaagaatgcatggttaaggcattcttagtcctgaatttaagagacatctgagtatcatgagctcagatgcatttggctggattaacccaactctatggaacctggtaaacgtggggtgatcaataaaaaaggagttcctgaaagagaaagagaaagctagaaagagaattcttggtcttggactgaaaggatcccaccaacattcgctgccaccttgggaagtctgaccaggctagacagctgcttacgcatgtgtgctgtgcgctctgcctttgatctctcttcctaaacaacactggacatatagaaggctcaagacacccagtcctgagggcagggaagtggctctgtaggtgaacagtctctgtggggaggaggccctgagctgtggctgtctgagctacatgctgaattgcccagagctcctttcacgcattacagcttgctgtctacattgatcagattaatcacaagttgccatctccacagctgaagttaatgttttttaaaacattccagggattgtgtaagtcatatagtgtttcttcatgggatttctcattttctgtgcaaatacactttgccagaattgttagtatgcctgtttatggtcaggttccaggaaactttatgatattctccaagacaaattgagaagttaaaacttttttgctgatgtttttacatttaaatattgccaaacgaaagaaatgaagtgttttctaaatacggacaacaaggtctagccagaagagatttgtttttgctttctcctgtttttatcataccttccagcacgacaagtccatagtacccaactaattaaaataaattttgggctcccatccatttttgacatacagagtccaagtcctgcaggcccagggatgccccccaaacatctcactttcctggacgtgtaggcatctgagaacccaatccaaagtgctcaagctatcaagtgtatcccagtgtgtgttgatgcatcttcaaatttcccatgccaggagtatacaaaacttggaactcttcactgcttcttctattcctctcacttattcttaatccaatggagagttgctgggaggttttaaggagagagctgacctgacctaatttattctcaaggagaaaactctaagacatggactagaggggacaaaagaagaagctaggggaag

SEQ ID NO: 55454 - DNA, 795 bp, Bovine  19866880453319
  misc_feature (1)..(1): n is a, c, g, or t
ncccagggtttctcatgatgtactctgcatataagttaaataagcagggtgacaatatacagccttgatgtactccctttcctatttggaaccagtctgttgttccatgtccagttctaactgttgcttcctgacctgcatacaggtttctcaagcaacaggtcaggtggtctggtattcccatctctttcagaattttccacagtttattgtgatccacacagtcaaaggctttggcatagtcaataaagcagaaatagatgtttttctggaactctcttgctttttcgatgatccagcagatgttggcaaattgatctctggttcctctgccttttctaaaaccagcttgagcagctggaagtgcatggttcacatactgttgaagcctgacttggagaattttgagcattactttactagcgtgtgagatgattataattttagagtaggctgcaagcaaagctgtctgctctttgtgtgtctagctccatcttccagaaatgcttgctacacaaacatcctttgaaggacaaaagggtagtttcccagtagcttggcatgctgaaagttgtaaagtcctttgtatccgacccaggagtctcatgtattctgtcaacatccatgaaattgctagcatccaggctgagtagggtaaatctgagaattttcctggtttttgatagctgtatgttggtccagtagtttggaggctgttgcagtgattcaggcgaaagataaattccttaactaaggctgtgaaaagcagtatagagaagaaacaatagattccag

SEQ ID NO: 55455 - DNA, 614 bp, Bovine  19866880695700
  misc_feature (1)..(1): n is a, c, g, or t
nctttccttatagaaatgaatggtaggctagatgtggcatgcaggccattttaccagcccctgatctagaatctgttctttgaaattttggttttcttgttgtttgttgcttttgtttttgacaatattttaatgttataataatgaagatttaaaaaaaaaatcatagatggtgcagatcttctctgaagggcagagaaatgggttggctgtgctgcattcgtatgaagaggccagctgttttcactctgcattgctagttgaaaaagccatccggtctcataacaagtttcaagcttcagtgtggtatttcaaaaatagaacttgttgctgaaacatctctgtccttaagcatttggaggggatgctaaagcaatatcatgtgccaaatacatcacatgtccaatactgtcattaggtaatacacgagaatctctgatttctgtatctaaatatttaatcatgtgcgtgcaaataagaacatggtgaatggatgccgaaagaataaatagatgacaaataatatggcttcacctgaatgtataggagccagtgatccccaacctttttggcaccagggaccagttttgtggaagacaattttttcacacatg

SEQ ID NO: 55456 - DNA, 799 bp, Bovine  19866880999341
  misc_feature (1)..(1): n is a, c, g, or t
ncatcacccaggagttgtgagagatgcagagtctcaggctcctggcagtcctgctgaatccgaatctacattatcactatcccctggcaactcaaatgcacgctcaagtttgagaaatgctgctctggacttcatgaaacatagcaccttgccttgtgagcagtcacgctcatctttcttccccgagctgcatagagcaattcagatttaaaaaaaaaaaaaaaaaaaaacactacccaatgttgcaaatggtcattttgaaagagctgcttctcaggttccctcctccaagcccgagaggccacactttgggggcggagacaacaagggagaagtatggcatgtttgcctctgtctgagcctgcagtcccccagagggggctggacacgctgctatgcgttcgtgggtgcctgatcaacatgggctggctggctgaccagcccagatgtgagaacaaaatgtgcctctctctgagttgggggagatggaccgaccgaactatttcttgtttagggcgagcagtcccaagtcggcttgactctaggctttgagaagcaggagggctacaggtgcagagcgggaaggaggggggtgattggaacagtaagaggccaagcaagaggctgcggggggcacagaacgtatttactgtactcagggcatggaataaacagagaagaagtatgccaatcactgcctaatgaattcgcttctggctgccaaagtaggagccgaagaacaatgaacaatccgagcggcttctgtttccacaatgcagccttggtcaatgtccatggg

SEQ ID NO: 55457 - DNA, 1300 bp, Bovine  19866881121043
  misc_feature (1)..(1): n is a, c, g, or t
ntttgcatcttttagtcccaaattccctaaactcttgacagcaactgcaaacatggccacgccttccaaagctcccaatggtaaaacatttcctaatccgcttaatgatgctgaaatgcaccctttttcttagtagatttaaatatctcagttgactgcacctttgaccatggtgtctgtgactggaaacaggatatagaagatgatttcgactggaatcctgtggaccaagataatggtatgtagtcttcagtgatccatgtcttgtggtctggccctagaattaaaggtatccaatgattcgagcataattgttctcatggcttgtgaagtcagggttgtttgtcacgtttagaagcttttagaccttcccaagtctcccctgataaatgattgacttagtccatttcccacccacctaccctataaaagattctccagcaaacctcttccatattcactcctctgctgctgagacacagatgtagggctttgtatgagttttaagagtatttgggaaaaggtagaaagaagttgtttcttttccccagtttaccagctatggtgctccgtggttgtcttttgagtttaggaggaaggggaaaggaatctggaaaggaaatattaatatgacctctccctaaccctggagttttaggagcgtcacccctcagagcactgaaatcataataagcagcagatcagcactctgaactcctggactggacttgcccacctattgctggaggatttctttcattccaattaaccttgaatttttctctgctgacgctctgagttgcctactttccactgtctactattgatggcctctaacttcctttgaggcagagcatttggacggcagatcccatttggatcataaatagaattttggtcatttaaggctgactctgtaattagaaataactgttatactttcaggaaatctggttctttacccatcaaagtgtttctttggagaggtatatgcccagccctcaggtaaaagatacttctagatccttccctgacactgattcctccctgagagccttccttgcaagcccttacatgcaatcaggaaacctgggtatctcctaacaaaaattcctttagaacgtgggattaagggaaaggatagaagttccctatttacaaacacctgatttgcaaataaccctgaggttcactcaacatgggatgaatcagcattttcagaaggctgaaatctcaaggacagatcaaagtgggcttgaactggactaaaaaggaaagctaccacaggggtcacaaaaga

SEQ ID NO: 55458 - DNA, 1052 bp, Bovine  19866881193586
  misc_feature (1)..(1): n is a, c, g, or t
ntagtgttatgatgacattatagggcctttaaaaagtttccccttctctagtcacttttgcagagctgtcacaggtttctagaactcagcggtgctcgagtagggagcaactagtgctcaggaattcacttctgaagggagctggcagctgagaaggccagacatctctttgtgcccaggcatcaggagagctgtggatgtggcaggagaatgtgtcggagaaagaagacatctttgggtactcagatcggcgagggaggtgggaggggtccaacagggaggggatatatgtgtacatacagaagattcttggaggaaggcatggcaacccacttcagtattcttgcctggagaatcccatggacagaggagcctggtgggctacagtccatagggtcgcaaagagttggccacaactgaagtaactcagcatgcatacatgcccagctgattcactttattatacagcagaaactaatacaacattgtaaagctactatactcaaatttttaaaaaatgctccgaacagacaccagagaagtatctgattgcccttggtctacagatgccacatactcctcactgcctgcagctgccgtttcaatcagggcttcactacagagcacattttcctcttacaatattttctttcacaggaatcctgtctgtgtgagcagtgtgttcaatcccaatgccaggaaagcccagctgctggcatgatacgggttggtgtgagtgagcagaaaaagacctcaggatgttttaaatggatgggcatttgttctatcagtattttcatggctcctgaccctccgactttctctaccactgatacagttagccaagcatgagacatcctgtttctttaagaaattactataatggatggaattgggaaaataagtacagatagactgttgctactgttgctaaaaatctattttcttgtatctaaatcaagactagtgatactaatttctataaagttaaacagacgccttccctatggcctttcccataaccaagaaagacagaagcacagggctataga

SEQ ID NO: 55459 - DNA, 1409 bp, Bovine  19866881229746
  misc_feature (1)..(1): n is a, c, g, or t
naatggattgatgaaaccaccccaaaatgggacccagtacacaatacagttcaagtccactagcaagtcgctaccttaaagagattcggacatgtgagatttgtgaacacagatgatggaggtcaatctcattttgtcccgtgacttcctaagcagggtgaagtgaggtaagaggaacacaactaaaagtccaaattctccaggctcccaaaccaacagcaactaaaattcttggccttgatatgtgtgttgcatcatacaagagagaaaatagacctcttttttcttgtgttgtatcatcccccacttctcccattctcaggctccacgatgaagttaggcacaagatgaatgcctgcttccatagctaatgaagttatctctggtccttaatggatagagatgtgtggccttgagactgtgttggccaagatggtggccactgggcatatgtggctgtttaaattactcaaaatcaaaacttcagctcttcctttgtagaaagtcacattttacgtgctcaagagccacatgggcttttggctatcatcttggacagaacagatacaggagattctctcactggagaacactgctattgtggaagatcaattttgacctgccacatactctcttgtgacatgagctaggttctgagttttactttggatttcattcattcggtcctttttgaagatctagagggtgataagcactgttgttggcactgggaatacaaacataaaataagacgcattccttgccttcaaggagatcagttagatgagtaacaatttctatggcacactgtgatgactaccaagacagaggctgctggagggccagtggatggtcaggtggaggagagagagacagaaggacaggaggaaatataattcaaattggagagggatcctgaaaggctttctacagtaaaacctaggatgccaaatatgtgaacagctgacatggggacactgatacaatttgaagaaatctgcatattactggtgtacattatcttactaagcctacatcctttctcatcatttggggttatggttaggtgttatagtgcagtgcactcaccctgtaacaagagaactcaaccttccaaatccatggttgcaacttcaaaacaatctttcctccacataggctagagctgtctgcttctttcaaaggaaatgccacagctgttccgtggctcaaaacagacaaggggggatcagaagaatgatgctcttcagtccccaattcaccactagatcaaggctaacattttcctccaatttgtctttctcatggactagttctagaacagcaggggaaaccagagactcaagactttcaggatcacttcaatgaagcatactctctcagcagaagccaatgctcttaggtttttg

SEQ ID NO: 55460 - DNA, 1213 bp, Bovine  19866881323484
  misc_feature (1)..(1): n is a, c, g, or t
nactattcattatttttgtgaccaagtgattcatttgattatgcatactagtgagtcttcagtaaactttctctatttagctgtgctgcaaaatggacttctccatttttcatacagtgatagccacctgaggtcaagaatcctagggctccagtgataatgctccaaggatggagacataaatattcaggtctcattgcgggaagacaaaagtcaattcattgtttaagagtgttccatttccccttggtttccgagaaggtttgaggctcctactaatatgctgaccgtctcaatcaatacatttggctcgaggcatttgtgtagtcaattctccatgcctactcttcagcatcctctctatataaaatggctggctgtgttcagttagaaccttcctttcctcatcaatatatcaacgttatacaacagcttgcaaggcatggttagatgaaactattatgttaatcctagtggcttgagatttcacaaataattcccaaatcctataacatttaaaatgtctctctatttctatagagctactacaggaaaataattttttaggaaaactttgtctgggctataaacgtcttcttagacaagcaaaatctgtcattatagtcaagattgattgacctgtctatgtatcaaatagactagtgtaggtaaaggtttataaattaatgactagcatggattttcccctcacgtctacctctttatttcagtgtctgaaatcttgactggctttgactgtgtggatcataacaaactgtgggaaattcttaaagagatgggaataccagaccaccttacctgcctcctgagaaatctgtatgcaggtcaagaagcaacacttagaactggccataaaacaacacactggttccaaattgggaaaggagtacgtcaaggctgtatattgtcatcctgctcatttaacttacatgcagagtacatcatgggaaatattgggctggatgaagcacaagctagaatcaagattgctgggagaaatatcaataacctcagatacacagatgacaccacccttatggcagaaagtgaagaagaaataaagagcctcttgatgaaagtcaaagaggagagtgaaaaagttggcttaaaaccaagtttcagaaaacagagatcgtggcatctggtcccatcacttcatgggaaatagatggggaaacagtgtcagacttta

SEQ ID NO: 55461 - DNA, 675 bp, Bovine  19866881557470
  misc_feature (1)..(1): n is a, c, g, or t
nttttttttccactagaggttatctgcaaagaccacaggaagtgtctgagcaaacttaaaggctatttctcaaaagttattagaataaatatagtaatttagttacctggtttctaacaactcaaggcctgacccctcccaccctcagcaccgttctccacacagttgtgtgaattggccaacaaatagtaataatgctggctaacaaattagaaatggcttttaaaaacgtctgctcttttgtcatgctcaaaagaaatgagcattctttaagaatgagctcaaagaaatgtacaacttgaattagtagatggacagaggagaaggtgaataggtggataagcaagtatagcaaaagttgatggtggaatcttggtggtgggaacatgagagtattctctataaaatccttttcttctggtattatgtttgaaatttttaataagaaatgttatgaaaaaaaatctacctctcattttgagaacatctagaattctaaaatgtgcctattgggctcaagactgggagcatccatgttctgttgcctgacttagtgatttcagctctgatggccaatcaaatattgcagatttatcaaatggggctgatagtgcaggagatgagggttcagtctcagtaatcctctagatgctcaagtgtttcatgttcatttaa

SEQ ID NO: 55462 - DNA, 2345 bp, Bovine  19866880574105
  misc_feature (1)..(1): n is a, c, g, or t
ncaggcaagaatactggagtgggctgccatgacctcctccaggggatcttcctgactcagggatcaaacctgcttctcttacgtctccctgcattggcaggcgggtactatttgtagcatatgtcaaattgtgagtcatgtgattcacatgttcatccattcaataattacacataaataagaatgagactatttcaagagattcccaatttgttaaactagaaacctatcgaaacaaatggtagacatttttcttttaactacagacactataaactgacacggatttgaggggaagaacactcacacacacaaaatgcatataactaactgaaaacaatccaactttcattataaatcctctgattctttttatttcagttctaaggtatgtttaaatggagttaactttctggatgacttctcctatccccccaaaacaaaatactttaaaaaacttatggtatactttttatacatacatgcatatgtgcatgtgtatgatttttttatattctgagatattttgttaaataaacagtcttaaaacttttatgttttacattatcatattgtttaatatggattattaacagttttgcaaagaaaaaaaaatctggcttctgaaaactgttagaccagagaatgtcagtaacagcaatctgtacttccctgcttaatctttcttggcaagctctgtctgcaccagtgctgtctggcttcagcaagcacaatgccaggagctcacactgtatgcaaccttttcagtaccccaaacagtattcagttccttctttgccacaaataacgagtttaactaggtctataacattttctttttataaacttctctattatgctaataaacagtaatttaaggcttcaaaataatgagaggtaaattaatttttgtcaataattgaaccatactgaaggaaatacaaagtgttgaacaaacttagtcaagggtgaatcaacacgctctctgactccacctcactagcccaactggttttaaaaataataataataataatattgtcattcagctatttaacatagttgtgaataaaagtcacagtcaagaggaaaagaagatcaacgcatgttttcagatattacgaatgccaacttagaagactgattttctagtgcttcttgctacattttcatctatagaactgcatacattcaagatctaaagccttaaaaaagaattttgtgagaaaagaaacctaataaatatgtataattctaaatgatttggtttattttcaaaatcccttttattttgggaagaaaatcactttataaaaacttacccaaatatagaaattattttataacatttttactaataaaataaaaaacattataaaaattgccacaactatagaaaatagccataatttgctataatagtcagaatattagagtaagtattctgtggcttactacttgaaggaattaagaaaattaatgtaaaattaaagttctttactcttcaaaccccccagaccctactcatggcaataagatggaatttcgttaggctaaaacggtgacaaagtgatgagagaaagaacacatgcattagaaaatgcaaaggaaaaagcaccttagatacaggcatctgatcacaaggtaaatcctccagtgatgaatatttacctttggtgtataccttaccagtaattctgaccctagccaaaacaatcattaggattattatcttcagccttggcttcaaatcctcaccttatctcccatatccacaaaatctataatacactcccaaaagatacaaatctcccatgactgccaaaattagcagtcccaaggatatctgacttttgacagtttcagtgccttaggctaaaagaacagagctttaatcaaatgttcagggatcagcgttggtattttaccctagttatttcataggccagttcaaatttagcaaacaatcaagtaataataacctgtccaggctgagtttaaattttttcagtttgaaaaccaaatcaagctaggtttctgggttttaaaagccacagaagatttcttaattggtaacaagcacagacaagcaggtactgatttttaaccatcttgtaaatggaacagacataggctcagaggctgggagacttgaggtgacagtataaagaggatgagggaggctataaggaaaacaaagcttgtaagaactgggtagttcttctcaccacacaacctttaagggtcaggagataggtgacattactttcttgacaattaaaaaatggataaacaatatatgcaaaagcttttttactgctaattatttcaatgcattcttctaa

SEQ ID NO: 55463 - DNA, 1403 bp, Bovine  19866880762862
  misc_feature (1)..(1): n is a, c, g, or t
nctgaaaatgctcctactatgatacaacattctggaaaaggcaaaactatcgaatcagtaaaaagataagtggttgctagggttatggggaggaagagataaaaagggagagcaaaaaggatttttagcacaatgaaaatacttttcatgatagtataatgatacatacatgtcattgtacatgtttcaaaacccatacaatatataacaccaagggtgaaccctgatgtaaactatgcactttgacaggcatcatgatgattcaatgcaagctgatcaatcgtaacaaatgtatcacgctggaaagggataccaggggtggctgtgtgtatccaggaacagctatgcaagtgtaggggcagaggggacatgggagttctgtatgatgtctcacttagtttttctgggaacctaaaactactctaagaaacaaagtctattaaaaaagtgaaaacctcaatggttaccatcacaatttcctaattaccaaactttaaaatattagtgtttacatcttatattcaaaagttatattaaaaagtagaggcattacgttaatgtgttatggtttatgaaaatcagcataacaggctatcagactatgcaaacttggcctctatctgctaagaatgtacactatgtagaagttaaggcttgaaggcctgactagagaaattctaacagaccttgtaaacttggtcgccaagtatggagaaaccccatccacctaagcacatttctaactggaaagtacaactgaactaagcttcaggcaaaggtccgtatgatgaagagcctgaattatctgcaaattccgagaatgaacaaaaccaaatcttatatacctagattccaccctccggaaagttatttctgaatacacagtttcctttaatacagaaatgctctcacaaactccaaactaacattaatgaagtcaggtaattgtcatatagatatagctccatgaaattattatattagtatacatttatttatcaagttttcttggcattcaaagtagatagtttattattaaaatagatattatcttgagttttgcacatatctgacaagcaaagtctattaagaaaaacctattttatatgaaattaaaattactttcctcatttttctgataccttcaataacacttaagaaatccttccaggaaaaagcagtggtttaattttctaaaatgtcagttacttacaaccttaatcccaataaaatcatcaaatttcaaaatcagttttagactgtaaaaggatttcactaatgtgaattactatttaaaatatttagcaaataaagtgcatacattcagaaatgaaaaattaaatagattgataggcaccattcaaaacaacattgtaactgttattaaaacaaaaccttacttg

SEQ ID NO: 55464 - DNA, 2065 bp, Bovine  19866881160820
  misc_feature (1)..(1): n is a, c, g, or t
ncgacgaattggtttagaaaatttcctcttgagagttgcttcacatcccatccctttgtagagacaaaatcttctatttgtttttaacacaggtatttttcttttatttagtcttttaaaaaatttcattttacttgggattttaaacattttaaattgtggactgctgctgcttaaggattctcttggagccaccctttgttaatttatatgtattttaacagtttgttttgttttgaatttccaaagtattatatcattcttttggttaacatttttatacttaaagatactaaagatggtactttttggtatcacttaaatggtatcaaagttagtctttagttttttgaatcccggatctataaaattttggggctgtctccggtaatcttttggaatctggattgtatgtgcctctcccccatctcccatgaaagaagaacagaacgatgggtatttaatttgggatattacttatgggctattttacagtgatatctaaagttatctttaatttttaggaaggcaactggaaagagacggtaaatgaaactggatttcagctgaaggtaagggtaattgtatgaaataatgtgtcatgtccatatacaatttctagcacagtgccatgccttaatggatacttgctatttactgaatgagtgaatgttggaaataggctttacatctaatatcactggtaattttaaagaaacaatgcggtttatttttgattggtgtaatttttggtaatagtgagactataatgggcatatttatgtgtgaatttaattctcttgggaaagaacattttgaagcagtaatttacgtttaagctatagattttccccgcagtatactcacattatgctttttatgtttttttctttcctctgtccttgtcactgtcacttttagtggtgcccacgtaattgctaactctattagatagaaaaaacacttctaaagggttgaacttgggttttcttatcttagtaggctaaaagagtagccatcagtcatgcttattttgtatactgagacacggtggccagttttgagtgggcataggattcattttgtatcagtgatacaggtttaattagattttgattgctcatcatattgatcattagaattagtgtttgggaatggaactgttacctaaaaattaaagaccatgtcagtcataagatgactaccctcactctgctctgctctcccctcctggtttacaaaagtaatttaacactgcatatttttaaaagttttcatcttttatgtaaacagaatatataagaaggaaaagtaatataaattgatatataaattgataaacagttcatatgatattgcagtaacagaagttcaataggtttaggcagcaagaacagaatgtctttacagtaattttcagaactagagatttatgcattggcatataggtattttaattttaacacaaaaagacaggagaaaacatttttttctgcacagaaaatgtaattaagtatctaattttgtcataaaccaattttaacttactggttcaacttatgagttatctgaaacttcagataacatgaaaaaattagtgttttcttagctgtaactcactatagtgctcaaagagagaataatagaattttgaagatgatttgaaataactctgaactttaaaaaattgtttatattttgatagaattttatgagaactagtccaggatttcttaggagctaataatgaagaaaagaacaaactaaaatatttttttggtgatgctctttatataatagaaaatttaaaaactgttaactttttaagagtttcattgatttagtcattattttagtaactggttatcagttgtttgtccttagcacagtttttgggcgtaactgggtggccttgagaaaattcatgaatttccccatccatttagactattctgtttacagagtgccttgaatcttgggtggtcggtgctacctaagtgtttagatataatgttttatatttgggtagccttacggtaaaatcctagtttcacttttataaaat

SEQ ID NO: 55465 - DNA, 1004 bp, Bovine  19866881296993
  misc_feature (1)..(1): n is a, c, g, or t
naaaagttttttgttgttctatttttattcagatgacagaaaataatttttcgttgaagaagatagaaattagtgtttcagaagcagaaaagcgaactggaagaaatgccatgaacatgcaggaaacatatactgcttacctcattgaaacaaggtgagtgatgagaattatgtctgaggttagaaaaagctttggtagctgttgatgtaaattctgttgtataatggaatcatttacaggtcattgtcttttagtttctttactttttaacaggtgacaaggttttcttttactctggtactcttagtagctaaatttgaatgtattaattttggagggagaacaaaggttactggatgttacttgatgcttgctttagtgtcaagtaacatccagatcccatccacatcacaggcctgcccatgcgggagacacgggtttgtccctggtttgggaagatcccacgtgcctcagagtaactaagctcatgtgccacaactgccgagtctgtgctcgagagctcgggagccatgacttctgagcccacgggccacaactactgaagcccggcccctagagcctgtgctccacagcaagagaagccgccgtgcaccgcaactagagaaaagcccacacagcagggaagactcagcacagccccaaataaaattatttatttaaaaaactcaccagaaaagtcttttacttcataaggaaaaagttaaatgaattaaactgtttgtccagagaaaagcaaaggatgtgtgtgtgtgtgcggtcatgtctgactctttgtgacctaccaggcttctctgtccatggaattcccaggcaagaatactggagtgggttgccatttcctcctccagggcctcttcctgacctcttcctgacctagggatcgaacccacatctcttgcgtctcctgcattggcaggtggattctttaccactgcaccacctgggaattttgcttattataaatagtttatataaagactat

SEQ ID NO: 55466 - DNA, 3080 bp, Bovine  19866881324797
  misc_feature (1)..(1): n is a, c, g, or t
ngctgcgctgtaggggttcgcgtaagtggggttgctggaggcacgcgagttcagcgttgaccgaaaccctaggggtctgtgctctgtctccggagctggtctcggtaagtctccggtcctttgaccacctgcagccagttctagtggatcgatggtgtcctggccctggacagaggggttcacaaggaaggagaggagtgtaaaactgtgtcctcaggcgctgggcagctaggcagtcagctccgacccttgtgttgaaggagctcagggcaaaaaagagctgggggcagctgtgtttaaaagaacaacaacatttgagcagagggagtctgtgaaggatgagtgggatcaaatatttgggtatcaaagagggaaggagatgtttccagatgaggcaagacaaagttccttcctcagacagggcctggtataggaaggatgggcaataaggatccagggaaagaggagccagactgatcgggaacactgtttactttccagaggggtctccccacccagaccaccaggacccccatttccagaagaatggcccagatatctcaagtgcaggaactcttccacgaggcagcccagcaggtaggcctgggtgggttggggggtctgtgagaaaaggtcaccaggcaagatgctgaatggaaatcttacggtggactattttaaaagtaatgatctcagacatttattttggtattccagcttaatcgagaaaatgttacagccaactcctagccatctgtgtgcaaaaaatattctttggtatctagcagattccgaatcctggacactcctcctcctaccctgccccacccatggaggttttccatgaacagagtgaggactgagataatacaaactccttttaatactgtatcaaaccaatgtaagaaggtaaatttatttctgacaaagtcatactgtatatactgaagtcaaatagatttctggattccctggtatctgcaggtttttctttttctttctttatctgttgatcattacagtaagtattcagtgtaggtatggaattaaatgactctcccctaaaaaaccaactgtgcttaggcatttatcaaggagcaacttgcaccagggtctttgctgtatgatgatcactcaactgtgaagttttcagtctcttggatatctctcgtctttatagagagggttagaggggttttctggcattataacagggagaatgagccccccaaaaggagagagaatcaactcacggcctcacacagtaacaagagaatggggtccaaagccggggagccctgagccaaagggcagaggctggagaggcagatgggattcaggattggtggggaaatccaagctggctagttacccctcttcatgtgcatgggtacatatgaaaaatgcatcgtggtggctggcagctggcgagtgctcagcaaaaggtactgctccccttccccctggcgggcccagtactgtatcctgcattctctactgagctccttacacccagccccctaaatattcaaggtgtttagaaaaaatgagtgactggagacccagaatagctcctcagagagatttcagaactcttgcccagaggtctttgctcctaggtgaacgagccagtaccatatttttaatgtggttgagtacccttatagaaaccttgtcttacttattttatttaactttaagaatgtgtttagctcgaccagtttctcgtcatacttgccatgcattttatttgtgtttgcaagactgtacatgagtgtttatgcacctaatatatgttcatggactacttcctaaataatgggtactgttaagcttgaaaaatgtacccagatggaaaacataaggccctcatttccagggattctgaaaggagagcatttggttcattgctgtgagagggatccattgaggctcagctgtgaccctctctctcgtttaaaaccttcagtggctctcctatccaccactcaagagttcaaactccttagcctaggtcctgcacagtctgacccagtctgagtttcaaacctgctcccctgcatcttactctctgtaccccaccttccagacaaaggtccattctctaggccctgtacttgtatctttccccttgctggtctttgctaatacttctcactcagctgatttgtctctgaactctccaagtatctaaggctatgcttggcatttaagtagcagtaaatgttaattgactaaccaaatgaacaagtaacagatgaccacagtgcaagctaaattgccatgaattccctaagagagagttgattttatttttaaaattttttgtaattaattaaagccacaactacgtggcatgcgggatcttagttccctggccaaggattgaacccgtgccccctgcagtggaagcacagagtcttaactgctggaccaccagggaagtctcgagtgttgatttttaaaatgatgaatgtaaatgcctatgtatcaccttcctctccatctccctcagtctctgaacatacagggattagacagtgttcaatgtcaaggcctttggtgttcattatctagacatcttggaaatctctccctttgtcttcattgccctgtcttgtccaaggtatcattttttaattgaattatttcatatcttcctaacttctttctccacatctcgtctaaagcgatccctttttaaatcacaagtctgtacatttgactcctctgcttaaagcctttccatggcttctcgctgccttcagaattcagttcagactccttaccttggtccccacagcccctgcccacccgccctcacatgatctgactggcttcccctgctccctcccgtagcatgctctgtcagtgcacttgctctgcagtattgaagtgagctgtttctttcctgtcttcctgggtggtggtggtttagttgtgaagtcatgtccaactcttgcgatccccacagactgtagcctgccaggctcctctgtccacgggattctccaagcaagaattctggagtgggttgccactcctgtcttccttaagactgtgaatccctaagttcaggg

SEQ ID NO: 55467 - DNA, 1886 bp, Bovine  19866881603033
  misc_feature (1)..(1): n is a, c, g, or t
nctcctccatccataggattttccaggcaagaatactggagtgggttgcccatttccttctccaggggatcttcccctacccaaggaaattgcctggtagctgagttggtaaagaatctgcctgtagtgcaggagacccaggttcactccctgggttgggaagatcccattttatgtaaattaggagctataaaaaaaaaaaaaaaatcatgctccagtcatatagtgatataataaagtgtaaagtatttcaagtgtttgtgattcctgaaaaaaatatactttagcagtcatgaagattttagtcatgaatttctgttctgaaagcggtatgaatagaattgtagacatccttttatgcattttgtattcatgattattttaatggcttaggaaactcaagacatatttggccattgctgtaaaacctctcttttgtttttagttttaaaagttgccttaaatcctgtcattagtttaagaaggattatatagacatttccccaaataccttttgcttcagtgaataaaactttaacatgctgttgttaggaatttgagtacatgttctggaataagtgtcttttcctttcctatttaacaaaatgagaagaaaaaagtattattttatttgtgtcagtgattttaaaatactaattttgccatgtattttgcactctgttttagtcacaggattggattacatttattggtatcaatgatctttcacaatcatcttgaaaggtgacaaatctatttgattttgtttatttgcttaaatagtcattggtaggatatgtttcttcctctctttttggctaaatcccaacttgttatttctattacactgtatacttttcaataaaattatttattatagccagttcttactactctttgtttcttttaaagttcatttgagggattcagaagtaattttatgtttattgactcttgggtccttgtcttttgaggcatttgtgttgactttttgtgtgtctgcatgctttaaggagtacccccccattcaaatacttttcacttcatcatactctttgaatattattttcagaaatagatttattaattgaacttgttttaaagagaatagatggtagtttatatcagttccccaaggttatttttttaaacaagattttactcttttatgtggctcttagaaagtatcctatttgataggaatctgttttagcagaaaacatagaataagtaatcttgctttatagtttttcctgatgagagtcatattattgtttattattattgatttcgactcacctggtaagtaaatgaatcaaagtatctctatcagtcggttgttttagggagctaacctagaatggtctatttttcagtattctccagtgctcttaaagttgttagactcaactttttttttccccttgctgctaagtcgcttcagtcgtgtccgactctgtgcgaccccatagacggcagcccaccaggctcccccatccctgggattctccaggcaagaacactggagtgggttgccatttccttctccagtgcatgaaagtgaaaagtgaaagtgaagtcgctcagtcgtgcccgaccctcagcgaccccatggactgcagcccaccaggctcctccgtccatggggttttccaggcaagagtactggagtggggtgccattgagttttctttctatattctttagtaacatagctagtttcctaacacttttcatatagttctgtgtgatatttgatacctaattaattgatctggaattgtgagatagtggtactgagtggagagttatactctttcttagatcaaatagtgcccaaattgggaagtcatagacaaggctctgatagcatccatctagctaga

SEQ ID NO: 55468 - DNA, 1739 bp, Bovine  19866880425694
  misc_feature (1)..(1): n is a, c, g, or t
naccaaatatgtggggtttttcctccacccccttccaattctctgacaccagctctacagtgcagttcaattctgatactaacccgagttaactcagatcccacattattaagagctcagtcttgtaagattatccctacttcatatgccatgtagattcccaagttacctgcaatttctgtctgacttgtctacaaatcgtacgttcctatccatcccctctcacatgtttaatagtatattagagtagctcatagaacccaggaaaatagagcttgcttactattggcaatattttaaaggatacaaataaaagccagagagagagatgcattgggcaaataatgtgggaaaggactcgaagcctccatgccctccaagtgtaccaccttccctgctcctccacactttcagtccagaagctctctgaatctcctccttttgagtatttatggaggctgcattacataggcatgattggtgaaataattggctactggtgattaattcaacctctagctcccctttcttcccttttccccagaagttcaggagtgaggctaaagttctgctaatcatgtggttgatttccctcacttcagcccctatctgtagaggcttttagaaagtcaactcatcaatctaaactcaggtatggttgaaaggggattgttatgagtaacaaaagactttcttttcatcttttttggctctgtatcacttaggaagtttcaggaagctcctttgtcacaaacaggacaaagatctaatatatatttcatattactataaatcacaatatcatagaaggaagatgtaagtttgcctaaattaagttcgaaaggtgattgttcatttctctgcttccataaaattgaatactcttccagaactgctgaataaggaagtattagcaagtaagagcttttcactataaacaaataggaactataagaaaattcctagataatgatgaaataaaagggaaagcatttcaaatgaatgtgccacatatgaagcttattttactatatattatgtcaactttcctggatgtttgaaaatttgtataatactggaagatgatgtgtattatcttggagtcaatatttatacttagaatttgggggaaagtaatctcttagaaatgactcttggcttatgaaaagtatgtatgttaggcaaaaagaaactgttaaccagtttgatttttaaatggctttataaaatttactttttactaataaagcacactcagtaaataaaacaatttttctatgaagtcaattcaaagagcataaatactaaaacagttacctaagaatatttagagaataagaatgatctacagagaaaaacttactagtcagaccacctatttaatagataatatatttaaaatatttgtttgaagcatggttgagctggcaggaaacttagggaaacaactcataggttgaaatgacaaggatgtttgattccataagagtaggcaaagtcacagtttgttttgagggcatttgctggcacctggcagtgaggtgcttggtttataaaggcggtgtactcagaggattggagacaaagcctagggctcaagcagaatgggaaattggatcagggattcccacatcaatttaggacccttgaagggcagcatcttccttgagagatctaaaaataaggaaggcatgagatgcaggaaggaatggttaaacctgtgggagcctaaacaaaaa

SEQ ID NO: 55469 - DNA, 1356 bp, Bovine  19866880437049
  misc_feature (1)..(1): n is a, c, g, or t
natttttaattttctttttattttaacaaactaggaaaggacataaaatgtcaaagaacttctattcctatttgaattcctaaaggttcaaggattctaaacctctttcagccctattataactttgaaggcaatgattcagctctgattcacatggtatacaaaatatttggttgttcttcctttcttctctgcctgcatgatgtgctggaacactttgcacgttggaattgtaagctctttgagttcaggaactaggtcataaattatgtatgatatttgagcaatgccaagcttaaatatttactagtatgattttatctactaccagccacacagacataaatgttcccagtacctaatctctgtaagcagataattcctctaccttgccttttaaatccagagtcctctttaaagagatttttctttgcatagtggttggcttataatccatctactctcaccagaatgtgagttccgtgagagcgaaagtattgtctgttttgttcaactctgatgtccccataacttacaacagtgcctggtacttagtaaatactgagtgctgaataagtgaatgaataaatgattgaattatcaagtcactggccatcttttgtaaatattaccctaaatatcctatatgcatatgcaaacacaaatggctcttccatggccttctctctctttccactcttccccaccaactcaccagaaaaactaaatagtcattggccattcttaaggatctgactgtcttttgctgaacagaaaatgaaaatgctttgcttttataaaaccttatgtggggaacttgcatctcaaaaaagatgtttgtaatgcctaagtgttttctgttttattaaatccagattgttgggtggagtcccttagctaaaagtcactctcaaacaaaatgaattgcttgttattctcacaaagaatttacaggaagcaatttgtagaggttgccatcaggctgaagtcattgttggcgctaggaatcggtgtgtcatcaacctcagagcagtcatttaacctgggtctgctcagagaaatctccataatgcaaggaaaattgaattctactgcttcagattacaatcacttttgatattattccaatttgatcatggactttaaaatatttgacatatcagtttcttccatcctgccactatgtagaaatatctactttatacgagctttgcactgtgcctatcattaccaactgcttcacaaatagcctttttttttttttttaaatctgcgctcctaatgggatggattataaggcagcaaacacttcatgatccaatagctccaaatttggtagttttgaccttgaatgaa

SEQ ID NO: 55470 - DNA, 2172 bp, Bovine  19866880450555
  misc_feature (1)..(1): n is a, c, g, or t
nattgacaaagtggattcttaaccactggacccccagggaagtccagaccattgatatgattttgagcacatggagaaggaagtagtttcccttgggcagcctcttttgcccactattaccaaactttatcacaccccactccagtactcttgcctggaaaatcccatggcggagcctggtaggctgcagtccatggggtcgctaagggtcagacatgactgagcgacttcactttcacttttcattttcatgcattggagaaggaaatggcaacccactccagtgttcttgcctggagaatcccagggacgggggagcctggagggctgcagtccatggggtcgcacagagtcggacatgactgaagtgacttagcagcagcagcagcagcatcacaaatatatatggatatgcctttttaacaaggatttgtatttttttaaataatacagaaaacattatagtccgtcaatggctaaaaagaaaaatcctgtttctgtcttccagtctctcttttccatgaagtccagcagaaaatgaaggaaggaaagaaggaatgagggcatgggaaaggaggggaagagggaaagtgatagggagagagatgagaggagacagaaattttccctttttgtaaggacaccagtcatattagattagggtccactctaatgacctcatctaaacaacctttgcaataaccctaattccaaataaggtcacatcctgaggtactggggggttaggattttaacatatggatttgaaggggtggcgacacaattcaactcacaacaatccataattctcaatattccagaagttatattttgctccagggttcaagttctagagctaaatatatgcttaatactataatggggaggatgtcggtgtatatttcagaataccctctttcctatcaccaagaccattatgataattgaagggtagaagaccatattcttctatcttgaaagatttatatatcttttgaagcaaaaaattggaggaacatcaaaattccttttgtgtataagagactgattctttgactttcagtgggaaccttttattaatttacttttcaatagggaaagaagaatacagtacttctctctccattaccactccctgaaggaggggcatgggaagagggttggttagttcctgattcaacctttgagagcaacttgtcctgttgctgatacaaaccaagtgatcacatgttaactgcagattcccacttgcccggtgtgagtgaggctttgtactgaacaaaaggaagacagctctacatttaaccacagctaagtcctttgtgggacagacaggaataacatacagattgcaacccataaataatgcacctcaggtcatctgcattttgcctactctttaggacacaggctactattcctggacagtctgcattaaccctggattcctgactccagagcggattcttgcagagagtggtgatttccttcacctcttcctctccctatattttcagtccagacaaacataaataaaccaagcataaataagtgggcagtttctaccctgatcactgaagctctaaagatagggcactgaactcactaagtgatgaatacatgccatatgggctaacggcaagttcggatgtaaattgtctctgtcttgctctctgcattgcagataaaaagtcccttgtgtcatctctttgtactgaactgtgtgtatctgaaaacagctaaaatcactgagaaaagtggaacgtttaatttcctctgaaaaggactgggtgttattgctggcatttaataattagtagatattttaaaaacattctttgagtgaggttgcacacatttgcttttatttggaatcccatattttaagcaaatgtttgactccttttggctagctgccttaatagtgcagtgcagtatacaagagttggagtcaaaagattctcgtttgtctgacgttaatatttgccaagcacttactgagagccggcaaccattctaggcacttaatgtaagttatataatttactcttcacaataactctagaaaacaggtattcctggtattcctgctttttatacaaggaaaccatttaaatagttcctagaagagctggattcaaatccacatgtcaaccacaaagataatactct

SEQ ID NO: 55471 - DNA, 1527 bp, Bovine  19866880485984
  misc_feature (1)..(1): n is a, c, g, or t
naacagagaattacactgaaatattttacatcttacttttgaaatggaatcctgttacactctgtaaaactcacatagaaactaaagatatttaaaatgaattatcactaaaactaaggataaagtctgtctagggataaagcctttttcttttaataacacactaccagtcatataatatgtacacgaacactattttctataaaactgaaaaattctctgaaggttcaaacatgccaccaccaagcacctaataaaatacaattttaaataaaggcaaacaatttgcttcctattactaatctgatataggtaatattggaatccaattttctttcaaaggtgtgtcttttcaaagaatatccaaccatccaaacattatttaaaaaaaaaaaagaaaaatgttaaaaacttttgtgttagaaattgtcccaggactatatttttacatttttagcaacctgacaaaccactctgtttgctttcttctgccaatacaaatcaagccaaggagtagtttcttcatttatttcattcaatgtcacaagactatactatgtcagggtaaaggtcaatcatcaataacatgtgctgttgataagttgaaatataagtgttcatctgggccctatttcaaaggctggcccattgtaacctatttaataagatctataaaactagaagaatatgggaagtccaagaagtataaaatacccctttcccaccaaattttgtttgccaacatcctgtagtaaattaaagaaggtacttacagaactttatgtggtgggccatcagaaagatttttttttttttttttctttttttctagaagctttaacaacctcatgttttaaaaataaatttgcaggaaggctaccctgcaggcatctatgacagtgtcacaaggtttcatatctagcgtgggtagctggataaagttggacattgaccagttttgtgtatgctgaaaggcaccaggatggaacgctgttttcggcaattggttatgagactgccagtgcagtgggttggaagatgtatgcgttggcactctgtgtgaaaccagtatgcttgctgaaaaggttactgcagtcttgactttggcagctatcttcttcaagtgatcatgaagaactaagagtgagatccagagttaaatctatgaagatcagaagctgtgcatgtttgaagtactgcctgtcctttataacattgcgtcctctgaaacagaagcatggagtagtcccttgagggcggaaggggtgggagggttacataattgagaaagtgtcacattttaaaacactcaggtaattaaactcccaactttcagggtggcatttaagttaaaccattagcagatgtaattatgtaaatggaagaagcaactctgtaatatgtaagtacgaatatcatcaggttaagagccccacactctgtctactatatgtctgtgtctttctaatgtacattctgagccctctgcatccaaaaacaatttgtgagactatacagtctcacaga

SEQ ID NO: 55472 - DNA, 3198 bp, Bovine  19866880507730
  misc_feature (1)..(1): n is a, c, g, or t
nttttattctaatgctttgggttgacattgctataactatcacagaattagtttgaatgtcagatttcctccaaaaatagtatttcatggtgatttaaaaggctatgtagctactaaggaataaattatgattttgaataataatatcaagaatgttcattcctccagtatgttacactcctagaaaagctactggaagtcaaaattagagaagccaagtttttattttctatagaaataatggtataataaatccagaattatattcaaaactaagggtcaagtatccacattttcctagcaataactagcaacactgctttaaataaatgtcatataacgtaaagctttgttgagtttatttataaactgacaatttattgactagggcaactcagttacctgtcatgtgactttatatttcctaaagtatcatcatgttctataaatatttcttggtcatttctactattgcatttaatgttttaaattgaagtaaaattggaatataacgttatatgttacagttatacaacattataatttgacatttgtgtacctacagagtgaccaccaccaaaggtctagttaccatccttcaccagacagttgatcccttttacccatttcacccatccttcaacccctcgccctccaataaccactgatcttatctctgcatctgtgagaaatgtttccttttgtttgttcatttgttttgttttagatcccacataaaagtgaaatcatataatatttgtctttctccatcttatttcacttaatatcctcaaggttggatacccatgttgttgcaaatagcaagatttcattctttcttacggctgagtagattctgttgtctatatattcacacaccatatcttctttatccattcagccatcagtgggcacttaggtcgcttccatatcttggctattgcaaataatgctacaaagaacataagggtgagtgtatcgttttaagttactgtttttgtatttttttgcaaaaatgcccagaattggagtagctcaatcatgtaatagttatttcttattttttgagggatctccatactcttttccgagtggttgtaccaatttaccttcccaccaacagtgtacaagggtttccttttctccacatcctctctgacactattatttcttatctttttgataatagccattctaacaggtatgaggtagtgtctcattgtggttttgatatatgtttccctaataattagtgatgttgaatatttcatatgcctgtaggccttctatatgtcttttttagaaaaatgtttatttacatcttctgctcatttttaaaattgggttgtttagtttttctatcgttgaggtttctttctattttaaacaaagtaattaaaagctgaattaagatcataaattgcagagaagattctttggagtatcgctttagagcaagaatttggagcagaggttttggagtatggcatacttggtcataaaacctacttctgcctatcattcatttaaaaatactgaattctagtcgccacagatcccataatgaacaacagagacaacttccgcagtctcatggactttacatttgagtaccacttgctggccatgacataagaaaatttttaaaaacatctctagggtttaacctcctcatcataaaataaaaataatagcacctaccttattgcataatttttaaaattaaactaggtaatgtctgtaaagcacctagcacatgtgcctagttttatattttaacatctgcttttgaaaagaattgtaagaaatagaaattcataaaaaaggagaacctttaaatcatccataatcttatcatctaaatataactgttattgctattttaatataatacttccaaatttttctatgcatttttttcaaactttagacttttaaattttatttggttatagccaattaacaatgttgtggtagttttagatgaacagcgaagggactcagccatacatatacatatatccaatcccctggagaggggaacagctacccactccagtattcttgcctggagaattccatggacagagaagcctggtgaactatagttcatgggactgcaaagaatcagacacagctgagcaactaacaaacacatttatcctcaaaccccctcccatcaaggctgacacataacattgagcagagttccatgtgctatacagtagctccttgtcagttatccattttgaatatagcagcatgtacatgaccttcccaaattcactgtcccttctctctggcaaccttaagttcatttgctaagtctgtgagtccctttctgttttgtaagttcatctgtaacatttctttttagattccacatatacaggatgtcatacaacatttctccttctctgactgacttagtaagtaagtctgactctctctaggtccatccatgttgctacaaatggcattatttcactctttttaatggccaagtaatatttcattgtacgtgtgtaccacatcttctttatcccgtcctctgccaatgaccatttaggttgcttctgtgtcttggccatcgtaagcagtgctgcaatgaacactggggtacatgtatcctttcaaatcatatttttctctggatgtatgcacaggagtgggattgcagggtcatgtggtagctctgttattagttttttaaggaaccgccatactgttctccatagtgactataccaatttgcattcccaccaacagtgcaggagggttcctttctctccacacgctctccgacatttgtcgtttgtggattttttgatgatagtcattctggccggtgtgaggtgatacctcactgtagttttgatttgcatttctttagtaactagcaatgttgaacatcttttcatgtgcttactggccatctgcatgtcctctttggaaaaatgtctattcaggccttatgcccatattttgagtgggcagtttgatttgatgttgttaagcatcataagctgtttataaattttggagactaatcctgtatcattcacatgatttgcaaatattttctcccaatttgtgagctttttgcgttgttttctttttcatgcatatatttttaaaaactataacatatacttttattttaacatccattttgcctaattgcccttcaaaaaatgt

SEQ ID NO: 55473 - DNA, 1291 bp, Bovine  19866880531846
  misc_feature (1)..(1): n is a, c, g, or t
ntgatggcaccctttgatttggtacaaacctcattagccatactatagtgcagtatagtatttgtaatggaataacacataagaactaaagactgcaaggtatctggttaatgtagagatgaaatgaatgcaactgcaaggctaagctttcctgacccttcatgaaagaatagatgaaaaaaggaagaataagctattgtgccaaagggagatgatgaaattcaagatccacacacataatctctggctcagcctctgaaatgttaatccctgggtagaattatttgagctatagattgcaatttatcatcaaaatggcactgtgtcaaacaatactttttatatgtgtgatgtttggaactatccaattttaatataaaatggttcacagagcactggctaatattttagtcacaactctttaaggttatgattttggggagggcatggggtggtttctttacttcagaaatactaattgtattttagattgagggctttcgggggatcttttctgcttttcttttagtgacagtttagttttagtgccaggaaaaaggatttttaaagaatgcctcttgttaaattaagttgtttagaattgttttctttcacatgctaagaatacgtttataattatagaacaattctgttgtattcttcgacattgcttaaaaatacactagctgatgaaatagtttcttttttttagaatttatatggacttttcctttattatatcagatatttgtagatttcctcttatttaaattaacccaacttcagcccactaggatatgttgtcatgattagtatctgtttgtgatacagtacttgctccttagaagtcaaatcatcccagttttaaaaataaattttaatcaagtaggtgggggaagggtattgcatgtctatcagtcttttagagtaataatcgtagatatttcctatgtaaaaaaaattaactttagtattttaaaggatcagaatgcttaaaagaactctgtttttgaatctagaagcttgaaattccagtttaattttatactttttctttcagttttatcatgcctgcatttaaaaggctcttattttttttccctatctttaattaaaaaccactcttctcctgcattggcaggcagattctttaccactgccccacttgggaagccccaaaaagcaactcttcgctattttattattgagaaattattttgcttaactttgtatttaattcttagtacctattcccaaaaatttgccgacagggacctctaacaaaaaccta

SEQ ID NO: 55474 - DNA, 2617 bp, Bovine  19866880592360
  misc_feature (1)..(1): n is a, c, g, or t
naaacatgaagttgaacttgaataagttaaatgcacttacgacgctactccactgcttttccttttatgtcttaaaatctgttgcctttcacctttacttattttagtatctgtggaaatcccaccttgtctaaatgcttcctcactcgtaaagcttttcctgttccttcctctaagaaacgtattgtcttctaatctctagtaaaaccatgtatttcattcatcatctatgtatttagattagttgtgtttgtctttgaaagcaaggacaactgtgtttgaatccgtataacgcctctgtaattccttatatagtaagtagccaataaatatttgtcaaatacttggttaaagtctgactcatttagaaaaaaagctgcatttggttgtaggatctgttaccctttctcaggcctctggtaatggagggcagatgagggtatcaacgtcagatttgtcattttgtgtaggttatgaagttctttgcagtactttgaaattccaaatgtttataatatgtaacctctgcaccaagaaaaccttgcctcaagtaatgctttgagttcagaatacttagaggtataaaaataaggatatcagtatcttaataaatgagcctggtgggctacagtccacggggtcacagagtcagacatgactgactgactgaacactgcacaaaaagtgctttttaatagttcactcaccaagttatctgtccccaggtttcttttttaaattaatttttattgaggtatagattatttacaatgttgtattagtttctgctgtacagcaaactgaatcagtcatacatacacgtgaagtcactctttcagattctattcctatatagaccattacagagtattgcctagagctacctgtgcgtattagttatctattttatatatagtggtgtgtgtatgtcagtctcaatcttccaatttatccctcccttctttttccccttggtaagcataagtttgttttctgtctctttgattctatttctgttttgtaaataggttcatttgtaccactttttaaaattccacgtataacctctgtcataaaatatttttatggtttccttttgtcttgttttatgcaatgatggaaaataatgatatgtattaacctaagtaagagaatttcttaataaaaataatgttttaaatttagataaattatgaaagtttcttaaaagcagaccattctgccccttccttttttgtaagttggtaaaagctaatatcaaggctgtttgtgtattttcctaattgaattgactggattaaaaaaatgtatttcaactttatattttacttttgttacaggatcctcatgcagaggaatttgaagataaagagtggacatttgtcatagaaaatgtaagctaattgtaaattctgtcacctttcatatttttaactatatacattactaaggggcattttggtggcagaagaaatgttgctttataaaaaattagtgatttgtagcttttagaattttttaagtgaaataataaccagtagaattatttgtgaacattgagtcagccaaaaatttcctttaggtttttctgtaagatgttatggaaaaacccaaatgaactttttggccaatatttttgttaaaaacataaaagtaaaactactcattgatactgaattatgtatatgctctatgtattctgttgggagtttgagggaaggattgtgtcttattcatctttttatctatttagcatctgacatggtgcttctgacataacataaatgctcttttaaacatttgttgaatgaaattatgaatgatcttagaaatatttgaaaataaactatatgctttaactctttgggttgaaggattctcaagtagtactttaataatcattttcaattagtttgcattttatgatggagtcccaggtgacttgtaggaagatagtagttgtttaatgaatgtttattaaatggagattagggaagacaggcaatgaaactatgtgtgggttctgaagtctgagagacagattgcaagccctagatcttccatttataagctctgattatgataagtttcttaacttctcagcagtcaatttatagggttgtgatgattaaataatttcaatgaatattagcttttatcattgtcattgacatcactatcatgatcattattacagttgtaaaatatatttgtaacagttttataacatgctttataaaacagcatgttcttcctctctgtaagtgattttgttttatattttagtggtaaaaggaatcttacacttttttgaacagtagctggaccatttttagacataaagatctggggagcttgggagggaggtcatgtccaaatacagtggaaggagttctggtggctggatgtcaaactagtgtcattgtgtaaaggttcacacgtgttaacaattctgacttttctgtagtgataggtttgaacactgtagttggagtaatgttgaggttttgaaaacagacaaacttacatttcttgaaatttgttacagcctcaaaaatctagctttcattgagttaaaatcttctccccaatggatggttttaacggttttcaatat

SEQ ID NO: 55475 - DNA, 1499 bp, Bovine  19866880593572
  misc_feature (1)..(1): n is a, c, g, or t
ncaagtgtcagatgcagccatcagtgaaaaatctatcccagtacccattcactctagcagcagccaaggagtctcagcctcttggagatggaaaacccagtgccttttcacctacctaacagagtgagatgcatcatttcatctttcacattatttatttttgacaaataaaaattgcatatatttaaggtgcatgcatatatgatttcttattaactgtgaaactgcattatcttccacaatggatacagcctaagactggtcttattgtatgattctgttctttcgtttttaccaatacttccttcactttcttttaagtgaaagaggaatatgaaaagtacttttataaatattgctggaatatttgaatgcttctccacaaaactatgctattccaccattcaaaggatttataactttttggaatctagtgtatctgaggctaaaaggttaacagtttagccagtgttctcaaattaagtcacatgtcttcagttctaagaacagggatcaaaagtcaccctgggacctcaaagaaagaaatcaacatctattttagtttgtcaaacggaaatcctattttcatacaacaaaggggtttttcccctttctttacaactattcaaagtggggttatgtatctggggaggtaggtatgctttagagcaggactgaatgctgaaaggactaagattgaaatatacaaagaaaaaactcatttaaaaaatcaaggtctccccgtaacacatatcctgttttctaagaaaacaaatgtactaccagatccagtaaaactctcttcggaaaatttttaagaggccagaagcaaaattagagaaaggcagtatttctatagttaaaggaaacagaagatgtcacctagaagaaactcagactgagctgaagctctgacagcttgaaaagatacagaattgagcaaattgacttcatttcaagaggttcaaatggaaacttgaaaaaaagtggtctcctttttctatattctactccaagaattgaagtggtcttatataagaatgttgacactagcatttagctgtacttaaaagagaagggaagctatgaggtccagggaaagctgccctggaataactgttaggagacaagggctctagtttcactttggtcacttgtcaatgtatggcaggttactctccctctctgagttattaataaccatggtgatggtggtagtagtagaatcagtagcagcagcagtagtagtaatattagcagtagcaatagcagtagtagcagcacaacagtagaagaagcagtagcagtaacagtagcagtagtaacagtagtggccacagcggtagtagcagcagtagcagtaatagtagtagcatagcagcagcagaggctgcaacagcagtagcaatggtagcaagtagcagcagcagtagcaatagcagcagtagtaacagtttctatttattgagggtccaccatcatgtactggctagaaacca

SEQ ID NO: 55476 - DNA, 1086 bp, Bovine  19866880630570
  misc_feature (1)..(1): n is a, c, g, or t
nacttggttttggcagtgaggaccaccgggctggaagtttgataatgaatgacttgagcatgtttgtgtgcactcagttgtgccccactctttgcaacccggtgaactatagcccacatgccaggcttctctgtccatgggatttcccaggctagaatactgattaggttgccctttgaagtgggttgtcatgccctcctccaggggatcttccagacccaggggtcaagccagtgtctcttgggtctcctgcattggcaggcaggttctttaccagtagtgccacttgggaagcccaacctgagcatagaagcatgagtttacacaagaagagatcttacttttgtctcttctaataaaatacaggtaaattccctggtggttcagaaggtaaagaatctgcctgcagtgcgcaagacctgggtttgatccctggatcgggaagatctcctggagaagggaatggctacccactctggtattctggcctggagtattccatggacagaggagcctggcaggctacagttgatgggattgcaaagaattgggacatgactgagtgacaaatacatacaaataatcctctttacttaagtaggatctatttagtttgaaaacatgttcattcctactctggactatttatgaggtgaatttttatttttctttctttatatcatctgtttccagggacccacccttgtaatatgaatacaaagactagaatcatttgtaattttgttactgacttatcaacactaaactgtgtgccatttgaatttgtttgaataggtatcgacaaactttttctgtaaatgaccagaaagttgatatttcaggcttggcaagacataaaatctctgtcacaattcaactctgctgctgtaatgcaaaagcaaccatagacaacatagaaatgaataagcatggtagttttccaataaaattgtatgtatggacactgaaatctgaatttcatgcaattctcacgtcatgaaatattcttcttttgatttttttcaaactttctttacagtcataattactgggcaaaatttttaggtaggaaaggaaaaaaaaaat

SEQ ID NO: 55477 - DNA, 2799 bp, Bovine  19866880658952
  misc_feature (1)..(1): n is a, c, g, or t
ntatattgtaatataccactactttatatcttgttgtgaaagtgaaagtcactcagtcgtgtccgactctttgcaaccccctggactatacagtccatggaattccgcagatcagaatactggagtgggtagcctttcccttctccaggggatcttcccaacccagggatcgaacccaggtctcccacattgcaggcaggttctttaccagctgaggcacaagggaagcccaagaatactggagtgggtagcctatcccttctccagcggatcttcctgacccaggaatcgaaccggggtctcctgcattacaggcgattcttgaccgagtgagctatcagggaagccctgttcttgttgtggttaaataatattccatggtatatatatgccatattttgtatattcattcatccattgacggacatttgggttgtttccaccctctggctaggatgaacatggtctcaaatcatttctttgaatctcttcagtttggggggttatgtacctagaattggaattactgagtcatatggtaattctctattttttattaagaaactatactcaattttaaaagggctatgaagtttatttagaagttgatttgtggaactcaggatatattttccaaaacaagtactgttataagcatctacaggccaaacccacacaaatctattaatttaaaatataactaaaataataataattattattattctattattataaaataataatagttattattagacctgagtcctagattcctagagcttgagcagctctgggttttaagcaccaacccctttaacactgaagctcttgcatcttgaggaggaggagggtgggaactggttggtggcccagacttctgtgcatttttccttacttgttggaagaagactctagcaaaaaagcaacaaaggattgtaagagatcctcagtcagtactataacaagatggggagatagcagggatgaaaatggccatgacatgggaagggctagaaagatcccaacattcatttaggggagaggcatcaatattagagtgaactcagctgtggtgatttatatgactagttccttctgaaattgagtaatcctaaatcagtgacagtctgaatattaaataacaatagtatgtgagagagagtatatgtgagactgtgtgtgtgtgtgtgtgtgtgtgtgtttctgccatcctatcttagggtctataaaaccctcatgcaaatgctagagaatttttttccataaggaatgttttgtgggttttgtttttatttttattttgtaattgttgcagaggaggaatttttaaatttctagcacttaaagtttataacaattagttccttgggaacaataaagcttattaaaaacatacatgtggtctaagctgatgttttataagtatagggctaatgaatctgaaccagcaatattgttagctttgcaaaaatggagtttataatgggaatgtcgataacccttttactaaagtgctacagatagtgttactctaatgaatggtttttctttcccattcctaatctgttttcatgtgatggttattaaactttcttactgtaggacagtagttttttaaactaataatttgggggtattaaatgacaatactttatttacattttgagtgtaaaaattaaatatcttctggctttctaacctttaagcactgaaaagtgatcatgattacctcactaagtcccttggccacaaatactgattctgtagctttttgtagactaaccactacaaaaatctagcaactgaccatttaaaaatatcaaatatattcaggggaaaaagaatgaaaagagataacttttctctacattcctcagaatgtttctttacctcagcctttgaggaatcaaaagtcgtaaatattaaagctgcttaaaagcaggaaattgggccaacaaaaacataaaaatgaaatttttaacttgttactaggaacccttctcactaagtcttcagaattagtcattatctttacctaaagataacaatcatagccagtatttgttacatgcttcttatatataagtttggttttatggaaaatgcttgatgtatataatattaaggacaaggagataatgtgtgtaacacattatctctcacagtggccctatgggataggttccatttaataactgggactacaaataatcacatttttagtgaggaaactgaggcacagagaaggtagtaacttgccttcaaatggtagtgccaggagtcaaacccaatctgaggactctgaagcccaacttccagataccacatgacatggtctctgcttcacatctcatcttagaggttaacttccaattttcctggagtctcattactaattctctgtacccttttatcaccatttcctgatttataattagaaattcagaagaaacagattaatattcatttaacttatgaaaaaagtcacttaaccaactcatttggcccattagagacctagcacactcatatacctcttaaaattatttcttttccctggtcatcaccatgtaatatacatgaaaatcaggctgcaaaacatcctcatttggaataaccaaagagatgaaaacaagcttcccttcaaaaggaacatctagctctttgctaatctttagaaagttctatactttaacatatttagctttcagagagtggttttcaatcaggcatcatctgcttatgaatacctgagggtgctgttctgaggtgtgttaaaagtaaaaataactaaaa

SEQ ID NO: 55478 - DNA, 1407 bp, Bovine  19866880671997
  misc_feature (1)..(1): n is a, c, g, or t
nagtaagtgaatgttagatcgctagaaagatcataatatttttgagtttgaagcaaagaagaaattatgaaggaagggttcatggtttcatacttaattgaaaagaaacatcatttatttaacttaaaaataggaaaaccggatataaattagtgacacattaattttttgatctactggaatttgtgtggcctgttttattttttgcaccttgcacagtgctcggcatataggaaatgttcacactagttatttgttgaacaaatactgcaataattaactaaatagacttggattaattatataagacaaagaagtgaccctagggtccaattagctagttgcaactaagaatgatgagtgaaaactaatttctttggcccaaatgcaaaagaaccatgcaggaggctgtctactcagtggtgggatgggaagtgatgggaaccacaggtgggctgtgtaagtgctatcagaccaaatcatgtcacacaataagcatcagctgttacagggtaatagcagccaacaggccaccctggccaagtcgaatggcttgactcaatcaagaaatcttgttcaacttgggaggcccggagatcagggtgctgaatgacagggcttataaacaagcagtctcagctgctaaacaaagagcatgattgtgttctgggagcagagagacagaggaccactcatttcttgtcgatctttttctaggataaatactcaatgaattgaagcatctttaaccagttagacttgatggttattgcatcttccatctgagacaatcctctgactagaggggttttaacatcagtgtatgattgggtacaatgtacagcaagggatatattcattccaaatcatttagtcattggggagtctatgcagtaatatgtttctgcattatttttggtctatttggtgctgatggctcacagcattcagtatactgaatcagtaaacaaattgggcagtattttgataagtctaaaaaataatcattttgatttgtcaacatcttgtcttccaacttggtgttgggacatagggaactggttgaatgtttgctaaggatatgaatgtatgtgttatcatctttttagctctgttttcccagagtgatgaaagtaaatatattaagggaaattaggagcacagaactgtacatcttccctgcatgtgcgtgcctggatccagtgtttctctgctataatgatgcccctgtatgcctatctaaaacaattgttccacttgtcacctagactggaggataggatccttcagaacgagtagaattttttgttgtgattgctattattacttgaccatcagacaggttaccgaccagaatgggccagattacatggcaaaccattcatttgcggatatacctatagaagc

SEQ ID NO: 55479 - DNA, 1714 bp, Bovine  19866880687880
  misc_feature (1)..(1): n is a, c, g, or t
nctttcttatataattgtgctacatttctggcatatatgaatttgcatacagatttattgagtaataaatcttgttaaaaaatatcttatttataaaaatagaatttggaaagcctcttttaactagcaaactttgctagtacctttaaggattctatagtgcattaactaccagatccaaaagcataggaaacagagaaatcatggtctgataagccactaccaatataagaaaaattgaaaataagggctaaatatttagcctaaaattgcatcattaagaaagtgtgattcaactgacaaaattaatttactcacaggctttttaaaaaaatgagggtatcttatttcagatggggtaattttttttatttttacatcctttgaattttatctagagttttgtctctcagaatttgggaaattatagtaaagtgtattgatcagttaacaaatgatgttattattttgtttatatttattctcatatactttgctgtcaatacaatgcattaaaataatttcttggaaaatatagattctatattagataattttatattataaagcagtgaaagctgtttgagtttatatgatagataactaaggaattttctttaatcctgtgttcagttttgccttacaatgaaatcacatttaaggccaactacttgatatacacaagatttcttttgtttattaagccataggaataacggtggccttttccttgatgacttgaaactaattgagtttggttcttcttaggttgacaggcatcttttttaacttggacataaacttgtgtgagtaagtgcttccatattttagtcatggtgagttatgagcatataaaaataattatcttcacctcataaatctttctttagtgaaatttattttagtgcttactgtaatcttcctattaatgtctcctacttttggtcagatatatatagatggcagtaaattttcaatttgaactatatttagcatagagaaaaaggccagtggcatgatgcattgtaactgtagttcataatcagtgtctgttaaaaagggatttgagacacaaccaaacccatctattctgctgcttattggcattgggtacttcttttttaagttgaatacagtaatttagtttcattggccgattttgagaattgaaagagtcatagatgccattctatggagggatcaaaaataaggctgcatttgccaaacactaatggtgatgatagggttagagtggatcatttgagttaattcatgtttacaaagttaagcacgattagtaatatgaacattcaacatttggtctaggaaaaaaacagaagcttactaccaaaaattaggattattattataatttttatgatgtttagcaaatatggtagtaatatatataacacagttcaagattggtggcctacatgaaatacatcaaatacttctgagacagtgtgagcatgttaattacatattccacagcagcattttttctgtcatgttcaacactgtgctttgctatcatttctccatttgttgaattcaagatgacctttgcatgaataaagtcaaataggattaaggcaggaattttcaacaatggaaaagagcaacagatgtagccagctttgaacgtggaagggattgttgatgggctgtttcttaaagggagtgtctgtagtggggggagataggaaaggga

SEQ ID NO: 55480 - DNA, 1150 bp, Bovine  19866880741787
  misc_feature (1)..(1): n is a, c, g, or t
ntcacatttatttggacttagggctttattctttgctctattattctactttccttgtttctagggaaaattaattaattcacctcttgcctgaagagcataaaaagattaacattaatgaagctgacattctggtggcagattcttggtggcctcactgtctccggcctgtctgattttatgtagtgatttggttgtgcataagtatcacattttataatgctgctggctttagaatactcatatcctactaatattcacacgttctactaatgtgcaattttctcattgatttttctcagacatagtattctaattattatttggatgtattttgatgaggtgactattactatcattattattagactgtagcttatctgtgtgattacatctgaaattgaacattgtctcttaggaatatactaggtttttcatgtttccttttttgtatgctttccattgtttcagttataaggaatgtttggtagttcttttgacagtaggctatacatggcattagaaaaaagaaacattagaagaaattgaatgagatagcttaggttagaaccatccttttgtttactctgccaacaagaagctctcctgcgtaagtgaagaggaaaaggccaagtacgattttgtatttgtgaagcactagaatcgcatcactttttcacttttttctggactttgctagccagtattttaatactcttaaaaaaagttattagataatggaataagtactaacagtgaagatcatcataaagtaaagatgaagaaaaggagcaccatgcagagtagggatatatctaagatcactcgctggttaagctgaggactcagattgcttaagtccagattaaaaaaagaataaaatactacattgattttaatatcaaaaagtatatagtgaggtcatagtatgagtttgtgctgatatacacatatactgtgtgggcttttaaaacaaatgttttggtttacagttttgtttttatcttgatagtagtagaagtccagagacagctttttgtttcttgaccttttttgtcttgagcaaatatgaaacgtattttgacagccttccttcaaatccaaatgaatctaaattttgaaacttacttctcatgtcctttactgacaa

SEQ ID NO: 55481 - DNA, 816 bp, Bovine  19866880837645
  misc_feature (1)..(1): n is a, c, g, or t
natcttctgaaaatagctttttgtaacatttcagtagaagaaactattaatttgttattattttattctaacttagtacttgatagtattgtcaaatcttttttttttttaagctcttctcacagacggcttcatcatcttatcatttttggcacaaaacaaactatgttttattcagttttccaagaagatgagctctcctgatataaacaaaagactggaaaagctctcagccttggattataaggtagagatttgaatgtatatggtcatattgttaattattaaggtatgctagagtattgcttgagttgatgttatgctcttttttcttaaatgattatggatttcaaaaaaaccagagttattcatagtataggattaagcttgatcaactagaaacagtggccatccaaagttttctttttttactctcatcatgggggtctaacagtggcatgcttgggagcagtttacatcgtacttacggacatcagaaagataatagaggcaagttacacatttgaaaatggttttcttgctggcagtagtatgtatgccattctcattcttccctaagaccccgtatcactattctaggcaagggtagctgctctcgcttccatttcacaagaaagaagacaacactttcaaaggttaatagaaaagtgtaataaacaaggagtgggaagatcccccttctcccaacatcagctataactgtggagaaaaatgcaaaaagaaatctccttcatgtgttagtctctttcccttcagtaactccaggtaatttgtttccttgtatcagggacttta

SEQ ID NO: 55482 - DNA, 918 bp, Bovine  19866880981381
  misc_feature (1)..(1): n is a, c, g, or t
nttattgtattaaaatgtctgttaaaaattcaaagtagcctttaaagaatgtttggcaatataattaccaaagtaaagtagcaggatcaactattaataaaatgaccgagcttttaggaaaaaagttgcaatattgaaaacagaatttcaattaatacttttttttcttaagattaaaatttaacttgcatgtttctagtaaaggcatacagcactggctaaaggaaatttttgatagtagaaaatgctgctacatcatgttgatcaaatatagaaaacggtatttttagggggctatggcaggtataggatagcacattagttcctcagttattgctgatagttttaaaatcagaattaggtactgatgtactactatccccatttctactctccccccagacacacactgaaaagaaaaagtaaaatctagcgtgggttttggtatttgaaataactaaaaatgacagagttaaataaattagattttgcctccctaaaaacaggttattatgaattgcaaataatcaatgtgaaactgctttgtaaactggaaagtatatgatataaggcattattattatgacaaaacaaagcctgaaataatctggccccaacatatctgtggttaccttctcttaacctcttccaatctctataaaacctcacatctatttatacaaattgtttgtatcatgcagtttcatgcatccatggatttgaaatgaatatatcatttcatcttcctgggaaagttctctcatctatttaactcctactcattcttcaagattcattttaaatccactaaatttctctgactacttcttctgtcctccttgctggtggaaaagaagttctccttcttctctgtggctacaaaagtgtgtgtgtgtgtgtgtgtgtgtgtgtgtgtgt

SEQ ID NO: 55483 - DNA, 795 bp, Bovine  19866881009748
  misc_feature (1)..(1): n is a, c, g, or t
ncgaagagttgactcttggaaaagactctgatgctgggagggattgggggcaagaggagaaggggacgacagaggatgagatggctggatggcatcactgactcgatggacatgagtctgagtgaactctgggagttggtgatggacagggaggcctggcgtgctgcgattcatgggttcgcaaagagtcggacacgactgagcgactgatctgatctgatctctgatcatctcattcttggtgtaatcttgtcaggtgagtttggttgggcaagcaatcttgttcaacacaatccaataaaagaaataaacctgaggatcatttatagtactgtcttggaattaatatcccatcctatccatttaaaaggcttctggaagtaggatcaaataaatggcaattaaaaagacactaaggactcagattgtccttctcactgttcacatgtaaaaattatagaaaagaccagatatgtgaccccccaaaaaaacattttaatatcccatagattccctctaaggaggacatagcacttccagttgatctctatgcctattattaaatctattaggttaacagataaaaacctagaggactattgctctgtagtagggggctcaatttttgttttggttggcttgggttttttttgctcttcttttcaatgatctcatcaagagtagatactaacctaaactcacaggtgtctctcttgcctttatctgatctttctttactctgctttcaatggctttttttgcataacctcatttttccttaaaaactaagcttca

SEQ ID NO: 55484 - DNA, 1585 bp, Bovine  19866881040668
  misc_feature (1)..(1): n is a, c, g, or t
ntttaaaaagaaagtatgattcctgcatttaaatagctatgacagatgatggtatatctttataagcatttcaagttttgaagagacataagaatatttgtgtactaaaatattttataagctctttagacaccaagttgttgaatcaaagaccatttattcctacattttagttaactttaccccaagtgtcaaaattacttatgacttatttacactccacttccatcccggaaaaattgtgactcatcctttaaatcataatttcccaatctactttaaaagtacttttaaaatttcctgaaacagtatttataagatgtttaataagattaaccttcgaaaaacgaagtatttatgacagttggagtggaatggaactttgtgtcttttatttcattagtcaccaatcaaattattcaaagccagtaagaggggtataatttttagaaacataatagattttcaatgtttaaattttgaaagttgtcatttaattgtactatttgattagaaaaactccaaaaatattttaaatcttatctccatctttgaagtaacggttatagaaatatgaatgtgtaagtttcataattaggtgatacatttgtgagcacaccatacatttgttcgctttatttttttttctaagaaaaaactggatatatttaacagcagtttcaacttttactatttttcataactgccatttcacctaaacaacaagtttttcaggaaatatttttgatttttaaaaacttttgaaagactgcacctaaagtaaggtaaaaatccaactcattaaaagcatgattaaagaattactaagtcaaaatcgcatgtttccctctcccaccaaaaatatccaattcgtttttcatgtatcaataaataccaataggatgactaaggtaaaattgatttttcaggaactatctacaacacacagccccacccccaaccaaaaaaaaaaaaaaaaaaaacctttttcaaataagtgtattctagacactcacacatttaattaaacagattctttcttaaatagagatgttttctccttgtcagaataagcaatgcattgttattattgagcattcattttttagttggtggtttttattttaggtactattgaatataaatattccttaaagttaatgagctactccaattaaaaataaaattttaaaaattaatgagctaatgagcttttttcattctcattttcgacattaaaatgcatgggggaagggagagatagtacggaaaacagaataattcgttgagaacttgttaggttttcaattaaggaattttataaatctatgttgatgctgttcttaaattaattctgcaacagcagccaagtgattttttttttttttttggtcttgaatagtaatgatacagattttctttaccaataatgtatatattaactacatttaatatatcagatacattttatttctgtatctctaaagaaaacctcggtgcctgtcagtgcctaatgacatcaataacattcatttattctgccaaagtaagaacttaccattctcacaacggaaaaaaaaaattt

SEQ ID NO: 55485 - DNA, 750 bp, Bovine  19866881148222
  misc_feature (1)..(1): n is a, c, g, or t
nggtcataaagaaggtgtataaaggaatgattctcatctgtaagaatgaaagtaaagaagggactgaattcagcatttcttttctgaactaatgtacaccaagcatttgagcaagtattcttattaatcttcatttttctccatcatgaaaaaaatctttgcgataaagtgcataaagtgcactaatctggaatgcacatctcgagcttttccatatgtctacacccgtgtaatcatgacctagatcacgagtcagcaaacttttttgtaaaggccagagagtaaatattttaggctttgcaagccatatggtctctgtcgcaactactcaactttgccttctttgcacaaaatcagccttagacaatatgtaaacaaatgggtgtggctgtgtgccaataaatatttatttagggacactgaaacgtgagtttcatataattttcacatggtatgaaatattctatttttttcattttccctcaaccatttaaaatataaaaattctccaacaccaaagaaatcttcctcaagccccttcttagtttataccctccctactaaggcaatagtcattcgaacttctattactattaccattcatgagatttgcctgtttgtgaacttcatacagggcttcccatgtggctcagggggtaaagaatccacttgccaaggcagggagatggtgggttccatcccctggtggaggaattggcaacccactccagtattcttgcctgggaaatc

SEQ ID NO: 55486 - DNA, 2160 bp, Bovine  19866881166059
  misc_feature (1)..(1): n is a, c, g, or t
naaaaaagattttagtttgttaagcagatagtagttttgtttgttcagcagtctaattaccatttcctgatcctagactgagaattgaaagagatcatttagaggaccagcattaggtaattacttaatatcactgtcttctaattctacccagttgtttgttggtctccacattccctgcttctcacacttttgatctctttctcatgcatataaatgttaagaccttagggattgaagactattttcttgactactgtgtgaatcagaaatagagctggctgtaatgttggttgggtgaagaaccctgaacttgaaaatcatggagctggttctcctacagattgttattatgggttcaggcaagccatttactctttattgcttcagtttcattatctgtacctgattagatttcctaaggatattttcaggtctaaaattctttgatggtactttttaaaattcagaattgttcaagtactatcttttctattgtcgctaataagaaaaattcaattattatagtctttttcaatgtatggggagactatgaaaatataattatgggaagtttgaagagactagagaaatagcttgatctgttgttagagtacatgagaattacagttgtcacaaatcttcagaattaagtatgtagactatatagagaggagttctaattagagattatctaagatggcagcaatttacttttcaaaattcagattgtttactctgtggggttgttttctaggactgtcaacaggcatagaaataaggcaggggaatagaagaatctctggagacgttttttaatcaacaaaactccgttctttaccactggctgtggtgtgctaagtctctattttttattaagtatagttgacttacaatattctgctggtgttttaaccaacaaggtatgataagatttacatggacatacgtttctgtgatcttgatcacttctcagttccacttcctggattcaaatccagtttctgccacttgcttgctgtgtggtcttggtcaagtctgtgtctcagtgtcctcagatatcctctcaggtgtgttaaacctgctccctgacatgcgtctgcactcaagtactctaacttcttttctattattactgaagaatgatctgtgctcccagcacaagccagtctgtctcctttcatactgttaaagacatgactctagcaattatttctcttctgcatcattaaaatttccctttcaactgagtgtttcccatcaccctaaaaatatttctgtcttaaaaaattctggcctgacaatatttctcagactagcactaacctatttctctctttctctttcagcaaaatagcccagagaagttgaatgtgcttgctagcttcagtgtctatcttcctattctttcttgaacccatgctgatccagtcaggtgtttacctaccctcaccactccactgaaacagctcttgtgaagtcagtaatggctttggctttgttaaatccagggatcattttccagacctcatcctcttgacctgttaccaagatttggcacagataattgttcatgtctccttaaaatattttctccactagactttcagaataaccacttgcctctggttttccttctatttactgacctttctttactgattcctccacatttcctggacctgttattgttgtgctccaaagttcagttcttgaacctttattttctccctctctctctgtttcccttcctccctcctgtcactcccttgggattacatccacccttaagctttaagtatcacctgtatgctgatgattcccaaatttataactccaggcaggtatatccagctgcctagttaaacagctacacttgaatatctaatagacaccttagatttaatgtgtataaaatcacgtttctaatctgattttccaaacctgatccttctgcagttttatctgttaatagcaattcctattttgtacttgctcaagggcaaaagccatacagtcatccttggctactttctttcatacagtcagacagaaaatcttattgattctgtcttaaaaataaaaaaaataaaaataaatctgatcatttcataccacttttataccaccctaagccaattcaccgtcaactctccttgg

SEQ ID NO: 55487 - DNA, 814 bp, Bovine  19866881168554
  misc_feature (1)..(1): n is a, c, g, or t
naaaaattatactaggtcaaaagagagctagtaatgttatataaatagtctctaaagcaaaatcagtagtatagattactagagattgatatcaatagaaaaatcaattgatataacagttctaaatgtgtacaattacacataaaataaaaattgacaaatcaacttttcacagttaaaattttaattcctttggtgtggtaattgatagattaagtgaacaaagtatcattaaggaaatagagaatactgatgtaatggacatgtatacagtactgttgcttcctgacctgcatataggtttcttaagaggcaggtcaggtggtctggtgttcccatgtctttcagaattttccacagtttattgtgatccacacagtcaaaggctttggcatagtcaataaagcagaaatagatgtttttctggaactctcttgctttttccacgatccagcggatgttggcaatttgatctctggttcctctgtcttttttaaaaccagcttgaacatctggaagttcacggttcacatattgctgaagcctggcttggagaattttgagcattactttactagcgtgtgagatgactgtaattgtgcagtagtttgagcattctttggcattgcctttctttgggattggaatgaaaactgaccttttccagtcccgatgccactgctgagttttccacatttgttggcatgttgagtgcagcactttcacagcatcatcattcaggatttgaaatagctcaactggaattccacacctccactagctttgttcatagtagctttctaaggcccactga

SEQ ID NO: 55488 - DNA, 1980 bp, Bovine  19866881282297
  misc_feature (1)..(1): n is a, c, g, or t
nctcatttcaggctcttaaagagaactccagtctttcacttgtttctcccactgtggctttttcactctttgactaaagaacctatttttcaacttgctattaataatagctaataactttaacttgctaataattttcaacttgctaataactttatttgtctaaacctatccacgtctaaacttatcccacccacctcaaaaaagcagcagaagcaactttctactaccacattttcttgctcaccaaagagtaattccgcttgtccatcccctacctccacgcagaaagaagtttaacccaggttttgactaatgtcccctctcttttctatccattgccacaaaatgagtctctaggactatccttggcaattgctttcatctgagggcagtggtacagattgaactctgacagggatacagcatcaaggccgctgacacttcatctgaatagctaggcacacccacacactctcccagagtttctgtttgttccctaagatgacactagcagatagcattttccaatgtgtgtgcacttgtgcaaggtaaggccactctgagatcttcctgtgaggtcttgtgcttagtgtgcctgacatctgttcttggactgaagagcgtcaaaaccccagaactacttggtgttcttaacgctgcttcatcatccatgatgggcctgaagcttttgttcataaaatggcaaactctggacctccaggttctagggtctatagctcgcagtagtgtcctagtgtgatattaccacatcatgtaaagctgttctaggcaagtggatatctgtcatttctgcctgcccaacaatcattcctccccttctcatgttttcccactttctgtctttgtaatttagatgctgaccttacttaccccacctctgtgtccctactattagtgaaaggaagtacacatatcctaagccaagccaatgaaacttgttctgaaactgctgggaaaaaggtgctgtctctatttgacttaaagtatataagcctggagtttctaggagccactagatgaagggactctccagagaaaaaagccaagatgagagagagtgagatcaagggaagtagggtggggtgggaatgaggtcttgacatcatcttcatctctggggtcaaccaagcctgaaattttcagttatgtaagccaacaaaccccctttgctcaggccattttgcaatggcatttgcaaccaacagtatcctaatatatccattgtttcatttgacctttcttctatcttctactccctgcttagtctacatagctatttttgttcttgtccactaaattgacatgtttagcacctcctaactgtgttgggatgaattttacttcaatgttcgtagggtgtttggtgaaatctgcagttgctaagtttatttttccacttgtagaatttatagttggctgaggatgaaagtgtttccccaaatccagaatgttttgttctagagtcaggcagtatagctgtctagaaggtaagaaaacatcatcactcgttataggcctatgacctatgtaagagcatctgtcagtcaaattcctaaatgtcaggatgatcttgatttatttctaggctttgtcaatcagtttatcacatgctaactgctaaaacagaatccagtgacatcctcattccagactgagtataggatttccttcatgtgagcttgtgtgttactttggttttgtagctgctatagaaataatcaaaaccactatgaggtaccatttcacgccagtcagaatggctgtgatccaaaagtctacaagcaataaatgctggagagggtgtggagaaaagagaaccctcttacactgttggtgggaatgcaaactagtacagccattatggataacagtgtggagattccttaaaaaactggaaatagaactgccttatgacccagcaatcccactgctgggcatacacactgaggaaaccag

SEQ ID NO: 55489 - DNA, 1557 bp, Bovine  19866881312847
  misc_feature (1)..(1): n is a, c, g, or t
nttttcctgatttctgtggtgtaaaatatttctaccatagccagttttgagttaccaacatgatatccttgaacttggaactgggaggagatagccttaattggcacttgcaaggccattggagttagtcatagtgagtgagtgaaagtcgctcagtcatgtctgactcttggcaaccccatggactatacagtccatgtaattctccaggccagaatactggagtgggtagcttttcccttttcccaatctagggatcaaacccaggtctcctgcattgcaggtggattctttaccagctgagtcacaagggaagtgttagtcatagtgcatcactggaatactttacaagttcctgacacatatatttcttgagaggtgtgtatgtctatggtggaggctggagtagatcagctttaaatggaatgctacctcacagcaaattgtaggatgattagacctgggcatgaggggcattttattttctttatgtcactagaaaaaccctgattcttctcttactccccttgagaacatagatttatggttatatgaagccatgttgtaagctataaagataattttttttagattcattgtcttatttaatccttttttttttttactttacaatattagctaaagataccacctcattttgataaggaagatgtatgattttaactcaaacttatacaccaacaatataaaaaatattttttgtgtgcaaagagacatcttggggacatagtaaaagtaaaaggaagaattgatataaattctgaatggagaacttaatacatgtaaaatatctgtaagaagtccaaagtcagatctaaagttaaataattttgtgacttttgttggcaaatatatgtgaaatcattctatttatttagaaattattctttctgtattagctcctttgcttggactcctttgctcctgatattacatcttatgctcgagtaaatttcaaaataaagtaagtcttttaaagtcagtatttaagaggctttaattcaaaagcattcttgaataaagcagttcaccctctaagagaatattcaaatttatttgtaccactgggtgtgctgtgcttagtcactcagtcacgtctgactctttgcaaccccatggagtgtagcctgccaggctcctctatccatggggattctccaggcaagaatactggagtggattgccatgccctcctccaggggatcttcccagtccaggagtcgaacccaagtctcatgcattgcaggaggattcttaaccatctatgcaaaaatgatttttttccccatagttgtatatagcattttaatttgggttctgtttaattatatgtactcatatgcatagaattttagtgctgaaaagactcttctagttatcttattttatagatgagcaaactgagatccccaaaagtgacttgtcagaaggttagtcttgactagtttagccaaactagggctagtctttcttgatgaccaccttagtattcttaaagtttgtagcataaaaactgcctgaatccatctgtctaca

SEQ ID NO: 55490 - DNA, 1896 bp, Bovine  19866881324719
  misc_feature (1)..(1): n is a, c, g, or t
ncttgctcactttgcaataatctttgatttactactgctttttaaaatagtaactctaaactgacaaattatttcgacagttagcattggtttagataagagcatttcagtgttcttttgtctttaactcatctctttaggaattcttgaaattcagtttattttctcttcaaagttgcattttttttctatctattcaagtgtagcataaaactatatttatggaattacaatctagaattacttatcatggtcacattgccagcatttctatattccctgtctctctattgttgtggttgagatacatcctaaaaagaattaagtccatatttttaaagatcagaagggtgggtacatgtgttggagatggtggtgagcaaagattattttatggtttgctgttattacttgcttaagcaagcatactttttcccccctaaaacgcctgatataagccattgtgattatttgcaggatcatggaaaaaatgcacttcaactagacacaagtctctttggaataatggaaaattgtgtgcagtaaaatatttgaaaagagcatcagcaaacaagatgtttgtattaacaggaacctagaaaatggctatgcaaaggtcaatactgatctttaaatattagtgaaatttaatttgttgcatgtaaagagtagtagaagaggaggaagcaggccacaatgaagaagccattggtgaactgtccaaatgtcaaaactgcttacaataaagaaaatgttaaattgatgtgatctatttacctaagtgaattaaacggtttgaacagtgctctggagaaatattttccaaatttaagtataacatgagatttataaagatttttgccatgatttattttgggaggatgaagagactcctattattctttctaggtatagaatttcttctaacctctttaagagagtatggtgcacaacttctcttaaaacaggaacctattgcttttggcttcatttagaaatagcatcacctgaccagttgttagcagctatgaagaacttacctggccttggcactctgcacagcaatagctaaattgagttcaaagagttttctgtgatgtcatgcctgatttttaaaaaatgtgaattctgtgttctcttattttaatgtataaagataaattttaaaaagaaacatgtctaatgtatgtaacaaaggattaatattaatgcacaaagaatgagatggagaactcagtagaaagatgggcaaagttgggaaatggtagtttatagaagaaacaattgttaaaaaatacatgacatgctgtttgaactctttaatgaatggaaaaatgaaacttaaaactgcaggttttttcaccttttcatttttcaccttccagattggcaaaaattaaaaactttgttaatgtctcatagcatattgaggaaggacatgggggaaaggacagtcatattactggtggacatgtaaattggtagcgtcattttggaggccagtttgtcagtacctattaaaatgtaaggtgtgcatatttactttaatagtatttttatttgtaagatgaaaatagccctgaaatgagcagtcatgttcattaagtaaattatgatcagtatacagtggaatatctggcaccttttaaaaaaaagagataaatctttatatgctaacagaggatatccatgctgtcgtgttcagtgaaaaaaaagcaattgtatgttgagtaaaatactgatttactaaaatacaaaacaagtcagtatgtatatgaacatgctgttaagtacttcacagtctggaaggccatgttgtgtaatggctcccttcagagtggggagggcctctgggaagggaattcattttaacgtcaaatacttttgtatttccat

SEQ ID NO: 55491 - DNA, 1775 bp, Bovine  19866881363841
  misc_feature (1)..(1): n is a, c, g, or t
ngtggtgcttttcctgatggtctgcaattgatgtctgtcaatcaagttgtcaggacacgtgaagaagaaaatgactttaattttcctaaaacacgtaaaataatgaacaggccgaaacatgcataccaactgagccattctctcaagtcaatattttgaggtatctatattataaaacatagtgctgtgaaaattgaagaggttttaatataacaatttatttttcattttctttcttacttattccataacatttattaaactataggaagaatacaatacaaggattaaattcggaggtagaaatacactttaacacgtacgttcaaaagactaatgccttctgagttgttacataatttcctaaactttctttttagaaaaactttgaattactatcctatatctaggttgttacaaagactagacattttacatcccaaagcaagaacatagctagaaggtccttactttttccaagagtatatctcagtgtttagctgtatttttagtgcttcctagcaacacagcgttgttttcaagagttagttcagcatagtaataattaattgtaaattgagaaacagctttgattcttcaaaactagaaaaacctgatgtgccacagtcatttaaaggctaacaaaagtaatacaatgcagcctcacattctaaactaggttgtcctactcaaaacatttcattctttccaaaatggatagagtgaaaatgcagtcactcttctcatcatgaaaataaatcttaattgggcatttaaaaaatgtttctgtttctagacttaaatagcagttatttgtattttataccaggcaatctaagagttagttcttttggaatatcaacccgtactttatcgtcacaaatcactgcaattacatgatcactgaaaagaggttgatagaataataaagctccagatgatttattatttcattatactttagttttttttaatcacaaaaatcaattctaaggttttatttttaatttttaactactcatttttgcttgttctcattaaacattttttgaggtatcatcaccatataatattacatcaatttcaagtgtaccacataataatttgatatttatatacactgtgaaatgctcaccacgataagtttagttaacatcctattattttgttgtttctgctgtttttaaaatgtgtaggatagtggtgatgttttaagtttcttctgaaaaattaaaatgtatggattgtcttaactcttcaatatatcttctgtttttctttgctctgaaggcatatgatgggtttgccagcattggaatttcgcgactactggaaccttctgatatggttttattagcaattcctgataaactgactgttatgacctatctctatcaaataagggcacatttcagtggccaagaactgaatgttgttcaaatagaagaaaacagcagtaaaagcacgtataaagttggaaactatgaaacagatacaaatagttctgttgaccaggaaaaattttatgcagagcttagtgacctgaaacgggagcctccactgcagcagcctcccagtggagcggttgacttcatatcccaggacgactctgtatttgtaaatgatagtggagttggagagtcagaaagtgaacatcagactcctgatgatcacctcagtccaaacacagcttctccgcactgtcgcaggactaaaagtgacacagaaccccagaagtcccagcagagctcgggaaggacttcaggatccgatga

SEQ ID NO: 55492 - DNA, 1685 bp, Bovine  19866881374844
  misc_feature (1)..(1): n is a, c, g, or t
ntgggggtacacagttaagtcagcctgtagccacagtcaggtggcccaaagggctctacccattcagccctatccagctactttcaagaatgaaaggatcaacatttttcccaaaccaattgggaagctctgacctcagtacattaattatgtggaaaaaactgtacagtttaccagaaaagggggggaaagtgggaaaaaaaaaaaaagaaaagaaccagtgttcatatcttgttgcctctgggaacacatgcattcttttttgcacactcatcaggctcctgctttcatcccttcccaacggctttttctgaacttgcagcacaacagtttgaggtgcactttttaaaagctaaatcttgctaaaaagctaaataaaagcaacatgccttaacaaatatttaacagttaatgaagctcttacacactattatcatcagatgccaggctggcatttgtgatttttaaaggccatgacaaactagagtaaaccatgcatcctacttgaactgcagggaacagactgccttctgtgagctatagttaggacctcacaaaacaacctcactttccccaaattaataaaagcctgcagagaaggcaaaattgaaactatgcattttttttcctttggcaattcttacctttttgttgttctctttaatgtcttgaggattcagagacttgtagtcactgagggagaaaatggcacagtaggtacatacagtaattgataaaaacagctgtttttacaacaaactgaatcttaaaatctgacattcagtaacaccaaagagtaactagcaatttcacagcaattcaatcaacacaactaatagagtggaaaattaaagaaataaataaataaaaacagtgattacaagttccaatgcctgaagctttccatttaaaagagaagttaaggcaggggaccagcgactagtcttgacaaccaaattcatcatgaggcaattctttgttgtcagtatataaacagctacaagcttatttgtctcattttaatacacacacagttttcatagtaactttaagtctgttttttatatgacattaaggaaaaaaataagctctttgaaaacagaaaaaaatgtttttcagcatcaagaaggaaaaactgttctgagatatgggtaataaaaaaaaatcaagtatttcaggacacatgataagaaattattttatgctatttttaaaaaataactattattagcaaaatagttataggaatggaaagtttttctacttacattaaatctggtctaaagtggtgtaatattgcacaaaaagataaaccattcctccacgatgtagtaaaattggtgattttcactccccgatagttttttgtaacttctttgcaccaaacaagtaacgactgactagcattcggctttcgtcccaaaataggacttggtataggactcggctagaaaaaaagaaaagaagaaaacattaaaagaatttactggaaaatgaaaattaacattaattgacctaaccagatcatttgaatacttttgatggtcaggtttaagtccttcaaaactgtcacttaaagacaactgtaacctataagaaatgagacatgaatcttaagctattatcttcagctgtagcctatggagtctgcctgacagaaaaggtagataggcaatattttaacc

SEQ ID NO: 55493 - DNA, 1830 bp, Bovine  19866881379740
  misc_feature (1)..(1): n is a, c, g, or t
ngagggacattgcattgaatgggcaccatgaagagacacaactttgagaatcttggtaagggggaggagaggaaagaagatggcatctgacataatcttgtaaaatcattaccattctcagtatattgggcttagggagcaagcacacggtttgacgtttttgaatgactacaatcataaatgcactaactcttgctagttgtgatagctgtattctactaagttgcaggaaacatgttagcgatcaatacataaccttgttttacctgtttctgtttaaagacaccttatttacttatttaataaatattatggattcattaacattgaactcttgaccagcaacactataacttaaacctgaacaaagcttacctaacacacatattttgtctataaggtgcttcctgtgcttaggaagactagaaaacacgtcagcactacactagggaattattttacacaatgaaatcacctaaaaaagcacaaaaatttgataaaagggtactaagaagaccaccaaaaggaccaaaaaaatttgcttacagtgtgagagctgacaaaataaggcagcattttcccttgtttgtcctcaagtaggaatgcatatgtcagaggactcaaatttttcactgctctgcccatatccacaatgatgatgaaagtgctgtgagtatttggttttggagttacaagtaaatttcagcaagtaggcaaatttgcaaatattgactctacaaataatgagaatccactacagctacaatttactgaacacctaccacatagatttgaactaggagcttcatagatacacatatcgtcaagtttatcaactcttcactattcaaatgagatggctcagagttaacactggtggatatatccttagatccaaagactatcaccactagaaaaagtaggactttattaagagactaataccatacaattttcacaccaagcctaagcacgcatgtattgggctggaaacttatggggttgggcttctgctcctgttggaaacctctgactcaatagtctgggctcttatagaaaactaagaatgtattgcacactcagcaacaaggctacagagaagctttcttatagggaacatgccccgcagttaagagtacaagatctttccaagcaatatgatgagaagccaaaaatggtcaagtaaacacattcaaagaaaaaaaatatgtctttcagggcattgacggactcagtggggatccaagaagttagcaagctttagaatgtaccatctgaaacatcatgacttgtgaagtgataatgctgtccactcatctgtgcattcatagtcttcccatctgctgcttgccttccattcaggtcagtctggactctgtttctaactgcatggtgctcattatgcctcttcatctttactcttatcactatgtcattctcttcccaagcaaattaaccttgactggcaagtctcaacatgtctgccactaacctctcttggatctcctcagccctctgggcctttttttgccttggaaggatatggatcacccaaaatctagctcacttttcacctcaactgtaaagtgaaataataatggacactggttaggacttagccagatagaatgtgaatgtgcgtagcatagacctggcacaagggaaatgctctacaactttagtgtttctgaatctgaatgtttttcactttggttcatatgaattcacttttattatcccttctgaggcagattttatgaagaaaaggataacatcacaagagaaaaggcaacaacaagaaagtacatgctaggggaggatttccaaata

SEQ ID NO: 55494 - DNA, 1158 bp, Bovine  19866881467442
  misc_feature (1)..(1): n is a, c, g, or t
ntattattcaaaattaagtacatgggaatgaggtagattatactatttttttatacatttagcaaaatgtattataagtcataattaattatattacatatttttcctttttaaatcctaatcataagttggttaagtaattttcaatattatctatttaaaaaggcatagcagtagatctgtatattagaagctaagctttaaattctgctactgataggcaatgcaccttttggagaaatatctgtctagccctgggagttgaagaatatccctactattctacagtttatttttcatagggcaacttttattaataatgagatattccaaaggttattgcaattgagaaattctaaattctataactttggcttaaaccttcaatatttctccttttccctgtacagtgtgtgtttgattttgggcttcccaagtaaatatttactgtgagcattaatattaataataatagtttacatttattgaagacttcctaatggaagccatttagaagaatataacagagagaaaaagaatgagaaatgcccccaagggaaaatattgctaaatgctttcaaatcattaaggtattatacttggctatattatttaagtacaattagttgagagagcttttctaattgactgtgcttagtacaactatttgactaatttcataaaagtcagcaccatcatcctcattgttctcaaaaattcttctctaaataattctgtagtaaagggaaatgaatgaacaaatatttcctgagtaccaagaaagtgttcagaacacttcctcctgtcagagagtttactatcaatagattttaaagtatggtattttgttcctgcaaccagcctctattgatttctactgtccataattaatctagagtgaaagcacaaaattcaacactcattcatttacttattcaagaaacttctattgtatactgaaactgcaatttacaaaacactgctagatgttgaagagatatcaagttttataagatatcaagttttaagacatttattccaccttaaagttatatataagtgaaggtcactcagtcatgtccaactctttgcgaccccatggattgtagcctgccaggctcctctgtccttgggaattatcccggcaagaatactgga

SEQ ID NO: 55495 - DNA, 730 bp, Bovine  19866881570445
  misc_feature (1)..(1): n is a, c, g, or t
naagggtgtcttttataacattagatatttttattagtcgttgaaaactatagattgagaaggctttctatttaagaaacatgtctacacacattatcatgaaataggcttttacaaaatttacaaatatgttatttcaacatagtttgcactctttagtctttgtaaactctgtatttactaacagaacaaagcagagtatttctaccaacaaacccatacttccactgtcctttaactcccttaacaacacaatatcctgtgcttacttgtgttcttcagtgttttcatagttttaataaatgaacttgggctaaatacattttaacttatctaatttttttaaagggctttacttagtactgctaatatttcattggattctcttctcaaaatggtccgtgaaattcctcagttttatagtaaaataagagaaagaacttgactgccaccctttcatcattagacaggaagcaaagctctgttattaggcattcagaaaggacaaaaaaaaatttgtgcttgtccagaggcaaggattaccaaagtgcacctattcacttgcaaccaaagataaaaataaaaaataaaattacaagatctttaaaggtttgggtagactaggtattttcctgccagcttgatcagttcttgactgaataaataggatttagagtaaaacattaaaactgtttagcagatcttttcaacccatttcaaacttttctta

SEQ ID NO: 55496 - DNA, 1426 bp, Bovine  19866881717596
  misc_feature (1)..(1): n is a, c, g, or t
ncttagtaccaaaggcagttacaatatcgaaaggttattttataaatatctataagtccaaactgatataaatagtaaacaacagaaaaggtcaactttgttctacaaaagaactccaaataataaaagaaaaataagggaaatagaaaatcatcattagaacactaaataagtaccataggcaaaactgactaatgaactgaaaattagtgactgaaattttaaagagaaacaggatatttacataacctcaaagtagctctcttctaaactttattaattttggggtgattttaacatatgtcctcaaagtttttgacacccctccttccaagaactagaacttaactctccagcccatgtgtatgctggactccgtgactggtagctagtaaacagagtacggagagtatggagtactgagtctggagaacggagaggggcagtaacaaccgtagagaaatctggctgaccccaccttaaccaagtcatcaaggggaacatcagcagtcataagccatgctgacatctatcatgtgctctctgatatgatgtgatgagggcacttcgccttggtcacatcttccccaaatccatagccccagtctaatcattagagaaacatcaaactcaacttgagaaacattctacaaaatcagcagcactcatcaaaatcatcaaggaaagcttggtagactgtcaaagactggagaagactaagggcatgcgacaacaaaatgcagtgtggtaacctagagtgtgccctcaaacagaaaatgctgtcagcggaaaaaccagtgaagtccaaatgactgcagtttggcctattagtactatactaatgttaatctcttagttttgataaatggccatggtaagtttatttaccctattttcactcaaaggaatctgagttaaaaagtatacaagtactctctatattatctctgaaactcttctgtaaacctaaaataatttcaacaaaaagtgtaaaaatgaagtaaccaatttttaaaagattattttgcaaattagagtacacttcaaattaaagctgaaccattaaactcaatttctaaacccactcattccatgaataaactcaatttcaattaagttagtttgtgataagagtgtattactacttgctctttgcatttaatgatttttggaggggaacagcaaagaatggaagtaacatttgagggaaactatttgcatttggtaaacaagcttgtagaagcttaagggaaataactggaaaagactagtaaaacagaatgaagataaatttaaaagattaaagttatcatactaacagtatcctagaaacaaaaggggaaatctagaagattccttttagaaggataacaacagcaacaatacaaacgaccaaaaggggcaaggaaagggttaaggactatca

SEQ ID NO: 55497 - DNA, 2489 bp, Bovine  19866880537612
  misc_feature (1)..(1): n is a, c, g, or t
nggaaggcagagtaggaagaggtaagcaatatttgcctttattcttcctggaaacacacaaacacacatccctaactggaagatgtggcttctcaaacacagtgtttaatgtgctaagatgtcaagtaaagaagtgtgtggatttgagacactatgatgaacagactcactatgctattcactatggggaattttaaaaactggaagctgacaaaaatattaagacaaagagagttaaatcctgaaacctcgctgttgtaatgccacctctgctcagcgctcagcgggggatggctcacagggatggcctttgggatccactctgggctgtgtgtggcggcagggaggccccacttcgggttctcagcaccaccactttccctcgatggacactgccttggatgcctctgggaccaatgggagaccagggcctcacaaagcacccttcctgtcacacctgcacaccgctgcagcctgagctcttaagtggttcagccggagcccccggggtctgaaggaagtgacacctcgggagaagcaggggcagctgaacgctgaggaggagttcccaccccacctcactcctgtgcacttgcatcatgcagcgtggacttccacgccaggagatgagccctcatctcgtgatttaaaaatccttttgttatccagacatttggttcttctcaacattactccctgaataaaggtactccctgagaatcctcctgaacaagaggatcaagcttcattcacatctagataaacgtaaaggcctgtgctcagcacaggggtcagctgactggctgggcctcaaattacagtgtggccagtaagtgccaaccgtccactgtcacagctggaactgccctggcactgacagctggtccgggttcatttacattctctccacgcagccactgagctactgcaggcggctgcagatgtctgttttttagcaacaaactggttcactgcagatgtgaattttggtgatattctactgctgtcgagtcagttaacactgaatgctaccaaggacaggatggggcctggaaagcatgaaaaaagatgagcagagaagaagctggcaggtgagaaagctacataaaaacaagggtaagtgacactgggaaaagatgagagcttacacaatcacgtttacattcttgggctccactaaaagacatcaagcaaaggggtctcaatggttattctgattaaagtcccaccaccagccatctcctcaatagcaccagcttcataagtattcctaaacctacctttccagaaagctctacttacacctctgagtttagagagcaaagtcatgattctagaccggtagaaagaggccccacagggaaatttctgaccctaaaaaatattccagaagcatcactttcaaatctcttaatttaatatcccacagtcccaactcaaacacatccaatccactcctaaaagcagcatgttaaaaacaaactgatgaattctttatctgagaatacacaggacgctgagggccttgacaatggcattccatcacatcaatgaaacaaagactctctccacatttcatcaaagatacagtgtcttattctttcaggatctcaggggaatgattccaggcattcaagccctcctccagataatgcattcatataaatgcctcatctcagagtgacaagctcctggaaatttaactggagttcagattactggcagtgacaatgcaataggggagcagatgcccttagtctcaaaagggccaaactggcttgtggctcatttattaaagaggaggaatcctcaaggaccaatggctggttcagccatctagctgaagagaaagtacgtcatcaggagaacaggtacaagtgaaaaaggtaacagcatctgccctaacaacaatgacatctctgatattaaattctgaatgagcagagagtggtccgctttggtactaaacctaaaagaattctgtaagttctcccaagactgtttcgctgacacacacacttttgaaatgcccaagagaaaacctttcctcgtggagtgttagtgccaccttgtggccaatctctccatggctcctggaggaggaaatggcaccccactgcagtattcttgcctgggaaatccatggacagaggggcctggagggctgcacgccacggggtcacgaagagtggaacgcgactgagcacgcacactcacacagtaacaattcacttttaagttctcccttcttttcaaaggacaggtggcaagttcttggtaagtatcaactgctaactggctgtcactgtcccttgagagagctttcccttcatctttcacactgggccagacgcgagtctagaacatgaatgcgcctgtgctcaggtgagggtcgagtcctggagcacactgcagtggacagactgtgtgatgcagcctcttcactgtagagcaccactgaggggacgtcaagagttgtgaaccactgg

SEQ ID NO: 55498 - DNA, 1396 bp, Bovine  19866880745813
  misc_feature (1)..(1): n is a, c, g, or t
ntccatggtggttgtacttttttgcattctcaccagaaatgtagaagagtacctgtttctcactagccttaccagcaaagtatgttgtcagacttggtttttacccattcagttgttttgtttacttacatgctattctacactcataagtgttttatgtcagtcttttattccttctatattttgagtcagatttaagaatgttttctccatatattctagtacttgtaaagtttccttttttacatacagcactctgatgcattttaaatttattatcagttaattttttaaactagtaaactatataactgaagagatgactattaatcatcattttatgtttatgaaagtaaatgctaagtggtttatgacatcttgactagagttgcatctatgtgtctggttttttgttcctcagcatgaagactttttgcttgccctgcagatgaatgaagaacagtatcaaaaggtaattgatatttcatctaattaatttattctgggtattttcattagctgtttttctcatctcacatttcctacgcattttgatgacaaattggttcccttaacctctgctgttgacctgccgagtttgtggttcaactaagttaaaatcaggtattgaaccattgaatccaaactggattagactttgagggaagataatattgttagagttgtttgtcttaaacatttcctggaatctgttagatagactcttagagcaaaatttagaattcacatgtcacttcagagttagaaagaagagatatatttaaccttaggatcagatggattttgtgtggtatcagccatcctcacatttggccttttctgacatggtagaaatgaactaatgactgatcagtcactgcccttaataaaaaggagaagtttcctggtactcacagtacttgaaatgttgctgtatatggcttcagtagtcccttaaggtaaagcttggactgagacacaaccccatcgcactcttgtcttataacaagatgcaatatgcaacttttgaaacgttttaagataataccccacatgccacttgttcctgactgttagcatttgattatagatgttataatcctgccagtacaatgaaattcgtgaatatggtaactttatacaaaggataatgccaaagaataccccccaaaaaacataaaattgtactgtctttagctgttaatatgtactcatatttgtactggcatcttaagctagatttctacagcagaaaacagctcatcattgttttatggcttttaggaattgcttttcacctcggaatgtgtttggggtgggggaatatgaaacatggctgcctcctctactcgagtgtagggaatttcacatgtttctgcccacctccaggaggcca

SEQ ID NO: 55499 - DNA, 5144 bp, Bovine  19866880869231
  misc_feature (1)..(1): n is a, c, g, or t
ncctggccactccagcacccctctctgcagtgtgcccacgcacacacgcccccctcccagcgtctgcaaagaccccaggcaggtgggaacgcaggtgacgcccatgcaaggaccagcgctttgctgagcctcagctggaggctctgtgccatcagaccccattgccacccctcagctgcagtctccagccttccccacgaggagcactgcctgttctggcagcaacacccccaaggctgggctccctgccccaaccagcccccggcccgagactgccgctccttctttccctccattctcctccaggcccacccacgctgcttcagactcctggacccagtcttctcctccgtaggaccctggacccagcccctcactgctgtcacctcactcagagaaacccagatcactggctgggatggacggaatgacgggcccaggtctcggtccccgcctgcacccacacccctgccacagcctgagtatgggtgcaatggcttcccacctcttgaccttgggcatggtcatgtgacctgctttagccagtggataaggggagaacagcttgaatctgaagggaggcctccctccagaggccttccggtccctctcgagcctctgacagcaggggctgtcagagaacaagccctgagcagcccagaggcccacgctgggcagacctgtccctggtgtcaatggactgctagctgtcccattatcaccagagcaagcccagctgaggtcaccctgccgtcctgctgacagcctattcccaaccatcactgagtctgcatgcttggtcgttacacagcgatagctgacaaacacactccccagtaggtgacaaagctcctcggggctggcctggctcttctcactgtactcccccaatttacattctttaatctcaagctccagacccccaggtccaagtgcctactggaagtcatcgccctgggatgtcctccaggcaccccaaaccccagccaacaaagcccagcggttccctctgtgacccacctcagtgacagctgcccccacctgccaacacctgtgcacaggccttgcctccccgcatctgctcacacagccctcgaacactccatcccgcccatgtgccccggctccccccacagggtcccaccacccctggacccactccctggcccaccccgactgctgctcactcagatcccccagcagtctcctaactcatcttcctggcccccacttcctgccccagccctccagttccctgtctacacagcagccaaagagcttaccgtgaaaccaacctgaccaccctgacctccgtcttactgttttcagggcaaagcccaaacccccaccgaggccctcaagacaaggggttctgctctgcctgcccccagtccaaagccgctctcccgccctaactgaccagcccagagtcacgctggccttcctgcagcttacctcgggcactgctgtgctcccgtccaaccttggggcctctgcacacgccaatcccccgtcaccctgtcccctctctatgcgagcctggcctggcccgctcgggccctgctggcagctgcctccggggaaccccctgcacccccatactccaggcccgcgccaacacggcatggcaggcgctcacctggggtcagcggccgctctgccgccccgcctcggggcaggtgctcgtcctcggagaagctcgagtcctggttgggctcaaagtcctcctcagcggccatgctctccatcagcttgctcacggctcctcccttgccccggttctgagaacagagcaggacagaccgacggctgaggccgggccggaccccggtgtcaccatcaggctgccatgcagcgtggcacagagagcagcagccagatcccacctgagcgccaggaggaggacaagacgggttgagggagcacctccagctgcacacagatcttggggttgggaggggcacccaggatcgcccgcatttgtcaaccgagcgaagcaactctgccgtgcctaggcccccggggagcctcacctccttcttcacctccttggccttggccttggccttgctcctcttggcagaggctgcggagctggtatgaggggcccgggcctcggtgggcagggcaggaacgcggggcgctggcagcgaggctccagatccggcctccttgcccttcttcttctggggatgaagccagagagtggctgtcagagggcagagcgggcccaggccccacattcaccctcccgcccctggcaagcatttccggttttaatctggctttattaccactatgcattacttgttataaaaaaaagaatatcgacgtgcatgtagctgagttcctctccaacgagcccaccaaccgcagaggtgactagagggaatgacaacagcgtggcgtgtcctttccagaactttccccaagcacacacaatcatgtaaactcacaggctacgcaaacgcatttgtgcacacacagtacttttttttccttaaacacggatgggaatttaccgaaaattccgctgtgcagcctccctccccccaccctctgccaagtgtatctggcagacagggagaagaggcctccctttttattgtgaccagccgaccgaggtgccttggcatggagacctgaaattcatctggctgcccgcctgctttttccctctgctgaatgaggccaagaatgacgacagcgtcgctcggcgaggcgggcacattcctggcaggagcgtgcagaaccgtgcccccactgcccagggcacttctggggaccagcggttaccttcctcttgccccagcagtgggggacaccgagctcaaagcccccagggtggatccgggatgctccctccactggaaagtgggccagtgcacggggaccgtgcgaagctccacttatcagagcaaaggagtggcaacaacctagatgtccagcaacctggagtgtccacagacacagttacaagcttctatcccaggggccaaggccctgtgccaaggaagaggtgacagcatgggagatgcacgtgatgatattcggggcaggcagcaggctcaggccacagaggtgacgggagcaagggcaggggtcacttggtgcattttagaagagacgtgcctgataccaatgaccgagtcacgggccaggggagatggaaattaagacagagaaaaaaagaagactgggcaaatgttaccgagacagcagtagaagtcacagcttccacaagagacgagtgaaattcaaagccaacagcgttaaaaggaacaaagtggggaatgttactaggataaatgcgttcgttttaatctctatttagggggagaagtatatatatacagctttatatatactgaagcaacttggcgtgtgcgcacacacagacacacacacaatgttttcttatttctgatgtgtcttgtaatcctcttcccatttctgaaatcagaaggcatcttgggggtggaaggacagtgtttcatgtggtcgtgtctccttttccacctgacttctattattaaatagacagcctgtcttatggggcatgtctttgcagttgcatcttcaggaagaaagggaaattgacagcaaaaaaaaaaagttaccgctgcgtggaatttaattttcttccttttctttatcatccaattactgttacaatcagataaaactggtaactttctttcccactaaccagaaagcccatatctaagaaacatttcttcttttaaaaaaagaaaagaattccgaaggtgacgagttctgtacacagagcagagatgtttgttgctgggatgattgccatggcaaacaccaccatcaaccagatcaccgatggccagcgtggctgttggcaggagatactgaaaaccacaggatggccagatggtgggatgctattccttcacttagagagtgactttaaacaagaaagaaagaaaagtaagctaaaaagttgatggcatgtgggaatgcacaagatctaactccaaatctagaaagcagaatacaaaagtgcacctcaccaaacggtgaactgtttggccccagagcggtttccttcgtgtctgacgccctagacagttaatctgttccgttccacctctgactgtatcgtcaggaggctgggatcaggtgagcccctggccctctcctaagggaagctgcctttttgggaaaggctcagagaggctgggagccctgtggttaggggctcaggcactaggcctccagtgtaagctcagctctgatgatcgttagctgctgggctgactgggatggttccggggctacctgtgaggtacagtttttaagacttccttatatggcttgtaaaaccctccttacatggcctgtgatgtcaaaagcagtatgtacttggtctctccccgccccctgctgtgttcctgatacagcgctcctacagcgccctggcatttccggggtcacaggcacatcttctgttctaagaaggggacatgtgatgagcccgtggatggccttaggatggggcctggtctgcagaaagaccagccacgacccaaacttgaaacttcggcctcatccccgttcttgggagaggagcaaggggctggatggagcctgagtgactgctctccatcgtgcctccgtgatgaagcgaccacgaaaaccccttagcgctggggctccgaccacgagagggctggtccacacactgaggagtgccggagggggcatggggctcgacgccccttcacacacaccctgccccgcacgtctcctccacctggctgctcccaagctgcatcttttacgataaactggaccagtaaatcaagtgtcttcccaagttgtcattttggggaattattgacctgagtggggggcgggggtggagtcatgaaaatccttgatttacagccagctgggcaaagagcacaactgaccacctgggacttgtgcccagcctcgggggtgagggctccacctgtggggtctgtgccagctcaggggagttggagtcagagtgtttcagcagaggacataagcgtccccccaccagcacatgcagcatccatggtagagcgattaggacatgccgggcccccaccgcggatcccccagtacggtcatcatcatgcattatt

SEQ ID NO: 55500 - DNA, 1269 bp, Bovine  19866880882018
  misc_feature (1)..(1): n is a, c, g, or t
ngtgtccccaggtgctgtctgcctgctcagctggtgacagtctccccccagcccagcagaacctgctaggtctctgacccaattcaccatccagcgagggagccagcctccaccatggccctgtggcccggggttcatggctccacggagggcctggggcagcggcaaggacagagacctcaggcaggtgtgtgcccagcgccagcccggtgactgccctaggccctgcgcgtagaggcacccggcacagggagaccagagtgatggtcccctcaaggccaatcccaaggctcgtcttctgagatgagttctggcagttcttagccacacagggcagctagggaaccactccttcctctctgagcccagggcacccaatttccagtgttcctcttccagccagcgtgtggagtggctggcaggtcagcggccacagcgccgtcaccaagcgtaagtccccgcgtgtctgtgaaatgagcctgtgtgtccacatgtcctggagacagcacctgggtctcggtctcctggagaagtggtctgtcctagtgatggggtggggggagagacgggacatcctcatctgacaagacagtcagtggcctcaagacactaacgccgggacacccgcagagatgagcccctgtctggggacagcagtcctggaggcagccagcaccttcccctctgggctgctgggcttgctccccggagcgaaagactgcccagtggcagtcctgttcttgccttaaaactggagagaggaatctagtatttgcacttagcaaaaagttttaaaacaagtgtgcatgaccagtcacattgtataaaaacagcaaaaatgattagtttattacatttttttttctttctggtagtaaaaatacataattgtttaaactactgtgtgtaaaaagcttgtattatatgtaacttgtttttttttgtaaatagatgtttgtgcagactgctctctggtttcttttctccgcacacggcacaatcaggccctaccaccccctgcaaagttaccagggctgctgggacagaaagcccatggattcctgggacagataacgcctcacctaactgttctcccagagcagaggtcgggaggctgcacaagagctgcaggatctgattccagagcttcccccgaggggcctggcctgcccaggagggaggtctggcgatccatcccattcaccctgcctggggagctgcccaggtcaggtggggcacagggggtactttttccggttttactgttta

SEQ ID NO: 55501 - DNA, 959 bp, Bovine  19866881085086
  misc_feature (1)..(1): n is a, c, g, or t
ntccccgagctgggccagagactcccggagcgtacacacaaaaatgaccgcggcttctgggggcgcgtgaaaaggatagccccggtccttcctctggctagggtctccggcacccctccctggtccgcagtgcagcacttgggagaaaaccctggccctcattgtggcagctcttgggggacacgcgcgccccaaggccacgacccgtttctttgccccccccaacacacacacgccccccgcagacagggatctttgcgcgcgcgcccctcccccgcccggtgcctcacaaaggccctttgtcccgccgagccctggaactcaggttcctgaaaagtttcaagagaaaaatcaaagaaagaggcaaaaaaaaaaaaaaagcgagcgcagcgaagcgggcagggtcggtggggcaaggccacggcggcggctgcagccggaggtgttccttccaagaccccaaggccaagggagcgtcagggggtcccggagaactcacaagagtcctagactacacttggtggtgggagaggtgggttgttctttttttttatttaaaagccgaaggtgggacgccaggcacagaggctggaggcagccggagagcaggggctgggtttcccgcagcagctaaaggcaggtctggggtcccggtgtcagggagtgcccccgccagaccgcagcggcccaggcaggcttccccctctcccgcgcggtccccaccgagcctgggcagctccgctggggaaacggcaggatccagcgagctttctccgcccgcgcttccatgtcagactcagggtgttcccgccgcggatcgtgcccggccgatcggctcccgcgccgcttccgtccccaagcttcgggatggcggccgcccagtgtctgcatccctgcggcggggcccgccggctttgctgccggagaataaggggtctccagggccgtggtgctgcctt

SEQ ID NO: 55502 - DNA, 1343 bp, Bovine  19866881252617
  misc_feature (1)..(1): n is a, c, g, or t
ngagctaacatctgcctgaagacctgggcttgcatcctggttttaccaagtgactcgaatcctgttcctcatttgtaggataagaaagtggtcccgcccccatgctgtgatagaagccattgtatttagacatgaggttcaccttaccatcttgtttcttctacagaaggtacattttaaaagttcagggaaaaaacactgaaactaacaattagttaccgacttgaagtctggagtatctttctgaagatattctctaaaagggtctccacctttcgctccctgatcctctgaaatactttcccctcctcttctttccccaggccactcaaacaagagtctcaaagaagcccagtgccctcagtgcccctgacccatcaggaaggcagatgctggtccaggctggacggtactggagccaactgagggcagagggccggtgggtagctttgtttaagacgtggagagaatagaagacctgagatcaacacgggccactttttttttgtttgttttttaagtctggctgcaccacgcagcttccaagatcttcattccccaaccgtggagtgaagctgggcccttggcagtgggagtatggagcgctaaccaccaggtttccccatgccacattttactgacataatcttctgcaagtttctacatttatacaactgggatgatacagctgccttagagcatagtcacagaattaaatatattaacacatattaacgtcaggttcaatccactgcaggtttaggaaaaataaataagtctcctgaccaaatggctaggcgataatggtgccaaattgtaaactggttgtaaaagccctagggttttatttgaactgaacatgcctcaaattcttatatttaaaaaacaaagaagttgtagagaacaattctgtgcagtttctggtagccaaaacccaagataaaaccaactttgttttgtatttaaagagaaaatgctcttatgaattttgtcccacttctagaatccagcctgctaggtgactgctctgaacacagcttctagtaacagtaaggtgtaacctcgttaaccccactaggttaccactcatggacaagaaaaaagctcatctgggtccagtaaagtcccagggcaacccatcccccactgcaaaataatgtctgttcatttacaggctgtgatctgtctgtgcattctgacccctaaactagaaaactgtagtttgtcgtgactggcttgcttctgttacttttttccttcctaaaaagacatcttgttttacaagactcttggttgaatgttttgagcttattttcaacaactaacagataactgacagctct

SEQ ID NO: 55503 - DNA, 448 bp, Bovine  19866881326037
  misc_feature (1)..(1): n is a, c, g, or t
ngaaggcgctggccaaggcctcagcctgtctctgaaagcctcgcgagaaggtaaacacaaaagggccgccaaagccaggaagatggaggtggggttcaaggccagaggccagcccaagtcgacccactcccccttcgcctcggaagtgagcagttactcctacagtaagtagtgggccgcgccgcctcagggctgttcttcctccctttccttcctttcttcctcttttggccttgaaagctccatggcctctggtgatggtctctttttccgctttggcgccggtaccaggccggaaacggaggtggttgtgatgaatgggcactgttgtttgggcggccacctgtgattggtgggtactcgtgattggcgggcgggtgggagcggaagtccgccagccctcccgtacccgccttaccgttggtccgcgctaaggccatcggtggga

SEQ ID NO: 55504 - DNA, 966 bp, Bovine  19866881422294
  misc_feature (1)..(1): n is a, c, g, or t
ntcataatgagggatggctatggagaggaagaatgtcagaaagtgcatggaatggtgggaatggttaggagcccagttttcccaaaaagaacgttatgggaaagtcatgtaacttaacatcctgataggaataagtgggggaccaggccacataagactgggatggctgtctggattcctagcaaaacagttgtctgcatgattttgcattgtcacgtatcttctaggtgacaaaaaaatagagaagaggatgttctttctggaaaataagcggcgacattgtaggtcctatgaccggcgtgccctccttccagctgtgcagcaggagcaggagttctacgagcagaaaatcaaagagatggcagaggtaggaagatgtgtttgtatgtgtatctaggatctgatttgctggtggggctcagtgtaaagctgtctttgaagatttgccttttcttttaagtgattaatgaataagccatgaagtttttaaaaggaaaacaaagctaggttttgtagtaatactgactaaaattcatagtttcacaaatcagatttacgttattttaattggcacttagtaaacacatctgtttcaccttcttcgccctctactgggagaggaataaacagattccatttagctctttaattcttccaaaagtgaaagtcaaagtcagtcagtcatgtctgactctgcgaccccatggactatatagtccattgaattctccaggccagaaatgtactgtcaaatgtgcaagtcagctggaagatacaaatttggttttttaatacagacagacctcagagacattgtgggttcagttgcaggccagtaaagtgaatatcgtagtgaagctcatcataagaatgctttggcctcccagtgtgtaggagagtcatgtttacactacagtgcagtctagtaagtgtgcaatagtgctggtctaaaaaccaggtccaagc

SEQ ID NO: 55505 - DNA, 702 bp, Bovine  19866881630168
  misc_feature (1)..(1): n is a, c, g, or t
ncccagcctcagcgaccccagagccaggccgaggacggaggctgagggtcctccccaaccccaagggctctgcccatgggcggtcaggcctggagcatctcagatatgtacgcaaagcctctcatgggcaggcttgtggctagggagcccccgaccaggtgggggacccggctgtgaccagttgggggggccctctaggacccatgacagccccccttcaaccagagcatccccgggcccctaacccctctacagcggggttgggggcgagcgtgctcaggactccgcttccaggaaggagggcttaaagaccccaccagcccctgcctgggcccaacttgaggagggccagaagccagaagaaagaggggcaggaggacagtggtggaggagggcgatttacggcgtaaacacaacacttgtgtgtggaagaaaaatattttctttgaacaaacaagactctcagcctcgtttcccagaagcaccattatctctgcacagtgctgcttccaaaaagaaaggaaaaaaaaaatcacgggccagggacagagggaaaagaaaaaagctttgcaacctgagaacaagcgctccagggcctcaggggccttcgcagggggcggcgggctgggggcagtgggcaaggctggggtgcccggctgcctcccccaccccgggcccaggggcctcgtctgagccggcttc

SEQ ID NO: 55506 - DNA, 1953 bp, Bovine  19866881644119
  misc_feature (1)..(1): n is a, c, g, or t
ncctcccagcaactcccctcccaaccctggggtgcataaagcaagactggagcggtgggtccctgccccgggccgcacgacgaccaccgccgtctactcagctactcagaccccgtccagcctggctgtgtccagtcctggaactggtgtggatcaacaggcctaggccagcgagcaaggtactcaaagtggggcccaggcgccttgcgtgagcagcacacccctccagcctcagtttccctctgtcaacccggctcggtgtctctccgtcctgccaggagattgagagcatggaggggcccgatgccaagtagacatggggtattctgcccccacaggaggggctgggggtagtgtccactccatccaggggggcccctcttggctccaaggccatgccctgatgggaaaggccccactcggccttggagtctctaattagagctgggttactatgggaacagggttttctttgggatttttcttttcatcaacagcagcacagaaagcgtgagtcacaggcccactggagccccgggaagtaaggagagggatgcgggggctcaccagagcccacaggcacatcctcccaccccggagacgccgggccccgccccgtccatcatggctttcccagtctccagccccggggccatcctgcacagaccagcctgcagcacaccccatggtctcatccccctgcagccttagcagtccccaagtcccctgggtggtcaaaaatcaggcgctctccaccacccccattcagtttaagggagggagcccagaagcttctgtggcttcacttcacttctcctccttgctgtcaactcttgccactacctaaccaccttaaatccctactccatccttacacgagctgttccctggggccaacgtgacctgccttatcaagagaactcttacacatcctacaaagcctggcttgtccagcccttcctcagccagccagccagcctcaccttcgagcgctggggctgggcacttcctgagcacggagaccccagggcacagctggtcagaggcaaaggggctatgagatcagggtctggctggagcccagggcagtgtgtgtagatgttagtcgctcaatcatgtccagctctttgcaacccaccatggactgtagcccgccaggctcctctgcccatgggattctccagggaagaatattggagtgggttgccatgcccttctccaggggatcttcctgacccagggatcaaacccaagtctccctcactaaaggcagatagataccttaccatctgagccaccagggaagcaaagcccagggcaggtaggcaccaaagaagcttgaatacagctcactcagcggccctgcctgtgtggtcacagtgaccccacttcccaggacctggggtggatgtatgccatctgctttgtcacagcagctctcaggacccccaagccctggtggccgaccttgcctctaacagtggctgcgatgaccccgtcccagaaatacggtctagccacaaagaacgtgcccaggtggagccctttacagatggggagactgaggccggagagcagcttgcagcttcagcaggaagcaccccacccgcaccgggccctggctgctgggatgactcacatcccccaccggcaaaacccaggaggctcctccttcctggcccgcgtttcccaacatgtgtctggaggagcctcccccgcctccctgccacgcaggcctgtctaaaatggcctctgcaggcacgccccccaaccctgcgcggccccgagccccccatcaccctccatcccgccaggtagacccgacgtcagaacggaccccagaacctgaagccaaggcagccccaatcttggcccccagagctccctcccctttaaacacacagatgagcccggctctccagctgcaatttccggcagctcctcttgccccat

SEQ ID NO: 55507 - DNA, 1276 bp, Bovine  19866881690372
  misc_feature (1)..(1): n is a, c, g, or t
ntctttggggaaataaggctcagagttgtctgaggtcaggagagagaagttccagccttgcccagggcgcagaagagagggcagggggccgggacagcccgcccagggccaggtcagagtgccgacctgcccaggggatgaccggtgagggcaccgtttgctctgggtttccagtttgaaaggcaaggggctcgccacccgcagcagagcccccaggagaagagagttagtgtggggcgggggcggggcagggagggggccaggggcgcaggcctagtactcccacagcgtggtggggtcgatggtgtcggcgcaggccttcaggacccccgcgtggtcccccttcaggtagtgcccccccaccttgatggccaccttgttgtagtcgcagaactccaggaagaagtccaccgggctgtcgctgctgctggtcaccgacgagtcattgcccaccatccagtacttgcccgtggagtctgcaggggcacaggggggaccctgtcaggccctgcctcgcgctctgccccccaccctccaatcacggctcccagagtgtggcttggggtctgccctgtccacccacgtggatggacggagcccctcccagagccctctgtctagtgtggtctccctcctatacccacgagagcggaaggaaggggctccccaccagctcgagctcccacatggggcctggaatggcccaagccatgtcagagggtcaagtggggcgcagaggcgggggggggggggaggtgcccccacccagtcccgcccacaggggcacctgcctttgatgttgtaggcaccgtctcggaactccagctggaagacgtcatagttggagcggttggcatccagggtgcccgtgaccttgcgacagccgatgaagccgtgctccccgcggaacacaatgatgggccgattgatcagcttcatgaggaagagctccgagtcccctgtcccaagaggtgggaaaggcagtgagcctcagggggatccgggcgggggccgggggggtgcgacgcccagggtgtgtgtggctcagagagggacagcaagagcctggggtcacacagcacgccagccctaggggaggcggggtgagggcggcctgggaggacacttggcacagggcgggcttccagtggggttggtaagtgaccatggcacagcgagaccccgccccagggaactgcggcttgaggtgtgcccaaggtggctacctgccgtctccacggaggccgccagctggccgttcttcttggccgtcacg

SEQ ID NO: 55508 - DNA, 741 bp, Bovine  19866880375371
  misc_feature (1)..(1): n is a, c, g, or t
ntgccttctcctctctgagctgcaacctgacaaacatggtaatcaggttggcttatgcctcagtgtgagcctgaatttcttatgacccactcctctattcacttcttatcagtctcttcctcggttgttgtgccatcaataattgttctctactcaacacagtatgttcttttctgtacctgcttcaacactggtctgatcactctattgtttttcttgagaagcttcccattactttgtttcgacaacccaaggccatttttttcaacacagtttccacagaatataaatgcacatgaagttgtttacttatttccctttgaggacatgtaaccaacacttcactgggaaaaataagtctctctaccttttcacagtgcaaagaagccctgttatctttcacttaactgaggaacttaaacgctccttaaaatacatgctgttaggtctgctttcactgagcagacaaaaggcatctatttaaagtatgattcattctttcctattccagtactgcctgttgtctttttacattttcacctgtctcttaaacttcaggaaagaacaatggtgacatccacaggggcgatttgtttgtcctgaacatcctgctgagtttgcctgtctctaacaaggatacatgccttttctaacttgaaaaataactggcaagctctgatatttttcatgaggttgaacctctgaccccttcccacagtgctgggccctcccctgagtttc

SEQ ID NO: 55509 - DNA, 1633 bp, Bovine  19866880489739
  misc_feature (1)..(1): n is a, c, g, or t
ntaaatttgaataactactgaaattttaggtttgtgtaaatactatacttcaatagttgggctttcctggtggctaagatagtaatatctacttgcagtgtaagagacctgggttcaatccctgggttgggaagatcccctggagaatgaaatggcaacccactccagtattctttctcggcgaatcccatggacagaggagcctgagggctacagtccgtggggttgcaaagagccagacacaattgagcaactaacactttgatttacttttcacttttatatataatttttttcatttttgtagtttttaaaaataaatgtttagatttcaaaaaactgctattctgcttttgacatttagaacattacgtaaaaattgatctttaggagtttttttcttctataaaatttcctcaccagtaaatgataactactgactatgctgtaagtaattgtaatgtatcttgtaacagggaagatgattcatcacagcctccagatgcttgcagaattcgtggtcatctgtatgtcaataaagtagcagggaattttcacataactgtgggcaagtatgttcttttcacttgctgaaaatactttagacaagttggcagtttggttaaaagtcagatctttgctaattgaataatatctaactaacaactaaaggactcttcaaatttgtatttttgatgtcttcagattgttttggccttcagcctcaggatagagaagactactgactttaaaaacttctactttaaaacaaaaggataccagtcatgttatctttcatatattaaagtatagaaaatagtaggtaaatgtgaattaaaaccttcagcttgccaagtgttggtaacaaacctcttacttagacatttcgttaatttgttcgttttgttggatgatatcaggtttttgtttttcctttcagtgattctcatcaaaatggaatccctaattcaagacaatattttgatgtaggtagaaatgtgtctgggataaggttaaattaggtgaatgttaaagaaaaatctcagaccacctgcctttatgaacagaacccagcacagaaactgtcatatggtaaacacctggtaaatttctgaataaatagattctctgattatctcttccctctttctttgcttctttccctcccttctctcctcctagctagtttcagagctgaacagttgttcattgtgaaaaacatttcttgagtatttgctacatggcaaagtaccatgctacatactatagattaaacagtgaaaaccagagaaagggtttgcccttatgatgctgacattctatgagagaatctgaactttaaacagtgaattacactaataattacttaattatagttgtagctataaaggaaaactgtggctgataaaaaactgtataacaaggttgctggtctactctccaaatcagtggaggctttattgaagaaaacctttgaacactaatggatgattcaacattttatatgtaaaggagagaatagcatctaggctgaaggaaaggtcataaaacaggaaagagcatggctggatggatattttttttaatgtacagagaaaacattagactttgtttccgtgtttacagtgatcag

SEQ ID NO: 55510 - DNA, 1771 bp, Bovine  19866880524902
  misc_feature (1)..(1): n is a, c, g, or t
ncccccccacagtgaatctatcacacatttttcctacagatacagtaggtatcggtaaactttcgtttgtttaactgatccagagaagtaaattaatttgttggaagttgcacagttaatcagacaagtaacgtgtatttttattggctatattactagctgttttaattcttgtcttttcactccctagtgtatttgaaataaatttccagttgcctctttcctagaaatgaatgtacttcgtgtactttggaaaatgacacacatcttatttttcccccactcatattttgtttgcatttcatctgaacctattaggttgagataagccataaattatttagccaactctgtcacatctgtgatccacaagatacaaaattggattcccttccagtctttctcattctaggaagttcagccacatccatgacatatttttccctaattttacaacattctgattgcctgatcaacttgcagtttatgtcaatatttagtatattcttgaatatgttctacctctcttgactgaatggggaggagagaagattatcatcagtttgatttgagaatcaagaacttttttcataagtattatttctcttgagataaacaatggaacttcattgagtttgggcactgtgccactgtcttaagttgaatgttttgaaaataaagaaaacaccacataagacagcccttctggtagcacattctgtggagtggtggcctctgaactcataactccaatgacattgactttaactgatcaataaatctttgtgctgatccaaccaaccccactgagccgtgaactgcacttacatcattttatagttgaggcaaggaagggctaattacctgcctgctcaaggtgactaatgatggcagggccccaacttagatctggacatcagctttgggacactgacttgctttcccttctatgtgtgtgggacccttaacttgttccctgttgcctgtaggtaaaaatcagctccactcagggaataccaaacccttataattcgttacctgctaacatgcacagggttattccctgctttgtactttctgtatcttctgcctggaatgcacctcactgtgaccacttcccttctctcctaacaccaccacatttaccttgtgagcattcactcctcagtcttcaaccccagattgtcccctccaccaggaagccctctccatcctctccctgtctcacacccagtttcctctctcacctggaacatttattcatttattgatttattcaacaaatgtttctaaacactcattaagtgccaggcactgagctgagcagaaaccacacacctctgaatacagctcaccagctcctgtcctcatagagcttagagtctggtgaagacaatagaaaaatatggtgagcacacagaaaaatatataattacaactgggatgagagtgaggaaggaaagaaagttggtgcctggagcctgcagtccccaactcagcatcaccactgcctgcagcagtggcactcagactacccactgcaggggctcctgaactgagggaggagatggccaagggggcctctgcatgcctgggatgcccgcctcctctccatctagtggctcccagagcctcgggcttctgctgagtaaaggacataagcatgtgccaccacagtgaggaaggcctttggtcaggcagcaaggggtgatactggggatgtgacggcaatgtctttttcagagctatgagggatgctcaccaataactg

SEQ ID NO: 55511 - DNA, 1142 bp, Bovine  19866880592868
  misc_feature (1)..(1): n is a, c, g, or t
ngtaaatttcctgctcaccgaatgttcaagttaaggatcccattccgagttttaagatcccatccatgaacactacagaggtcatgttcaccctcactgaatccggggtggatccctgcagccccagggggctggtttggccattttacaagaaaaacccagaatgagtcatatccacagttctctttcatcctctgcctttctgcctaacaatgaacaagtcacttaaatcttttggcttctgttctccctccgtcctaacctagcgaagacccaaaatctcacctgcctctcacttgcactttgaactctgtggataaaaggaacagaaattggctatctatttagcacactgttgtatggctttagggtcaatgttttaccaccaaaagcaattggaataatcttttcttctggtgataaatgccagttttatggatatcttttttgaacaggcaggggagttcggggcttaaatcattctttcacagaagttttgatctcttgttcttatctcaagagtagcatataatttaatggctactttttgtatttcataaaaaccactttataatgcttcaaaggactaaaatttcttagaattgatgaagcagacatagttgttgagagctctcaaataaaatcataggatatgatcagagatccattcaaatgccagattaaggatgatttatttacttcagtgtcaaagagcaaattcctgaactattttaagaaaacatctacgaggggagagggaagaacagacaggggtaagtgaaggcagaaacaagaatgtagacagaactgatcaagaaaaactgggaccatggaaggagaagttaaacagataacatgtgtttgaggggaaaagagatactatttgagttgtatagttcttcagctaatggacacatcagacatggaaaatggaaaaaaggtgactcatttccattttcagttctgacaaataccttcaaatcatacctactaatacttaaatggaatttgtaatcttacacaggttatttatttctcaggatgcaaaatgagacatgttacctctaaaggaacattagtcctgttatctgacgctggggacccctactgataagccctctatgcgtatgttccttcagagt

SEQ ID NO: 55512 - DNA, 851 bp, Bovine  19866880700674
  misc_feature (1)..(1): n is a, c, g, or t
ntaacagtgcagcccactgggattcagtgtggctgtagaactcagatctgatttcagccccaagtaccctctcatctgggtgccatattgagcatcacacaaattgtacaatgtgtagttatagagagagatctagagatagacatggaaataaagatatatatcagcttatatatttttattatgtttccctactagaatgtatacctcataagatcagagatatttgaattttttgtgttctgttaattactatacccccagtatttagaatagtgcctgatacatggtaggaactcaaagaaatgcttgttaaaacagtatgtttgtaagttttctattttgcttaagctagcatgaattggctttctgtcacaaccaaaagagtcctaatatacccatgaaatactaaaatatttatgttgaacagcattagtgacataaattgctgtccccctgaacaactcatttcatgtttcattatttatgcttctttgaaaattctttttgatattgaactgaaatctatcttcctgaacattccatacattttttgcttactgattaggcaacacagaagaaatttaattcttttaccatatgacaaccccctgcaatatttgaaagaactccttcaatatttgaaggcaaatattattactttgtatctatttttctttattaaaacccctactttattcaactatttctccttcaaaattgtcttaaaaaatctcactctccctgttaaccctctttgaaagtcttttttctttaaattcctccaaatcagaactgaaggcaataatctgagtggtatttgaccactaggcaaagagcagaattattac

SEQ ID NO: 55513 - DNA, 1051 bp, Bovine  19866880913119
  misc_feature (1)..(1): n is a, c, g, or t
nccccccccatattatgaagtaattagcctccaatttaaataaattaaaaaaaaatctcagtgtttttccttttagggatatttcaaaacttatgcactgttttgtaagcaaagttatgtttctgtggggaatgagtttatatttgagggaaaatcattttaaatgatctgattttggtctgatccaagagaaaaactacttagtgaataacttgactgacttgtacatcattcagaattgtgactcatggacatggcgatacaatatattaactgcaaagtaatatttttattgtgattgtcattttataccacagttagcctttcctaccaccattatccttgtggattaaaagatttgggttctaaatcttagctggctgattagctccagacaatttttatctctacaggagttccctttatagtgatattataaaaataaaaggttagaatgagttttgaggacaagctaaaaaaatagtagaggctgatataaatgtaaactgtacacaattcagagttattagattttcagacatgtaattaatgagatttttgactcgtgatgagcataggtaaccaaaaactagtttctctccttggcactgaaaagctttgcagggatatacatggaaaaatttaagtgagaaataaaaagaaaagcatgtatatcatatgaaatttgttttcctaaagaactatagtataaatattgctttaacaaatatcatatatcatttgtacgtggaatctaaaatgtgatacaaatgaacttataaaacagagacagactgacagacatgaaaaaacaaacttatggttaccaaaggggagatggagtgggggagggggaaagttaggagtttgggattagcagatacaaactattatatacaaaacagataaatagcaagaccctactgtattgcacagggaactatattcagtatcctgtgataaaccataatggggaaaaaatgtataaatatatatgtataactgaatcactttgctgtataccagccactaacacagcactgtaaatcaa

SEQ ID NO: 55514 - DNA, 1031 bp, Bovine  19866881012653
  misc_feature (1)..(1): n is a, c, g, or t
nctgaacttaagtgaataacttagctgttatacttccatctgtaaaatgggagtgataatagcagtgacagcacatgaggtggtagtaaagcaaaatgagttatataaggcaaagtgcagagcacaaagtatatactcagcttctgctgctaagtcgcttccgtcgtgtccgactctgtgcgaccccatagacggcagccccccaggctccaccgtccctgggcagatgttagctattatagcaacaatacaggtccaatagcaacagtccacggcttcagatcacagatctgggacagagttatgactaaaatatattaatagttacaactcagaggccagaatcctttctatactaccagctttattcatagcttgactcacgagtggtggcaagaatgttctgcattaaggttagtctatgtcagaggttgtgctattgagggtcagttcccatgattctttcagcaatccaaaaagtcaaaaccaatctttgtaataatgctaagatgttatttgcctttttcactgtgtttgacattttcactaatggtgcaaaagcaatggtagttaagatgtaccagtaatcatactattcaatgccacatattttcaggcagggtgggggcgggggggaagtatcctttgaagaagtagtaaaaatgacaaatgttattaaaccacaacacttggtgtcacaaatgggaaacatacaaaaagtacttatgctgcaatggttgccttcgaaaaaaccactttgttcaactgagttccaagatcagtcacttttttgtgaaacaaactgaaagaactgacaaacaatagttattcggttgtagataccggacagacatgttctggaccaaaataactaaggaaaagaactgccaatatctgttgccagtgataaaacacactttcaagcaaaaaaaagaaagaaagaaaaccataatcctggaaaacttgtacgtaccacatgaacttaaaagcttttcaataattttaagacttttattagaaaacggtgctat

SEQ ID NO: 55515 - DNA, 1114 bp, Bovine  19866881060625
  misc_feature (1)..(1): n is a, c, g, or t
naatcacatggacagaggaatctgatgggctacagaccatagggtcgcaaacagttggctataactgaagtgacggagcacgcatgcagagacatgtcactatcacatctggctggggacagaaggaagttatgaccctctagtgaggagaggccagggtgctggtaaacactccatattgtcctggagagcccgcacaacaaatatttatccctcccaaaatgttaatactgcaaaaaaacaaaaaaccttgacaaagtatgattcctgagaggcaaaactcctgtttcttttaaaaaaatttttcctttcaagggctaccaagaaatatggattgtctaccttaaatgcttttttgaatcttaagttttttattttccagaggaaccacccaaagaataattaaagttcccatatgcttaaacctgcaaaaaatgtttaacttggcacaactgtttgtgattcaatattttaacacccaatctctagaaatgagaacagcctcacttctagaaaacaaaaggagagtgacaactatggaatttcgctcattaccatggagagctggtgatcttaaggagaaaaatgctccagaatataggaagaatctaagctgcataaggcctgttcactgttagtcccagtgcctggacagtgcctggcacatgcagacaatcactaaaaatgcattggccgactctcacgtcagccttgtcagcctatttgtcattcagccttgcattatacaggctggttcagatactgtcaaagtagtttatgcttctcacaaactatgttataagcatgaggaataggaaagtggcctttgttctctgcattagtaatctgagactgtaggaaaggtaagccatgttctaaacatgttcttccttctagagttatatatcctccatttctgagtgtaaaattattttaatttttgaaacaatttaattattttttaaattatatgtatggggatataagatgttattggaggaagctgaaagaagggtacgcagacctctctgcactctattttttaaaatatgtatttttttaagtatttacttatttacttgggctgtgctgggtcttagttgcagcacgtggg

SEQ ID NO: 55516 - DNA, 965 bp, Bovine  19866881064417
  misc_feature (1)..(1): n is a, c, g, or t
ntataacttttttcttcccctaaatgtttacaaatgatatgtatcacttttatttccttgttttattttttattgaagtatagctgatttacattgtcatacgtgacttctgtattaagaaaatgtatattttaaaaactagctcagacaaaactaaaagcaaatatcaaaactgttttcaaggggaaaattcctcaaagcatacaactgaaaacgatatgtgaatcaaacttactggttcataaactagaccatctgcagatgcaaccattgtttctgctaaatccaatacatctgctccaacatctgcataaaaaaaaattagaagttttatattttatgctcagaaccaaactttatgtgatgtacactaacaaattaagatgaataatagaaaactcacaagtatgtgggatcactttcctatactgcttatttattcaagttaaaacagtagtattatatagttttggtggaaataactccaaaaattaataatgctttttctactttttactcagtaagaaagatgacttggaatctcacagtaaaaatagtataaacttaactgaactgaagagctttgcaaaaactggcaataaactaatcacagtattaaatggctgcctgacaaaatattaatgacaagaattatttttagagattaaaaaaatcttaaggcaaagctactgatgacatttaaatagtcaacaaatagggaaaatttattttgaaaagggtaaaattttaatggtattcaaacatctataataaagcaaaatatgataattcagtattaacactaactcaatagtttagatacaaaatatttatcttaaaaccactaacataaaaaaatataaatggaaaagggaaacagatttagatgaaatcttttagaaattaatttggatataatgagattcacattggatataatgagttcacaactttaaaaagttctg

SEQ ID NO: 55517 - DNA, 1237 bp, Bovine  19866881090719
  misc_feature (1)..(1): n is a, c, g, or t
ncctttctctgttccaactctatgatgttttagtattgacagacctcacctgtgcatcaggcacatggacttgcaatttgtaacacatgctgaagaatgttctacctgtggtattagagaaatgacacaaacttctcttgtgatgattaagctgtaaaagtaggtatctgcatgaaagaaaacccctagctactttatatcaagaccagtaacaattatttgagtgcctaatatatacaatccaataagaactttctacttttgatggagaaggggacagtaagtacaaagaaaaggttactttttaaaagctttggtaatccctatattctgcacccacaagatattacagtaacaaacattacagaactgaaaagtcaacacatgaggcagttaattctagaaaaagttgaggcagaagggcacacaaatcagaaaaacatttctcacaaatttatactaacctaacatctccagctagtataaaatttaactcatttaaatttttagctcatttaaataactgacttagaatctcaaggtaaaattgacttgagaagggactaatagtaagtagtgtatctcatagtgaacattaacaattaggtcagcctaaagtttcttgtaaagagatcaaactagtcaatcctaagggaaaacagtcctgaatgttcactggaaggactgatactaaagctgaagttccaatactttggctacctgatgcgaagaactgactccttagaaaagactgatgctggggaagattgaaaacagaagaggacgacagaggatgagatggttggatgacatcactgactcgatggataccagtctgagcaagttcagggagttggtgatggacagggaagcctggtgtgctgcagtcatggggttgcaaagagtgggacacaactgagtgaataaactgaacatttctaaaaatatcaatgtttcaaagttccaagaatcacatgcaaatttccgtgtaacttttcccctgtacattttctatgcaaatctaaaaaattatgttttgggaaccatatacatatatgaaaaaatgctcactacctagattaccttttaaaaatataacaaattgccagaattgctgattttaagatataactgacttgagagacaggaatgccctgtgaggtgcagatacaaatacgacaacagatacttaactgaaattgagtgttaacagcctagaagagctctctgatataaa

SEQ ID NO: 55518 - DNA, 1992 bp, Bovine  19866881101794
  misc_feature (1)..(1): n is a, c, g, or t
nttagtgctaagacttggcagcacacagatcttaaagagagtcacccatacagaaggaatacatgtagtggcagaaaagaaaagaatctggggaaaaagttaataattctgacttgttgtcagggaccttctgggaccaggcacatgtggttgccagttaaactgaaatatttaatttattcaaaaacaaaacagatggggaccaatagagggtggagacaggggtctttaacagatctggagcaacatgccttccctcctgcctttacagtatccagcagacatatatggtcacacaccttgagtatgggataaatttgactctatattatttattatcagttctcttcattttataaaagcatatttgcactaaagcctgtgttaggcaaaagttgtttttatgttttaaagtgaagattaaaatatttcctaagtaggtataatagattcctaaactatctactttttaatcattactcttacaatttcaaaaatatgtctctctctctcacacacacacacacacatgcacacacacacccctctcccctgactcaaccttctctctcttccctttgctctaattatgaatttccagtgctttggttccatttgattacaaaggaatagtgttaaccctatgagaacactgtgagatgatagcttcataccctgtattaatagaattgaaaatctgttttcctgccatttaaccttatggcataaggttatcttgcacattctccatctggtccggtacttaaacaaatggattctccaaggcagcaacagataaagatgaaattacacaagcagacagggtctctttatgaggacattaatgttaaaatggaccagaagatctgtttcttggtctctgcattcttcaagcaagcattctgatggatcagaatataattatcccttttctttttctctgcagggaaactacgtgtctgcaagaacttattatgaaagagccttacagctggttccagacagcaaactactgcaggaaaatctcgccaaattggatcgccttgagaaaagattacaggaagttcgagaaaagaaccaaacgtagccagcatttgacccagtctcaagggacagtgctggtgtctttggaagaggaagaagtgatggaagctttgctttcacatcatttggggcacgaccaatggcattttcctctcactccaagttcagggtgacacattttgggacacctgctggtaacgctgtgctggagacttgcatttccatgaaagaagacaaaaagagcaagcaggggctaggagacctgagatggaaggaaaacagcagctgcacattttacagaattttttcttgctttaattctagatttcctttcatatatgcatctgcttttttaacctggagatctatttccatttcttagtgtagacatttcttggtgtagcctcccagaaatagaggcttgaaatgctatgaagtcatggcatctcttctttatgagaggagatatttcagagaggataaatcctctgggataaaccatttgggaaattcttccaagaggtatctcatttaattctctggaactagaaatgagtatctcacagtttttgtaaaaatcttctggaatatatggggaaagaggctgttgttaagtcagctttatcttatatccttttgaggatattgctagagccctattgagaaataaattaaattcccctctgatacaagctgttttcccattgcctaatatatcaataaggaagtttctggaattgtgtatgggtattcatattcctatgggaaaatcaaggatctcagtacccctgattgtttatggaaatgttttaaattattttaattttattacaagtattattggagtagtggctctgctctaagatttcataagtgcttttaaaaatcataaatgtttccacctccaaatatattgttattttggtggagaaaaaatagtatattcta

SEQ ID NO: 55519 - DNA, 1750 bp, Bovine  19866881326181
  misc_feature (1)..(1): n is a, c, g, or t
naatccagtccaggaagacactcactctggcaaatacacctggcttccttggttggtcacagccagctccccagctgacaatgccatagaggacaaagggacctttttcatgtttacacactagcagtccaccagaatctccctgaaacaccaaagaaaacgtgttctaaaattgctttaatcagaactcctggctttcaattttggaacatgaataattaatttattaaaaacatatttctttaattttttaaaaagatttattccttgtcatttggtataccttagaacacttagacataaataaatgaaatggcaaaaggaaggaaagaggagacactacagctggtattccagaaatacaaaggattataagagatcactatgaacacttataaaccaaaaattgggcaatttataagaaataaattcccagaaacatgcaacctactaacaacaaagtaagaggaaaaagaaaatcacaatagactaatatgagaaaggagaatgaatcaataatgaagaatatcataaaaaagaaaagtccaggaccagaaggctttactagtgaatttcattaaacatttaaataaagaatccttgtcaaattcctcacaaaaactaaagaggggggaatactccaaaaatcattttatgaagtcagcattatcctcataccaaagctagataagaacactacaggaaaagataattacaggccaatatccccaatgaatatagatgtaaaaatccccagcaaaatactaacgtactgaattctgcagtatattaaatatactatcaatcaccataatcaaatgggatttattccagggatgtaagaatttttcaatatatgcaaatcaacaaatgtgaaagttaaaagttgtgtcgtctcaatagtacaaacaaaacatttgaaaaatgcaacattctttcacgattaaaaactctcaagaacttggatataaagaaaacataactcaacataataaaagtaatatataacaaaccccacacttaacatcctactcaacagtgaaaggttgaaagctgttcctctaaaagcaggaacaaaagtactcatcctcaccatgcctattcaatatagtctgaaaatcctagtcagagcaatctggcaagaaaaagaaataaaggcacccaaaccagaaaggaagaagtaaaattgtttttattttcaggtgatataatcttttatacagaaaatcttaaaggcttcacaaaaaactgttagaacttatcagtgaatacagtaaagtttcaggatacaaaacaaacatgcagaagtccgttgtctcttgcctgtagtcagtgaggggctgtgcaccttgcactagttcccggtgggttctgctggacaaatactgggccagtgtcattgagggaatcaagcaagatctgctccacagggctaatgctacatctcccttttaaaattttgtagaaattataaaaagacagtggtatgtggtgtgatgatcagcactaagtcctgcgtttctctcaaggccacctgggccatgaatgagaagggaatcaaaatgaaatctgactaaaatattactgcacaggccaagtacatttagtatggcactgagttatgatatagttttactttggtgtgaattttgaatttcagctacacctagatagacatagaatgataattaaaatgctgtaccaacttatctaataaaattggcacccagcccctattttgttgactatg

SEQ ID NO: 55520 - DNA, 619 bp, Bovine  19866881724233
  misc_feature (1)..(1): n is a, c, g, or t
ncctgcctatagtgggcttaagctagagatactggacaggaaaatagagccttcaccaggagggtgggagggcagggctgagagcagtgccctggcaagatcctgatgcaaagttatagtaattagggtcctggaaaggaaagtccttctctccttgtagctgtaaacccctggttttaccactgaagctcctggtcctggttttcattttgggctctgcagcaacaaagcacctttggcccaaatctctcacattatatttttaaaaagcaaagatttaagtgtgcaggggagcctataatttacccagcacttgaaacaatcaaatccacctcaaggcatagatgaagctcaaatcctcctgcgcaggttttgatggtcctacaaaagcacttaaaattttcttttatgtgcagggcaattgccatagttttctagctgcatccttttctgtctcatgtaacacaggggtggttgtgctcttgcagagactgtggaacctgactctgggttctgtttataggctttgggtttgcaaaacaggggatgatttgccaagtttagaacccctggaaacctgtggatttggaactccagatagaattccaaattttttttt

SEQ ID NO: 55521 - DNA, 1176 bp, Bovine  19866881758120
  misc_feature (1)..(1): n is a, c, g, or t
ncaaaataagcataagcctaaagtgctcattgttgtctgcatgttaattgaaccaatgatacccaatttagtatataatgagaaggaataccatttagtatctctatcactaaatagttttcaattgctttttaactattgcttaatttccatagaaacaaaactcacaagccttttcttaaagtccaaatagctttccaaggctgcatggatgagctgcactttgaaacttaagcactgttcagtaggtctcttattctactcgcaagcaataccaacagacaaaccattcagtctacactctctgggctccagatattcttcctaagtgctccctcttgcttccactggggttttgatagagggagaaaaaactttcagaaatcaacccctatcattaaaggaaacttcctctccacattcacctcagaagcaggcaacaagtttctcccgatgcatctagacctttcttgctgttttactttcctccaaggctccaagctcatcttgggactctcctcaaacttgatttctacaccaacttcagtagatttttaagatactttccttgcatttccagagactctagagatttgcttttaattaaaggacatcattttccctttatgaacatcttttctaaaataggttttatcaaccctcacagtagtttttccacaagaagacaaagcttgcttgtttaaggaagtgtctgttggcaggacttacagagatggcaaattacagggaaatgttttatatgtgcgttgctttacttcaacataattatttgcttgtaaaacacatgagaggaaagaaattcatgaggatattttcaagatcagagaagtcagaagtagaattgggttcatctggcctgaagataaaagttcttaatcctatggaggttaagaatatgggctccaaagtgtactgccgtggttcaaagcttggttttgccaaagctatgttggcaaattccttatctgtgccttggtttctgcatcaggataataaaagaacctacttattagtgttgtaaagactgaatgatttaacatacacaaaatgcctaaaatacctggcagatagcaagggctccataaaataataactattattggttgtagtctagcaggatgtagaataaagattttcctaacacgttcaaagtta

SEQ ID NO: 55522 - DNA, 674 bp, Bovine  19866881849614
  misc_feature (1)..(1): n is a, c, g, or t
ntgtagtacagatcgtcagttctggccctctgtcatatgcaggcagctctcctctctgtttaagtcttttgggagatttccagcagcgggactatttattggtgctgtgtgttgtgcttaggtgtgtctgactctgccactccatggacagtagtccaccaggtttctctgtccatgggattttccttgtaagaaaatgggggtgggttgccatgccctcctccaggggatcttcccgatccagagatccaacccactgtttcccatgtctcctgtattagcagggggattctttactactgtgccacctgggaagcccatttattggtaggcaagctcaaataatagaaaagctggaaaccagaggttctcagctcttctaaagtcaaaatggatttgaactagctttaaagaagtgtattttagttgaaagaacatttggtggggcatcaaaagagatgggccgcaggctgacctttgttcccactattatattcttagttcatctgtttccccatattccagaaaggacacatgtatgtgttacctgaatatttgctaggaggatgatatgaaatgcttccaactccttgaggacaaggctatcagattaaaaaaaaatagtaataaactgcattatacaaagcctagaattatggcaaaatcaaacataa

SEQ ID NO: 55523 - DNA, 930 bp, Bovine  19866880486663
  misc_feature (1)..(1): n is a, c, g, or t
ntattgctatatcaccatcttcccaccttgacaaaaaagaaaaaaaaccccacccatttcatttggactgtgtactaagaataattgccaccaatattgattggcccttggggacccagctgaatttaaaaattgcagactgtgaaatcccagctgatatagcctcgtggagcttgctgcttatttgtgacatgttcctatgtttaaacttacccacaaaaactgtgaaattaatatcctcacgttgagtacaatatggtgacacacccagctgacatgcgcagctatttttgttcctattgttttcatgctggcttctgtctgtaaacacagcagatctttctgatgatgaagcataagtccatttgtttcctggagtctccttttccaaccattttcaggggttgggccaacacgtgaagtttttcagtttctttggctgcacatttcgctgtaatgagtcaacgcagcagggtctcccagtggcctctggcctggggtgaactgactgcgctggccccattcagcttctccttggctatgcctacctctagcacaggcagcttgaagctagacattcctgttaaaagcaggggggaagatgtgttagtttgcctaaatccacgtaatgaaggatgactacgtagacttgcacgtacatggattgcaagcttcaaatatgtcaaggatggaaatttcaaatgtttctgaaatgagtcacaactaaaaatgaaaagttaatcctacgtatccttccttcttacgtcatgaagatgtacactttcaaccaagcaaaacatataaacaactctgatggtgaaattttcagggcgccacggattgttactgtttttctctgtctagaagctactttgtgtcgtgtgttattatcggagtcactgcaaaatttcatttttcttcgtcgccatt

SEQ ID NO: 55524 - DNA, 1456 bp, Bovine  19866880500646
  misc_feature (1)..(1): n is a, c, g, or t
nctctttaatttacaattttctacctgttacctggtacctggtaccagataagagaaaatacatttttttaaactaaatttcttgtctacatataaaccttcccacaaaacttcgctatgggttaaatatgtatccagccttgtgatgagcactgggggatgaagacttagcaaccaagaggtaaaggtcctaaccacaggaaactaagatgctcttttaaattttaaccatataaggcagagttgacaaatgtaactgtaaggtttcctttgccactgccacatcccagctaagttgcataactcaacttctcaatttcacagtctgtgaaatgggtctgtgagtcaaatctactccagcataggcatggggatgaaatgcctggaaagatccaatctgggcacacagtcttcacctcccctgtgtgatggggaacaagcacagtaggaaattcatgggaaggaaagcttgccatgggctgagctatgtaggggggaccagaggaggggttgaggattgacttgagagcatgaggtagcccgggataacatagatcattttgatccaaattgctgctgcgagcctgtgataattgggtgagcccaaattctggtttcccttgtagctcagtgagtaaagaatctgcctgcaatgcaagagtcccaggttcgatccctggattgggaagatcccttggagaaggaaatggcaacccactccaaatgcctggagaatcccatggacagaggagcctggtgggctacagtccatgggttgcaagagtcggatatgaattaaccgcttaaagcactaccaccaaattctctttacacggtgctgagttcctgtatattacttgtattagctcatttctagtgttcaacaaaaccatttcctttgggtttccaagatcccagccctcttggaggggcttctctgctagaaatgtgggagttcagatcccaagggacagtttgaaccatggccaagataacaacactgggttccagatttcaatcttttttttttttttttttttaacttctgttccctttagttctttcagatgaacattgcactttaaagatgagattccgaaatttccagtcagtcttatcatgggaattaaaaaaccattcaattgtaccaactcactatacattatggtacacaatcatgaggtaggtttgacattctgtttttctcttgctaatttatatcatgttcctattatgtggagagtagggaaagaggtgaccttacttgtcatagagcttttctctctctctccccctcactcagcccctctcagtctcagtgttttattcagagctttaaaagtccaagacaaaagactcctccatttttaattgcactgaatgcctgaacaccccaaagttatttttgacacacttgtacttagagaaccaatgccaatttctacagtcaaagcct

SEQ ID NO: 55525 - DNA, 2246 bp, Bovine  19866880802580
  misc_feature (1)..(1): n is a, c, g, or t
ngctggaacaaaccgggccatttcggtaaaaatcgttgctgttcagtcgctcagtcatgtacgactctttgcgaccccatggactacagcacgccaggcctccctgtccatcaccatctcccagagtttgcttacactcgtgtccattgagtcagtgatgccatccaaccgtctcatcctctgtcgtccccttctcctcctgccttcaatttggtaaaaaaataaaaagtgataaacccacctgggaacgatcaaacaggctgtgactttgcaggactagcagatggtccccaaaaggtcactgcaacctttcccatctcagtgagtggcagctgtgacttaggccaaaacctgggaggcatcttcctctctctctctaaccctgcatccaatctgtcggcaaatcctaaacttgaaagcgtatctctctcctttggcaccagactgcctccatcatgggttgcatgcacgctccccggaaaggcctgtcccagttggttctgtccccctgtcacagggtccccacctggctgaagctgacgcctgaggtcatgaaggagcagacctacaaactggtcaagaagagcctgactccctcacgaatcgggggtggtcctcagagactcacatgctgttacacagtacattctgtgacaggcaataaaatcttgagaattcttaagtctaaaggacttgctcctgattttcctgaggatctctaccatttaattaagaaagccgttgcggtttgaaagcatcttgagaggaaaagaaaggataaagatgctcaattgcatctgattctgattgacagccccattcactggtgggctggatattacaagaccaaacaagtccttcccctcaaccggaaatacacatctgcagcatttggcttgattgcataaacttgtctgttgtactcaagcaataaaactagaaagaaagggatttcccaggtggctcagtggtaaagaatttgcctgccaatgcaggagatacggattcgattcctgggccaggaagatgcctcagagctactaagcccaagcactacaattactgagcccacgtgccacaagcctgaacaccctagagtgtaggctccaccacaaaagaagctcccacagcgaggagccttcacaccacaactggactgtcacctcacctagcagcaactagagaaaagtctgcacagcaataaagacccagcacagccataaataaaattattttttaaaggactaggaaaaaaaaagaaagaaaatatatccaaaatatgaccacttctcacacctctatccgggccaccacagtgtgatgtctggattcttcccgaagcctccccctggtctcctgacctcttcttacctatgatatcagggattattcgtgagaaaaaattaataagtgaacaaatgatcatggaagcaaaacaagaactgaagaggaatattccaagaatccttccagtccccctccccacgtcctcctctcaccatgaaaaaaaaataaataaataaaggtgatctgggagaagaaggaaccataatcttgagaaagagtggacttttccccaaaaattagattaacagtaaacaataaatgtagacactgactgagatcttctatgtcccaagcaccatgagaatagctttccctgcctcttcttgcttcttgaaaccaaccctaggaggtactcacatctccttttgtgagtgtgcaactttagtctttggtaactcttctgccaccaactgcaacacagttctagcacgactagccagtcacttccccaccctggcccactgcaccccgagttaaagtctgggtcctccacaggacagcccttccctcacactctggccacactcctgggggggtcccaggccatccacacttctgagactggctacaaattcagagcttcccacaacccctcgggtttagtaattccccaggaggactcacaggacccaggaaggtgctctacttacaatcactgttttattataaaagagccaggccaggcccagccaagtgaatgctcacataggcaaaggtctgagaagtccagatgcagagcttctgtggtcctccctgtggtcctccctgtggacgcaggcacaccaccctcctggaacgtcaatgagatcgccagccaccaaactccatccagcctcaaagtccagagtttttcaccggaatctcattacgtcagcctgatagactgactcattgcccat

SEQ ID NO: 55526 - DNA, 2520 bp, Bovine  19866880830020
  misc_feature (1)..(1): n is a, c, g, or t
naacctgagtctcctgcattggcaggctgattctttaccacatgggaagccctccagaaactctcccaaacacagtcaaatcatttttcaaatttatatctttcagaatcctaatggtaacacattaaatcattcaagaggactgagctgctagatctcgaatcttaacagctggaaacaacatttaagaaaaataaaaagataacaaggaaagaaaaccatacctgtagaaatgccttaaaggggagcagtgagtcctagagacatcacttcaagccttcgacagcctttgaggtaaacacactaggcctcctcaagaaacacactaaattcaaactcatttaattacatgtgtcagtcagggcctcacaatcaaacaatcaaccagactcctgcgcaataacaacactgaagccatacctagacataaatacaataatcaggtgtgccaaaaatatgtgaaacattgttacttgaattgactgatgagcccaccttgagcaagatctacttggcgtttgaaatgaacaactattaatatagttgcttatctgtgatggaggtataatcatgatagaaatgagacaaagtctaaccatagcccaaggaagtaccaagttttctgccacattcatcacttcagagagtcaggtactgagccagtgccagagacaaaatagtgtctaaaatatccctcctgcccgccagaggccctgcagtccacttggagattggtaaacaccagactgcgacctccactcaccctgggacagaaacgtcacatgccttatctctaatactcgtgcttaagtcacttggtcaaggccacccaactccctacaagtccatgctctgttctcgcctctccattcacgtgtaacgtcagcaccaaagggatatgagtatgtatgcactattgcacactacatgagactgtgctaagaacagacctttccaggtggcgctagtggtaaagaacccacctgccaatgcaggagacgtgagagacagaagccgcaagagacaggagacatgggttcaatccctgagtcaggacgatcccctggagggagggcatggcaacccactccagtattcttgcctgggaggtggggtcacaaagagttggacacgactgaagtaacttagcatgcacatgctaagaataaagccaagaataaaaatgattttgttgctactaaaaaagagacatcgagttcagtaaaatcaagtagtgtcaagccaagtaaaacagtttataaatggtactggttttgaataggaaaaattacccatagaagaaccaccaagggcaaggccaatatggatcaaaatatcaacactaattatattgaatgcagagattataggcaattattggctcaatttgaaattcttttataacacaaattgtttttaaaaatgatcatccaacattaaaataaaatgctttttttttttaacccagccaagattccattaatcagcagttctcaataagtatgttccactcctcaggagatgttcagaaatacgtgggggtatttttggttgtcacattcactgggaggcaccactggcatttaacaggctactcagaacagtctcatacaagtaaccatcccaagcgacttgaatgtctgtctagacattcctgtagggggaaaaacccatttataagtatctgggcctagaaccaaactccattttacacattaatacaaaagacattttgcaagtttttacttgcaaatgtcctggggtcctagtagtgtaaaatactttgatttcttctttagaaaaagttgggcagtacattgagatttgaaagtatgtatatgttattgataaacttaacttgatgaaaagaaacttgttgtttaggccttaaagtccgtgtccaactctttgcgacccatggactatagccttccaggctcccctgtccatgggattgcctaggcaagaatactggaatgagttgccattcccctctccaggagatgttcctgacccagggatcgaactcctgtctcctgctttgcaggcagattctctagcactgagtcacttggggagaataaaggaagcattacaaaaagggaatgctgggtctgacaaggttgagagtttgctgtgatgacccagggaatatgtacgcagtgaggagaatccagctgacttctattaagccagacatagaagagatccacaaaaaatgcagaacaaggccatccttctcactacaactctttgttgtgaaaaatagggttattctcattagttatttatgctaacttggaatgatttgagttttaaatgaataaaagtgttaaaaataagtaaatttttcagtttcactcttactatgggaacatcaataaagagaacaaccataagcaaaagctctttgatagccttcggtacattttatgtgcatggagggatttaagatgaaaatgtttgaaaactgttgcacttatagaaaaagataaggaagaagggcttagctggctggag

SEQ ID NO: 55527 - DNA, 1525 bp, Bovine  19866881034167
  misc_feature (1)..(1): n is a, c, g, or t
ntcccctctgtctccgggacccgcgaggcagcatcccgcaggcttgtgggctcgcccgcggggaggaaggccttctgtctccctgggtgtggaaggacatggtgttggtggccgggcagctctctttaagcagctggaacttggcgactcagagcgggtagtgtgtcctggattttcaaaagccgggggaaagaaaaaaaaaatctgcccggcctgtcagggcattggaaagggggagagggcccgccacctcgagtgggaaccaaactgccagccgcacaaaccacctccagactgcgggaaggctgccaggcgggccggctcccacgtccactggctgcccggccggctcagccccatctgcccgggcctccgctggctctgacaaccactctctggaagggctgctgggaccagttcgtcagctgaagaaaagttgtatgtgtgtgtgtagcgggggggtgggctacggagcttttgaatttggccttttttgaaggtaaggaaagtgacccacccagcagggcccttgcaactgaggactgggggacaaaccctgggtcccaggatcgaggggtcaggcagggacagtgcacaccaatactctatgtggtccttaagcattccctaccagaacaggggaaaacatttttcattttgtgtgtgtgtgtgaaactgggctttgtcctcgaaagaacaggtcatttggggactggctgcacaaactaggaattctaaagccccctaccctccctacttgcaggttagaaggaccagaccttgacatatatcaagagcacctggacgtgcacgacctaaatataggatccacgatgtcctgcgtataggtccataaccaacccaggcagggtctggggagtaagtgggcagtgctcataatgaacagatgactgatgtcagtgtagatggctgatccaagtaattttagagtccaaagtggatttttcccccctaaagaatcattttgacattctcgctacttcaatcaaatcttcacccattctttcccgtataaagagaagtaaaaaatcaaagtgaagactgttaaggttttgcccatccaggcttttctctctctggaaggaagaagcatttaactgggcttcccaaaagctgccgtttggggacctggtagaaaactggactgcgtggcttttaaagcagacatgagttccctgcgctgagaccagtgtgggccaacatctgttgagcaccccagtcagaaccctgatgtataaccaaggggctgacgggctgcctggagccagggctgcataactgggaaacatcagcacaatggtgccaagggcttgtgggaacagtggttttccagatgctgacttattgcagagggagagaggcaagctagcttcagaagtacctggcattggacacttgcttgctgtggacaaactgaggcacaaaagcatgtgtgagaactcacttggggtcaaaccatcattgacaataggacccggaagcccagttcaagttccctccacat

SEQ ID NO: 55528 - DNA, 722 bp, Bovine  19866881095536
  misc_feature (1)..(1): n is a, c, g, or t
naattccctgtatcatctggatcgcaacatcggaaaaaagaagcagatagtgtttatggagagtgggtccctgtagagaaaaacggtgaagaaaacaaagatgatgataatgttttcagcagcaatttgccctctgaggtaagtaagaggactattatgtatttttctttttatatacctgaacctgcattttattgttactttatatctgatttggattctgtttcactcttcttagggccgggttaaacggcagggccgggttagacgacagatgaaacaacccgcagcttctcatttgacagtaactcgatgcaattcactttgtggaaccaagccacaaagtgaaaagcatcgaattgcagagaacagtgttatcacatccctacccaacattgggccctccttgcacttgtgggaaggtagcccaaggtacaactatttagcttcccgttttgcttcaaggctctatagctctagattttggtggtagcaaatttattgggtggagggatttgagcagagagaggcagatcctcaggttcaacacaagaactggattggaaaaggtccctgtaggctgatgtgagcatctcggatacatagcctgttgccctttaaataatggtttcttactatatttctctggggttgttttgtcagatagccctttaattttaatcattttccccttctgtgtgctaccttggcccttttgaatt

SEQ ID NO: 55529 - DNA, 993 bp, Bovine  19866881304139
  misc_feature (1)..(1): n is a, c, g, or t
nttttaagtgagcatcactagcataatgactattaataatttgcacttctataggcctttctggagggcgtctctaagtgctttcccagtgaaccacaggcctcagggcctctggaaggagctggctagggggatgagcctcttgccttaggtcagaaacccagcacactctctttcaaacctggactagatgaggtcaggggagtttttaaaaggtatattttgggcttccctagtggctcagagggtaatggatctgtctgcaatcctggagacccaagttccatccctgggttgggaagatcccctggagaaggaaatgtcaacccactgcaatatccttgactggggaattacatggacaaagtcggacatgactgagcaattaacacaacataatatatattttccaatcacaagaatagacgccatcacaagcaggatggatatgtgatgccaatatctttgggtccttttctttctcttcttggctttaactctctccccgtttgaaaacttcactgggcaattccagtagtctgtctggctgagtgctgggtagatttcagcctatgggactagtgctctgagtgcaaaaaaaagagggggggatgggatttgcctgccatagttctccaagataaataaacaaaaggacaatagaaacagtaaaaagaacaagtaggctgcagttttcagcctggagcagtcacagcccggagcttgtccgcagtggtctggagccctccaggctgacagggatctacaggtgtcaggaccaggagagggcctggctagggaggacttggcaaagaaaccagccctggggattggtctctctgaagccacttatttgagtttttcagctccaggaagatcgcccccgcccccaaacagggaagcctcaaaggacttgagaaggcaaatatccgctggtcacttcttttgcccagcttccagccacagtctctcaatcaacagcgccccttactg

SEQ ID NO: 55530 - DNA, 1629 bp, Bovine  19866880600080
  misc_feature (1)..(1): n is a, c, g, or t
naacccactgatggcacaggttcagtaatgtgtcagttctcaaattttgaaatattgtgtgataagggattaaactgctgtatttgggaggtaggtttgcaaatcactggaaaatcaaaagagaaatgtactgcgtttttaaaaaaaaagtgcccctaagttagaaaatgttgggtatagcaaatggggggccctacgtggtcaagctacatgtaggcatcctgtgacatcaggtttgtatatataatctgtttcttagaatctatacaataacttattgagggccacatcttacactcaagggcttgtctttcactgtttatctgtgagatgatgtatatatgaagcaacacaagttatgatgtggttcttcttccaaagacacacagtagaaaaccaagacacgtggacaagcaaacaaaagcagacaccacagtaaaccagaacgacccacagtcatttcaacagggaacaccacgaaatctgctttcctacttggctgctccctgaactgaaaattcatgtactttggtggccagaaagtataggtttcactgcacagtcatgatcttgattttcataaacaaagggccacaagattgaccaaagcaagtttggtaagagaatcaaaacaaaattctgagcagaaatctatcccttccactgccatgaaattcatgacactacatcagacccagaggctgggaatccagcctccagcaaccctggaaaagttataaattgcaagctgtacaaatctatatccagaacctactaagggtttttaaattctactatgctttacattgagagacatcttaaaattcaaaataacttctaataaccaagaacctcaatgttaaggacatctattcctgacaggggaaagacagcaatgcatgagctgaagcctaaaatactgtgacaatcttgcccggaaaccatttaaactttaaacaataagcaactctgagctcactttgggaacagcttcctctgaaagctcactgttaggacaggcttgttgggaaaatgcggcctgtgatgtcctccccgattgtccccccgaaagaaggcaatctttcatattggcccaatgtgtgttctccatgctgaccctttgaaataaagtaagttatttcatgctcttctgcagggagtatacaggagctgctaagaaaggacacaccctgcaccaggacagtggctggggtctgcacccaccagccaggctgggtagcgggccagcttctcccactgagtgaggatgacccacacggggtgctgaaccaacactgagatggaacaccagcctctcctccagaccccagagaggacttggctggagctctgtcctcatggtaaccagcttcctcatcaccaggaacggcagtcatggtgctaggtggactgttcctaccatggagcttgttataacttggccatgggttagctattcaacagccatggttagttgtaacttcgccaggggatttgttataacctggccacagagctagttataacctggccatgggcagggacagagcagcagagggacctggaacgaaggaaaaggctcggtgagggcagagacacccccgcagccgggtgaggagagcagccagg

SEQ ID NO: 55531 - DNA, 1721 bp, Bovine  19866880635423
  misc_feature (1)..(1): n is a, c, g, or t
ntcacaagtggctgtacaattctgtgttcccaccagtagaagtacgacttcctgttgctccacatccagaccagcatttggtgttgtgttttgggctttcgcaactctaaaattggtgtgcagtggtatgtccttgttttaattttcaattccctgatgatgtatgagcatctcttcacctgcttatttgccatctgtttatcttccttggtgaggtttctgttcagatattttgcccattaattaggttgttcattttcttattgttgagttctttgtgtgttttggctaacggtcctttatcagatacgtctattgcagatttttttcctcctagtctgtggcctgtctaatcattccgttgacattgctgttttttagtttttcacatgtagacactttgttgaccctcacaatgataggtgagaatttaactcataaccttttgcctcctcccagtgtcatatcactgtttttaattcctttcctggttacctcttttattttaataatgtagttcatctttttttcttgttttgccaactatatttagtctctttgactctccatttatgagatcaggttggaaattgtcacaaccctttcttccagctttcttcacctggtcttctacctctcaatttcttctattggtactttaattttttttttttttgctaacaaggatgatagtattcaaatgttctataaaacagtctttcctactttggtataggtaaatttaagtagtactaatgttattatgactacaaagataggcttctgagaaagactgaggataaaaggagagaagaggcggcagaggatgagatgggtggatagcatcactgattcaatggacatgaacttgggcaaactccgggagatagtgagggacagggaggcctgcgtgctgtagtctatagggttgcaaacagctggacatgacttagggcctgaacaacagcaagataggcttccctgcagagtgcagtcatgtgctatgattttgttacctttatgcagtttcttgtttttgtgaggtttctgttttttcactatttttattatatcctcactccccccgccccccgactcttcttccaatgaggtgttctattaaagaaacctcccttcttagacactttatcctctcaacccagcatggacttgttctccagacttgctccatggacaccatccgagacttcccttgactgctttcttctgataaggccaggcttcctgaatgactcattctcttctgtttggtttgcttcattgttttcctggagcacatccttgaataacttcctcagaaaaggtgttggcagttttaattttctgagtctgtgcatgttttgacatgtgttttctgcctctctaattgatttgcagttaggttgggtatagaaatctaggttaaaaatcattttcccacagaactctgtaggcatttgctttgttgccttctagaattcagtattgctaatactggggggttggccaaaaacttcattcaggtttttctgtaacatcttatggaaaacctgaacaaactctttggccaacccaatacatgatgatggccaggctcattctcagttcacaccccttccccaaacttttacacattcttggtgttctgaaactttaaaaatatttatctatctccttgtggatctattttttgttttgcctgacataaattctatcgacac

SEQ ID NO: 55532 - DNA, 984 bp, Bovine  19866880778296
  misc_feature (1)..(1): n is a, c, g, or t
nctttttcagagtcttttcacatataggttatcacagaatactaagtacagttccctgtactgtacagcaggtcctattgtcaagtagatcattttcccgactgctttgtaattttgaattgtgaatgtattttcagtagcctctgtactccaggccacagagcttctggcatcagagacactataaactagtcactgcttgcagcagatcttataaatttggactcaaaacctcatctggcccagcttttccttccttccctccaagagattttgtgggttttggccactaagaaatccaaggtagagactgagcttccttatcacctccctggactggcaggtagcaatttttatctccccttcactaagaagatcagcgtttggggagccttggttctgtccaggggtctcaggcccaatgctctggttacaggagctcagtgccaggtctcctgccccttcatgagcacaaaccacagcctacacacattggaggccctttcccactgccccagtcccaccctggggtggccagagtccagcacatgcctcaggactctggtcttcactcctcttttaatttctggcatctagttatttcccgttccttcttcagagattggctgtgtattgatattttaaaaattacatcgtattcatatttccagggctttaatgataattcagtctagaactgaaatttatgcacagcgaaatcttcactgaaaacactctaaatcacatgtggtcagaccaactgtacacttttatatcaggaatcatgagtaatggacttcattgctgtgaagattatttagtagacggcataaagttctttctcatgggattaaaatatcacatggatacaaagggggacactcaccaggctgggtttgatgcctacactttcagctgcttcaaatgccaacaagagatttcttttctaggttaaaagtcaaacagaatgaaattatcagccaa

SEQ ID NO: 55533 - DNA, 1639 bp, Bovine  19866880804519
  misc_feature (1)..(1): n is a, c, g, or t
ncccccatcccctttttgtggaattgaaggaatatcttagctacatgaatctgtgagctgttcagacattttcccttttgtaagctttcatgtacaggtgctcagcagcttaaatatcagtggaagtgttggtgaaaatacttattaaacacatcaaagcaagaccaatgctttcgtagggatcttgtataacaaaccagagatctcaggtggtgccgaagctgcattcgatgaccaggaaacaaagccaagaatgcagccgtgaacagagaaagatgaattagtaacctcactccagccatgtggccggcgtctcctggctcctcttaggctctggcccagtggaaatgttctgtgtctgatattgcctccaagaaatattaagagaggcttcagctgtttgcctcagaggacaggaaggatcaatctagggtctgtatatcctgcctctggggaaagtgctaagcagtgaatctttctccaaaggaattcctcgtggaaggtgcaggagaaatgaagggctccctgtaaaagctttgctgccacccaaacgggccatgctgcactagggagacagcacgacactggcctggagcacgtctgtcttatccttttgccagtgaaggatgggatcagatctttttataatacaggttgggaccccaagtccaagaagaggccgaggaagctgggtacagttggtaaaatggaactcagaagtgggcttcggagttcactcagatgcgtaccatggcttgatctgtttatcaggtgaagaaacaaaagcacagaaaaaaaaacaaaagcacagagataaagtgatttgccctgggtcacacagccagtaagaggcagagccaagattccaacccaggattccaagtctggacttagagctggtgccctaagctgccaccctgtgccgcccatgtgacatggctttccttcagccctgtccacaagccccggtggtgtccccagcgtctcctggctcctcttgggctccagcccagtggaaatcatgcaggccttggaaacacagtcccgggcctgcttcccagtcctgcctcacccatgcagcctcgagcgagttagttaatgcgctttgtcaagtccagtgtagtcgagttatgttttgaattggaagtaacatgtgagtcaaggacgtagaaggacccaggctgccgcatgtcatcagctcctatctgttcccttaattctacctctgaccctccaaacaggcttaccacccaatcttcacagcaagaacttgactttgccttccttccacctccccaggtgctctctctgtttccccacccgtgtctgccctcccagctgcctcctctctcccctcccccaacctgcccgagccctccttcgcttctgctcacagaggggtctctccagcagactcaactggatggctcgcctggctggaacacatgggtttccctgttgtctgctcatcacgtccgaatccttgtcactgcttctcctcatccttatttctccaggagccgggagggtcctgccctggccccatgtgctcccccttccttccccaccctgctccctgcccccagctcttagcatacacctgcagcctcagggacaccccatccactggtcctccagg

SEQ ID NO: 55534 - DNA, 1086 bp, Bovine  19866880841528
  misc_feature (1)..(1): n is a, c, g, or t
naatatgaatgattttcttaacatatacatatggaaggagaataaaggaagaataagttatgttgaattggccaagaaatttccaatattttttgacaagtaaatgcttataactcaagaggatatatttcaatgtagaagtagacttgcaacatgaaacgactcaaatgcaagagtaatgttcagagaaaaattcaaaaaaagttgaaaaagaatatatagttgatcctttttatttgtgaattcaactaacaactaaaatgttttcataaccccagaatcaatattcaggaagacatttttgtgctaattctaagacataatcagagaagctaataaattgagtgaaccaacatgtacattcccagctgccttcttgagacaacctttataatgcaaacaagggtcattattatgtctatttagtactattactttttcatttttgtcaagttttttttggtgattttgctttcaaaataggccccaatgatagtgttgaaacgctgtctagtgttcctaagcacaaaaggatatgctacgccttgcagaaaataatacttgtgttaagtaagcttcatttaggcatgagttatagtgttgttgcccacgagttcaaagttaatgaatcaatactatggtacacacagagaaaagaagaggaaatttgctgatctctatataaagctgctttggaaaatgctgaagcgacatctggagtgtatgatgaggctatggagaagatggaaatgtggctaaatttatagattgttgagatggtgactgattacaaaagagaagtagatggcattgttgtaaggatgtaagccacagaaatttacagtcaccttactcagcttcaggaaaatgttaaacccttcctggctagggctggctggctttcaagtttcaaaaggtaatacagtgtaaaaaatgttaagcttgcaggtgaagtatgttgtgtaggtcaggagactaggaaagaattattttttttaaatatctgctaaatgttattcaggaaaagggttacggaagaacaggttttcaatactgatgagacggcttattttataagaacagggc

SEQ ID NO: 55535 - DNA, 4841 bp, Bovine  19866881142344
  misc_feature (1)..(1): n is a, c, g, or t
ncattgagacagaagttaatgactgtgggctatcagctgtttttatcaacagcaagcacataactcaattaatgcaatgtctaattaccaacgaagaaaattaaagagtaaatggctaaagctaatgaagataacacaaatctacactgaacaagatggtttctactctttatgtgacaacacacatgtgtattatcaatgaaattattctctcttctcatgtagcaactaaaagaaactcaagctaacctagaaaaaaactccttattcaagtaaagaatgttagcaagaaaattggaaagataatatacttttcctagtttttttgtctaaaaataacaagcatatatggatatttgtcagtttcatgaaattcatttgaaacctaaaatatccatcttctctacaaacagaatactcatagacagacttcctgcctctcaggggaacactgggagacaaggtctcaaagaattgttggctatgacctgggaactcccctcccaaccctgctgctactgacctaacgtccataagctgggagctccagttacaaattccttggagcttcttgcaagccaaaccaccaccaccaacgttaaagacatacaaaccttcttggtggctgataaccattatcttccccaaaacagacaccagtaaatatgagatactgctgctgaccactcttaggttaatctcatcctaaatctagtattttagtttttagacccgcattctaccatacgtgtgtgtatacatatacacatgcaccaataaacagtgacaaaatgttatgatctggagaaaattattggagctctatttttaagggaacataaaatctgtaacactaaaccaagaaaagagttcttttctaagtaatggagcattcctttaactgcccagtgcctcaaatgcacgtgtaagatttgacttatcagtgtgtgatttacacatatcttttcagacatatatattttatataataaagcaaataaacacccacatttcttttttatattgatgctaactggtagctcttattaaaaccagtattaatcaaagtaatgaaatttcattttctagattgatttccattgtctgtttgacaaccagaatttagccaagtcattaattcctaagacttggtttcatgaaagaatcatatgcccaggagtcaaccaatcagcaatgatgcactagaggacattagaccaagacaggagagcacagaaaatatctcatataaatctattggtttgctaagactggaaaaatctaacttgaattcactcacgatgggacttaaactatgtacactgtgtggacattgcctacctgatgagttcctactcctggattcatggccctgaagatgcccgcagcagcactgacggaactgctcaggaatggtgcccactgagagaaagaaaggggaaaggatggagaaatggctcagaactagtaaaggatggaacaggcaacaggtgcacaggctgtatattacagctcacagaatttaattagcaaagatgtagttcagctcgtgcatgctacgtggcccacatgctgggtgctgggctcacggagaatagagccccactgggcctacctggagagcagagtccggggagagagccaggcacaccctcgacatgccttcatgacagagaatgtgaaaagctggtcccgagcgtccagcctatggagctgccggggcccagtagctggccctctgcccaccatgttcctgccaaggtcgctcccatgccgccccaactgtgactggatgggtcacagatctggatggcatggtgcctggggatgctccttcagcttgggggatgtctccttaggactcactacctcagaactcctgcccactcctccccgctccctcacccttgggggtcaggcccataggtgctctgaagggcacctgccgcccctgcttcctccctgatctccagcagggtcttcccaggcactctctggaatgctctctgcatctacctctgggaagccaaactaaccagagggagagccggggaaggcttcagggagcttcggcagacgagagacacgtgtccaccaaaaagaagaggcactgacttaagtgtggctgggcctcgcccctggaactgggagagcctaagggttacagaggggatgaggaagagccacagttttgtttgaagaatatttttcagctaaaaatacttttaaaaccattgcaacaggccaagtgctgatgtaaccttttgacaaagtgtcactggggtcctgttctgcgaccggggcacctgggcgctgccgcagtctctcgctctccctcctgctgaggtgtctccccctgccctctcagtttcctccagcagctgtgatggggggtgcagccctcctcttggaagtgtctgtgtatgctggccctccctgtcctgctcccccaacatttctgctgggtggctgtctctctcagactctgcaatctcagttgctctggcctctccgatgtgtattctcaagttggagcattttctctgtctctcagttttcctgaaaatgtggtctggggtctttctgttaggttgggatttgctgttctgtggcctcccagggtgtcctgggggtggtttccgagctccccctgctgctgtacaaagtgaccgggagaggggggaggagctaccgcccctgccccctgtagcaggagggcctctggtggacacagcctggcacagttatgtacaccactgccttgtaaccctcttaaatcctagcaccaaagaagggcaggaattatatatgctttaacctagggtatctgattttgtgtttagagatgctttttatccataagacccatggatactatcatatttccaacagtgctctgaatggatttacaaaccctcaagaagcagtcagagcagtggagggttggagggagagacatggctccctatcagctgggactcaaggccaccaagagctgggctcctaagggagggtcctgtcacaggtgtcatcatgaaaaaggagggaatcaactgccacgtattctccttacctagaggggaaggtgagtaaggcctggaagagccagtggagagtcttcgtcctatggctggaaccgcatctgccggcgctggggagcaagatcccggacggaggaagcccagagggctggtgttagaccttcgtaccactgcagatctggggagaaagacaattactccctcgctggcagcttccaggactgtatttccgtcttttttcctaaagcttccaaacagtatgccatgcagtagattttttaaagtatggagcaagttgcatggaacagacatcaagtgtgtgaaactacagagtgaggtctccctcccaccttggatccctctacttaatttccaacacttcctcagtcctactcaaaaggttacttctatgttcatttctaatgtatccttccagagttccttaattcaaatatgaatgtatcatgcacgtgtgcatgcatgccaagtcacttcagtcgcttttgctaccccaaggactgtagactgccagactcctctgtccatgtgattttccaggcaagaatactagagtgggttgccatgcccttctccaggggatcttcctgacccagggatcaaacccacatcttttaagtctcctgcattggcggctgctgctgctgctgctaagtcacttcagtgtctgactctgtgcaaccccatagacagcagcccaccaggctcctctgtccttgggattctccaggcaagaatactggagtgggttgccatttccttctccaacgcatgtatgcatgctaagtcgcttcacttctgtctgacaccgtgcgaccccatggacagcagcccaccaggctcctctgtccacggaattctctaggcaagagtactggagtgggttgccatttccttttccccctgcattggcaggtgggttctttaccactagcactgtatcacaccatatgaattacccggccaagcttaaacatccactacaaaaacatttatcattattcaacttcgtacacctctagcacacatccacgtaagagagtagtcagctatggaaagtgatgaaccttcaataacaacaaggactttaaaagacaggtggaggaactgggaaaggggcgagtgcccacctaccgtggagagccatgtagatttgtgctggagccagcagtggaggtgaggttctgctctatgcgctggtagttcctcacctgcgtggggacgggaatgggggcagctgtgctgtgtggggacacggagggctggcactgcctgcagacatgagtcatggaaaaggaaataaatccagtgagaccactctcctttcacttgacccactggtgatattgagagaaaattctagaagaagccaagtgatcacatctgaatgtgattaagaaatgatcttaaatatatacatatatatatagccgaatacatcacacctgtcatttcaagaagtctcctggtttgcacacacacactgaggaggaagacttgcaacaagaaggggatacacacccctctacagcaacaggaagggcccacggccggcgcgatacagctgcatctgcttacattctgtgacttattccttatgtgatctagaggaaaaatacttctaggaaattatgctgggtaaaaaaacaggaaattcaagagcagagatgcctggaatgtttacaaaagttatgagtgtagtaagcgttctcaggaactggaactttgatgaagactaaaaacatactgtgtactcccagcacacaactcagtagatccaca

SEQ ID NO: 55536 - DNA, 1382 bp, Bovine  19866881326838
  misc_feature (1)..(1): n is a, c, g, or t
ncgggcagctcctgccgccatgttaccaagccgcccgcccggagttccggtccttcgccgcgcggggcttcacgggaggccgcgcgccggccccgccccccgccacgcctcctcgcctcctcccgcggctgggcctcctccagccgctgggccagggccagcgcccgcgctgcccgcgcgacgcgcgcgctgcctgcacccggccgtgaaccccgcggctctcctgtttctgggctgtgcgagggtggcccctggcgagcccctgacccagccgagtgtggcccgcaccgcgctcctagggatcggaccctggcgtggatctcgggatgcggactgggtcccgggatgcggactcgaggcaccacctgtcgccgcgtcttcggccgtggaggaggtgcgttgggcttattataagacgcgatcgctgagaacgctcagctctgaaaggacagcaacataaaaacctctcccagtatttaccgggaggactccaaggatcatccttctagcctccttcaaatgccattttcctaggaacctctgacctccttcgacgctagaagcagagacgaacctcccacccgtggggcctcttccacaggactgggaatccctgtagcctcgctcgtgtgcggtggaggagcctgggaaaaagtggcaaatcaataaatgggttttttagtcagtgaagtccatcaagtgatggacagagcaacggaggtccagagagaagaggcaactggtccaaagttattcaggttgtcggtgttgagactagaacccggggtctagtcacgatataatcagagcaggttaatagatttgtttgagtttggtccctgagtgggtaaaatcccctggaggagggcatggcaacccactccagtattcttgcctggagaatcccatggacagaggagccaggcgggatacagtgcgtggggtcgcaaagtcggacacgactgagcgaccaaaccacaggggcatgtgcggtaacgacagcggacatgtatggaaaggtcactgtgcgcaggtgccaagccctccggacacatgacgacccttggggagtcttggtgggagaaccaagcgcaaagagataacctgcccaaggtcacggcctcaccagaggcgaagtgtgtgggacctcagacctagagagtcggcttcagagccaaggtcaagcctcttcctgggtaaggacagtgtcggggcaggagcaagaggctgccccgtctccgggcgtccgaatgtgtcctccctgacctgagcaggtgctaggaatggacctctgtctgaccgcggagtcttcaaggggtccgagcggctcccccacttatcagaagggcgctgaccccagcctggcgcaggggaaccactct

SEQ ID NO: 55537 - DNA, 1941 bp, Bovine  19866880353412
  misc_feature (1)..(1): n is a, c, g, or t
ncctggcgtgctgcaatccatggagtcacaaagagttgaacacaacttagcgactgaactacaactgggaactaagatcccacatgctgtgtgatatgccccccccgccaaaaaatgagaataacaaccagattttcactgtccattgccctgtgaactggccttgcttggggtacattgatttcaggggaggcctgtggggattaaaaaaacaagaaaatcttcacccctctcctttcaagcatttgactgaaagttgcacgatagaaagaagaaacatgtgaaagacacatgcgcagagaaataggtaccgaatctttcccacatcaaactgcacttctaaagttctgccgtcgaagaaatgctagagaaatcagtttgggaccacgagtgatgttatgacaaccttgtagactctgccactttagaatgaaagtttcaagctgtaaccaaaaaaaaaaaaagtctctggagccacggtttatccaatatattgaatccagattttgtaaaccacaaaaatgtcatcctagagatcatatgtagaaacatgttttcttcagaagttttaaagtggaaatcaaatatacaatgaagacaattagatgaaatttggaaaaaaccaagcccaggagatctggggcaacttcaggctggggccagtttgcaaagggaatctatgcttcccaaacatggtggaaggggagggttccaggatgaagaggtaagggtagggtcgcaaatggagggatacagttcccaaggctaaagaatcccaaggatttgaataagtgggagagagcaggattttattttattttttaaaaatctgcagtgttgcaattttactgtgtaggatttcgttttatctaatcttggtaattccgtgttggatgatgctggtctccgctgtgtgctctgccgccaggccaagttcagtcctggtgaaggtttgcagtcacacaggggaagagtgatttccaaagtttgttctgaacacagattagcagggaggccttatgtgagctcgagtggggaaatgcctgcagtctgggctggggcggcgggagatgggggaacggagcgctggggtagcagctgccgtccatagaggccccgaagttctgactccagacccaccatctccttttcttgctgcagctcctacacgtctgagtcgagatacgttctgtaaatggggaaaacgatgcccacttttctagcattggtgaggattacagagaaaggatgtgaagtgtgttgttaagaagttggttttcttagcaatcactaaggtgatctctcaccttgaaccttgtctcctgaatcctgaccaggcctgtcccagaagctgaagtttattgaagcatttgccccatgctaagcacactccaggggatgatcttcttgaatccccacaacagggtaggggccacatcatctccaagatgggaaactgagcctcagaggagttgaaagtttacactgctgtgatggggattggagcatacccagttgggctcctgcatccctggaccaccgcaccccactgtctaaaccacactgtcctgttccctgcagttaccaccagccatatggtacaacttacatttgcatgaatgaaagctgaatttaaaattctgttccgcagtcacaccagccccatttcacgggcccaccagccatgcatggtcaatggccgccatatggcccagccctgaatctccccatcactgtggaaagtttccctggatggcacaaggccttccatttctacctcaaccttgggacagatagcttataaaatggtaaatttggttttgattattcacatgtaagaaaagaattgtggactctccaaaggagctgcccaaatgatttccattaatcagaggattgaaacgtctatttacagatcattaactgcctgacagatgaggc

SEQ ID NO: 55538 - DNA, 3038 bp, Bovine  19866880381675
  misc_feature (1)..(1): n is a, c, g, or t
nttcggctcacaggcaggtcgcctcacctcttcccatcccagcccgtgcttgcctggggttctgaggcctgttgactggttcagtccggccgcttacgccgactgcgcctgtgtgtttgagcaaatgttcatggtcacatattaagagcttcctcctatctcctatcccatttcacctgccttccggagattttgcccctgggcggggagcagatacgcaaggtagacccggagacgctaacatcaggcagcacatttagtgtccagtggaaggagggtgttaggttaggagattaggaagctcgagtgctcatggaagagatggaaagcctcctggccctggcttaaaggatggatctcagctcaagtgtcatcccattcccccgcccagagagcccttatacttcatcgccctccatcagcttggcagttcctctagccttagatcctctgttacatagcctgttgtatttttcttagcacttctcactctttgagatcatcgtttgtttaacttccacgcaaacataagcccttgagggcaaggatcttgcctgtcttgctcaataatgattcttggtaaagactcaatggttatctattaaaaaatgaaaattcttcgtggaatgaatgaattactggaatcgtctagtttacctgtttggcttccactagactgtgagctcctaatggggagggccttgccagacttgtccagcaatcccactgcacttacataatcattgttgtataaatgattgagtaagatgtgagctggtgggaaggaatgccatgcggtttcatccatagaggagcctccttcagtggcttgtcctttcttcctggtccccaccacactccacaacctgtaccccttaatagaacaatttgccgttttaaatgatggctctgtaggaaattttttacatctagtttcttagaagctagaaacactgcctcattcttgttcttagctcattcgattgctgaaaacaaaagtcaggttaatttaggagtgaggataattttttaaaatagccgaggtcctttatataaagaaacagaaaaattacattagacaggaaggaaataatatggttgggtagttgctaagtgtaatttgtggtacccaggactttaaaaacaaaacctacagtacttagagggaagtcttggtgaggtaacactttattggctgctcagagtgcctcagcctccattaagatgcaaagttaatgtcgctgggtgtttaaaatactggtttgggacccatcagcacagaacagtctgtctctgctattcctggagatccctgaagctgttcaccatccaggatccctattctgtttattttagagaaggttattctaccccttgagtcgtgaaaattaaatgatgcctaccctcctatccctctatcagtctatcgattttactcactaaagctggagtgatgggggtgggagtgcgaaaggaagactagaagtctaggtccaagtgtctcttctgtgtggaagtaacactgccttggacttggacttggagagctggacctttacataggttatctgctggagactcgctcagaaacacacagaggaaaccgactcaatggacatgatgaatttgacccaactctgggagacagtggacagaggagcctggtgtgctgcagtccatggggtcgcaaagagttggacacgtcacgatgactgaacaacaagaaagccttgtgtcacttaccgtgcctctcacagaaacagggaagtcattagtaggtcattaatttgactggaggttcggtaggtgacttgctcttatggcacttaattactggagtgacaatgcccagagcctcgtgcccttccctgtgcccggggtggggtggtggattccttccaaccagaagcttcacacctggctgagccaaaacacaagtcagaaaatagctagaagatcaacaacaaggtgctttagtatagcacaggaactatagtcaacctcttataataaactataatggaaaaaaaatctgaaaaagaatataggtacagctgaatccctgctgtatgccagaaactaacacaacattgtaaatcagttatatttcaataatttttttaaaaagtagagggcatttaaagcgggggtgcagggcttaggtgttcagaacagtggcccgtggttgtgaagatagctcttcttgtgagatggtgggtggagccttgtcatcctgggctcagatcaggggctgggaagtgaggcagccggcagccagccccggtggcagcagagccctcttcgttcttttgtaggtagggctcagagacagacctcgcaggaaaagtgggtggagtcacgtgcctcaacttcagctgggcaccagcgccttttattcccagacttcagtcattctcatgccatcttcacaacgtgccctgtctttgtaccatctgttccattattaagtttcttataccagcattcttacaaatacactttaaatgaaactttatgtaactaccatcactagaaaattgttttcttttttctcctggttttcacgtaacacataactattaaagccaaacagtaagtctgtgggctccccaccatctttcacagagtccaggagtgggtgtgtctcacattggggtcagtttccaagctgcttttttataaaagattttttttttgatgtggaccttgttacaacattgtttctgttttacatattagttgtatggcccagaggcacatgggatcttagctccccaaccagtgatcaaacctacaccccctgtgctggatgggcgaagtccccactactggaaggcagggaagtccccctaacttcttaactgcttttcaactctcacccgttctcttcaaactccaaactcaccttgacctctgaccctctcagccgtgatgtctgtctctgaatttactgagagctttcttcaacttgtgtcccctcctcttgaaaatgtcttgtcatctcattgcatacgtgctgtgctaagtcccttcagtcg

SEQ ID NO: 55539 - DNA, 1829 bp, Bovine  19866880477179
  misc_feature (1)..(1): n is a, c, g, or t
nttggttggttttgggttttctcttttgattgcggtttttcctctttggcaaaaaaaaaaaaaaaaaaggcgtgggggtgggctgttaactctaaggagatggcctttcccccatttttcttaaaggtgctgatttggaaaaataaataaataaaagaagcataaaagaaattgttgaaatgaccagaagaattacacaagcattaattagtatggaagttttccatttccttagtaatttggctatctgagtgaatttgctaggttaagacctagttcagggtcacatatcaacaaaacagcttgattataaagaataaaatgtaaagggctgtttttccgttgtggtggtgtctcctttgcttttgggggacgggtcatgtctttgttctcctgggtccagatttatgtaaagcagaaaattaagtgaaaataagtctctttggtgtttatgcatttgcaattacagtaattaaatggtacatatgttgagctgttgtcaaaaacttctaaaagtggaattatggtgtgtgaatattaattgcgtataatttgatttcaaagtataagcctagaaaagtctagaatcttccccaggaacactcttgctatctgaataatttaaaacaagtgtgatgcgaatggtaccttaaatttctgacacctttgcacagtggtcatagtctccctttaatttgagactgatgactctgaatgcacctggcatcactcagctaacctgccccaggtgtcctagtcctattatcatagaaagcctctggcgtggggctctgcagcccgggtcagtgccatgcgttttacgtctttaaatggtgattctcactgagtgatgccccttacccaaaaaaagaggaaacatgatgatgccctttttcataaaagaggatcatcttttttaatttaatggaataaaatttgaattacagagccacaaaagatcttgcagtagtttttcagtttctctgatttcctaaatgtggaaactgaggcacggacctctgtgtgcatgtaaaagagaggtgctacgaattttaacacaaaagaagaatattggagattctgattaatattatgtaccattaatattttaatttgtgagagttaggctcattaagatagaatgtttgctttgaaatcaatgtttctgtggaaactaattttaactttttacagatattgattacagccttgtgaaaaggcaagagaaggaggaatgcttggctctctgggcagtaaaacaaaacaataaaaagtgaagaggggctaaaaaaccaaataggtttgtgtgggagggggacaaaaattgtccactcaggattatctgttggagagaggatccatttacagaggccgagaaactagcaatcctcctcctagcttggtggaactatgttttttccataaaacatgtttttacaaatttaaggtgatttcaaatggggcatacgccctttttctagctctgttagtcgtgaagggcttggaatcatagaaaattcagtcgttttcaggaatattttcccttatgattaaagtcttgtcctttttaacatgttattaatagggttgtcctcaagcactgtatttaaatatttttcaagaagacagcaaatcgatggtctttcatctctccccccccacccccaaatggttgttatatccagagagagtttaccttagaaaaataaagtttgcagtaaaaggggggaggggtgtggagaagtggatcaaacggcatattgtggggctaagggggtgatttttaagtagcccaggggacaagaaccctgcagacaaaacagctactt

SEQ ID NO: 55540 - DNA, 3576 bp, Bovine  19866880563903
  misc_feature (1)..(1): n is a, c, g, or t
nggggctttttggtctctgtgtctccctgtacccaaagtctcatcaacctaagttggagagaacctggggagaaagaacgctcccctaggactgtccctgttttcgcattcaaggaaacaacaatggccattttggaaggctgcttccaaggttaaggtggaaatcaatgcaaaacaccctacgggtattcctctcagcttctgggttccactgagagctctttcagaaggatcccctcccttcttgtactcactgtctccactgcatgctgagcggcggctctgtaagttgccatccctttgtctgtggggctgttcatccccaaccagaagttgttgtgtaggttcatgttctggtttcgcacacactccagttgccagcagttacagccctaactcagaaatagctgaagaaaggcatcataaacaaagcattatggattggagttggaggtggctgtctacattcgtgactggagtgtcctggagggtaggaatgggggctgatttgtctttgaaacagacacacaaactgacaagatgaaaatcctcaataaccacttggtccattgttagttcatttgtcaaatcatcacagattttctaggggccaagaactcttccaagcaacttacaagcatgataacattgaatccttacagtgatgttccatgatcaagctagaagatggcattaactcctaatatgatgtgatgagaagggcccttcacctatgtgattccctccacgaagcccaccactgcagcttaatccctaggaaaacaccagggaagcccccaaaaagtattagtcatgtctgactctttgtgtgaccccatggactgtagcccacctttccatggaattctccaggcaagaatactggagtaggtagccagccgttcccttctccagggatcttcctgatccagggatcgaactccggtctcctgcattgcaggcagatttttttttaaccatctgagccaccagggacgtcaatcatgaggaaaacctcagacaaacccaaatggagggacaagccacaaaacaactggccgatcctcctccaaactgtcaaggttatcacagcccagaggagcctaaggagacatgatgatggccaaatgcaaaggggtgatcaggatggggtcttggacctgcaaagggaccttaggtgaaaactaatgacatctgaataaactgtggcgtttcattcatagtcccttgtcggaactgtcattgtcaccaatgtactacagaaacgaaagatgtgaaaaatacccctatttttcattgggtaaaggtttatggacactgtctgtactatcttctcaacttttctgtaaatctgaaactatattaaaataaaaaacacgtttaaattagaaagcttgcttaaaaaaaaaaaatagaaccctttaaagtagggatttttaactgccccaatttgatggtgagactactacccaggggagtcaaaacttattgtctcctaacctgcttatcattctagcagtttgtcccaccctgctctgaggctcctgttaacaccacggaaaccctcccaagcctcctgagaattaaatgcgagagcagatcttgaaggggtcatttctctgcttgaaaagttgagtcacccaggttgctctgaagggcagagagcaagctgacaaggtctgggagctcaggaaaacatcgccagattgatttaaagggatgttcagagacctcctcagaactcctgggaagtcttggatgtctgaggaggttgaaaaattgttccaattctgtgaggcctgggcagcaggaaatcatccagagtaacctctcacaccatcgagacaccaacttttctgcctctctgcgaagtccaagacccacagctgcttccaatcaggataagcaaaccctccttccggagcatctcactccacggtccccatggctggctcttcaaagcacactccgtcgccccatgcaaggaagaaaacacacaccctttcaccgcctggggcccgtggtcccttccctcttttccctcttcaccatgttatttcttttctgagtcctcagcagctccagccttatccactgggatttcttggaaggtccccttgcttctggtgtttgcgtcattccagtgaatttctcccaatgacattcagatctataaacttccagtgctgcaaaaactcgccatggaccgtgctgggcactatgggttctgtttcctcaggatccagtctcccttttctcccatgacagcttgggaggtacttcatccccacagctggctccttacctgcaaggttctttgggagaggccttccctcccttgttcaggcctggcttaatcacagtcccagtgaatatgggtttgtgggagggggatgtgaaccaagaagatttgccagggattttgtcaccagcaaatgagggtcctgagtgctcttcaacgccaaggaaagtcccctgtgataccccaggggccttctgttggctgctgaaagatatgaccatgctccttatgacatcaccctcccccaaaaaaagtcagcctttcaacttaccaactgttgtgtgatacattgtcctgtgtattccactgttttcctctaggctctgttccaacacattattccttcttgtttgttcttataaaaatggggacatccgataaacactcttatgctagactcggtggcccttccctaccatatttatcaatcgactcattcttttggaccctgaaacatatgtcttgaatggatgtactccggtttattgaactttttacttgctggtgggcatttatgctgcattctactacaactgccttggtgcacctgtcaatgtacttttttaagacaaagtctagaagttgacatgttagttgaaagggaaaatgtcagtgaccacgccacggatggacctcaagagctctgctgtcgcacaccttgaccctgcctctctgtggccaccacctgatggtgccctgagtcttgttctgtgaaatttgaggagagggctcctggtgagtgagaaccttctgtgtgtcaggctctgagcatttagaattttatgtgcatttaaccctgtgaagcaaaaacaattactatccccatttactttgcaactctatggactgtagcctaccaggctcctctgtccatgggattctccaggcaagaatactggagtgggttgccatgccctcctccagggaatcaacccagggatgaacccacatctcttgcatctcctgccctggtcgatgggttcttaaccattagcgctgcctgggaagcccacatttacagatgagaaaactgaagctcagggaaagtcagtaagttgccccaaatcgtagatctgatatatgggggggaaaaaggaatttggctccagtgttgcctgactttgtagcctgtgctcagcacccccacctccccttcccagaggctgttggtgggtgcatggatgatggatgggtgggtgacggatggattacctccgcaataattgattagaaatcagagcaattggtgtggggtagatgtaagttctcttcat

SEQ ID NO: 55541 - DNA, 1820 bp, Bovine  19866880791680
  misc_feature (1)..(1): n is a, c, g, or t
ncgcaaggtccatccatttggtggcaccttccctccccgcacccctccccccgccgcccactctgtccccctgccccagattagcagggttttcagtggcttccaggaaggtctgagaaagggcacagaggtggaagacgtggcctccactggcgggctacagtccatagggttgcacagagtcaggcactacctaattgagttagcacacacgcaggcatggtttgaaataaaatgacaagttgatgcgatattaaaagtcatcaggaaagaggaaggctagatgggggtgaggatggggggcggtgtgtgtcaacggaagaccagagacccaaataaggaagcgtgagctgcttggcagggatctggggggaggcgcctctactgaggagaccagggcaagtgcaaaagccctggggcagggacaaaccctgcaggttccctgccctggtcttccaggcctcgtgggaagggagactgtggagacccagagagagccaaggccccacaaagtaaggcaaaagccagcatcagggctgtggcctctgcccccaccacttgaccctggcctgcgccaacgggccatcacgcagggtcccgccttgtgggcgggggaccttggagcccacctcgcccctcagccccctgagcccgaggaccagctgggatgagcaaagcaggcaggcgtttgtgacatcgccagatgatacggtgactaacggcttcgccaggtccagaggacacaaggcaggctcagggtggcagatgtttgagatgatgagggaatggaggcaggtggaggccccagagccagtggctctgcacccgcaaccggctggaccggcgcctgggggatggagccatcctgcgcatgtgtaggtggaaaggcgcgggaagagggatggatttgtgctcaggcaatctacaaagaggccccccatctgcttcccattaacgacacagccttgctctgtcgtagttgtaaacttaaccaaaaattcatttttttttctcttaaatgaagttaatagtttttaaagccgccatatatcaacttgggttgatccctttgcagatccctttgcagaagtttatgtaaccccaccttttttgaagaccaagccccaaaagtgcctttgtcaacctgagatgagtatatctgaaaagggagtccctaaaggagagtggtcccttctacttcccaaagaaggggccctgggctcagtgggcggcaatctgggcccactgggccacctgctctttgaattggttgtacattggaatgatggggggagttggaacaatgcagatggcccggccccccagggttcttctggtcccttgagcctgggaatatggttgcaaaaatctgcctgctgctgctaagttacttcagtcgtgtccgactcttcgcgacctctaggtgattctaatgagttttcaaggtggcaaaccatggtcctacctccgagggcggctgtaaggataaagcacttacaaactctgctattgtcctcatcatcataatggcaattattacttttatttgagcagagaaaattgaggctcagagaaatcaactggtccagccaatctgggctgagcacctgggttttctgtgattccaaagccccatgctacgatggaagctattttaacttagccaaagtaagaaaatgtgtattatttctgtcctagcccataatcagcaatcactttacaattttgtgtgtgtgtttcaagcagatgacagtttgcagggttaaaagaatcagagggaaattaaaagtttttccctggaattgtgccccaattccaga

SEQ ID NO: 55542 - DNA, 2536 bp, Bovine  19866881131045
  misc_feature (1)..(1): n is a, c, g, or t
nctctgaagaggctggttagggtcggctggtcggatacctgttctgggtcacctgggcacatgcatctccccatttgccctgcaactggttctttttgctgtctctctctttctctccttccctttgtgtctctgtccatctctgccttctggctccttcccctggataaggcttttcttcctgtggcctgaggccactcagcaagtcacctggaccccaaatgaggtcagtggcaggggcaggcatcctccaggctgtgttactccactagtgaggacaggccatcttcactttctctcttttccaagccaaaccctggaaggaaagggcttagttttcttttcgaaaaatccacgcgggaggcggcatcaaatctgtcagttctggctaagaaaatacactcagaagctgtaatcaggggcgagtctcgaccttctagacacggtatatctctatactaaaacctaaattttatcgtctcccgcatgctatttcatttcctcctgccctccccacctcttgtatttattagacactgggtatggatttctttccctgagagaactttcataataatgaagtatacttggcagacactcacagtgaatatacagggttggaggctattctgcaaggaaaatggtcaggcttgttttcctctgtgggagagaaatatttgagatcaggtagactaatcatttctcaagatagaagttttgaaggttgcttttgcctaaagaagttgaaaactccttgaaggggcagaaagtttctgagatgttcacccttatgatttccctccgtggcagtctgccatcatcctgtctctctgggtaccagcatcctctggggctcagtccacttcacatctttcttctgctctccccacgctgacttttttttcccctctttttagattttcacgaggggtctgactgagaaagccaagagaaccactctttgtgcttctagccctcattctttgatggatattcatgcaattttctcattatttttctgtcagcattcacagaaaacgtgtaaactactttatttcaaaacccttaagttagtttactccatgataatttaagccatgtattcttttttctgatttgaatttagtaataacatattttaaacagaagtcaagatttcctgaataaattttcgatgatgactgctgacgtttctgggttccaccccacctccttctttaatatccttttattggaccttgctctacatatgtgatgagttgtcctttctttctccgggcgttttaaacagactctgggacttttaggaggagaaaattttggaggggagtggtcgtcttatcgacccagctgtctttgattcaagaaaataaccaaggggacttccctgggggaccagtgtttaagacttcggcttccaatgcagggggtgcagttcaatcccggacctggaagcgaagatcccatatgcctctgagccaaaaaaacaaagcataaaacagaagtaatattgtaactaattcagtagacttagaaaagaaaggaagaaaataaccaggggccagatgtgtggtcaggtgcacaggtgccccaatcccaaccctgccggggaccacccccaggggggattccagggactgctggaagacaggagtttgtaaagattgtcttctctccctgtagccagttttgcctattttaaattctgttttttcccccagccccttcgcctttgtatatagtgcagaattttgtatctgctccaagtctcgtctcccactccattccttacctcttccccacgtggaattttctggattcccgacattatttctactcctttccaggcaacagttagaagtatctcccactttctgttagatctggatctcccttcctatagtgctcttgacttgcaaaacagattccctttgtgggtgatggaggagaaatcttcaaggaatgatgtaaagatttcttatatgcttgaaagccttgactttctccatggttctaatacgtcaattgctgttcttaaaaatctagaaatcaaatttcttaatgaatttcgcagcatgagcatttatacatttatttctatggagggatattcttgcctttttattttctctttctccttcatgttgctttaggagtcctatctgtacttccaagaatgctttcagttgtgtaactgaggttttacatttccagggcatttttaaccagactgattatatgtagaggaagacaaagtctgtgattccaagactgggagagtttctgaagttcaaaaaaaaaaaaaatcctgtaatttaagtttcccgttataaaaggcagaatttctaaagctgctgggaggacaaaagactgacttcctaggattctaaaagaattgggtccatctcttcctgttagtactctttcccctttgttacacgcgcttccaagttccacgtaaccttgaggttggagcctcttcatcacagggcagagtcaacccttgatattttatttccgcttcagcgaaagaact

SEQ ID NO: 55543 - DNA, 876 bp, Bovine  19866881285984
  misc_feature (1)..(1): n is a, c, g, or t
natttgggcagttgacacccgaatgcttcccccacccccagctctgtgcacccccagtgaattcagcaaattggctccctgcccccaccgccccgtgaccccagggcttgctccccgcaccgcccccccccacccctccaccagctctccaggtacagctcagcggatgtaggagggggcctcatccaagtggcagagtcaggtccacatcgaagcttcaggtgcctgactcattccggctcaggccggtaataacaagccccatgtttttctccagcgtccacttctctgacacacagaatagtcaggaagtaaaagattcgagtactatacagctgctttgctttctctaaaaagaaaaaagaaaagttgggggtggggagggagaaaggagcaaggaggcaggagactaggccggcaaataatgatgccgcaaaaacaagcttattgctggtgtgttacataaacagccccaccatcctttgctgcagcccagggaagaagctgtgctgtagtgacacttgggctagtttcacacctgagcctggagttactcagaggtgcattaacaactaatgattcaatcgagggaggcctggattgccattttgacttgccacatattagcatacccttctagaaacccggaaccttccaattaagctccccagtgaaactcagaaggggcctttccaagatgcctgatatttaggaaaaggaaattaagctaattgtgaaagcgcctgacatgtttccttaatatctaggtagttgaaggctaggattgaatattatgaattcctcacatgataagtgtttgaatatatgtcaggcttccacacaggttttccaaaggtgcagctcagaactactcag

SEQ ID NO: 55544 - DNA, 1074 bp, Bovine  19866881327324
  misc_feature (1)..(1): n is a, c, g, or t
naaaaagaaaaggaaaggaagaaagaaaggattcttgatgtttgtgataagaaaaggaggaaatgaacaccctcaggtgttgaaccccaggccgtgcagcagagggacttctgtgccctttgccaacaggcacactgatgaaccatagacctggttccctggaagccgctgtgaaggcagccccagcacaaggcgtatttagagtgatatttgttttcaggaagaaatgtggatctttggggaatggcttcaaaataagccacagacacaagcgctttgtaaattatgtaaatttctatttatctatataattggcaataactgggaattgtaacgcctgacagttcgcaatctctttcagctgcgctctagtggctacgctgagattactgagcagctgaagaagacggtgtttttcaaccgcagggatgggggagaggccgccccatcccctctcccttcccctgccaaggtgctaatgcaatggtggatgctggggtgttagccttggccaaatgctaaattctcaatgagtagtataaggtacgaatgtgaatattcatcatacggaaatggaaaggactgatgtgccagcgagatggtatacagtttcgagaagcgattatttattgtgaaactggtctctacatcaactcctttcggtggatgtgttcgcagcagaatctctgtacatagagatgttaaattctgttctgaatcccagcttgtgttccttagggcttgaattatgtttttgttaaacgcctaagcaccgtttggctctgtggcaggatggtatctcggaaacgcattcattgtgctaacactcagaaaatactgtcaaatgcaaaataaaaaaatctcaaagtttgctctgatttgtgggtttttctggctggtgtgatacacattgtttcacatcagctttctgtgggccctgggagaggacggaaaacagttccagttccagaagcagattcatctaaagtcagttatggagcaagatgagcaagggggctgcttgaattgtaaggaaggagcagatctgggggacgtctgaggaagataaaacat

SEQ ID NO: 55545 - DNA, 1102 bp, Bovine  19866882213331
  misc_feature (1)..(1): n is a, c, g, or t
nctggccatactcccagccagaaagcatcccccccagactggttgagtgagtcttgttgaagtggtagatgccacaggggtcagaggatcagagagaggtgcccagggtgaaaaggagaaggggggcccctgagggctcagaattggggacccagggtggtcttggggccccgctctgtccagaactggtcatgtccgtcctcagccaggccctcgagcccacctagaacaatagggccagatggaattcaccggcccctggttgtttgcagtaagtggtctggtctttgtgttagcaaatgtggccacagatccaccatgtttcagggtgtcctgggcatttggtgtccaaggggtgaattaaaccaacagcttaatcctcgaagagtttactgtcctggggggaggaatctggacagatatgaaaactatggcagaaataggtaacatgaaagcagtaaagagtgggggtgcgggctcaaggcaggatggacgaggtgagaacacatgagacagtatggagtcttccagatctaacagctgcactttgtgttgaaccctaattcaaaatgcttactttccccccagatgtgttgacctattcactagccaacaatataatcttattaaaaggctgctccccttggaaatcaaaggaaattactaaaaattattaaaaattaagaatttaattactctctattctcagctatagagtattatgcaaaggcctttcttctggctttcaggaaaagtcgagcttttgagcgcctactttgtgctaattagtgttgtctttttgctgagagctggggaaggaatggttaccgtgactcctgtagctgaaggaagagggtaattaaacacctgagcgcaaggtgatttctgttattagctagtggatggcgcactcagctagaaaagtgaagactggggtctgggtgcgctgctttgttcgcgtcttaacgaggagaaggtctcacgctgcctctccgtgcggtccccagagtgtgacaagtttaaccagtgtgggacctgcactgaattcaaagagtgccatgtcatcaagaactacaccctctggaaggtcggtgactacggg

SEQ ID NO: 55546 - DNA, 776 bp, Bovine  19866882261048
  misc_feature (1)..(1): n is a, c, g, or t
nccaaggttccatgcccagaaccctacagcccagagggctacagcccaggacgactcccatagtacccaagagggggttgggagtgacccggaaagtgggtcagacccagggcaatgcaggagaaggggtgactcagcgagggggggctggcttgtgagcggagctgggggctgagcaccacctgtctcctgaaataagcccatcatcaggggagagagaaaagaagtccagaactgactgccttgaggtgggaggagtggggcttcaaaatagaaattccagaaaaagagcgctacatctctgacacacctgccacgatgattattttgctctctgcagcctgttgcgtgatcacagcaaaattgacaccttttagtagcagctgatcgctgccaggaaggtagcaagcccaccagcaccttccggaggttcgggaggggggacatggcacttttcccaggaaaaccacaaagggctgcgctgatgattctcactctgaaccaagggggtgggaagccatcctatcgccatcaagcaggtgccccaggaaggctctaggaggaccacctgctcagctagacccactgccaagcgctgccccctccccgtcgccctcctgagggtccaccctgcagagagcttcttggactcctcgcttcctccatctgtcacgtgtgggcttcccactcaccgaagctatgttcctctaagcttgtgtgtggccccacggggagatgaacagaaaggtgggaggaacctgaggaaagtgactatt

SEQ ID NO: 55547 - DNA, 1599 bp, Bovine  19866880168235
  misc_feature (1)..(1): n is a, c, g, or t
ntgagagactttattttgggggggctccaaaatcactgcagatggtgactgcagccagaaaattaaaagacgttgctctttggaagaaaagctatgaccaacctagacagcatattaaaaagaagagacattactttgccaacaaaggtccatctagttgaggctatggtttttccagtggtcatgtatggatgtgagagttggactataaagaaagctcagcaccgaagaattgatgcttttgaactgtggtgttggagaagactcttgagagtccgctggactgcaaggagatccaaccagtccattctgaaggagatcagtcctgaatattcactgggaagactgatgctgaagctgaaactccaataatttggccacctgatgtgaagagctgactcatttgaaaagaccctgatgttgggaaagattgagggcaggaggagaaggggatgacagaggatgagagggttggatggtatcactgactcaatgcacatgagtttgagtaagctctgggaattggtgatggacaaggaaacctggggtgttgcggtccatggggtcgcaaatagccagacaccactgaacgaatgaactgaactgaatctatacaagaaaatctatgggggaaaacctctatatctttcacgtagaccagcccacagtctcaggttattaacacctcataaacaccttcacctccagactgtgaagccagtctcctggcttttctcctaaattattttatttacctttttttccagtactcagtccttcttccatggatattttaatccatggccactttttattggttgttaatccagcccaattccatgggtacacatatatctgagctggttaattgtcttatttctgcttccctctaacacagctgtgaaacaaatgataaagcaagcaggaagtctggcaggatacatgaaggcagaaaaagaaaagttctcccctagaccacaaagcccattctatttctggatataaatagcttatacttggttaaaaggaagtacctagtacatcttattaaaaaaaaaggaggggatgtattctaaaaaatttagagaagtttgaacatttacccagaaaggaagaatagtttttacacttgaaaaagtttttgttcggtatattatacatcagtatgtgcgtgtgtgtgtgagtgaacaggctcaataaatagcaccccacttccccactgggttcctaaactaattaaaaaataagacaaagaaatattatctttcttactgatgagggcttgtaaagagaatatagcttcatctgtgggtaaacgggctttttagaactgaaatccaaagtgagtcagacttgagtaccccgtcacaggcaagactggacaagggctggcctcccacaagaaataccagaggaaaaccatgagcacaggctcctaggagctgaaggtgttaggctcgacttgcaaatttctccttctaaactcacccatcagtttagtggaaagcgagagtgaaagggtgtgagagggtccgagctggcgcgtgagcggaaagagtagaagtcagaaaacaccggatctgtcaccatttaagcagt

SEQ ID NO: 55548 - DNA, 997 bp, Bovine  19866880485388
  misc_feature (1)..(1): n is a, c, g, or t
natgaagacaacatattctgagcacttaagatgccagacatatgctgaacatatgataagcatcatctcataattagaagattctaatacaattactgcttctcattttacagatgaggaaatggagaatttaagatacctgctcaagactttagagctagtcggttactgaccgggcctgaaactggttctttttgacaacaaaattcatctccttgaccttgatgttacactgcccagcgttccaatatgtgatatgagattgggtcaattatttcacttaatttctagaagagcaacatttcgacatgtcacctagtctgaccttttcagtgaatagttgtgaaagcacagatccagagaggtcaaatgacgtacttgagatcaatcagcttgttagtgccaaaaacaaaattcaggtgtcagaaattctgtattggcaattattctgctacattctgatgagggactcatttgaaaacacagtttgagtaatagtaggtgaggaaagtggaaatgtttctttttaaaattcaaacttggagcagagttgccaggctctcttatatcccctgctttttctctgccttacaatctgtgctatgaattctgagagctttcacacggaaaggcattgcttatggctgaaccttaatatgtcatattaaggatgaaggtgtgtgtgtcctaagttgcttcagtcttgtccaactctgcaaccccttggaccgtagccctccagaggctcctctgcatgggattctccagacaagaatactggagtgggttgccaagctcttctccaggggatcttcccaacccctgttgaactgttgtctcctgcattggcagacacgttctttaccactagtgccacctgggaagcccagggataaaggtacatgatagcttctcttgcatgtttctatgccaaacgtgcattttgtttttgtggctgtttcatcaaaactgcttccttctcttcctaggtgagcag

SEQ ID NO: 55549 - DNA, 4296 bp, Bovine  19866880514083
  misc_feature (1)..(1): n is a, c, g, or t
ngtaagcgtctgtctgcaatgcagcatacccgtgttcgatccctgggttgggaagatcccctggagaaggaaatggcagcccactccagtattcttgcctgaaaaatcccataaacggcggagcctggtaggctaccgtccatggagtcgtgaagtgtcggacatgactgagcgacttcactttcactttccttgtctttaaggtctttcctgtatcttaaattcagaaaccataacactttctgaatttttcctctcctctctctaactggataccgaatcctgcgaattctttattcatagagttgcttacatcctctttcttctgttttattcttaatgctgctttgtggctttatcaaatttattgcttcacagtttgaccaatgcaatgatctccaaaatgacttttgtatctcaagatagttttctgcttcacatccccttttaacatgacatcagtctttctaagcaacttattttgagaacatatcccttcctcaaattggtctttacctgatgaaaacaaaaaactaaaacttccaatctcttcactttataaataaagacatttagactgattaacagttagtcacttaaccagagcaaaatagctgaaaaatggaagagctggatttaaaccctggcttcctgattgttagtcttgtattctttctactacacatcctgcttgtagcataatgtccaagctctttcatctttattccaggctttgccccatttaaatcctatctatcatgccaatctccaatctaactcacatacctaacctgtcaacacattattcctcaaaaagccattcatccagccagtgtaaaaatgtttattgggcatttcatgcctaagtcattctgttagatgcctgaagggaccaatcttccctggctgtgtgggagataaagctggcaaggtgggtgaaggccaaaagcactgacaacactgaaagtcaggctaggagcttagatttaattcattaaacagggtagtacaacagacagcttttgattaagagtgtgagatgacaaatctggcagagtatgcagaacatattaaagtcagcagagcttggagtagtcctgagattgtaaagtggtaattcatggagagaataaagcttagaggtggttcttgtttggctcacagattgtctctctgtgtgtatgttcaaatacaatcagttgctaatgtttaaaaattagacgtttacataaaaatcaatatttaaaattctcttgaaaaattacataatctggttgtgttcttacatggcaagaatcagaacgtgtcaatggggagctgactaatttagacagggcatgcttttactggctggattctaccctgtatgttacctgtctgatactttaggcattgagactgagattaatccactagaagtaggactattagcagtaaggaccaagggagagagcagcatcagaaataccaatgatggtttgagtcaagaaaaagtgagagagtactgatatgatttgcatatgcttgcagtaccctttaaggctcaccttggtcacacttccatatactggctgaattcagtatgacttctctctatgatcatccctatgcccaccacttctgtctacattgctttctaatgatctgtttatatataatctctttctagatccttcaaaaatagtgtcgcctttggcaaccccatctaaaagaaaaataagctaaaaaaaccttagaaataaatgggcacttatggtataagagataatactttagctatattaaaagaaattttaggaaaatatttgcgggaaaacagttttaggaaagaagaaatcttactgaccaagacttgcaaagtagagtcacataaagagagagtcttaacctcttgggatccccaggtggcacaatggtaaagaatgcagctgctaatgcaggagatgcaggtttgatccctgggttgggaagatctcctggagcaggaaacatcaacctactccagcacagttggacacgacagagcacgcacttaaccgctttaagtaaactgtaattttaaggcaaaaacattctaaagaaaattttaaaacttacatgattgaagataaaatgttttcgtggcacatctgacaaacaatgacttcttgaatatataaagaatacctcaaattgataggaaaaatggtatattatacaacatatatatctttaaacactgaaataccaacttacagataaaactcaactaatcaatcaacatgaaaagttgctcaattttatgggtggccaggcaaaggcaaaaaaaacaacaatcaaatatcaccttttgcttttcaaattgcaaaaattgaaaaaaaatagcatggaagtgttgataaggatacagggaaatggtactttcatatgttgttaataggaaaataaattgctaagcttttgcaaaataatattgaacggtgtgttaaattaaaaataaatgcactttttgacctagtaattccacatttcataacctatcctataaaaataacagcatcagtgcataaagatgtgtgtccaaggatatttaatacaactttacatgaaatgataaagcactgaaaacaacttgaatgtccattgactggagaatggtaaaataaattatggttatgtggcagagtataagatattagatgggaaatgttgaagaaaatagataaattatagatagaatgatgtaattacaaaaacaaatgatgaacctccagttcgtgggataataagtaaaacacagaaaacatggaggaaagtagaggaagatgaagaaggagataggccagcttgtttaggcaggagtgggaaagattggtgggagtggaagggagaattatttaaactctatgggtctctgtatctgtttacaagtatgtactcattcataattaaaaaaaatggagaaaatctaaatattttcagtttatacccagatagagatcctatcaaaaagcatagatgggagtaggaggttggtgttagcagttgtaagcttctatgtatagaatgaataaacaacaaggtcctatcgcatagcacagagaactatattaaatatcctgtgataaaccataatggaaaagaatattaaaaaaaaaaaaaatatatatatatatatatatatatatatatatatatatatatatatatatataaaagaaggaaatggcaacccactgcagagttcttgcctggagaatcccagggacgggggagcctggtgggctgccgtctatggggttgcacagagtcagacacgactgaagcgacttagcagcagcagcagcatatatatatataattaaatcactttgctgaacagcagtaattaacacaacattgtaaatcaaaaagacctcaattttagaaaagcaacatttgtctgtttaaacaaaagaaatgcctcctcaggtttactgtctatactaagcctgttagtcatctttcatagagtatctttctctccaaattaccaaactttataaaaaatacacatgtgcagagatggcaaaccgcctgagtgtgaccactcctccttgtcatgctcctagcagatatggctgaccataccacctatcccagtggatgctgctggaatcttagagtgcttcccaacactggtctagagactgttactaccagtcaatcagaatagaaggtaaaatgataccatctgccattcctggtatagtcaaaagagcatgtatatgggctcgaatcacatattcatcattttagaacctggaacagtttaataagcctatcagagcttcagtttctgataaaatcggtcattatcttcttgatagtttttttatgaagagtgagtgaaatcctatcctggctacaagggcccttcatcatctctctacatttgcttgtatctagttaaaactttccacttagaatgtctatcatagctactttgctcttatttatgcttggtccttgcatttggatatgttgctgaggggaagatattgattcagcttaatctggaaaacaataactctcattttctatccattatatccatcacttctagagaaaaggcgcaagaagtaactctaggggtgagtctgctttcccaaaatttactgtcctgagttagtttcatcagttgtcatgtggtttccctttttttggtaaattatcactcagactctattctcatatttattttgagacttcttagtagattttaaattctttaactcttttttttttttttttgcctgtactgtatatataaagatt

SEQ ID NO: 55550 - DNA, 1025 bp, Bovine  19866880539032
  misc_feature (1)..(1): n is a, c, g, or t
natgaacgataagtgaatgaacaactgagaagttcccatggtgagcatgaaatcaaagcagggcttgtgagttatgtaatttaaatatgtaatggtaccaagctctaaaaattgaattcagtgtttaactcgtttttaaaaaactaaaatagcacacacatgtgttccatactgaactccaagacaacttaaaccattttcatacaccacatatgctgccatcctgacttcttttgactcaaactttggcagaaaatttctcctgccacctctgtgcctatgtttgaacttcactgtaaatgttatcatttggttctgaagatgactgcttggcatattgacttgatatttctactttcaggaaaatcctgattgcttacacatatagctctgaaggacagcaaaagcgaatcactagggagtgaatcagcctttgggaaaaatacagtaacgtgatttatccagataaaccagcgtagttcttcactttatctatgtggatgagggccagactttttcaaatgagtagcaaacagcagcatgtggtgggttgtataattgtttgcaatattcgccccctctttccctgtaagaggattatatatctcagttcattgctgtctccctcatggttgttacacatttccctgccttttgacttcaggcctagctagcctagctattagacttgctttggccaatggcctgtgaggagactcagatgtttgccacatctgagcagatatgggagacatcacctgtctccatcagtttcattgctcttccctcactgctctgtaaatggtgtcccatacggggactgaaggaagaagacacggggaactgagccacgcagagccaaacagagccagggcaactacagctttctcaccatcgcggatgtataacttgagcaagaaataaatgcttgtttttgtgaaccaccgagatctggaggctgtttattatgctgcaaatctgatctgatggattaaatataaggaaagaaaaagcaatgttatgtg

SEQ ID NO: 55551 - DNA, 4034 bp, Bovine  19866880558160
  misc_feature (1)..(1): n is a, c, g, or t
ncaaatatgtatagagagaaagtaggttaatggctgcctaaaatatgagggaaggaagctggtggaggaaataagggaatgcacttctaataggtgcaaagtctggggggaaggtgattataatattcgaaaattgcttgtggtgatggttgcaaaactctgtgaatgtacaattgtgcaatttaaatgagtgaatttatggtatatgaattaaatctcaatagaattcttatattaaaaagaaagagaaaaaggaaacattgtcctagtgattctgacgtgtggataggtttaagaaccaccatatcgagcctggctactcagagtgtggtccacggaccacactataagcatcacgtgacagcggcatctcagtgctgaagtagaacttgtgattctgcattttaacaagaaccctgggtgactgaagtgcatacgagagtttgagaagtgctactctcagggactatttagaaccttgtcagatcctgtctactcaatttcaaagtcagaccaaaggttttgactttcttaatgtctaaactggatgagcatgctaacatcaactgtttattcagttgtgggggaaattcaccgaaacaatacgtggggaaagtcccaaagagaaaaactttacaaataagtctccttaatatgtcacaggagtcttaagtattaatagtgttgctggagtctcactggggaacataaaagtgtttctgattttagtgaaggggagaagaaaattatgtctacctgatagtcaattggagatgaggtagagaggtttagattaattaggactgggagaaaggaaaatgctgacatcatctgtaatgtaacctaagtctctctcattattttttatttgcctttagttatcttgaaaattttgtgacctttttaccatgacacaaaagaactatgacttttcttccatggtctatgtaggtcatttcgcttggtttatcgccagcagttagggtgcctttttattttttatttaatatttttccagctttattgaggacatcacatgaagtgaaataagccagacacagaaagacaaatactgtatgatctcacttatatatggaatctaaaaaagtcaaactcatagtactagagagtagggcgccttttttaacaatttaattctgcatcactgagacgttatgttgaaccccaggggcaatgtgttcaagcagacaggcacagcatgttcactttgacattccaattaacaccgcagggtcaacctacctcaaatgcaggctctcacacacctacacgaaattgtcaaagctatgaaacatcacaataaggggccattttcatgttcttactctattcagagtggttttattatacagttattagatgaataggtgacaaaccaacttagtcggaatctcaagaagactctttaatagttgtatgattttgtgcaagatatttaagcattttaaacctaggcatcctcttctctaaactgaaataatagggtcataaaattgttgtaaggaaaagatggcataatgtacataaagtacttaatacacttctgagaacatagtaagctctcaataatgttagctattattattatcatccacatcagattctaaaatagggatgttggcaatgtttgacagcatatttgcttttaaaccattttataatctgactacaatttagtttaaaaagatgaaatgtttttagactaaaaattgacaatctttggctgctcttctctttcagtaaccacattttgagaagcactgatgtagatattcagaaaaagaccctggggttttggaggtggtggggaggtggcaatcaagaacccagtagtgcaggagagcacaagatttaaagtcttacctcctcagaaaacctccagacctccccaccatgccccccatactgcattcctgtagcaaactgggaaaactagtttatttttaattaacaaaatgtattgtttgcatactaatggttccagctgcatcaaatcaatcaggattgggaactgctattccaggtccttgaaaaataatttgccaataaactcttgggagctaaagttgaagacttaagggtgcatcaaaattacctaggagatctaagacccactctagacatactgaaacagaatttctagggatgagggcaaagcaactgaatttttaactggttcttctggtgatggacaccccaaagtttgaaaaatattgttagtcttagaccatcccataatccactcaacttttttctcatgtgcacaggaacttgtctttgtaccaaggggaagctctgagacagtaaggtagagtgaaatagatatgaactttggattcagtctaatttgagttcatgttctacctctgcccataaatagctgaatgattttgaatgctttatgtaggctcctaggtcacagcttatctatctatcaaatagggtaagccatgctcgttcttgaactatttgagaattagcactaacatacagacatgtgttttacaaaataattgatatttattagaaataaaagacaaagacattatctgcaatacttctggaaactgcatctataatcataactcttaagacagtctcaataaataacaattaaaagtcctgactttactggtaattccctggtgaaccagtggttagaacacccaatcttccactgaagggagcataggtttaaccccacttggggaactaagatcctgcaagctgcatagtgcagccaaagaaatcaataaattcctgactatatttacgaagctttagagacattaaatatcccagctgtctagcaatgcctagcatattggacgcactgctataaatgtatttatcatgatgcagtcacgcctgatagcataagtggtaagaatacaacatttgtagccatattgtctgagtccaaatcttggttttgctacttagtctctctgtgactcagtttcctcatttacagcatggtattaatacaaagtacaatcacacaggtgccagatgtgttaaataagttattttatgtaatacaataataaagcggtacctggcactactagagcttgctttatttttcttattcttattaacattattattaagtatgtaaatattgaaaggggcttccctgggttaggaagattccctgcggaaggaaatggcaacccactccagtattcatgcctggaaaatcccatgggccaaggagcctggtgggccacagtccatggggtcgcaaagagtcagacacgactgaatggcttcacttcacttcccttcccaggtgcctcagtggtaaagaatccacatgcaatgcaggtgacatggatttgatccctgggttgggaagatcccctggagaaggaaatggcaacccactccagtattcttgcctggaaaatcccatggacggaggagcctggtgggctgcagtctgtgggatcacaaaagagtcagacatgacttagcaaataacaacaaacaacaacaaattattgaagggatattcataagagcttggtgttgagaaacaggaaactttagggaaaagtaaattttgagaaatataaatcaactatgtattatcatatactagaaatgtttccaagtcattacaatgacttgtggggaaagtgattaggaaatgaaaccctctcataagtctgctttatatagatgatcaccattggtaatttgtgcctcaagtctgcgttttaaaataaaataaaagggatcagggatcaagagagacaactctgtctcagacaactaaccacaatattttttactatccatctggctatgagttgagtccatgtgacatatggatgaatattcacaggttaccttgatatccagatttctccaagcacagcagagtcctggtttaaaattactcattacagcatgatttgggaaatactacaaggtcccccaaatgttggggcctatctgagctctcctgatacatagaaaacatacaagaaaggtccaaccaaggt

SEQ ID NO: 55552 - DNA, 3243 bp, Bovine  19866880809960
  misc_feature (1)..(1): n is a, c, g, or t
nctagatgcaagtaccaactatgaattgtctattcagaattgctcagactttaatagatggcccagtgctttctgagcatctgctctttctgtgtggtctggagaaggcaggtaggatcctagaatcacagataatgagtcagataaaaatatggcaggtgtgtcagagacatgtagagctcaccaagtattaatatactcctgccctttccccagcctttgttgcaattaaggttaaagacacatgactagttttggccaatgaaatgtgagtagaagttccttgtgtcacattagggctaagaaattgagatggtttgcttccttcatttctttttacaccccaccaccacacacatacacagttccagattgcataactataagacagaggagagtgactgtgagacagaaatacatttttactgggtaaagagtctgaggtttggaatttgctattgtagtagctagcattggtttagtcgctaagttgtatccgcctcttgcaacccaatggactagagcccaccaggctcctctgtccatgggattctccaggcaagaatgctggagtgggttgccatttccttctccagaggatcttccctacccaggaattgaatgctggtctcctgcactgcaggcagattctttaccaactgaactacaagcattaattaccctaatagaatatgtgatactccttacgttagaaagttattggaaaagctgggaatattatctagattaagaaatcacaaatctgactttgaatcaaaatcaacttggggagttttaggaaattcacatttctgggacccatgtaagaatttttaagttaaaatttatggggagggcatgtgaatcaacatttttttaatcaagctccccaataattctagacacttctttcaaatctgaacttctactctacgacatgaaagtccctctaattattttctggggtgatgaaatggaaaattaaaaatgatcagagagaatcagaggatttagatctaaaacagaattaacaaactagacccaagggctgaatcttgtcttcagtctgtttttttaaatattaataaagttttattgggacagtcacactctggtttacatattatctatggctgcttccactataccggcagagttggatggttgcaacagtgatgttatattcactctctggcccttactgctgatctacatgcctgtctctgcttgaaaaagttaggaactcttgatttggcctctcccataagtggaagactcaaattctcagcattcctggtaagtgtaagaaaggtcagtcatggaaacatttcacttttagatcagctgcaccttatgatatctccatgctccatgggttagtttagagtcatgcaaattctcctactgtctcataatctgtggaacaaccagaaacacagccataggaagacagttattttaactgaatctagaaagagctggatgatatttgtaggggaaaaaattatagtttccaaatgtatctggattcttgtagttctttcttactacaaatgaagatatgacacaggattaatatttaacgggacccattctctttatatctttcattcatgcttaaattatatcaagggcttggtacaaccccctcatctaaaatgatctatatttaaatatgtaggtatatttaaatataaattttaaagctgtacagtccaggaaattcaaatataaaatgcaattctagggaaatggctattttaaccagctccaaatggagatttaagttgaagatctcttcagctcaatgcgtcatcactgtagctttcctttctttcccttccacttccccaataacacactatcaatcagaaacctagtgaatcacagccgagaaactgaatattcttgctttttagtgaacggaaggggaattttgtcttttggctagatgatctgtggtattgctcagtgaagaaaagaacaatgagccttatatatgaatcacagaagagcttcactgggtcattttggtggcctcaggagtcctgatcagtttcactacagagtaaacgctggaatatagctggagaattgtaggagctttgatgcacgtggttttcttacacttagaagaaaaacgttatgtttgagctctgttccctcacaaatttaatttatgtaacttcttggagctagagaagaaagaaaaagcaaagcaaaacatacaatttcattacactccttaggacataattagtaacatgtgtacctaattttgattactcactcttctattcacttgtcgctggttaattgagagtggcagtcccaattaaacaacccctagtagcatgtaatagctaattgtgagcaggctagaagccttctttgtctttgaaaaggtctcttaactctctagggcatgtctgttttggattgaagtcataactcggtatcggatgatttaaattcaagaatgtcttttaatattaagatttaaataaatgaatttacactccatgtcatatgtttagcaggtgactgagaccatgtgctctttatcccatttagcagagaattataatgtgtaaggaatttaaattaggctgtaaccagccttgctgctaggggcaaaaagtaatgtggttaatatagcaggctagaatgagaagtgggttcatttgggtcactgcagtgacttgtaattgaattcaggtaatttcttcgaaaaagagttcatgcttctcgtctgtctacttccagctccaaaactccagatccaaacagttcctgatttacgtagttacgatttccaaattgctgggctaaacaatatgtgtctatggctactggggtctatgaaaatgatcatgcagttccgatgcagatgaggacacattttatttgtggtaaccatagctgtgggatccccaggacagtttctaaacactgtacaggccagtggagtcactaaaagatgcgctatgatggctaaggctttacaacacagttctcatcagtagccacgggaatcgtgtgggcgagagccatagccctctcgggtgagcgtgtgtgcttcaaggaatactttaccgacaaaatgacatttccctttcctttacctcagaaccacatgtaaaatttaggcaagtcatcgtttcactttgagatgacctgtggatgaagacggacctggctaacccggcaaactggtacagcccatttcaggatgcgtctctg

SEQ ID NO: 55553 - DNA, 2669 bp, Bovine  19866880903936
  misc_feature (1)..(1): n is a, c, g, or t
ntgttctggatgtacagattcccagcattaaagggaagagaaaggaatgcaagtatgtgttgaggaagcatttagtcatcaaaaacatatcaatgaaactttgggaatataatttaaaccagagacatacatacgaatccaggtttacatatatgtacaatcaaggtaactctgaaataatgacatgtgtttgataaataggtatatctattttccctgatttgatcacatgtggggtgtaatacaagcaagtgtcagatttgcttgtctttgttttattgtatttgttgtaagattccatttttcttatgcaaaagttcaatgactgaatttcctaaatgtttttcccctggttatagattaaatcagttatcactatttccataaaatagctcagtttatgaagatggcaaatatgtgttcagttgaattgcaacaaatgatgactttattgttaaaaaaaaaaaaagaactagtatttttgaactttggacaggtttccaattacttggactttgtttctctacctgcattgccttttgcaattttaaaaaattaccttttggacaatcttttaatatcaacagtaactgtgttactctgtagtgtcaacttaaaagacttcaatactttaaaagaatattcagttgggtcaatttacaagaaatatttggctccccataaaattttaaaagaagttcaaagtcataagcaaaagcatggaggcacctagcagactgtggtgtggacaaggaatgctgcctgccacccttggacatcaaggagatcaagccagtcaatctgaaaggaaatcaaacctaaatattcattggaaggattgatgttgcagctgaagctccaacactttgaccacctgatgcaaagaatggactcattggaaaagacttcattgctgggaaagattgaaggcaggaggaggaggaggaggtgacagaggaggaggaggaggcgacagaggatgagatggttggatggcgtcaccaactcagtggacatgagtttgagcaagctgcgggagatggtgaggtataggaaagcctggcatgctgcagtccatgggatcgcagagagtcagacatgactcagcaattgaacaataataccagtaaacaaaggatgttttggccatcaagcccataaccacctctgcctccaactctggataggccaagaattctgcttagtctatcaatgggaactcacaaatggtctatcaacagataaatggttgactaattgtttatagaattcgggcttcccttgtggctcagctggtaaacaagctgcctgcaatgcgggagatctgggtttgatccttgggttgggaagatcccgtggagaagggaaaggctaccaactccagtattctggcctggagaatcccatggacaaaggagcctggcaggccacagtccatggggtcacaaagagtctgaaatgactgagtgactgacacttcctctaacttcagatctatccatctatccctagagctgtcaaatagtctggtctgaagcagtcagagatgcatatgcagatttttatatttataaagttagtaatatcccctagtcttgctcaatgtgaggtcccttagtgagctattggtgaaattaatttgttccctgtttagtagagtagcacttaaaataagtggaagtgtaaaagtaaactgggattcacgtaactatagttttgagtgctagtgaagtaatcaggtaatgtacatggccagttctgcttccagtatagcgataagaatccacctgccaatgcaggagacacaggaagacacaagttcaatccctggtcgggaagatcccctggaggaagaaatgacagcccactccagtactcttgcctggagaattccttgggacagaggagcttgatgggccctatagggtcacaaagagtgggactcgactgaagtgacttagcacgcatgcactaggacctcaagcaggtctgtgatcttatctcttacaatgttcatgtttacaaaataaacctgtgagcattcctgcattaataagttatttatgagattaaaaattaactagacatcaaattcttgccacagtgcttagcttatagtaggtgctcaatacattaatgttcaatgaattactcaaaaggcccgctgttgaaatttataaattctgatgagttgagtttttgccccagtagtgagaggagcaaaagataagtggcttttgagatgtgctgccttcctgtgaggtagttggtagactaaaattgggtatttctgtcctagaagatacaagagatcatcaaaagtctttggtctgaactttgagactcactctccttgccagtacccttcaaactttgcaaagcctcatgacctgaggaatcctggtgttctcgatagtatgctatggagatgcgcataaattccagctagcaagagatagcaggctgtctgtccctggatggtgttgcagaagcatcagagtcaagtgtctacattatgggaccttaactcaggaatgccagggcttcctggtggctcagatgggtaaagaatctgcctgcgttgcagacctcggtttgatccctggatcaggaagatgccctaaaaagagaatggctacccactccagtattcttgccggagaatccca

SEQ ID NO: 55554 - DNA, 1155 bp, Bovine  19866880910476
  misc_feature (1)..(1): n is a, c, g, or t
ncttgttcgcgacgcctgtgagcgcaagctagctttagagaaacttgtgctgactttttcccttttcttccttttaaactcatttgcactggagttcaccattgcccaccccaccccgccttaggcagtgtgtgtggcgtttgtttgccagttttaaaagcccagctctgtttgctctgatgttcttttagccgaggctctgttggggctggtaaactgcctgggctttagtgaccgatgaggtgttaaatgctaatccaacatcttttgaaacaaaccaggattttgttcaaacatttttaatcaagcaatcaaatgcttggaagtccagataataggaagcaagcctttttttaaaaaaacggtgttttaattaattttttaaaaactagtggagactgccggaacaaagtcgttgggcagtctgatgcttttatttctggggcggtgtggggcgttataagccattgttccggggatccaagcaccccctccccggtccccgcagtcacccactgcgcgctgggtggtagtgctcgttaatcatttctgagcagcgagctcagcttccagacacaggagcctccctggaggggctgcctggacgcggtgcacccgggcacgcggagccgggccggctgtccccaccatccgcaaagcatggggaagtcctcccgcaaggcctgcaggctgcgggggctcaagtggggctcgccgattggtttactgtagaccgaggcatgtcagaatggagccacccggacaacccgcgccgggtcagcccctttcttcgcggggcagcaaccccctcccttgcaagtcgccgggcactggcagaacactgccccctcctgcgcgttgcgctccccgtgagcacccgccgcctccgcagcccagttcagctggcgccgagcctctagggaccctggggaccggtgggggaccgagtgcgggactttgggctccagttctgcctggggcgggtgtggggcgaggagtgcgtgccgggtcctctgctccagaggcgacctggggattctggggaacgtctcggccgcgctgcatagccagcaggtaactggggaggtgctggccagaccagcgatccgcgctcggctggcgtaccacggggtggggcggactgccggatagagg

SEQ ID NO: 55555 - DNA, 810 bp, Bovine  19866881156748
  misc_feature (1)..(1): n is a, c, g, or t
ntgaatgcaaaaggaggcacttcacatgtaaagtgaaagtgaaagactctcagtcgtgtccgactctttgtaaccccatggactatacagtccatggaattctccaggccagaatactggagtgggtagcctttcccttctccaggggatcttcccaacacagggatcgaacccaagtctccccattgcaggcggattcttttcccctgcaccacctgggaagccctaaaataagtcagtttgggcttataattcacattgctagttttgctttaattctgtaagtagaaaataaaacagaaaacagtcttcccaaaagtggtcttgacccctccagctcaagtgagtttcccatcaccgaaggttctaaaatagacttgggatggtcacttgtcagggatattgtgagaaatatacaaacatcagatcaggaaattcaaactgaatgccctttaaaagtcctttccattcctgacattctgagagttttcaagtcactacacgcacactactctctctcttataaaatgcctgcctgaaatagactaggataacaaaaaatatcttttgcctggacaaaaataaaagcaaaggctacttttcaaagaaagaatggatcatttattttcaatgagaacattcagaatcaagattagaaactccaattatctttatatggtatctagaacaatgaagatataccatttattcaaacaagattgttttattttagcacttatgggtctggaaaattctagatgccagagatataggagtatattagtttcctaccatgacttaaattaccca

SEQ ID NO: 55556 - DNA, 861 bp, Bovine  19866881214113
  misc_feature (1)..(1): n is a, c, g, or t
nggtcagccacatcagtctttctacaggacttggtcttggtggccactgccttctccttacttggctgctggtccagcacctctccttccacatgagccgccagtcacctttactgctcctttcttcctgccttctaaagtctttgcagttactctgtttggttcctagactcatagctataaagagtcacatgcctcacagcccaactccaaagggaacagaagcttctgcaagtggtgcccttccagaccttgccgtatgtacctcttcacctggctgttcatttatatcctttgtaaaaactagtaaatatatgtatgttctatgctgcgtgctatgccacttcagttgtgtccgactctttgcaaccccatcgactgtagcctgccagtctcctctgtccatgggatttcccaggcaagaatactggagtaggttgctgttcctttcttcagggaatcttcctggcccagggatcaaacctgggtctcctgtattataggcagactctttatgactagcaccatctgggaagcccatatatattctgataattcccaaatttatatctttagccccaggctctccacagaaatctagattcatgtatttccagttatatccatgacttttccctttggaaatcacataagcatctcaaacttaacatgcccaaaatttattctctacctttcttcccattaaaaaatgcatcatcagtggtgctaaatcataatgtaacaccttacccagctttatttttctttataacctttgttactacctgagattacatcacatatctgtatatttacccactggaatataaccccatgtcaacagggtctcctgtttattca

SEQ ID NO: 55557 - DNA, 1229 bp, Bovine  19866881224870
  misc_feature (1)..(1): n is a, c, g, or t
nttcagttgatacagcagtctcagtctttcagaataatgtcaccttggagaaagcgaaaagcgttatatttgtttagccagtgtgatagtatttggctgtgtcatcattcccaaaggatcttggtttacatacaactagagatccaaccagtccattctgaaggagatcacccctgggtgttctttggaaggaatgatgctgaagctgaaactccagtactttggccacctcatgcgaagagttgactcattggaaaagactctgatgctgggagggattgggggcaggaggagaaggggacgacagaggatgagatggctggatggcatcactgacttgatggacatgagtctgagtgaactccaggagttggtgatggacagggaggtctggtgtgctgcgattcatggggtcgcaaagagtaggacacaactgagcaactgaactgagcagatatgacaagatggtctgcaataatttcaagtgttagacttttatctaaatgctgaaaacccttccataattgtacaaacacataaaacctggcaaataaacagccttttaaaatataatggagttaattcaatggctccattccccaagaaacttcctgttgcaaacaactgttgcagcactatggtttaaaatcagtgtctctctcagaatcttcaatccaacaacttttaaagaaaataaaacaagatttctaggctattaagctgggaagaacatccttatgtatatggaaagagtggaggtttttgtgggggctttttttttctgtattttctttagaatatttatatgcttgaagactttatgtctcacagtgacagaaaacttacatacaagattcattctcagtagaaaatagatcaataatccttctatagataagaattgcagacagaacaattatctaataaaagtacttaaatcgccagctgaaaatgatttaacatgcagaaatcaggagtttatcattcacacatcacaaagcctagaacaagtattccataactacatagtttacagatagaatttttttttaatttattacaaacaaatgctctttcccctgatttcaagatcaacaggaagattctgagattttaccacctacttagggccagtgggttcataagtcacagatacttagagcagacatgatcttgagggattatctaaaatagcttcactttacagatgaagaaaggggcttgtgaaa

SEQ ID NO: 55558 - DNA, 1479 bp, Bovine  19866881327485
  misc_feature (1)..(1): n is a, c, g, or t
nccctccccctccttcccctctccccttcccctcctgccccatcaccaggcaagttttcttccaactggatcacagggaggaagtgactctctctggggccagttcacttgtgtaatcctgaaaggggagtatgggcaagggtcagggccagctggcctgttgctagctgctctagagattcttaggaaaatcaggtttgtaattctgggcccataggcccaagacagagcaacttctccagtagagggagggtggcatcgtctagggaggctgatttctctccgatgacacatcagccagggtcctctgactctgttgatttgggtttgatttggcaggtcacttaacccctgcttcctccacttcctcggctgtgaaatggggtcaccacttcctagtcagcatcacaggactttacaaagagaaaattctgatgacaagcagttttgcaacaggaagagctaaagcttcaacgctcaattgtaccagttcccacgagctgaccgtaggctctgctggcctctccctgcctcagtttcctcattgaaaatcaggataataataggactcatctcaaagctgctttgaggattaaatgagataatattgtacttgaagtacagtatctaatagccttagtaaatgttatttgtttcccctgatctgcagctcattttaccatttagtatgtgtaccagagcactggaatagataagagaatcctacaatgaaagagaaaaactctctcactttacagacaagaaaaaaaagagagagagaaagatgcagtgagattgggtaacttgcccagggcttctgattcattagtgagagtgaagtttagggcttctaattgttgggtcaagcaagcctccgttttcactcctttgaaggttgtgctggtatttctatccccagataaccctttcgaagtctgatattaacccttagaccaattttgaccattaagcaatacattttctaagtctccagcagtcccaggaaacctgcagaaaacctccacgaaagccaccgcctcccccagctccctgcagaaggccaggaaaggtagctggctcagagacctgaggaagccactaacggggacagcaggtgaggggggaggccggggagctgcagctgctgggaaaggttgccctagtaaccaggcagggctccattcaggaagtgagcctaactccaaggtgcaaaacgatcgccttcacgggggctcctgcaagcacaaaggcaccaaaggaacgagggccggcccggagaaaggaggcgcggggagaggtggggggcccacgctgtcatttacaaccctccaccttccagagaagaaagagaaagagaatagctctttgaatcttctggcctgtgtgaaccgtaaaaatccccatttaacatgaggccctttgtggcaatgggagagaagctggccccgactctgttcaccagccttatgaaacaatata

SEQ ID NO: 55559 - DNA, 1005 bp, Bovine  19866881629149
  misc_feature (1)..(1): n is a, c, g, or t
ngaagcctgctatgctgcagttcatggagtcacaaagagtctgacacaacttagcgactgaacaacataaatctatgacattatagatattcaacaatataacttcatgtctagcatacaattttaaaagttaccgcgcatgcaaagaaacaggaagttatagcacacaggagaaaaatcagtcaacagaagcagactaaaatatgatagggaggacagattagcaaataaggacaacagctataataaatgcatgcaatatgttcagagatttaaaaacaaaacagaaatgatgaagacagaaataaaagctacaaaatgtgccaaataaaatgcctagagataaaagaaatatgaaataaaaaattcacaggatgggattaagagggaattagactgtgcagatattgcaatagaatcaatccaaactgaagactaaatactaatgcatagggcttcagtgacccgtgggacaataggaagcagtcctgtatacctttatttggagtctcagaaggcaaagcaataagtgaattaagcaagatcacaagatagaaggtatagtcaaaatcaatttcactcttctatactagcaataaatagttggatgcttaagtttaaaaacattattcataatagcttaaaaaatgtaaactacttcaaaatacatttagtaaaagatatgcacatcctgcccattaaaaattataaaatatggttaaaagcaggcagactctttaccatctgaactaccagagaaaccctggccaaaaagaagttgagaccttaataaatggtgagatatgccatattcataggttggaagattcaatggtgttaagatgtcagttctccaactggtctacagattcatcttcatttacgtgaaactataggaaagacaaattttattcaaaatgaagaaagcacatcaatggtaaccagagcagatattaatagaatgactgactgttaaaggacgcaggttatatgagtgcatgcatt

SEQ ID NO: 55560 - DNA, 1167 bp, Bovine  19866881662768
  misc_feature (1)..(1): n is a, c, g, or t
ngagcccttgtctccttccttccatctatgcatgtcgcctatcgaatgagtagtacccatgctcacacacacacacacacacgcttccagtttcacacaaattgttttttaaaaaggaaagaaaccaacccaaaatattgcatttgaggtgacactccctgaagaattttgtacagaggtaagatactgtttagcacagctgaagtttcaacaacaacaaaaaaagtgagcccatgattttggtgtctttccaagatatcccctttgagacaatacaaatcaaaatatttacagagataaggcagaatcaaactacattaaggagaaaaaaagtcacaaggaagatatatgaaagagactgaagactgcaccataacaaggtctccatgatcattcagtgtccatgaaaatgtcattcagaattggtaacgttgagcatgctgcaaatatatcctttggattcaaaaagagcaaaagtttccattgtttttaagtggcaaactgctctttctccctttggatgatttcttttaaacccatcaaaggaaaaacacagttcaaacaaacactgtcaagtgatttaagatcaaatatttacaataatcaaatggaatatgagattcatttgattgattatttatttttgtttttctttttttttttttttgcaaactgatactacaaatacagagctgaaacctctctttggctcctctatatgcaaaattgaatcggtcttcactgaagacaatatagaatcagttccagatgcaaaagaaacagtcatacaaggccctaaagaacacatgctcctaccctaccatttggtcctaccctatgtacctggaagtcctcgaatcccagtccctgcaggggtaggctgtacacaggggtgtggagcaaacctactgcctctatctatacagcaggtcctgttcttccaacaggaagggagcaaatctctcccttgggaataaccaatgccatacgtggtaaccttgtctaatacagacagctggtgtcctgttgacacctggggccacatacaaagagagcagcctggctgatgctgctaagagaaactgctcaagatcggctggacacatcccagcggggggtgcccttcacgtggattgcagagagtccacctggtagacattctggttg

SEQ ID NO: 55561 - DNA, 1008 bp, Bovine  19866881694269
  misc_feature (1)..(1): n is a, c, g, or t
nttgaagagttttaaccgcaccctagacctgtgatgtcgagatactttattgcttaagatgaaagtgttagtcactcagtcatgtccgactctttgcaaccccatggatggtagcccaccaggctcctctgtcaatgggattctccaggcaagaatactggagagggtagccattcccttctccagggcatcttcccgacctagggatcgaacccgggtctcccgcattgcaggcagatttttcactatctgagccacctgggaaacaagtttaagatgaggctgaatttatttaagtaaactgtgggctgaattattttagtaaatataggtaaataataaggtggctcacaaccaaaattgtaaaagtggcatggaaatgacttaaatttaaggaacatctttccggcatgctcagaaagatgttaatatgtccatacagaacaccaagttgcctacataagacaaaagggtggggagaggggctttctttacatcttccccagccagcacccagcaggaacttgcattcgctatccctcaacaaaagcttgttagattgaaccgaatctccagcattcctcatcctttgatttctgttacccaccatccctgaaaagaaaaactaaatgcatttttttaataaaataaagtttaaggccttagggaaatagtgctttggttccttttggttgattggaagaattgattgaaccgcaccttggtttgtaccttttaactttaggatgtgtctctactggaagccctcaaagactcaaatcaatcactaagtccccgctctttattctgtgcatccaaggacagaaatctcacaacccaaaccacatgaaattcatcactgactgcaggaaaagatttactctttctgtgctgactcgccttggtaccattgctcctgaacagctgctttcacatttcttcactttattcctctatattttccccaaggaaaagaactcatcattaaggatcctgcccaaatatatt

SEQ ID NO: 55562 - DNA, 519 bp, Bovine  19866881707551
  misc_feature (1)..(1): n is a, c, g, or t
ncccctcctctccctccctgctacagcctgtgtcaactgtgctgttattaataacagcctgtgtctgttattaagcttatccagtgaaattgtaactctgcttatgttactgttgggtcactagtttatgagcttcattagggaagggacaacttctgattcatctttttatcctcatgaactggcacagaatctgctacataacaaatactcagtaaggtatccaatgagaagaatgaacaaaggaattgatggagtagacttctgacccgatggactcaacaagtatatgttgaatcctcactctgctccaggctccactgtgggctctggtctttgagcaggaacaaagcaaagcccacaagcaagagaactgaagaaaaaatacaaacatgtggcgagagaaataaaagtagacttgaggtaaatgaaacatcatgaaccagcacttcatatattcaataatgttgatactttagaaggaacatcatgcctcttcacagccaattttttccatgt

SEQ ID NO: 55563 - DNA, 918 bp, Bovine  19866881861108
  misc_feature (1)..(1): n is a, c, g, or t
naaacatcaattttatatagttcaatctaacattttagggaaaaagtaagattaaaatcttgttatcaaagtgaaagagctatacaagtcttttatttggatgggtaataactcttgcatatagaagtgggacatgaaatatggttaagcaaagccaggatatttctgaagaaggaattttaatctcgccacatcacaaagcagacctaacagtattttattttagaatgcgtaccattctaaataaaggaaggagaaaatatgaaccatccccagttaaaagcccagcttaatgacaaactcagcaatgatgccttcccattttgacatgattgtttctactgaataactacttgtattaatatttataatacatgcaatggtcacacaaaaggcttaccagtgtatccatggagttatacctgtgtcggggacatggtggatggtcaatatacatctttttcattaaaactttttatgaaattttaaacagagtggatagaatcatctccaccctgaaaatgtagttggaagcatcaacagaacactttatactaagttaactatcaataatgtatgtttatatgagaataagttcatacatttttaaaagtataatcagtatgttattaatatagtatccatagtatcctactgtgtgcacactgtactagaagctatagaaaaatgtattgctctgttccttgagataagagactttaaatctagctggtgaaacacatattaaaaagaatgggagcccacaaggcatgtccttttattaggacatgctaaaagaattaaactgacagcaagtgaaccattaccatattgtgttgaagtcattacccatgaaaatcaaacaggaaagaagtcaagaggcccagaatcctgtcccgactgtactttcccagctag

SEQ ID NO: 55564 - DNA, 1415 bp, Bovine  19866881979505
  misc_feature (1)..(1): n is a, c, g, or t
nttctgggataaagaagtttaaacatgcccattgcaacccaggacacggtatataaaccaagtctcccatttacttccctttcagccataagtacatcttttcctcttctggatcttattgattccctcttgtaggacctcaagcctgcagctatccttggcttatttagtttatctccactctgcatctagtctttcttcaatcatctggccttccaactgctctcttgatgctgaaactcagcctctttgtgcagtgctgacgcaaatctcagagatggggctttagatgaagtagaaaagaatatctttatttctttgccagacaaaggggtacacagcaggctcatgcctctcaaaactgtgtgccccaacctgggatgatttggtgaggagttttatagcagtggttcaagggcagattgctgataaggattagggtgtgtgaagagcctgcatgcctttaatttggccttagatggtcccatgagtttctgtgagtcctttaatctggcctcaggtggtctcttgaaaagcttctttggttcctttaatctgaaatgaagaacactaatatgtttcgtttgttgagggtttgcttccctgtggctcagatggtaaagaatcagcctgcaatgcaggagacctgggttctgcaggagacccaggttcgatccctgggtcaggaagatcccctggagaagggaatggcaacacactccagtattcttgcctggagaatcccatggatagaggagcctggtggggtacagtccatggggtcacaaagagttggatacaactgagcaagtaacacgttcacttctttcttagtgctacagaagtgtccagatttgttatgtgtattcctgaggcagagccaggactttgccccaagactgcactatcgtttcttggctgctcctttcttgtctctacatcccctgcctcctcagattagcaactgtttcaatctgctctttggaactcagggaaggccatgaaggctgaaggctactccctacaaacaagaaacagggagcatggaatgacccaagtcccataaggtcctagttcgtttcacccttagaatacacattccttcctgtaattgcttgagctacagacacagagtcttctttagccactcttgggaccagaatggacaagaaatggagcaattcactagagcagtgtttctcaaagccaaggatggattgttctcaattgtttcatagttaagcagggtctttcagatgacacctgcatttgtctatgctacttctgtatgctctattatacttcacagaatacattgaggccgttagaggaacgtccccaagctcctctaccaaacataccaaacttcctacgtctgcagctacccttcctagtgttaaagcaaagcagtattt

SEQ ID NO: 55565 - DNA, 819 bp, Bovine  19866880527021
  misc_feature (1)..(1): n is a, c, g, or t
ntttgtactgacatacctacattatgtataagtgatatcatatataatacatctccaggaaatattagattagagaaagaaataaagattaccaactccagtatcttgtatgacagataaattatggaacagaatataaaaggtgacaatacatggatgttgatataaaattttattttagttgaataattgcatcaccttgttttagaattttagaagtgtttttagaattaaagaggaaaaaagcattttcagatagttcataagtaatattgattagcaataaataattactgataagaaatgattttgagtagttatggttaaatatggatttgcttgctatgtctcagagaaagcatatctatattttggataaatgtgatatacctcttttggataaatgtgataaaagaaaaatactttctgacttcatctgagaaatctatcttaaaagtaaaaaaaaaacacacacaaattttctctctgctttaagagccactcacatgcaatatttatatactcattttgtaagaagcacatagtacacgtagtgatactaaggaaataccattataataatcataggctttgacaagcaaacatgacatctgctggttgaacagggaaataattcataattttccttctttttttatcctttaggcatttttttgttcttttagcaagcacaccaattttttttctcattctctcttatactcattttattttatgcaacattgtttgagtttacatcttttcagattaattgacctaaaactagtcattagtctaaattagcaaagtaaactttag

SEQ ID NO: 55566 - DNA, 1459 bp, Bovine  19866880588327
  misc_feature (1)..(1): n is a, c, g, or t
ncccagacactatatcttgccatggaagaaaaactttgatttgtcttttggggatgtttcaataaagaataatggccttccactgtcctgccaatgtgaaagaaaggaaatgtttgtagatataaatattataagaacagaaagatcaagtataaacactactctttttccatattccactcccatattctttacatttaaccctttcatgaaaaatcttaacatgcaaaaatggcctcagtagacatcatttcttttgaagatcctcttgcacaccaaagttgaggactgtagggcagaagcattctagatacaatgaaattgatataatttttaagaatattctctgtttaataataggaaacaaagtcattaagtaaaatcatttttctatattatcgtagaaaatttagattcctacttcctcaagtatgcacatttagataataacattattttaagacacaatcaaatactagcatttaacataatccttctttaattctgatctgatgattattgtagtggagattttatatgacatgaatatggccttttcatgtcccagacttagaattttgaatcaatgagcttctgcatgtaaccaatgtaacttggatgatgtttaaagatgttaagaatgtagcaaattttatatttctacaaaataaattttaaatttaagcaacataaattgttaaaaaggatttcttctctaataattagtatttatgtctttgactatgactatttttttaacggattattaatttatattacatactttatgattttaaaatcattattttactctatttttattttgagcctatatatataaataatttcttttatccataaattatctatattatctaatgaaaagtactttcctttttaatatcaagcatgactttaattatacaacacatttttgatttgctgaggcatgaaaagtaaatttgacccttaaagactcatggtaaattcagttcaaaagagcccaccttttctttaatccacaaactgttagaaacttatttattcttaaattaagattataaaatcagtactgtatcattaaactccttgctgggtggggtttggtaattatacccagcattcctccaaatttttggtaaaattagctgactcttttgattaaattgtatggtctttatttaaatataatgagaaaagttattttagaatttgattattggcttatatacttttcataaatgttgctgcagtctataaaaaagcactagaattctgaaatcactgctttaaaaaacttaaaaatagaacagatatttcatgtgaagttaaaaaattaatgtatggaaaaaatttttctaaaaatcttaatgtccttaaattgtactttttaagctcagctaagaaattgtttaatctctttagacagctactagcttcccaactatttacttcattt

SEQ ID NO: 55567 - DNA, 1063 bp, Bovine  19866880656072
  misc_feature (1)..(1): n is a, c, g, or t
ntttacttttcactctctgacagtagaatccttgagtacaaggaaatgtatagatttcaatgtaatcccacagtttaaggttcttcatataataaggattcaataaatgtttattaaacattaaattgatacatttgttaaatccttaaaattatacccaatctgtataacaatgcataatgttctatgccacatttgggttttaagcttttttttttagataaaactattccacagtatcactaagaatgtgttatgaaaactattcaaagcaaatataaagcagtgttattaagactcagagatattaggttacttttataaataaagaacattatttacaaacattatttgctttttcatagcctggctaacctagaaatttacactgtaacattctctaagcaaacttacctctcacaatgatgttggtggacttttttgcagggtttcccacattattattggcaatgcagctgtaagtgccagcatcttctgaagtgatggcaggtatggtcaaagttcctccattcaaaacagtcttttcaggcagagtcccaaaggacctgacccatgtgagagaaggtacaggctctcctcctgtcgtaacacatactaatgttatggcctctccaggatttacaacaatagggtcatccaccaagagtttaattgacggagacgctaaaagacaaacaaaagaacatgcacctatttagatctactagagctagacttcaacagtatgctttatatttacacaaacaattaaaatgaaatactgttctcttgtgccaaagtcttattgtattgatcaaatttaaaccttatagaatggttatttattttaattatatggcataaacctgtggaattttactaagaatcttacacatggagaggggaattaaattttatgtattcttgaattattgtttcacaattagaacaaattaaaacaaaaatccctttctctttttaatgttgacaatcaccatttgtttttgtccttccaggtataaatattaaagctgtttagttctttgtatttttcatggtcaag

SEQ ID NO: 55568 - DNA, 1421 bp, Bovine  19866880696469
  misc_feature (1)..(1): n is a, c, g, or t
naattgcagcacgccaggcctccctgtccatcaccaactcccagagttcactcaaactcacgtccattgagtccgtgatgccatccagccatctcatcctctgtcgtccccttctcctcctgcccccaatccctcccagcatcagagtcttttccaatgagtcaactcttcgcatgaggtggccaaagcactggagcttcagctttagcatcattccttccgaagaacacccaggactgatctcctttagggtttgtattactattttgcagcacgcatacaaaactctgaactaaacgtatgactgttatttgaatgcactgcaggactctatttctaaaaatgaaccaaaggtccatgggatctgcctgacttttttttttttttttgcagtgcaaaattcagccactgaataaaaattttaaaaactgcaggccactaaaatatagtaagtcttgatcatgttatgaaccatgcttgctcaacacagtggctcactcaattcataacagaagagaaatgtgggcatttctaaatacagtgactcacaacaacagagaactttgggtgggaaagtggaaactgagctcagccaccaacatgtacctaggacaacagcataattttcttatcaaatgtatgaaggaacttgttttctgacttgggagaaatgtagcttaatcactataatctcttaaaagatcataagaaaagaattgcggctctgtttctgaatgtccaacaaaacattaaaacctatgagattcctcttcagttttggagttcactatctacatagatggttaactacattatttaaagtgttttctatttttaaaaaagcaaatgacacattcagaaatgtttctagaatttattttttcctgtctgctccctattattttattttgtccatggatattctcaaatgatagtggaaactctatgcatagactatcctcatgcttgcttagaaaacctggtctgtggctcttgatttaattatggaaaggaatgggggaaaatgaacccagagttctatttgtgtatccatgacacaattaatctaagatatggcagagttctacaaattcaaaagacttgaaaataatttatttgctataataagaagaaaaccattttttctttaactgaatttcttgccctttgtggcagaaatcaaatgcctcatattactgtagcagtttttctcctcacaatttaatctaggacttgttaaccaaggctatttctatattcagcaagattacatacaaactcaattttatgaattatgtgaatgctactgctgagaaattctactggtaatatgactatgcaaatggacaccaggtaaattaaaggcataaaagaggatttataaattgaagaaatacattataagggtttatttattttta

SEQ ID NO: 55569 - DNA, 1813 bp, Bovine  19866880729856
  misc_feature (1)..(1): n is a, c, g, or t
nctggtgttctgcatgcacttctgtgtttaaaggtgtattcctgatgtatccatggagagatatgtactccacgtccacctactcctccgccatcttgttctctgagttcaatacattttaatataaactgtactagcgtactccaactatatgttatgtatataaaatgtattgaaattattcatttgattactacaaagtttactttacatataagaatgaatatattttcttaatttgttttttaaatcaggcatttacagaaacataaacatggatttttctcttcatgctaatgaaaacctagcaagatatttagagaacaaatctctgttgcaaacattgacagaaaatggacaagactgatcagccatctgtactagacatttttaaagctcactgaattaatcagttccattttaccgtatcaaattgcaaaaggcacactggtccattgaatttgccctaactgaaatgatacccaggcagcacttaacaggaatgtgcaagagaaagaactttcatcaccgagctgctgaatttgcactctcaggcctctaaggcaaggatttttttttaagtttgcagaactgtgagtggagaattagcctaggctcatatgattcccactgatagtcttagatctaaatgggtttattgcagttttaacttcaactctaaaagggaattatgttaataatttttttcctgatattttgaggtattattcattcagctttgtatttcagcttcagagtcgcccaagtctgctgatctttctcctattttcttaattttcaatttcaagatctatatttttaattttaattttttaataaaaatttttaatggtagactttttgatggaactttgttaaacgttttttggttgtcgttattgttgtttaattgctaaggcatgtctgactctttgcaattcaatggacagtagcatgccaggctcctctgtcctccactatctccctgagtttgctgatattcatgtgcattgagagagtatgctatctaaccatctcatacttctttaaaaaagctttgaagccaggcattgacttctcctctctaacagtgaaagtcttggagtagaaggctgtttcatctacactgaaaatctgtttttcagtgtgggcaccttcattagtgaactagattttctggataacttgatgcagattctacatcataacttttggtgcttcacctttcacttttatgatatgagggtgggtttttcccttaattctcattaaccaacctccactagccctaaatttttcttctgcagctttgtcacctttcagccttcctagaattgaagacagttagggccttgctctggattaattcttttatatttatttttaattggaatataattgatttacaatattgtgttggcttttaaggtagtgtttgatctgatatcctatccagaccactaaaactttctccatgtcagcaataaggcagttccactttctggtcattctgtgttcattggagcaacacttttaatttccttcaagaacttttcccttgcattcacaacttgggtaactagcacaagaggctaccttttggcctatctgggcattcaccatgtcttcctcactaagctttcgatttaaagtgagggacatataactctttgcttgaatgcttaaaagccattacaggcttattaattggcctaatttcaatattgttgtgtctcagaatatagggtagcccaaggtgagccagagagatgagagaatgctggtcagtggagcagttagaatacacaatcta

SEQ ID NO: 55570 - DNA, 1859 bp, Bovine  19866880816461
  misc_feature (1)..(1): n is a, c, g, or t
ncactatgagctgcagggtcctaagagcctatccaatacgggtgctgacctatgagtggcgcttgggcaacaaattattgcggacgggacagtttgactctcaagaatacacagaatacccagtgaagagtctttccaatgaaaactatggggtttataattgtagcatcataaatgaagctggagcagggagatgcagctttcttgttacaggtaaggtgctgaatattttgctttttttttttttttagatcataggagcttaggctcttgtcagtgtaagaatgaaagcattttgcaaatccatggagcatattatgaacagcttgcctgttctatttagagtgtctactcatttattttcaaggcaagtcattttagtagttaagatagtttatgtgcctataaaataggacagaagcttatgtgaatttgaatagatttggtgatgaggttggttattttgagtatcacagtaataaagtgacaaatcttaaccagctttttttttttttagatcaaatttcaaatattaacacatattttttctgcaagtctaaaagctcttgcaatccattatctgtgctggttttaagagtgctttctttttcttgtttatttattaactcaatgtgtggtgaatgtacattttgtcgttggcttacaataggatcacagatattcaaagggaaatcaatatagttgtatttggtatataatgaattgagaaaattaccacttgatgtcattatattttactgtatttaaagagatagtacatctgtgttaaattatatatatttatttaaattatttttgtaatctaaatctctttttgagctagggtttaagcatatcttaaaagaatatactccttttcattattattttgtcctagataaagtttgttgtaacagttatagtgtttatgctactaaaagaagaaactggatattatatgttatatataaagcaatcacaaaaattatgattaaagtgtttcaaacttaattaaatcttgttcattggtaatataaattattattaataagttcttactcattagagaattctctaatatggattgccttgggacatttaacttcctgaaataggatattaggtattaataggtaaaatataattgactaaccaaagaatatgaatacatcctctccactggatcttaccacctcttggttttgcaatctcttttattaacattcagttgaacttaaggcttttctactataattcttcaagtgaactgttaaaattaaaaaatccctaggactgatacttacatgatgatctaatttttatccctaggaatatttaaaaggctaagagaatgtaatgtattactctaggggtaatttaaatggcatgatatactttcattccatatatatatatattattatttatatatatatacatattatttccaaagaaataagactctttcaaaagcaattatttttcacatattggtacaaatggagtactttactttctttcattatcccttcaaaataaaaataccccataaaattaactaaactcctttctccaattctttcagctttatacacattctgcttttctttggtgacactgttttctaacttggactatattagattatgctcctctgtgagattttcatttgttctttattatatgatccaaatcctatttcttgagctagaagacaagctgagactggaagaaacactagctccattctcccatcccagattcatggggtgcagtaagtagatttcaatagctgcagaaagggataaacctgttgtggattgccccatggagggagagaaaataaccccaggcattaa

SEQ ID NO: 55571 - DNA, 1535 bp, Bovine  19866880831238
  misc_feature (1)..(1): n is a, c, g, or t
ntcaaaaagcaaaatttatgacccctaaaagatttttcttactttaagtttctactcaaaatacttacctgcagttattctgagcaagggcatttaaaagagaattaaaaattcaaccatactttgcttaaacaatttgaatgactaactgcagtaattagctttgagtaaattcacaaagtaaatagagccttgatacttcataattaaatagaaccccaatttcctttcagcatttaattcggcattcaaattatcaagggtgctattttaaactactttttggaaataggtgtaattttttttttgttcttacattattaatgagctttcattcagactatagattggcaatatttatataaaagaaatgagtataagaatagcaaatagtatataaaaaacaaataaagaacttcctcccccctatcatcttctagaagttttaatacacatcataacaatttaaatacattttatatcaaaataagatataaatcagatcagatcagatcagtcgctcaatcgtgtctgactctttgagatataaataactatatattattattatttcctcaagcaactgggtgagactatattttagcttgtatcaataattgcaacttataccgatgcaaacgcatttcattgctttttcatgacagttggatatttcaaaatgtgcatttccaagataggaacaaactgataattcagtttgaagaagtcctggtggtttgggaaaagaaagaaccacacttgtgttagtgcagatactttatttcatggctctgaagtgtgttttgcaattcattgtgtcattagacacaacttaaaaaaatcaagatatttcccttttcctttattttttttctaattataaattttatttttacaagagagttgtattgtgtctatcattttgtggtgcttataatgaaaatgcctataacaacaatggagtctaattttagagtacttttaatgatttttgtcagctaatagattctcttaactttatcctatgaaatactagtcctgaaagataagatgttccacaagtaaagcgtttttattaagtattattaatccctctaggaatatttcccctccatggatcacagtcttttcatggtgaaggggcttgtgtaactcaatgaagctatgagcctggccattatgggtcatagtgaagagttctgacaaaacgtggtacactggaggaggaaatggcaatgcactccagtattcttgccgtgagacccccatgaacattatgacaggggtaatccaagtctatttcccaaccactagtgccgaagaagctgaagttgactggttctatgaagacctacagtacctgttttaactaacaccaaaaaaaaaaaaaaaaattaaaaaagatgtctattttatcataggagattggaatgcaaaagtagagacacaagagatacccaaaataacaggcaagtttggccttagaatacaaaatgaagcaggacaaaggctaaagttttgccaagggaacaaca

SEQ ID NO: 55572 - DNA, 2682 bp, Bovine  19866880938512
  misc_feature (1)..(1): n is a, c, g, or t
ngaaatgttggaggaaaaattaaataggccagttgaacctgaactgaaaaatccttaaatttcacatttaagaagtgagtgtggactcttcagcctagtgagcaagaaataacgtgatctgatctgtgaaaacagggacaggagaaatgtgaatttgaaggcaggaaacaaatcaataattatttaaaaaccatttcaatattcaaggcaagaaatgatgaggatatggtgatgaggatatggaatataactaatggtgtgagaaggaccttagcaacctattggaggtaaaatcaggtgggatttggcggtaagttcatatatatttggggattctcagcatatacagtatggttaaatataaattgatgggataaggaagaatgtgtaatgtgaggaaaggatgtaagacaggcttctttaccactgagccacctgggaagtcctttacataattatagcgcacacaagcattccaactatagcaggccttgtaatatcttgttaaagttgctcagtcgtgtccaactctttgcaactccatggactgtagcccaccaggcttccctgtccatgcagttctccaggcaataataggaatgggttgccatttccttcttccatgtaatatcttgcccctaacgaaaatacaagtttcaagtcagccaaaatggtcacaaattggtaaaagcagatgataacataacctggaacattctaattttttttttcaaactggtcttatgtaattaaaccattgagtaaactattgtgcatctcccatataccaccaaaaggaggaaaagcgagcaaagcagaaaaggtacctgccctcacaggttgtacagcctattctgtaaatgaaccaaagatggtcactgagttttggcccttagcttgtttacttcttcaaagcagactgaggcccattagctctaaagcttactgactccagactcgtatttttacacattaaaggaaagctctttctctacacgcagaacatatctggcaccaaatatgtgtgtgtgtgttttttccatactaacaacacattctccaagtttctatacaccaactgagtatcctacaatttaattctgacagaaactacctcgagttaataccaaccccaaaggttaagggcccaggcggacaaactttggatgcaagtgcgagtcttgggttgtcatctgtatttctcaacaaccagttatgaactgagagattccatactccattcttcaggctcgataatttgctacaacagctcacaggcctcagggaaacacattcctttgattactggtttactgtaaaggatattataaacaataccaatgaacaggcagatgaagaggttcatagggtgaagtaccaaagggtctcaaactctgtagcttctgtccccatggagatagggtatgcacctccctgatactgtatttctgctgaacatgtgtgttaatttaaaaaaatgcttcaaaattttaaagtgccatatttgcatggtatgagaagctgttttttgttttgttttttttttaagtagccatggggaatgcatacattttttcttatcactacaagttaactccctatttagcatcgactaaatgattcttatttagcatagatcaaactgaatacagaatagaaattatatttccattcctttatgaaagaaagccactttcagtttaaaatttcactcttctctaagatatcagccaaaacatcaaaaaacactgttagtatttgtatcttgtgggattttattactatctatctaaccaatgtagtgtagaaaagactaatggattttctgagaaagatttatatacagagtcaactactttaagaggaacagtacaactttaattatttttatcctacaatgtctcttttgaatatatgtcatgtctcttgaggaaaaaagactttaagtattcatataaaataggattattgattcattcagcagccaatatattgcctcataattgtatttcatgaaaaccattgtgttaaatattctaacttgttcatgccaatttaaaactgtcaaaatgtaccttgaaagaatgaccaacctggaatcaatggcaggaatttaaaactttgttatatttgtaaaccttttggaaagacctgatcatttcaattgctatataaggatgaagagactcaataattatctggataattctatacaataaaagttttctcagaaaaagagagaaaatttaggtggatttaaatgtatatgattttcccctttaaattgaagttagttgtccttattttgtgtgcaaagaaataaaatcaagtcagttattcctctgttagaaactcctgctttcagcattcctgatttttgcaagcttgtgtaggcctttgcagtaaataagttacttattccgattccccacatttttaaaacttgtagtaactatgtttaaataaaactgctgtctcaaatattttccttcatagaatataaataattccagagagcatcatattgttttaagtctcaatgaaaattttccttcaactttactatatgcctgtgaaagtcactcagtcgtgtctgactctttgcaacccatggactctatacagtccatggaattctccaggccagaatacacgagtggatagcctttcccttctccaggg

SEQ ID NO: 55573 - DNA, 3113 bp, Bovine  19866881328991
  misc_feature (1)..(1): n is a, c, g, or t
ntaaaatatatattatttatattacagttacaagaaattttcttgcaccaaaataattgaacaaacatcaaactgagaaaaggtatttaatcacaatgaccgttacttttagaaacataaaacagaaggagcataaaataaataaaatcttcagttttttggaagataagtttttctgagtcacaaaattcaaacaacacattctcaccaaagtagtgtgaatttagaaattagactctgagtgtcatagtaggaaatgattttgtgtaatttccatagttttacacttagtcttcgttactttgattttaaaatgtatatattgatttggatgactgtattttatttatttcttcatgatactgtgtgtacctgacgtttgttgctgtgtcacttcaccttgttttagtctgaaatgtattttgatctagcttgaaaagaaattaaggttaattcatttagtatgtatgtgtgctcagcactcaggcatgtccaactctttgctagtctatggattgtaacccaccaggctcctctgtccatggatttttccaggcaaaaagactagagtgggttgcaatttcctcctttaggagattttcctgacccaaggatccaatccatgtctcttgcgtctcctgcactgacaggcagattctttaccactgcgccacctgggaagcccatattgtttcaaatattggtattaggaagagttaagccttaaacttttcatatttgcattgattgcttttaaattttctcacaaaagcccagagttgtgctccttcactctgcctggtctctctcaggattctccttcctgccgagatcagcgtgctttctggatgctattagtttgcaaatctaaggcatttgatatttactgaaaaataaaaatagatttgaacttgctcatattcacctgctgttctcaagctgaaaatacccaggaaagcaatttggaactgcataaaactttttttttttgtttaatttaaggaaattattatgtttaatgaaagcatgtcagttcaattttgcaacagaggagcagaaccagtaagctttagatgatcatatcttggtagaagcatgaaatcttttgttgtctttttttttttttttaaacccatcagtcatgtataaacttaattaaaagtaaagcaacaccatgaacaatatgtcattttaatttaacaaaatatcatttcaatgcatttttaattttcctgagactttacaaaacttttgttggtagttctatcaaggaagtacatcccatttccagttcttctatgaacacatggtctccctcagaatgacatggtacgtgatgaggagagatgaaaatgtataaaatgcttggagggacacttccaaaaccaaacgtaacaaccagccagcagcagtgcttatgttacctattattagaattattcatttctagttgaattttatttttgattggcactgggcaaggagatccaatcagtccattctaaaggagatcagtcctgggatttctttggaaggaatgatgctaaggctgaaactccagtactttggccacctcatgtgaagagttgactcattggaaaagactctgatgctgggagggattgggggcaggaggaaaaggggacaacagaggatgagatggctggatggcatcacggactcgatggatgtgagtttgagtgaactctgggagttggtgatggacagggaggcctggtgtgctgcgattcattgggtcgcaaagagtcggacacgactgagtgactgaactgaactgaactgggagtccatgtaaaagatgaaccttctcttaggcaagttctgagcccaaatccagattctgcttcttctaaattgtgtgcattgggcaagagacttctctcagagggaatgtctaaaccagtaaaatggaagcgtctggcacaagtaggtgcagaaaagatgttctttctgtttcttttctcacagatgtttgaatatgtactgaagaactactttgaggggggaaaggcccatgatctcctctgtttgtatgttaatagtgataggttttgccagactcagaaaacaagcaggaaaatgggtcctgagggtagctaccgaggcactggagtagtgggattacagcaattacaacaaacacctcatccacttggtgtttccctctagttgtttgtgtccttttaaaatcactcttacatgtgaactttgaacacatcatcccaatgactccttctacatttccattcttttgcctacatttaagatcaaactgtaagagtagcttttcctagtgaatgaaatggataatggggaatatattgtgacactgtacattgtctaactagaaactgtcattcagaacaaagtcagaaagagaaaaacaaatatatattaatgtgtatatgtagaatctagaaaaatgatatagatgaccttattcgcagagcagaaatagagacacaaatatcgagaacaaatgtatggacatcaaggggggaagagggtgtggaatgagttggaagattgggatcaacatatataccttattgatattatgtataagatagataactaatgaaaaccttgtatatatgtatatatgtatagttcagggaactctactcagtgctctgtggtgacctgaatgggaaggaaatccaaaaaagagggagtatatgtatacatacagctgattcactttgctgtacagtaaaactaacacaacatggtaaagcaactatactccaagtaaaaattaattttgaaaagggaagtaaataataaaattaaatgaaagtaaataataaaattaaatgaaagcaaataataaaattaaatgaaagttttaagcttcatgtttacaaatctttcttaaattactagtcacagttcatggaaccaaatatttttctggcttatctttcctcagtactctgctacatgtctgcagaagtgctcttttgagaagaaagaaaacaaaatgtgcaaaggaaaaatgtatttttatttctcaaaagtaatggctttaaacctcacctagtctctctgtctttctctgtccctctgtcctccctgccttcttccctttc

SEQ ID NO: 55574 - DNA, 1595 bp, Bovine  19866881333647
  misc_feature (1)..(1): n is a, c, g, or t
nttctgagttctcataatgtaactctgggactttactggtggctcactggtaaagaacccatccacctgccaacgcaggagactgcggtttcaatccctgggttgggttgggaagattccatggaggaggaaatggcaacccactccagtatgcatgcctgggaaatcccatggacagaagagcctggtgggctacaatccacggggtcacaaaaattcggaaatgacttggcaattaaacaacagcaagtaattaaggtcttgtcttatctttttgtattaatcataaggggtttgaaaatccaaaggacagttagcatttgtattttccagaagatttcgtgtaaaagagcttaactgagtctacaaaaatgggatgggcaagagacaggaagtagcatttaatggaaagaaatgttagtagcattacaacaacaaagaatgaaattggtctggaatagcagagagtggagctcagagctattatcagactttttgggatgaaggaaaacctctgaggggttgaaaatgagtagctgcatccatagagaaatggaaagtagctaagtatgtgggtgccaggcaagaagaaatggtcagggtgtggaaaacagcctggctaatggctggaaggataggaggcaggaaacatagaaatttatcgaaattcatttttgtgtgtgaaaaatctctgaggagagataaaggtagaaaaacaaaatggctgacacacacagtagaagggactaagaaacagtttgctgaaaatgatcgtagacaagaagtttttttttttttcttattattcaaaacacagattatgcttttgagaacaggaataatatttagttaacagacttagagttttgaatctcatagcatttattatcagacagatggtaatatctgtgaataaattttcaagtttaaattaagtcatgtttctttaaaaaaatttcaagatgattataaaggtgacaggttacttttgaattgaattacattattcatgttgatgccattatttctatcaaattcttttgggaagtgtttgtatatgattctttctcattaaaaatcagattaatatagtttatctttttatgttttagacatgtatttagagcaatagaatgtatttatctgaaacaaaatagtccaagaaataggcaggaaaagcaaagatttttaaattaatatctgggtgagaaaatgctggcttcaaaggtttctttgatgtccaaatattacatttgcatcaatgaacacaagccaagacttccagaagttgttagctgagtccccgtgcttgtaattgcttctatttctcattaaaatatccatgaagtgttagaaaacttaagtaacaaataaacaaactgtggcccttttctcaaataaggacacttgttaagatataatcctacaaatgtgtgctaaagaaagcacttgaagggccatgtcacttgtccattgtctacataagcaaatcttcctttaagtgagctgatgaagggcaccattagaatctgaacaaaatgtataccatcagttattaactgaacaataatatgaattgtatgtttgaatggttg

SEQ ID NO: 55575 - DNA, 646 bp, Bovine  19866881448216
  misc_feature (1)..(1): n is a, c, g, or t
ntgctttctgctactctggctgatgaggtattcagaattgaaaatgttgagatttcacaggtcactattgtggggattatcagaaatgcagagaaggctgcaaccaacattgtttacaagatagatgacatgacagctgcacccgtggatgttcgccagtgggttgacacagatgacgcagtggtgaaaacactgtggtccctccagaaacatatgtggaagtggctggtcatctgagatctttccagaacaagaaaagcctggtagcctttaagatcatgcccctggaggatatgaatgagttcaccacacatattctggaagtagtcaatgcacacatgatgctgagcaaagtcgaacagccagccttcacagggagagcgcctatcagcaatccaggaatgggtgaagctgggaacttcggtgggaataacttcataccagcaaatggcctcacggtggcccagaaccaggtgctgaatttgatcaaggcttgcccaagacctgaaggattgaacttgcagaatctcaagaaccaactccaacacatgtccgtagcctcaatcaagctagctgtggattttctaagcaacgaggaacacatctgttccaccgggatgagatcattttaatccacagatgcaga

SEQ ID NO: 55576 - DNA, 730 bp, Bovine  19866881896554
  misc_feature (1)..(1): n is a, c, g, or t
nttttattatctaatggcactacaattttaatcaaggtatacttttctggatgttaaatacgtttaatatcactcaatatttataacagatcccaaaaggagactgtaggtattctgtttctataatgagatgctctactcaagtaattttagttggcagatacattgatgctgttatttattaaaactcttcaatatataacttcatatgtgtattaaaaaagcaataactttgattctaaatctttaacttacaactataatgaaagtatatacttccgcagttgaagaataagcaattaaacacttaatatacctcagtgaactgtgcaaaatgtaaaaatagaaaattaaatgcatatacacaaaagaaaatacaacattagcccactgtttggaggtaataccacaaaacccccaaagaacataggacccaaaccataaccacaattgacagttccagagcatacccgtgagcatgttgatatgaaagcaataaagtatttatcatttcaattaaaaaaaaattatgtaacttcttttcctagcagatatgttcctttcgcatagtctagaggacctttttcactatttgaagatgaaatgagccataatttttctgaatgccaagatctgtaacctgaaatacacacattatctggaaatactgacttctagagagaaaggctcagaataattttatagcatgacatagaagagtattagaaag

SEQ ID NO: 55577 - DNA, 2556 bp, Bovine  19866880139576
  misc_feature (1)..(1): n is a, c, g, or t
nacattactttgccacaaagctctgtctagtcaggctatagtttttccagtggtcatgtatggatgtgagatttggactataaagaaagctgagtgccgaagaattgatgcttttgaactatggtgttggagaagactcttgagagtcccttggactgcaaggagatccaaccagtccattctgaaggagatcagccctcggatttctttggagggaatgatgctgaagttgaaactccagtactttggccactcatgcgaagagttgactcattgaaaaagactgtgatgctgggagggattgggggcaggaggagaaggggacgacagaggatgagatggctggatggcatcaccgactcgatggacgtgagtctgagtgatctccgggagttggtgatggacagggaggcctggcgtgctgtgattcgtcgggtcgctaagagtcggacacgactgagcgactgaactgaactgagctgacgtgaagcactagacctaagcagtcttttgaatttagaatatctgtagcataaaggccttgcagtttaggacaatggtttagatctttttttttttctctgctggatttctgtgactacaatattttacctaaatttttgtggtgagaaaagttgagaaaaaatacagctgctttaggaatttgggaagaaaaaaatttccatgccatttggtttaaactaagccatcgagtatgactaagccactaaatcatatacgaaaagaccagaaaaagggttttcataagtgttcacatctgccaaattggaaccatgctaaggatattgaaactattatttcatttgatcttctaaaccaaccctgaaaggtaaatagatttatgttttacagcatgagctgaggctgagaactattacataccttttgcagggtcaagtggttattaagacatagctggaattcaaacccaagttttgacaaaccctgaacattatctaccttgctataggcacctgctcataaaaattgctaacatatccctaagtattaggactcttaagttagagttgcttaaagtattatgctacccaaaattaaaggagaggagagagccttcttttattagagcataaatgcaaatgtcttttccaaataatatacccaccaacaggaagcctgcagaaattaataattgtgccagctatcaatcttttcatgcataaaatcaaaatttgttactctgcctacagatgaaatgtcattttatgaaaagctaataatatgcacccacaagtttgcctgtcaacaccaatgagccaatagcaatctgccaaagctaaaattgagtataatattaaaatcatttgaacacaggcataaaattgcatagtctattcaaactgtgttgaatatcaatagaatttagcttttgaatgtaccagaggcttttggagttacaaaattgtggatgattatgacacaagagttcatcgtgacatacctagttgcagagctaagaactctcaagactaaagacagaagtgaattcctccaggatagaggtggggctggcatgtaacctccttgcttgtactctcaccccagggattattcatctttaatcccctcttgttgcctgaagttgtataaggattattcacttatttatttaattctatcataatcattccagaaagtaactgagacagcttacaaatagaatttttaaaggtggaataaactaaaagcaggagaaaaacaaagatcgagttacaaatggatgacagtgattgagatgacagaaagcataccatgaagacctatacatgttgctttaaattagcttttaatttggctgtaagctttgaagtacaaatataagaattaaaatttgagcatttgtccccaccccactcccccacatcccacctatttaatcttcacagagcactgaactgattttctatacttcatagcagcttcccactagctatttcgcacctggcagtgtatgtatgttaatgcatatgtatacttacagctgatccaccttgttgtgcagcaaaaaacaatacaccttgtaaagtagtaattggtcatagcttcagataatttatatcattaatcgaaaaaaattttaatatattttgcgattaaatggaacttgaactgttaaataataatttattaagaacataattctgattacatatagatactctgaaaaccatcatcttcaatttaatgcttttgaaactttcaaataaatggtgttttataagttagttttattggactttgtattatgcttaattgttttagtgttttggagaaggcaatggcaccccactgcagtactcttgcctggaaaaacccatggatggaggagcctggtgggcttcagtccatggggtcgagaagagtcagacatgactgagcaacttcactttcacttttcactttcctgcattggagaaggaaatggcaacccactccagtgttcttgcctggagaatcccagggatgggggagcctggtgggctgccgtactatggggtcgcacagagtcggaca

SEQ ID NO: 55578 - DNA, 3862 bp, Bovine  19866880462782
  misc_feature (1)..(1): n is a, c, g, or t
ntcatgttcgactctttgcgacccaatggactgtagccttccaggctcctccatccatggaattatctaggcaagagtactggagtgggttgccatttgaagaaacttggaacactgaaagagggaactggtcagttctatgagtgcacttggaattaatgaaaacatacttgaagccaaagctaaacaaccggaataaaaacaacagcaaaaaatatcccttccccttttattgcgagttaatgattgagatacatacaaactgatggactgtttctgagtgtttgctggtatctcagtcaatctcatttcagtgacccgtgttcgttcgtttttcacaaaccttatttttgttaataaataataaaagtccttttgaatattttttgccaaaagcgtttgtcaagatcaaactaaaaacatttctattaagttggagaagctgctttcttaattaaatgtaaaatataatgaactctttgttaaggaggcctgccttaagttaaagatgttgctgaggataaggggcttgagattcatgtctgtctccctgttgttaacaaaagcacccttttgttatgcacacacagctcagaatgtctttccttttccttttttaccatttccttcttttaaaattcaagacgatgatgacaaaacatggaggttaataatacaattcaagccaagcatattttttgtgggaaaacattgagataactaaggcaacatgtgtatgtttcaattatgtgcattctttctcagtttttcattttatcctcaaaaagagggagacagaaggcatacagacactagtagaatctctggggtactgagctcatctttgtttcctggggagatgttagctttggaagtggttccctgttcagcattaatcgcttatttataatgtgtcaatgagtttcctcttacacttaatatgggaaataatacaaaataagcactgtgaaaaatatttggcaaatagagcaaagaagccattctgttattgttatttctagtttcccagacaggaactgaatggaatcacattcttgtgctaatagtcattagtggagtttcaaggtgtttaaagatttaggaaagtaatattcacaaatctgttagcttttatattcatcgaagaaaactattaattactggcttgggtttataaatagaattctgccatagaaatttataactttttaaacttttaagacacacaataaaaatttaaaaaatagaatcgttaaacatagctgttaaaatataaagttaaaagagacagaaaatacataaaatgagtagaaaaagatggaatctatctaaacggaagtagacttgaaataaatgtaaaatcatttttaaagaaagaatagttacaagagacatactttattatcaactaatatgtcagacttgagagttttaactggtgatactttcattaaaaatcaatatgcaccatgatattaaaaaaaaagaccactgatatcttcaggagcagtgaaagaatacagtgtatgaaaaaaaaaaattatcatcctactctgtattactcctaatagaatgtttaattctccctcatggtcagacatctatgggtaaacaacaataccctgaaaggctagcaactaagatggtgcacgaaactgtatcacatgaaaaagtgacacagttgaaggaactgaacatgaagcctggaaaagaggagacttgggcaaatgccaggaaaagagggaggaactttctctaagtgttagaaatgctgttatatgaaagaagagccacgcttgttctgtgtccaaaaaaccatctgggctccatatagaggaaaacatgctgaaagtcaaaactgtatcattatgggatagggtgccatattagtcacagttcttttgctttcaagtagaaaaatgaaaaaataaagacggggtacttattggcccacacatttgacaaacccaagggtggagtaagctttgggaacaggacatttaagactctaacagtgtcatagtgctctctttctgagcattcatctccttgtgtttggcttctttctcaggccatacagggtgtgccaaagctgtaaatcacagggaaaagaaaacagctctctctctcatcttctaatttgtgagttattatcgagaaccgtggctgagtctgcatgggtgcgaaggtgccacttctgggactccttaccatagacagggggatggatgctatgagagattcagcccagggaagtcatgtgcctgtggctaaaagtgcagtgaccatgactgacaccagcagaatcaatctgagtggaagagaggacagtagggagctgtgccagcaacaaatcaaatcaaaaaactacaaacaaaaatggatgtgtaaaaagaagtaaagctgtacatcacagctgcttggaaaggtaatgagtttctcatcactgaatgtgttcaagcggaacttgcagaacagcttgtcaatacaaaaaggtcacagaggtcaactgtgggaccctgagcaagtcaccctctatttccttgtttagtcatagattcagcattgagcacacacagtgtggcaggccatgcagacccagtggtacacaagacaggtgggtgcctgctctggaggaacttataatctacagtctctaacctgtaaaagagattacctccatcacatagcgtgagtgtgattaaaacaaaagatgtatgtggaaactgacaattataaaacaatatatgaatacaagatagggcttccctggtggctcagttggtaaagaatatgcctgcaatgcaggaaacccaggttcaatccctgggtggagaagatcccctggagaaggaaatggcaacccacaccagtactcttgactggaaaatcctatggacagaggagcctgggaggctatagtctacggggtctcaaagagtaagacatgactgagtgtctgaacatattgcagaataactaatatttgtgttgggaaaggtgaaaaggatttaaaaccaaacttcatctctagaggaatttcatctacacatgctataagcatcctactcaactccatgacacagggcttgtgatctaatcccaaatgaattattttctccaataaagatcaagggtaaaaatactcagcctatgatttagggctaaagatttaagaaacagattatctcatgagccataaacatggatagagcttctaggacgggggtctggctgagatccatagtaagcttgacctgagggctctgtgagccagcacaaagcagggcaacttctcagagtagctagacggtctcagcacccagccttcttgaacaccattggcactggcttgctaagctaaagcttaagggacatgaaacaaccttagaaggtgggtggccccatcatgagagacttaaattaaagagcttgggaatagcaacatcttatccagcaatgtgtctccagtgcccaggcacagtgccaaacacaccttttgtgtggatagtgtaattagtgactgctgcagtcgcttcatggcaccccactccggtactcttgcctggaaaatcccatggatggaggagcctggtgggctacagtccatggggtcgctaagagtcggacatgactaagcgacttccctttcacttttcactttcatgcattggagaaggaaatggcaacccactccagtgttcttgcctggagaatcccagggacgggggagcctcgtgggcttccgtctatggagtcgcacagagtcggacacgactgaagcgacttagtagcagcagcagcaaaggctttcctaggtggcgctagtataaaaacaaaacaaaacaaaaacctgtctgcc

SEQ ID NO: 55579 - DNA, 794 bp, Bovine  19866880527158
  misc_feature (1)..(1): n is a, c, g, or t
ntacaatttcaaaatgttcacagtgatcctaagtaggctagggaaacagaaccgcaccctccatggatcacttcagttaccgtttcaccttccttaatcagtctgaattcaggttcaccttcaattttgacctttggtattgtgcgtcctgaggcattgttttaggagacaaattatcatgttaatgcagtcctttaaatttaccaaaacaggaaacttatttcaacattggtgttgctcaaatgtcaaagtgctttcaggttttatgaaatcgattttaaacagttcccattgtcttcagattgagtactatttaggagaacaaatgactcctgggtcaattagggtgctactaaaatgaatttcatcagctttagcacttaaactaatgtttaattgatccatttattcatagttataaattctgatcacatatatatataacacatatataacaaaatgttatatatgactatactttgtgaatcacacagtatgtacaaatttcagttgctctaatgatagctagtgtagatcttactttaccatactggtgtctattacttgcttttcttattatattttaaatttaatttttaagtacactgtatattatattttttatctaatgggcataactaaacatcaaaaaagcccaactttatgcctacctttaagatatgattttcaggttttgtgggaaaatgggagtacttaccttctctatgtgaatgctgcaaatatttactaattaatagttaaacagtccttcaaatgcaaaagttgtgttacat

SEQ ID NO: 55580 - DNA, 2783 bp, Bovine  19866880621993
  misc_feature (1)..(1): n is a, c, g, or t
ncaattcttcggcgctcagccttcttcacagtccaactctcgcatccatacatgaccacaggaaaaaccatagccttgactagatggacctttcttggcaaagtaatgtctctgcttttgaatatgctatctaggttggtcataactttccttccaaggagtaagcgtcttttaatttcatggctgaagtcaccatctgcagtgattttggagcccaaaaaaataaagtctgacactgtttccactgtgaaaccatttaggactcatctattgcaagttatataaaactgtctaggattcgtatatcgattagcctggtggccagctatagtttatcaaattctggtgccatccccacatcctacaatttgaagttgctttaattaggaaaatattttgggttttcaaatcttagaaaaatgtgtttgtttatacataaatagcataagtgtaaaacaaaacaaaacatgaaatcagaaccaatcgcacacttcccccaaattcttatgtataaacctgcctttctatcatttgaattttccacatatagaaatccttaagtaacaaattggtgcttctcattcaatactatcttgttctcaactggaagatacaagaggtttgtttcttacttttattttgcattctatgcttctagtgcttctgtcatatcaactccctgtagctgcttctgcccacagatccatagctggctttaagagctgtgtcctcttcctacaagtggtcccacttatctccgaaatggctgttccaagatgggggttaacaacagggctttgtcattgtgatgtttgtatctataatacattgtgcaaagctgcctttcttcttttgacattatattgtaagtatccctctatgtcactttaactcttcaaaaactttgtcctttataacactctaagacattttctaaatacaaaagcaatgattggtcaatgcaaacaacttggcagaagtaaaacagaaaaacacaagggatgataacacactatttatgcttatcattttagtgtatatacttccagtattttcttttgttattttttcaccttttctttttcacttattattctttaataaatgttttccaagtgattgtgtatttttttacactatgattacttaatggctgaatatcagcatagtatctgttgtatactattatcataattttaccaatgatcatgttaaaatttaattaaaaaaacaaatgtgatgactatccttatacatatattatacatatatacatatattatatttttagaaagttgcattaaaattatactactgagcccaatgtaaacaaaagacattttaaggcacttaagatattttccaaattgcattctacagaagctgttacaatatacaggaatctaccagaaatatgagggtgcctactttcacacactgtggctgctcaatagaatagtcaaagaattatggttcttcatgaatttattccaaagaggaagaaacttaaactattctacttacttttgcaataaaatacttgcatataactctgtctgcatttaggttggatgcctaaggacacagtgattatacttcaacatagaaaactaggctaaagtttccaagaaatgacctctttgttaagtatgcaaagaaaaacacattcgggggtgtttttcttgcatgtgtgtgtgttagtcgctcagttgtgtctgactctttgtgatcccttggactgtagtccaccaggctttttaaagctttttgaagaatattgttaagacatgttgaccatggttgttttgtgtgtttaataggtggaggcttaataaatgatgatagattgtgatagatcatgctgatgtaatatttataatatgtgacttggattttatattttaaagtattttaattacccccccaaagcttaaagcatagaatagtagaatataaaataaatgcaatttttagcacaataatgacacagtgatttttaaaagagggctaaatgtaaagaattgattagaattgttacatacagaagtatttcatggaaaataattttatgtaaggtcatttaaaaaagtgcacattcaacacacaagtattttatgaatcatatattgtcagtatctgccacttgttattcagaaaaaaactcattttctgtatgctcctctgctctaacagcaagattttgcatgtttgaatatttttaattatgccagatgaaaactccataaaacttcacttttatcactaaaacttacatgctaaaaccaatttatcacagtttatacagagtttacgattcagttcatatgtatgaaaaaatcttactaccttcctcactcagcttttcctttgagaacactgttaacccaattcctaataaggaaactgctctgcacatttacaggaaaaaaggcacgggtttccttggcaactggagccatgtgcagtctctcagaacggctcctcctacactcaggtttcctaggtagcaggctgcatatattttataaagacaataggataatgggagagatattaccctgttcaaacttgcatgtgaaaagcttcaatgggaaagatgcatttgctataataactggcaatttgagagaaaatattaattgtataataaggttgcttcctctgtctaattcaggattaataatttaattcaaggtccaaaatatattatgtgttcatattttgaaccttcactaccaaattaactcatataaatttgccgcgaagcgaaaggtaaattgcag

SEQ ID NO: 55581 - DNA, 1015 bp, Bovine  19866880743075
  misc_feature (1)..(1): n is a, c, g, or t
ncccacacagccttggatccctgaccctcacttgaagaaatagactgattcaggggaaattctagatgagctctgatgttccgagcacatggctgatactttctgtcccgctgtccttcccttcacgttatttcttctgcacataggtgtggttgagaagccagatgtccagtaggacactcagtgtgtgtggccgagaatgccacttcttcaaggctggtttgaagtagtgccttttcaacttggtgtataaagacatttaacagcttgacaaaaagtgaaaaagttttttttttttgtttggttttggttttttgaactgtgcccatatagtatcagggatcttagttccctgaccagggatcgaacctgcacaccctggcagttttaaccactagaccacaaggaaagcccctaaaaagtgaaatgttttgttgatacttttacttttattgtttttaaatatctaattgtagctcatcttatagcccaaatacctgcctagtgggctgtttctgctccctttcctttcctatggtttggaccaattcagtatatgtacctttaaactcatgactgcctcttaagtctttgcgttcatcattcagtgcagaatagacactgttcagtttcaccatttccatccaagtaatgtaagcacttgtaaatattgcttataaaaaggtctttcaatatattttgaacttttgtttcattgactcaacttgcatttaactatggcctaagatagaaaccaggtcctctggggttagtttcttttgcaattgttggtatctgtgcctcaaatttacttgtggaccagaatagtcagataaatctgggtgttagtaatgagaaaatttggggatagcatttgttcaacgttctcaggacagcataaccagggaagaaattccctgattctcttggggaaattcctcaacttcctttcccagttcacagagctatgaaccaaagcataaaaggatcttctaacttggctccatctgtggcc

SEQ ID NO: 55582 - DNA, 799 bp, Bovine  19866881022835
  misc_feature (1)..(1): n is a, c, g, or t
ngcagagacattccaattgttacttagtaaccactacacaaagaaaatatggacagtaatgtgattaaaacatccagcatagtgtggtctatagtaaacactcaacttacactgttttaataaatattgaacaaaaaataaggccacaaagcttgactcaagagcattataaattcaagtcgatctcacttttatgagaatactgacccagacacccctgaaacaaaacaggatgccatgaaaagagacaatccttaaccaagacaacattatgcatatttttccaaataaagaagaattaaagaactcattagaaaagaagaaatttagaaagagatctgttttgtacgattacaaacattaaatctgttataatcatgagaaattgatgtatccacacctagagtttttgtcttctctcatcacagagtctagatttttcaagggaagaaaaaattctgaacatttaagacaaaattctaaaaataacccccaaatttgggttgctttgctgcttgaagtttcacattttcagttttattattaggtttccaaatgtctcatgatttctttctgacatactaacatttttgtaatcaaacccaccagcagagtcctcacatggtgccaccactcaaagtgggcagtgaagtaaactgcatggaaaccaggggggcagtgtttcatttgaggggtaagggggagggaaatgaccagctaccttcactgaccgaaggacaagagcatcaccagatacaaacatgctcggttccacaggctccagaggaaggtaggattt

SEQ ID NO: 55583 - DNA, 3939 bp, Bovine  19866881094895
  misc_feature (1)..(1): n is a, c, g, or t
ncccagcttgagcagcagagctttagatttatctcggtcccacgttgaggacagtttttggaaaagtgttaacctcccagtgtaaccgctaaacaatgaaagaaaggcatgcagtacatcaaagcaaatgtaagggaatatagtcggaattaagccacagatctgtgaggccctggtgcatccagaatttacattcctctctcttcaaagcccgtgtgtttcccagactcttccttggactcctaaaaccagccttctactcccacaactgcactcttaagagacccgtgtccatgacctaactgacaaagccaaggaccctcataatgttttcattgtgtgtcctggtttaaactttgtaattaatcatttgcatgactgtttaacacctgccttgccacattagactacaaggtcccataaggacatgtcactttctacactctgcatgctcactgttttatatccagctctaagcacgacgcccagtgtatagtagtgacttgacaaatattgttgaataaacagaaggtaacttggggccaccttgtacggaggtttcaaatgtcaggctataaagcataaattcattgcaaaggcaatggggaggcactaaagatgtcttgggcttccctgctggttcagtggtaaaggatctgctgccaatgctagggacccgggttccatccctggaatggaaagatccccttgaaataggaaatggcaacccactccagtattcttgcctgataagtcccatggacagaggagcttggtgagctacagtctgtagggtcgcaaagaggcggacatgacttagcgactaaacaacaaaagagatttcttagcttgtgccacttgggtttgacaacatgctggaataatcattctggcaggatgtggcagagccatctggattccaccacagggcccacaggggtagacacgtaacctcctgcagcagacaggtgaacttaaacaaagcttccaaacaaataaatcatgtgagtcaaaaactctcttaaccagttttgtttgttttgttatttatgtgtgtgctgtgtctctctcctctcactgacatgactggttaaccatccaaactaattaaaatcacaggcaattagggttacaaggctgacagccaaaatcagaaggaagtggcttctggtctatctgttgttgttcagttgctcagtcatgtccaactctttgcaaccccatggactgcagcccgccaggcttccctctccttcaccatctcccggagtttgttcaagctcttatcctttgagctggtgatgatgccagccaaccatctctgatctatttagtaagacctattgctgaaggagctttaactggacttcagttttgtaaatatctgaaaatggcctgagcatctgtccaatttctccttctagtaattttattacctttcacatagtgtcacaaatgtttcattttctggtctgcagtggatggcagtctctctgagccaggaaaaaaaatttggctggagagactctggtctaagcttgggtatcccttgggaaacaacctcaattacaagagaaaaagatcaggctatgggtcagtctcaatcagactagggcaggtttttatatcgtaaatcagcatcgtcattcacattttccttatgctgacttcctggagctccatctccaactccatctgttctagactcttgtttattcaacccagtggatttactaaacctcacctcatctcatgagccatgaaaccatattttacaaactatatggaaaatgtgcagttaacttattttcagacattcctggcctatactacaacgaattcattttcctcctgaattttatttcagtaaagacagccaaaaattccaaattcagcattctatatctggtagaccgaaagaagtatgttttattttctaatatttgaaagtttcgagattattttaaaaaataaaaataaactcccttcagagttgtaaactttggatattcaaaatcttatttcccctcaaattattaggactacacccatatataaccaaagaaagcatttatagtcatagacccaacaattctaacaatgtggtatcactattctttagggacagatatgataataagaagaaataggcatcaaaggagaaaatacctattaaagggaaaccattgacatcataatggtcttcgtactttggaatatgctagagatgggtcttatagcaatgaattatccaagcaagtatgtcactgtttttcctcactgtacctgtccctggtacctggtatagcctgacggagcaccaaatatatatttgttaaataatattagtggatgaatgaatgatctttgatttgaaataaataccttaccggcagtatgatactgtgttctccccacactttttcactcataatctattgcatctaaaggtcacataaagttcaatttctgagtccctgggtggcctgatgtagtcccatggccttaaacaccacctatatgctgacaactctcactccacctggacttcttccctgaatatcagatgtatctatccagcgatctacttaagtacgtacatgtgtgtgtgcacaagagcgtgaacaaacaatgtatccaaagctgaactctggatttctaatcatctccccactccacagcctgcctcacatatactatatcatatcattcagtcttaatcatatcagcaatgataactccacacctcagactaaagacttggggtcgtctttgcccctcttcctctgcatcctatacccacctcctcagcagatcatttgctctatccttggaatacatactgagtccaacgacttcttcccactccagcactaatccttctattccaggtgaaggaagttctctaacggggcagttaaagtaataagactggatgaaaaaatgccatagaactaagtccaagagtccaccttggtcttgcttgtgcctgcagatagcttagaatcaaggcctgcaataaatctcaggtctgagagaaccaccccctcgcttaccaggatatgtcagatggcccggatgtatgtcttggacaaagccatgctctccgtgtgtcctcagtctgaccacagctatggaggttaatgatttctccagagcagtctgagttttcagagtctggtttactagcagcctcctgaccatgcctgaagagtgataattcatgggaaaaaatgtcctgtcttgacaaaaaaacgggggaaagttttagttacttcacattacagactaatctccttcatctgaaggtcatgctgcattcatctcactgagatcaataatattggccatttatgacattcattttgaaataagaattgtatttttttaaaaccttaagaagctatcaaatcctgttttcaagacatgcctgtctaggaccagtcccttccttctctttttcatgctcagtgacatgctctgaaccacaattcctacagccttaggaaaaggctttcatttttgaaaagtttacacaagagaagcatcaacaatagcagtaattgcaatgcaaaattactctccctccctcgaaaacattttaggtcctcttgctatccaaaaagtaaatgtcactggaaaaataagtttctgtgaaaatatctgtataacaactctatttaaaatttattttgctgaattgtaattaatgattcacagagtaacattttcttgctataaatcagagaaggattacctctcaggagaatttttgagttttaatttttcctgtaatgatctatgctacatcccaaagtacatctgctggaagaggcatctcattttctctaaaaattcacttgagcaatgaattacaagactggaattaaatagtcatttttataacaaatcaattattatctttagacactttgtgat

SEQ ID NO: 55584 - DNA, 1570 bp, Bovine  19866881096981
  misc_feature (1)..(1): n is a, c, g, or t
natatttaagagaaatcccttattggttgaaaatgtagctcacaggccaagtgtatacttgatttgataagaattacacataaattctggtcagagattctaattttagtttcagttgacagtgcttatcactatgtcctttttggaagtcaccagtcctttgactcccataactggccagcgcattggctcaaaccctggctgtcctaatggtctgtgggaggctatttggcaacaattattggaacgctttggaaacattatttaagtcccctaaacttcaatcttctcatctgtaaaatggagaatattatagtctttacctaatagggttttttttttttaaggactaaaaaagtaatagtgaacaatatatgaatttaaaagcgtttttaatgtaatgtttggtaaaacaaaatctagtatgattgttataaatatcatcatcaccatccatcagcattttgtctggttgcttcttctcagtctcacttactagggcctcttctatttatcccttgaacactgtttctttagggatcaaaattaagcccagtgttcttttctttatatatatatatatgtttatatttatatatatatatatatattttttatatatatatactccctgaaagttggctgttctcatgttaactatttcaatgtttgccaatttattcttccaaccattcaataacactttggggcacccattttatgccagtcactcttttaagtttagggaatatagcagtgatcagaacagacaaaacctttgcctttattcaaactgcattctagaaagacagaaggaaagacacaccacatgagtggaccagtggatgaataaatccacgaatgaaggaatgtcaaatggtaaaggccatggagaaaagtagagtggagtaagaggaaataaggggtgtcaggggcaaggagaggcttctgccttatacagtgtgactcagaaggcttactgatacgatgacatttgaaaaaaaggctgtagaaatgtagataccaagctaagcttctaactaagagcacagcactcctggaagagagaacagcaagtgcaaaatcctgaggcttgagtgtgattagagtatttggccaacttgacagaagtacagttatctagattaatgtttcatgccatgacttgcataaactttctaattaattataataatttgtagattaaacttaatgtttatacaaattaactgaacatactttttatttcttctagtctttatatcttttatttttactctttttgtgatttaaaagagcctctagtagaatgtgtatggaagaacaatactgagaatctttgttcttgatattaacatgaatgtttttattatttcactattcagaatgatataaatgtaggttttggtagacactccatcaatttaaggcaaatattttgtctacttcattcctgatttgcttagatttttttttcttatcatgcaaggataaaaatgtagtaattggcttatttttttgcacctagtaagataataatttagttccttcacctttacctgttaaagta

SEQ ID NO: 55585 - DNA, 998 bp, Bovine  19866881192741
  misc_feature (1)..(1): n is a, c, g, or t
ntatttatatatgtattatttagaatgcagcatattttgttttatttttggtttttttttggcctgtaccacacaacatgtggaatctcaatttcctcatcagagattgaacccacgccccctgtgttggaagcacagagtcttaactactgaaccaccagagaagtcccttccgtatcatttaaaaagtgtgtcttgaccttgtggaactatggtatgaaaacgctgtgagtcatgtttggttctaggtcatctttgacttcttatgaattctttttagctgtaactgcaaggttgcctggaaagagactgcatagcaccacttgtcaaactgtaattttgacaagcaatattttctagaaacttttcctcagataaagcgcattagaaccattttatagaaatctttatgtgcctataaaagtttaccatgcaactcattcaaaagagatttagttgctgaatggtgacagtacagtcgaagatcatcctaaatatttgactcagtataaaaattaccatgtaaacagtaaagtacagtacgctatgaaacaaaaagcttgtattaaaggggttttagttatttatgggattgaaacaatgctttagaaaaagttatttatgatgaaacaagtgcaaattatcagaattattaatacatagcacttttgtatactttcctcatagtcttttcaaacatgctactcacttctctaatgttcctatgaactattaaactcatattggtaaacttctgagaaacatttgttataagaacagtctctgacaagggcgtatcttttgacatgtaggccagtatgggtattttatctcgttctgatgcacttactgtgcggtacacgaagactctgagctgtttgcctccaatggtctcaagtttttgtccattgtaaagttcattgaggccaatttttactttcaatatatgattctggagaattaatttaagaaggcgcgatccatgctcagtgtatcat

SEQ ID NO: 55586 - DNA, 1275 bp, Bovine  19866881328111
  misc_feature (1)..(1): n is a, c, g, or t
nttcttactcagtttttatttcccatcagtatctagcatatagcaggtactcaatcaatatttgtttaattaattaatgttactttaaaaattgttgtaggtgcttcctaattacagtaatgttttacattccattaagtgcagtcatcaatgttcttaatgcagtagactatacactttgattcttgctttattcttattttaaagcttatctattcaaaggacagactcctcactcaatttatggctactggtgacagcagaggttagaaaaagctaattaaagattcttatcaaatattatcaaataaagatgccatttaaataaaaaattacatgaatatcctcacatgttcccacaccattactttatgtgacatgtttgtgctgaatcagagaccttgcaccggaaatctcattattggttttcttaggattatatacttcttagagatgaggaattgctcactgatattagcaattgctttgctaatattgatattagcactgaaggaaagttgcaaggctcatggtagcctggggttaaaactcccctccaggtcctccccaccattctatgccaaacaaagaactctctcacccaaagaaaaaaatggacattaaggttgattacgcccagctcccagctggtccagcctctggccgatctccaaaattccttgccccaaccgtttaagagataactactctgaacaaccttggagaaaaacagacccccttaagacagtaactttccacatacatgcctatatatacctactcttttcttgggtaagtgcagcagctcgctaatctgactgctgccccttcttgcgtcattaaaggtgatctgttcctgtaaagtgccggcctcattcttttttgaacctcgccttctctagctcccttaccttacaagcaccacctttcttgtatggtggtggggggcatagcagggggttgtgagctggtaacagtggcccagggggagtttggtgtttgcctgtgcagtgtggctaagtgagtattaccgtttggtgcagatataaatggctcagcacctgtcatcctaatcacactttcatgttttctattgatcccctgtagtcatttgagcttctgacccttaatgtgaatgatatgatttagggacatcaacccaggtgccaggcgactagagaccactcccataacccaaatgttaccagaactattcaaactagccagtcctaaagctgtttacctgcccctgccttgcctttcctgcagaaattc

SEQ ID NO: 55587 - DNA, 2768 bp, Bovine  19866881329583
  misc_feature (1)..(1): n is a, c, g, or t
ncataacagaagactctacacatggacatcaccagatggccaatactgaaatcaatagataagaaggtgtcaaaaataaatgggcactgattttactttatgaagcttggaaaatagcactcttttaggagaggtaataatgagcagtttgctccccttttctcaatgattccatcctattctgaaccaccagctctggtctatgttgctaagcctaggaaatcttcacatgtttgtagtctgctcttttccaaactccaaaagaacaacttaataatgcagctgagaccaaatcatcaattagcaattcatcacaggatatctagttcacaggaccttagatagaagcccatctcttagtgtaggagacactaacagttacatctgcaggcgtagcctcctagtacatagcctggaaagaaattcaattaaatcaacattctgagctctggctgtaacatttatgttactgctgtacatctggtgtccattcaagagctcaaacaaaaaaggaagtcacagctgacattattggtattggatcaagcaaatagtctattgctttagggagggaaaaaaaaaaaaaaaacctaaatgaaacaatgagggcttgaaatatcacagagtaagcatggacagcctcactgaaagaaatttgctccatttggagaataagtgataaagaaagtaaacacaaatgaaaaaaatacacaggtaatacacatggaaatcaagtactttttcatagaagaaactataaataacatatgatttatgtatatataaagaatgtatgatttatatgggctttccagttggctcagtgggtaaagaatctgcctgcaatgcaggagacatgggttcagtccctgagttgggaagatcaagatcccatggaaaaggaaatggcaacccactccagtatttttgcctggataatcccatggacagaggagcctagcatgctgcagtccatgaggttgcaaagagttgacttgaagggactgagcacacacacatgatttatatattactttagcagaaaaaaaaactcaatggcattttaaaaagttaaaaagacatgcctattcatggtcttgtgtgtggaagtggctgtaaattccttcttcaaatatttactgagtatttaacttcataccaaacactattctagcaccagcattgcatgttgaacaaggcaggtatgattctttccttcattgaacttattttcttattggaatggatagaaatattcaagtaaatataggcttaaaattatttttgaaattatgaattctatggagaaaatcacagtaagaagtgaaatcaggagttagtgaggtgggtagaaaattatgttggatggtggtctgaaaaggcctctttaaggtgggaatttgagcctgtttgaagagtagagtacaggcactgagctccaggaaaagaaagaatgacaacaaaggctgtgagccaggaaaaatcttggaatatttgaggaaaaggaagataagcagggcgtctagagaacaatgtatgaggaagagggaagtcagagacatggaagtcgaagacaagttcagagagcagtccctctctagctagtcatttgttatgacttacagttcagctatggtttgtccagaagtcatgtaaggatgtgagagttggatcataaagaaggctgagtgccaaagaactgatgctttcaaattgtggtgctggagaagactcttgagagtcccttggactgcaaggagataaaaccagttgatcctaaaggaagtcagtcctgaatattcattggaaggactgatgctgaagctgaagctccaatactgatgcgaagagctgactccttggaaaagaccctgaatctgggaaagattgaaggcaagaggaaaagagggtgacacaggatgagattattagataacatcactgatttgatggacatgaatctgagcatactccaggagatggtaagggacagggaagcctggtgtgctgtagtgcatggggtcacacagttcaggttaaaaatgtgaaataatagttcatttcactggtactttaaaagagggcaatgatgaggtcagctcttggctgggctctggattaaaggaaatttctgacgttgacagctgcccctgggacagtgattggtatcaaaaaccaggtgtcagaagcaagcagttaggaggaacaagagaggaagattttgggggtataacctactcttatcttttttctgagacatgtttacaatacctctttggactgagaagcagagaaattccactgatttagaagcataagattttgtgttttcactaagaagttcctaagatattgtgtaatggaaatatttctttctaaaccttgagtatattctccatgggttattgcaattgtgttatgcaactcctgattcctattagctcttatattttatgatcatttgagacttggatctagctgtagcaagactgaggcaagggatggttaaaatctgaatgtacccagaatcagttaagatttcagatttggggaagaagaaaagttcctaacaatttggcagaacaatacaacaagacaacagatgataagcagaaggaaggtctggagtcactgagcttccaaaagtcctgtgtttaagggaaaattacctcgtggaatctcagaatggattccatggaatctgagagttttatgtcaaaatttcaacatctagaagaattcaaagaggaaggatttgtcgggaaagg

SEQ ID NO: 55588 - DNA, 1649 bp, Bovine  19866880068347
  misc_feature (1)..(1): n is a, c, g, or t
nctgattggtgtttttctttctggctatttactctgtataataggctccagtttatccacttcattagaactgattcaatgtattctttttaatggctgagtaatactccattgtgtatatgtaccactgctttcttatccattcatctgctgatggacatctaggttgcttccatgccctggctattataaacagtgctgcgatgaacattggggtacacgtgtctctttcccttctggtttcctcagtgtgtatgcccagcagtgggattgctggatcataaggcagttctatttccagttttttaaggactctccacactgttctccatagtggctgtactcgtttgcattcccaccaacagtgtaagagggttcccttttctccacaccctctccagcatttattgcttgtagacttttggatcgcagccattctgactggtgtgaaatggtacctcatagtggttttgatttgcatttctctgataatgagtgatgttgagcatcttttcatgtgtttgttagccatctgtatgtcttctttggagaaatctctatttagttctttggcccatttttagctctattgacttccgttgaggtatggaagaggaataaaaccccatatctacattctaacacagtcccctcagtgactctggggattttgctttgacattcactgtcatgttttaagggttggaatattatgtctgtagggttattttctttcaaaataaaaacatactcaagattgtgacaacaacaaaatcctctaaccaagtaactatgtcattttctgtatgtacacatcaagtcgtgtaccacacaggtcatcagtcccaaggaagcagaatgccatgcaccactcacctaccttgaagagggggcccattgcaccttggtgttggagtcaccgaggagaacacaccagtcaagcactggatggaacagtgctacctacacaaagaagaggcagaggaagatcagcttcagtagtgacctttggtccccagtggccagctgtctctcctgatggccaactcagggtgactggcctacgctcacgattgtcttaaactatggtgaaaggaaccttgatccttcttgtggaatctgaaacgctgaaagctgggcggtgtgcctgagggccactgacacacaggcttaagcagaaccaaggagttctcattgtgcctgaaacagggaaagatattcccacacaaagtgataaacccagtacaggctgtgtggattccctatctcttcataaggaagagttctagggccaaagcccattcttttgtagctaagtgggggtgaaaaggctgcaggcaggagactgctttttctaacagctcttttcctttatttgtagttttatagaagattcatctctctctgctcttagaagtgattctgcatttctcttagtgactcccttccagtgttcaaggcaattgtgacaacttaactatatggaggagagcatcagttttgagtcaggcagagtcaggtttaaatcctagattcattgaacagctgctgctgtttggcattttcaacctttgaactgggattatttcaaggaataaagtgattgcagatggaaagtatgggttccaagaagacggtaccaagaaaca

SEQ ID NO: 55589 - DNA, 1249 bp, Bovine  19866880442511
  misc_feature (1)..(1): n is a, c, g, or t
nctgctgctgcagctgctaagtagcttcagtcgtgtccgactctgtgcgaccccatagacggcagcccaccaggctcccccgtccctgggattctccaggcaagaacgctggagtgggttgccattattcactagttgatataaaatgcttaatagtaggccaaaatctcttttggactcaggccttgcattgctaatgagtgatacacaaccactttagcgtttcaaatggcagtagccttattggttacagtgctcagggtgcattatagtctgcatattcgttttcaggaactaatagaatggttgccttaaatgagttggcagtatatcgagataatttagagcatacttatgtcaatctttgatcttaaatattaaattggagtgcataagatacatattttgggacaagcactctttcagagtttaggctcataaatatattgattaaggcatcatatgtttaaagtactgatagagacatctcatctgatttgtttatttctagtgattcttaagtatctttgtaaatttgatgaggaaacaagcaagggcacctggattgtctttacatggtttttacttgatattgacctatatcattcctttaagctggtatttgatatgggatctctgcactgcaattttagtgatttctgaataggactgtaaattaagtgtattctcatacctttagagctacaagttcttattttgctttattttattttgtttctgaattattcatacagttgcctcaatattctgctttgatttgctatagagacctaggtttatttatgttaatctcataagaatgatgccaaagtatttttttctgttggctttgaaggtgcttttggaatttataaatatttcagtaggtagactcaatgaattttagagcaagtatagactctgaattcattctaatgttaaatctcagagagtttgagacttcgggtcacaaacatagaaccaagctgttactagaacctacatttttaatagtcattgaataaagctgttcttggtgttgatataactaaatactaaattaggtgttccacaggattctagtggataaaaattgacaggtggaagctaaggctaaattatctacttcaaatatctgcctctatagaaaaaagtcacaaattacttgataacaagggtaaaatacaatagcaagatgcttctgcacccagagtattgaagtctttcctgccatcaagaaaccttacta

SEQ ID NO: 55590 - DNA, 4434 bp, Bovine  19866880522399
  misc_feature (1)..(1): n is a, c, g, or t
ngcctcctgcattaacaaataagtatgctctcaaggagaaagaacaaactcagagaaaattgggttgtctgttctcgaagtctaaaaaaaggacttctttcctcagggggaatttagtattttcataatcacgtagaaagtaaaacatgtgcctcttgggtataacattaaaataaattaattttgctgccttattcataatggctaatagcaaatggagtgtttatttcttgactcctcttgctcataaaaccaggtttttctaggaccttcatctcattaaagatgaatagctgtgtcaacttatagggatgaagaatgtggtctctgcttctctatttttggcattttattaataggtgagtggtcatggggaataacaagaccctaaagcatcattgggaaaagactctgatgctgggagggattgggggcaggaggagaaggggaggacagaggatgagatggctggaaggcatcactgactcgatggatgtgagtttgagtgaactccgggagttggtgatggacagggaggcctggcatgctgcgattcatggggtcgcaaagagtcggacacaactgagtgactgaactgagcatcaggatctcaacttcatgttatggaaatataatcgtctgtttttttctcttctgttcttgggatgtacaatgtcttctattccttggaaatatgttcacttatgattagacactgctgacagcctttagattttcctctgttcagcccaaattgtggttagtttttctcctattttgtcataacacacacccgattttccttcacctgttcttccacaattagcctctgtctgtatacccattctcctgaaatactagataatttattcagtcatgtatatttctttggaattcttcaagtttggtatggaagagaaacaattcattgcagatatagatcactacacatcatagcttctagtaagatgagattccccccccctttttttttttttactaaagagtattaaaattttaaatagttgacttttatgatgttcaaagtattggcaaggtatgaatgagatctgcaattgacactggagtcactgaaagattcagaaaaacagcagaccttctaggaatctccccagctgacaatgttgtagctgttaactggaaccctaattgttgttattcagttgttaagttgtgtctgactctttgagactctatggactgcatcacgccaggctcctgtcttctactattccctggagtttgttcatattcatgtccattgagtcagtgaggctatctaaccacatcatcctctgctgccctcttctccttttgccttcaatctttcccagcatcagggtcttttccccaaaagttggctccttgcatcaggtggccagagtattggagcttcagcttccgcatcagtccttccaatgaatattcaggattgatttcctttagaactgactggtttgatctctttccagtccaaggaactcaaggtcttctccaatactacaatttgaaggcatcaattctttggtgcttagttttctttatggttcaactctcacatccataataatgactactggaaaaatggtaactttgactatacagacctttgcttgcaaacaatgaagcagaagtaaatacttttctgaaattcccttgttttctctattagggaaccctaatatttcctcacaaaatatataagcttttgcaaatgagtagttgccttgtaatcacaggcagatttgcacaagtctgggaatattttgagggaccataaatgtaaccattggttttgtgccctctttgatttttctttccaaagttattaacagttttgacatttggctaagaagcaatattatccaagcttgttttaaaattgctacctgcccacttactcaaggtaaataattcttcctagtacattgattgcagactaaaaaacaatatatatatttttaaatgtgcttaatttcatgggactaatttgaaggaatagttcttacttgcaaggcagagttaagcctgggtaaaaccagaataatcacccttaccagagaaattgggggaaaaaaaaaaaaaaaaaaacaaactcctgctaagcatttcttctcagctagaaactggttgagctgaagcacaaatgttggattcttttgccttgttctaaccgagggacaagaggtacgtggctgaatatgggagatgagcagtaaagggaagatactgctacctgcagggaaagccaagcaagcagggctggatgtgttatctaatccagaagaattcttcacataaaaggagaaactaatcttcagtaaaaacgctaacatgtatcttgaagccattttttctgaccttcagattacattttacatcaagattaagaaaagaggaagttgtcttttcccaggagatttctgccccttaacctggtactgttagtcttaaacatgattaaccatttgacatgacttcccaaactacagactgtttgtattaaacacatattacagtttattttcctgcatataattaggaataatcattgccgccagaatgtaaaatgatacatcaacaataagtagagataacagtagctggatgcaagaaaaggcgtacaaagcacctgaagcttataattacctttctctccctaccccatgtatttgtgtcatgatgcatctgaggtaacgtagacctcaggtagtcattaaaatcacatgaatattccactaggatttactgcaaataagatatcccattggtacatggatttttatcaataaaaaaggttaataatttggagtgtcttttaccaaaacacgatttcttttcaggaagtttgaatttatacatttaacagggtactacttctgtgctagtcactattgctgctgctgctgctgctaagtcgcttcagtcgtgtccgactgtgcaaccccatagacatcagcccaccaggctcccccgtccctgggattctccaggcaagaacactgcagtgggttgccatttccttctccaatgaaagagaaaagtgaaagtgaagttgttcagtcatgtccaacttttagtgacctcatggactgcagcctaccaggctcctccatccatgggattttccaggcaagagtactggagtgggttgcccattgccttttccaagtcactttgaaaaatacacaaagcaaagaaacacgatctctcttcaagaaacttataatcccctcaaatgtggagcaagacaaaacagatgaagaagaaatatcatacccattgaattttgctaagttgtacagtctgaatggcataactttgtagaaactttgagaaaggaggtcaggagagatgtgtaaaggaagtaaactagcattaaattttgatggtggagaaggtttatgtagattaagataaagtgaggtatcagagatggtgcccatgattcacaggtgtttccaacttagtcttaattagattctcttcctattatctgagctttattacattctttcacttaaccaggattttctaacatatacaaataattacacttagcatgagagagagattcaaaagcaataaaactccccaatctgatctagcttagcaacagaatacggattcatcaaactcctagacaacaaatacaaagtaaggtcctttgttttatcattccatgggtatgcgaaccatatggctgtaaccttcctaacattttctctactcataactcagaaagtcctccacagcaggccaaacaagttttggacaatccaaaaacttacactattttcagtttcaggcaaaatttggcaggtatgtttgtcagagttttgctttcatttgacttgttgaaagtgaaagtgaaacaacgtaaaacaacatataatcaaagtggtttcaatgagaccttacaaagtccaaaagaccatgaattgactcacttaaaatgttctatagattatgttttaatttatgtaaaaacagtttttcagatttgtgaaaattacattttatctatgatattgtgaaatctgtgatattgtgatatctgtgaaatattgttttcttctttatggcatattataaacatctgtctgcaaaacacaggttgggcattttaagtcatggcttcattaagttatttagcaaaatatcttaatcaaatcttgcctaaccttatagctaaaggcaggtttaaatttagcaacttaaaatgtttcataactgatttgcattgacttgtatgcattgtactaagtcacttcagtcatgtccaactctttgtcaacctatgggactgtggcccaccaggctcttctgtccatggggagtctccagacaagaatactggagtggtttgctgtgccctcctccatagatcttccgacctagggatcgaaccca

SEQ ID NO: 55591 - DNA, 1649 bp, Bovine  19866880577630
  misc_feature (1)..(1): n is a, c, g, or t
ngtgtcctggcccgtacctgaagccgagtcctttacgcgttctaccaaaggagtgatcgtgcctgccgtctgggtgctagcccagagctcctatctgacgtctgcccaagagctttgttgaaaagctacttccctccacgtccagcccattttcagccagggccgggaaccattttgctttgctggctctttgtagtttgatcgcttctgctgtgtctcagtgggacgttccatgttttatttgcctattctgctcactgcagctctaaaaccataggacctgccaattaatctattgtaagccattgtgtttttcagaccacagcaagctcaacttcagtgaaaatggacagagagtgatgaaacagggtggagtacattagataagatgccccaaggagtaaggacactcgtacaacctccagggacatttcttagccatagattagtttacctgtaatccccttgagcgttagtggttcacagtccagcgctctgtatcgttcatatcacataggatcagagggctgcctggactacaaacttgaaactttttttttttttttatttcagaaaatttcaaaaagcaaaactttttttttaactgcaccccagcaactatctacatagcatttacattgtcttagatattataatctacaggtgatttaaggtatgtgggaagatatgagtaggttataagcaaatgctatgccattttacataagggaattgacccaaggaggggtcctggaaccacattaatcctgagtgaagactgtatagactctggaatcaggttaggcaggtgtagaattctagttctatttaatgatggaatgactttagaaaagctgctttaatctctgtaaatcttaatttcttaatctccaatataagcataaatactaaaatagccttacatagttgttaaatcagacaacacctataaagcacttagcacaagaatggtaaaataataataatgatcagctttctaacatggtagctgtttgatcactgtcatcattttcttctactgctttagagagtgtcccaccaactgctcttatgagtgacgcttattccctagaccatcccaaagtgaaacatcattaacatctttccttcttctttcataatctcacattagattcatggaatgatcaatattttctaatatagttaaccaatatttagtataggaatgaattgccttcaacatattgcacaggttttcatgtatttggtatttttggttcccttaaacacagtcataaccattcatgaattagtatacctgggcttagacaggaaagagccatcttcaaagagaagaaaaaaacagaggcaagttgtattggacatttagttcatgaatcagggttctagggatttgagttcaggttttcagaatgaaatagaagagaatgaattatagctagtgacagcagagaagaaagaaatcctgatgagctagacataagggccatatttcttaaaacaagagtgaatcatgtcattgtctaaaaagcaccagtgtacctaacatgcaagagaatatttataacaaaactgtcctggaaaatctgggacttagtggttactatcagctaagacaacaagtcttggagagtccttcatatata

SEQ ID NO: 55592 - DNA, 3289 bp, Bovine  19866880594599
  misc_feature (1)..(1): n is a, c, g, or t
nactgaagaaagaaaacaagttctcagtcccacttacaactgaaatgcttacaaaatgttgactcatcctaatggaaactatgagactgaattggtacacatatgactaaaattcttcaatatgaaagaagcattttcttaagccacatccttttaataaatatattattaataaatatcagagctagactagagagctgattgtttagaacatgcagcagaagttgtggcttaagcctcagtcatctaagtttcttggctttttgatataacttagattatacatctcattgtgaaagataattaatttggagaagctcttaacaatattcactgaagataacttgtatttaaagccttaaggctttgaggaaataaatttgctgtcttcattatataaaattcacttggttttttgatgcacaatgtatatatgaaaaggtcatgtttcccaatcaatcataattgtgataaatgttgacaactgaagacaaggaacaaactcaaggtaataataaggaaccactctcctttcctcactgaatgatttctgatttgtgtctttgtctcaacccagctcagaggtcacagactgtggggccatatgtaaataacttcatcccaaacttctcctagtcctaaagtaaagattttgtctatgtaacatctaaaatcccttccaatgtaacactgaattactatgttatatccttgtgatatccaaagaaatatgtcctgggttccatccctagtacctattttgggacttacctggtggctcagacagtaaagaatctgtctgtaatgtgggagacctgggttgtatccgtgagttggaaagattccctggagaatgaaatggcaacccactccagtattcttgcctgggaaatgccagggacagaggagcctggtgggctaaagtccatggggtcgcaaagagtcggacacagctgagcaacaaacactttcactttcacatggaattagcagcagcaaagaagattaatttttcaaacatgttgtgaaattgtactagaattaaaatgtgctgaaaagagaaaaagcaaatataaagggagaatcaaatgggagatatccctatcaaagcaacaagaacaaacagaatagaaagcatagaaggagcaatttgctgcaaagccaattttgcttatgtgaatggaaagtttatcatctgtcaaaaaaagagaaaagaaatatagaatccctgagaataagacataaactggtatatgttttaaacataaaataatatgtaattatcattgtgcacccagcctgttccagctcattaaagtacttagaacaaaaatcaacatctaaaaaatgttcaggggaaaaatattaaatacattcttaacaaaggtagctttcacataaaaagaaaacaaaaagacattttgaaatataaaagaatctaacatatatagtattataaaaatctacctgcaaatgcattgtagtcaaataaataatgaatcaaaattaaaaacaagggatcaatacatcaaggagtgaaaggcttagaatagaattctgaatctaggtaaatatatcattaaatcttaacatttataaaaactggctgcaaatggtatgttttaattatagaaacaaaagttaatacatttgaaaaacagcaggtaaaaatatgccagagtgccaaaaatcgggaaacttggacagacagggaaggttattgttgtttgactctttgcaaccccatggactgcagcccgccaggctcctctgtctatgggattgcccgagcaagaatcctggagtgggttgcaatcctccaggggttcttatctacccagggatcaaacttgcatcccctgcattggcagttggaattctttactacatagccacctgggttggggaagggtataatagtccttaattttccacagcagagagtaaaaggatattgtttactctctgtagctaataactagagaagcttaggcaatataatttaaagatatagatataatcacatttagaaaagaacactgaatacactatatccctttgaaattagcaaagatacaagagaaaagaatagcaaacaattaaaataaaggatgagtgagtgagtgagtgaagttgctcagtcgtgtctgagtctttgtgaccccatggactatagcctaccaggcttctccgtccatgggatttcccaggcaagaatactggagtgggttgccatttccttctccagggggtcttcccaacccagggatcgaatccaggtctcctgcattgcaggcagatgctttaccctctgagccaccatggaagctaaatataggatacacacattatctaaaagaaaggatacacatattaaatcacatgcaaaaaaaaaaaaaatttagatttaaatatgtgaagcaaaacaaaacatctgataagaattgcaaatcaaaatttctccaaactgagacagagtgcatcctgaaaacttctaaaggaaataaaataagctgtaaaaaaataataattattaggtcaaccacattttttatcagtaaaagtagatgccaaaaaactgaaataccttcaaaatttatagggaaatagtttgtaatctaaaattctacactcttgtggtagattgtacagcggctgaaaaatattcactttctccttgtatcaggattatacatccctatcaatctacctgtgatttttctgagcatatgtcatcatggcactgacctcagattttgaccaggtagatgtgctttggcaattgagatgtgaatgaacatgatatacatttgccatatttaagttggattctttaaataatactgcttgatttggtctgacatcactctcacatccctgccctctgctgtgagaatgaacatcctaaacaggggctactctatcagcctgaggctctgaataagatattgagctgctgagccacgttgagcatgctgagtcaagcagagctgaagctgatctacagccctcatacaatgtgagccagaaataaatttatgctgttgtaagttactgagacttcgagactgcttatcaccagagcaaaactgaaaatacagacattcaaaggaccccttaccctgtgaggaagaagtttattgtgttctcagcattcatttcccctttgttctaatattaccaaagaaactttcatctgggatccactcctttttcaagcaccattcaaatggtttgggtgattctatgcacaagtctcagctccatgaggtgcggatactgttcttcg

SEQ ID NO: 55593 - DNA, 1460 bp, Bovine  19866880667622
  misc_feature (1)..(1): n is a, c, g, or t
nagttggacaccactaagagactaacactttcacttcacttaaaatctttgttgtagggagggcattatcttttgcctattaggatgtttagcagcatccctgatctctacctactaggtaactatagcacatactcatatagttataatgcaaaatgtgttcagatattgtcaaatatcttctgaagggccaagttaaaaatcaccagtctatggcataagcccaacattagagtcttacactatcttaacccagcctatatttttgatcttatcctctaatatttatatttctaacattatcttctataactttgctctctcgtcattctcacccctttaccatcctttattagctacatcagtcttgcccttcattatttacctctatgttttgctcatagctggagtgatttttccctgatttctttatggacatatcttactcattcctgaaaatctgtcttgaatcatgcctcctttttaggattcctttaaatcctcatgttagagtgaacctgcttttgagtacaaaatagacgtctattttagtgtttattataagctctcttgtggggcttccctggtagcttagatggtaaagaatatgcctgaaatgcaggggacccaggttcgatccctgggtcaggaggatcccctggagaaggaaatggcaacccactccagtattcttgcttggacaattccatggacagagaagcctggtgggctacagtccatggggtcacagtcagacaagactgagcaactaacattttcactcttgttgtctttggtattctctctttggtattcttctttcttctcaaactcactctagactcttgtaaaaattgtgtacaaattaaaataattcctaatactattggtagtgtgattattcattaatgagagacagtgagggactacaatgcggactttgagaagacaatgacagaactctgtgtatttacatgagactgtattcaaaatatattgctaactgaaaagtgtaactcatagaatactacatatattatgattcctttgagggaaaaatacataaatattatgcttatacatgcaggaaaaatttatgataagatacacaagtaactataacaatggttcgtcccttcagggaagtgagaagtgaggacttttacttctaacattgtctttatgcagagtttggattttttttatcataaatatgaaatacttttaaaattcaaaaagtaattacaaactgatgtgctgcaagctgcactaagatgctagatcaaaaaataatttaaaagttacaattttcagtgtactgtttatggtttacttgcacattcttgtagaaatttacttcctggaagactaaattcctaaaggggatgaagttagcccctgctgggcatggtatggtacccatttttaaggactgtgacctttttacactgcccttctct

SEQ ID NO: 55594 - DNA, 1035 bp, Bovine  19866880768844
  misc_feature (1)..(1): n is a, c, g, or t
ncatattgagtgcagcactttcacagcatcatctttaaggatttgaaatacctcaactggaattctatcacctccactagctttgttcatagtgatgcttcctaaggcccacttgacttcgcattccaggatgtctggctctaagtgaatgatcacatcatcgtgattatctgggtcatgaagatcttttttgtatagttcttctatatattcttgccacctcttcttaatatcttctgcttctgttaggtccataccatttctgtcctttatagaatgtaaaaacatttaaaaatttaacatcttgaatgttgaaaaaatatgtgtccataaaatggagacaattcaataaataaataataaaacccatattatttcacttgcattatttgcttgatcctgtaaattctacaaaacgtaagtttacttttaggtttcctgaaacttcttgtattttccaggacagcatcttcacaatctcaactgactctgacaattttagaaaattggttcactaaattaagcactcatcttatcctacgtgtgtagcaattagaatgccatgaagtcctttacagaaatccaaaatacacaaatgcatctgcaacatgttcccactgaattcccaaaaagggagaacttactttaaaaaaaaaaatttttttttttaaacaatgaaatctggatactctaaagatcaaccaaggcagttaaatgattcatgctgctggataaaactgctaaatatggctggctgcttttctatacagaaaagttcaccagaggccaagaaaggctaccctcatacactcaggtattttttcacaagagggtgagaaaaatctatctatcccatggaaatgctctacttggccctgaagtaagcactgaaccccgatggatttcacactgagacggtaatatctaccacaggcctttgaagaggccccagctgtgcctgttgccatgggcaaaccggaaaacctgcattaccaagggcttcccggtggtttaacattctcccctcaggcttcc

SEQ ID NO: 55595 - DNA, 965 bp, Bovine  19866880775066
  misc_feature (1)..(1): n is a, c, g, or t
ngactctatgcttttttaaacacccagttccaagaatccaaggtgagggagaggtagctaaggaaacagttcaaccagctgttacagaatggaaggaccaatgtaaaaccacaaacaaatgaaaactaataccaagggaatgaaataaagcttgtgaagattgccaaagataaaaataggtttcctaaggatatgacgggaacacgaaacagatatgggaaaacaccacgaagtttaccaaaaagagtcaaaaacaaaacatttcgggtctttcctctgttgtagacgacctacatttctctgtcccatgtctcatggggttgcagtgtgcctgtcagccacatgcccagcctgccccggctggggccacgaacccatgatcaaacagggccggtcagatgttccccatgagatttgatacacagatactgagaatgtgtttctcttccttttgggtttgaacaaagcccatgagctatcttcccaaccgtgtggaaagcccatccacaaaaggaatcagaactcaaatagggcaaaaaatctaggcttctgatgacatcttctgaatccctgaagtcagccatgattgaagcaagccttacccagctttgtgaactaaggtattccctttttattataagagtttaaactgggtttcttttaatcaaaagaggcctgactaatacattggttgagaaggttaactgtcagattaaaaaggagaaagcaaatactggaaggaggaaattaaagtccaagcaaggaaagaggttgaaaaatacaccttcaaaggactttagttccattccataagactaaaaggctcagatgacatcactgaactgtaaatagtcatctttgaagaactatgggaacagacgtcttctggcaaggtggaaagagggcaaataaatgtttccattttcaaaaaggtgaaagaagttacagtctttaaactataccca

SEQ ID NO: 55596 - DNA, 1137 bp, Bovine  19866880812426
  misc_feature (1)..(1): n is a, c, g, or t
naaaaccgatatcttgggtaaattctagttacctacagagtttcttatttagctttgcaaatactgaaggagcttctctttctcctcttctcattccttccttcaccaacgtgttgggcacatctatttgactattactttttcttcaatgtttctacgtgatccttcagtgatatgctaggaatagaactctgtcctaaaaccatgtaaccagaagaagctgtcactcccaggaactgagtcatatttccattatctagtgcctgtctagggtcctccttgaaaaaatcaccagtgattttgagtgttagctctaatatgaaaagttaactttaattgattgattaatctttctttcatgcaccaaaacctgcctagactagatctgaactttcatccctttggatcttgctcaccatcataacaacctgcccttaagcaagccagctaagggaggacacatttattctagatagtagacaaacccaataatctttccctttcaccctactgctcatgttactgggacttgacatatctaaatgtgctcacaactatgatcatagctaaagaaaccttacactttatattgcataccctctctaaaaatacagaattaatgtacacaaggaagaatgaaaatagtcacgctggtacagaatctgtttactgacattgagcagcaaatagcacgactcagagttgttattcttctcagacacactgcttgagttaagcaaatttcatctagttctgcagcattagtcagacctccaagcttaaaatgttgcattgtttaatattttccattactgtgaaggtaaacacagtcattaatccaatatcatggcaacagtaatgttttgttgtaaaaaagttgatcactaagacggtcataaatacacgagtgcatagaaattttgatatacagtgtttgggagaatggataattaatcttcttgaagcatatttacctagatggtttattttataaatcaccataaccctttaaataaggagcttagaatgatgttaaaatattttttaaatagtccaaaaacccttaaatataattcaaatttatattccagcaatcataagaatcaaatcattttctccaataaaacaatattttat

SEQ ID NO: 55597 - DNA, 1142 bp, Bovine  19866880876411
  misc_feature (1)..(1): n is a, c, g, or t
nctgtaatttgtggcctatcagtacacgtatgtggcatgagaaacaagtgaatagagaggtcttcagtgacctctgatttcttcagagtaaacttcatctggagcctaatagagcatcttttgtgttccagtaaatttacataataaacttctattgagaacagcctcaatggaaagcagatgctcatctgactgaatccattaatcattctattctccataggagaatagtcacgaattgcattgatctagagttcaaatgtactacacaagtattttgtttggtgtgggcttgttctaaagttgcgtgcaacaatctctcctatcctgcacagttcagttccgtcactcagttgtgtccaattctttgtgaccccatggactacagcacaccaggcttccctgtccatcaacaactcctggagcttgctcaaactcatgtccatctagtcagtgatgccacccaacaatctcatcctctgtcatccccttctcctcctgccttcaatcttccccagaatcagggtcttttccaatgagcagttctttgcatcaggtggccaaagtattggagcttcagcttcagcatcagtctttccaatgaatattcaggactgaattcctttaggattgactgctttgatagccttgctgtttgagggaactctcaaaagtcttctccaacaccacagttcaaaagcatcaattcttcagcactctgctttctttatggttcaactctcacatccatacatgactactggaaaaaccatagctttgactatacagatctttgtcacaaagaaatgtctctgctttttaatatgctagctaggttggtcataacttttcttccaaggagcaagtgtcttttaattttgtggctgcagtcaccatctgcagtgattttggagcccaagaaaataaagtctgtcactgtttccccatctatttgccatgaagtgatgggaccggatgccatgatcttagttttctgaatgttgagttttaagccaacgttctcagtctcctctttcactttcatcaagaggctctttgatttctctttgctttcttcaataagggtggtgtcatctgcatttatgaggtaatgatattttctcccagcaatctgattcccg

SEQ ID NO: 55598 - DNA, 2190 bp, Bovine  19866880910848
  misc_feature (1)..(1): n is a, c, g, or t
ncagagattctatctttctctgcttctcggatttttgacttggtgacatgactgactttagtcagtggacgttagcaaatgtgacacagttggagacctgaaaatctttcttactctgacatttgttctcctactgctcttggaacttgctaccaccttgtgaacaagtcggggttagcctggtctttggtaagagacatgtgatccaggatcgcagctgaagagaacctattatcagataggtggatgaggccatgctggacaatccagccctagcagagccatcacatgactccaagtgagacgacccagaacagaaaggcagagccttttcaaggaaccacctagccaactcagagaatcacaagaaaaggtgcacatttattattttaagacactacattttgggatttgctgttgttctgtagcaaaatggacacattgttattccaacttgtggtaaaattataaataaaagagaacaataaactcaaatgatctctatctctgaagagagtgtggatatgacaaactggaaaatcgatgaaggaacttcaaaattaatgataatgttctatttcttaaactatagtgtgtactttgcttttttcatcctttacagttactttatacatattttcttttaactagttaacataataatcaaaatcataaaaggctcatatgccttggctcttttgaagtctctttactttataaaatcattatgtgtaataataatatagaaccagtgttgaaacacacctcagtcaattcagttcagttgctcagtcgtgtccgactctttgcgaccccatgaatcacagcacgccaggcctccctgtccatcaccaactcccagagttcactcagactcacgtccattgagtcggtgatgccatccagccatctcatcctctgtcgtccccttctcctcctgcccccaatctctccaagcatcagtcttttccaatgagtcaactttcgcatgaggtggccaaaagctagaggttacctaataaaccagacaaaattctggtgactagtagattaaatcacgtattcccctaaattaacatattttataatcttatgtccctttatgcaaatcacgttcctggtcattgtcttctttagctcaatcttcagattaaataccattaccaaagcattcattatttgttcatgaggacattttttcctattagactgaaacattcttctatctatttgctttgactagtatttctaggagcccatttgtattttgaattttgcctggtccatgtattctttggattccaaataccaaagaactatccaaacccaagtttttgaaagaacaatatttcatgcaaagtattcatgaaaaaattatctttacatgttgatgacaaaatgtctatactttggcaacaagtctttgaataaatgttcaattttccaggaaaaacaaaccaacttgtggattacacaataacaaagtatcactgtcataagcacacagaccttcacgttctctcccatggaagggacactctaaatttcagaaatggacagagatagaccctctcgtgtgacagtcactattagataattcttatccaacagaagcaaggatcagctttaagagtaaaacccaaaacagcaatgatatgtaagaaccacatggtaacacatgtaaataagtcatttgatcatgataagaaataagatattcatgcttgtcctttgcagtctctgaacttttcatgaacctggaatgatgagacccaacaagattcttctgtttatctcgaaatgtgcaaagacactatgtatttgacataaagtgatctcattattaaagaaaagaatcaggggggatcctcaggagcaatttctgattttattactctggctggctatttacctctaaagtggctcaagatctctgtatttcacaatgttatcattatcaccaaaaatttattaccttacattgttcctatacctgcaattcaattggtgatgtttttataaatttacataataactgccagcttcaatatgctagtaaattattttcaattgtataaaatgggagatctcagtgatgtggggaagttttcattctgaactaatctactgaatgacctctcttctgtgcttagtatcctcatgcggcctttaggactgcagcttcctaaa

SEQ ID NO: 55599 - DNA, 1640 bp, Bovine  19866881049329
  misc_feature (1)..(1): n is a, c, g, or t
nattttaaaagtcacagattctctggtagaataatagttgatatgcattgtgtggtactctgtcagtttagaaaaagcagaattacattttctccccaatctcttacaaatgaaaaaatgtctaattgatctgagagtagaattcagagatcctataagctcttcgttaaacgttagtttttctatattgcttccatttttagaggctcaggaaaccttgttaacctcaccattttcttactctgtagacttgggtaagtcactcgaccttcctgagtttcagaaccaataaaggaattgggctatatgtcttcaggttcattctagctttaacaggccacaaatctaagcggaaaaaaaaatataaaaacaccaccagaaagcatatgtgaaatgcttaagatttgaaatatcataaaaataaatatgagtggaaaataaaagtcatgtaatagaatattttacatacatatctgtaaccttcacaaaataagattatatgtttctcaagagctttgtgctatgagcagaaatataaagcgatgtgaactagaatcttctaagagatatcaatttttctatgcttctgtgcatttttcaatgatttcatgaattgaaaatgtattacattttcaagatttcattcatttaaatgaggtagttctaaacagctaccaaaaattgtccttttaaagtaatggtctgtatttataaatacctttaagactgatgcacaaaattagataatgagtcttcgattggtggcaagaagaaaatacagtgcctgctctttggaaacagagtgcattagattttttatgcagtctgtgtattaagaacatctccctttcaatgctctgaacaaattaaaatggcactctaggtgtaaaaggatatgattgtccatggctagcttggtcattctggttgagttaatatcacaggagactgttgtggacttaatttggcagtgatgattggtgagatgtgggtgcacagaattattcagctgactagaatactgttagctttgtatatatatggttaattataataaacgttaagccccactatgttctatattacataccagagatctgtgatcccaaattaccattctctagtaactaaaggttaagatgcagactgggtgacaaaaatacataaactatgactataaaacatcattatagaacagtaggttgagctccctgtttcacacagcagattctcactggctgtctatttcacatatgtaatatgtatgtttccatgctactctctcaattcatccacactctcctttcccaccgtgtccataagtctgttctccatgtttgcgttttcattgctgccctgcaaacaggttcctcagtaccatctttttagatttcatatgcatgcaataatacacaatatttgtttttctctttatgacttatttcgctttgtataaaaaagaaaaaaaaaaaaaacagtgtaacattctgctgctgctgctgctaagtcgcttcaatttgtgtccaacctctgtgcgaccccatagacggcagcccaccaggctcccccgtccatgggattctccaggcaaaaaatctggagtgggttgccatttccttctccaatgcatgaaagtgaaa

SEQ ID NO: 55600 - DNA, 1117 bp, Bovine  19866881072153
  misc_feature (1)..(1): n is a, c, g, or t
ngaattcttgcccacaatagtaaatataatggtcatctgaattaatttgcccattcccaacaattttagttcaatgattcctaaaatgtcaatgtttaatcttgccatcacctgcttgatcacatccaatttaccttgattcacagatctagcattccaggttcctatgcagtgttgttctttagagcataggactttactttcaccaccaaatacatccacaggtgagcatcctttctgctttggtccagccattccattcttactggagctattagtaattaccctctgctcttccacagtagcatattggacaccttctgacctgaggggtcttcttccagcatacctttttgccttttcatactgtccatggggttctccaggcaagaatactggagtggggctgccatttccttcttagtgaactgtgttttgtcagaacccttcactatgacccaaccatcttggtggccctgcacagcatggctcatagctttactgagttacataagaccctttaccaggccaggtctgtgatacatggagatatcactgataccttccccaaaagggaccatgttacaaacttcacctagcagccatgatagatacctgggaagtcaagcatctccttaactgcttttagcatttatggtggaaaagtaagctccatgtgatttcaccatgctcctcaattgtatagactgtggagtaggccatcagactccactccagtctaagtcctgttgaaggagtacctgatgtcactggcttctgtcagagccaacacccagcaaggcagcacttgctgacccaggcctagtctggctaatctaataaggaagggaattaatgaagctttgctctggctattctaaatttttgaatatcttagagaacagccttagtctcttttcccttctcttttcctgtttcttcttagatgatctcatccattcccagaaccctaattaccatctatatgctaatgactaccaaatttatatcagcaacccgcttctctccattgaattccacattggaacacccaactgcctaatttacatttattttgaatgtctcacagatagctcaaatttaatatgtcaaaaat

SEQ ID NO: 55601 - DNA, 1315 bp, Bovine  19866881100030
  misc_feature (1)..(1): n is a, c, g, or t
naattaagagagcaagaaaatcaataaaatgatgccatttatattatctttatttactagcgatgtctattccaaatgaagccttggctcctatgaataaaagtaaatcattttggcagaatgtacctttctcctaaagtaagagagaggaaggagcagggagagagggaaggtgggaaggaggcagggaagagcataacttctagaagatggttgcaactgcagattgtgaataactataaacttttcattaagaagttccttaaatcaattaaaacaatttaactcaatcccatacttggaaaccacatctgactcaatccaacaagattaaagaaagaacattcagctttttgtcatttatagtacattcacaaattaatatgcatccctaacttgtaaaggagatcagacctgggatttctttggaaggaatgatgctagagctgaaactccagtattttggccgcctcatgcaaagagttgactcattggaaaaggctctgatgctgggagggattgggggcaggaggagaaggggacgacagaggatgagatggctggatggcatcactgactcgatggacgtgagtctcagtgaactccaggagttggtgagggacagggaggcctggtatgctgcgattcatggggtcgcaaagagtcggacacgactgagcgactgatctgatctgatctgaacttgtaagacatgatcattactatcataaaatgattaaacaaatacggagagaaataggaaaaattaagtgatgaaagggtttccattgatccaaaaaaacaaaaaacaatgctttattgatttattatcttactccatttcggagtagagtgggactaaattataagaattttttactttgattcttttccagactacctgaatggtcttccttaaataaaagctcatgcttttttataggagtcattatcataagatgatttcattgtttttaagcagcaggaaaagaagaaaataaccaatttgggggaagtaactgttttcacacaaatctggactctattgaggcttacctttccaatatattaaagttttgggctatgaaataacatgattattgtatcaacattacctaaccaagaattctaggtcaaaagtagctattttacagaatttgcttttttagatttatttttagaagtgcattttgccaagtgctctgacatgcccaagttcatatacatagcaataattcttaaagggttagaaacaaaatccaacctaaatttcattttatcttcaagaagtccagtcacttcttggtgatgaagg

SEQ ID NO: 55602 - DNA, 1067 bp, Bovine  19866881270265
  misc_feature (1)..(1): n is a, c, g, or t
ntccatcatccctttttatatcattcctgaactggtgttcttgatggtgtagatctttatataattatgtgttttataacagtccattgagtttattttcctaattaggattttgttctcttgtccacattggctaccaaagtctcaggcaaaacttattatcaaatacatatctgcccttatagtctacaaagaagcagtgagtgaaatgaaagttgctcagtcttgtctgattctttgcgatcccatggactaccaggccagaatacttgagtgggcagcctttcccttctccagacaacctccccaacccagggatcaaacccagggattccacgttacaggcagattctttaccatctaagccacaaggaattgacttagtaggaccttcaagtcggagatgatattgaatataataatgtaaactttatactttataatattatgcatggcattcattttcagtctgtacatatacccattaaagtaacaaatacctccttacccataggtagagacagtaaggaatagaggtattagcataatatataggtggtgctagtggtaaagaacctgcctgccaatgcaggagacagaagacacctgggtttgatccctggatcaggaagatcccctggacgagggaaaggcaacccaccccagtattcttgactgcagaatccccatggacagaggagcctcgtggctacagtccatagggttgcaaaaaatcagacacgactgaaagtgacttaccacacatgcacacataggaagcatagactactgagaagggagtatacaagaattccatagactaataaacaggcagttcctctcctagactatatgctggaaatcaaatagagacattcacaacatccagcaatatcacatttatgcatgaaatttacacactgcaaatgaaaataaatgtttcagggtctatatttcagattcagttgtaattttctgtctagataattaattaaaaattaaaacatgtttttaatgaatctggttaaaggcttgtcaattttctttatcttcttaaagagcaagct

SEQ ID NO: 55603 - DNA, 1118 bp, Bovine  19866881330115
  misc_feature (1)..(1): n is a, c, g, or t
ntctatttttggtgccttgtgagaccccactttatctcctttaattaagctagagttaatgtgtctctatgtttcaacaacagagagccttaatgaagacagatgaaaaggtgggaaaggaaatcacaaaagaggaaaaagtgatgaaccagtctgtagagaagatcatagcgtatgtggagacatgatctatgttttcctattgcactggtcctattttgggaattttggataaagcatcactgactcaatgaacatgaatctgagcaaacttccagagaggcagtaaagggcaggggagcctggggtctcaagagttggacatgacttagcgattgaacaacaaccagcctggagatgaagaatgaggagatgtgatgaccatggtaagaatctcaagggagtgacaggtttgcttctgtttttcagaagaaataagtgaaagcaatgtagaggatgaattattgtacagagtagagactggaagcaaggtgatgttttttggaggtggaggtattattacaatccagcaaacctgagaggcgcctgaatgaaagctctgacagtgacagatggaaagagagtgaagcacccaaagggggtgtaattgacaaaacctgatgactgttgtgaaaaggagatggaggacaatttttttttatttgttttttgctgactttctagatttaagattttttaacttagatgactgaagagatgtcaattctatgactgagatagtaagttaataggatttataggtttgggggaacatgaaagaaatacctgcttatttattgggttggttttttgttttgtttttagtcatgtccgactcttgcaaccccatggactgtatgtagtctgccaggttcctctgtccgtggatttcccaggcaagaatactgcagtgggttgccatttccttctccaggggatcttcccgacccagggattgaacctgcatctcctgcattggcagatatattcttaaccattgagccaccagggaagcccctggttgagggtatgttgactttaaagagactgctatatttgagaaaagaacaaaacaatgactactactctgtcttcttcaaagatactgaacaaaagtt

SEQ ID NO: 55604 - DNA, 961 bp, Bovine  19866881405037
  misc_feature (1)..(1): n is a, c, g, or t
nataatttttatgggattaaatccaagaattcattttccatttgaacaaacttcttaagaactggtgccactctgcacttcatcatgtgtagaccttagttggaaaacagctggtgtcccaggaatataaacatagcctttgaagttatgttctcaggattggaggtgatgctttcctggcttgttcattctcttggtgcacggactgcagttgtcattcccttccttgcctttagttccttcttttccttctgtttctacctctgcagagctggaaagctgttcaaaaatccatgactttaaagatcgtatatatgtaagcctgcaaggccttcagagattttaggatgagcttccccggtggctcagatggtaaaatatctgcctgcaatgtggaagacccaggtttgatccctggctcaggaagttcccctggagaaggaacagacaacccactccagtattcttgcctggagaatcccatggacagaagagcctggcagcctacagtccttgaggtcacagagagacacgactgatcaactaacacacatacatgattaatttcatattattattgaattattcatattatttacaaatttttattatcttttcttctaaacacctttagttacaacaagactaaaaggtgaagcagtttcctccaggaagtatagaaagtcatggagatgctaacaaaattgaatttaatcttagactgcatttaagagaagcacagagagaagtttaagctggaagtttcgactgtggtcagcccataaagaagatgttagattccaaagtcagttgttagaccactgagtggaagtttctaacttagcaacccaggataggtttgaagagtttaacctctgctacatgtaaagagatgagaataccagaccatctcacctgtctcctgagaaacctgtatgcaggaagcaacagttagaaccag

SEQ ID NO: 55605 - DNA, 1019 bp, Bovine  19866881457471
  misc_feature (1)..(1): n is a, c, g, or t
nctgaaattgtgatctcctgtaaataaaagttctgcaaaatctgtacaatcttttgaactccaaacaattcaggaatggaaaataagcttgggctccagttgctctctgatttcatgcactgaatttgggccgaatgcctgagcttcttagaacttcttgtgttcaccccccctctggctgtaattaaatgtgctcagatgtcttgtcctatcagctattgggagtgtgacaagcttggtctcatgggcccttttcatttttaagaagattcaatctgaggaagcagctcaggaaatctcagacgaagtttcttttttcccccacctgagtttttggactacacataaactaaatctttatactctgctgggactgttctaaacagcatcaaaaccaggaggtcaaaggcatgagctcaaagaacactcacaatcttgatcatcttctccatcacatcagatgacaagccagatttgcaaaggtcactgcacggcttccctgattatgcagtgtgtgctagacataccaaatgcctctgggtgaactgaataaactgttgaaatgttccccccactttcatgaaaggtgccccaactgaaacaaggggaactgctgtcttatgtttagatcaaagtataatcatctgggggtatttatttagaatgcaggttcctgggcatcatgtggaatccaaatttccgagggtccatctcagaaatgtgtactttaaacaagattcttaggtactctctgaagtccgagacatactattttaggctgcactagctcatgggtgctatatcattagagaaaatgaaaatgtctgaaaaggtatgagaggttgcatttggttcaagcattacacattagatactcctgatttagaggaacttgaaaaaagaagagttaaatatagtgagtgtagaggagactgtcaattgacccttaatccccattcccattctctctgaccacattcttctgtattgtagtggcttcaaaattaaaatttccatgt

SEQ ID NO: 55606 - DNA, 1154 bp, Bovine  19866881613707
  misc_feature (1)..(1): n is a, c, g, or t
ngactagctggtttagcattgagaaattctactcttagttttctttatggactatggaatcagaagaagttacattgttttatagctatcgaacctttcgcctaccactggatgtaaaatttaaggacagagttcagctgcatttaacagaatatcctagaacagtggtttaagtgacataggtgttacatgactgcctcaaagcaagagattcagaagtaggcagtctaaagtctcaaggaagtcaggctgattttcttggcttttccctcatagccagctcaagatggttgccagagctcttcatttctggctgggagtaagggaaatgtcccaagggcaaagaggatacatgcggtattgaatgaatccatttcctatttaaggtgctttcccagaaatccttcccaataaatccacttatatcttatcatccagaaatattattacgtgactacccatatcagcacaggagtctgaaaaatgatgtttaggtgggaacttttccaaaaccaacatcagtattctgctaaataaaaaagaagaaaagtaactggagatgttactagcagactcttaacttgaaaacatttaatttcagtttctttatctgaaaacaaatgatgaaaatttatacttttcaagatgtttattgacattaacctagataaagtatattaaagctgccatcagtgaactctacgtgtgttggatggaaaactgaccactcattatccaaataatgtggaatgtaaggtaacatcagctcacaaatgtttattaactcaagtccactggcatagattttccaaattaaagcaatattgactatcaaaatggagtatggataatttaccctcggcattgtcatgatttttattttctgaaaggctaagtatgggcagtgtccttctatggcacctcagttgtaggttggttgctggagaatggctgacctgagatttctgaaattctgaaggaataaatgatgttaagtcatagaaaaaggagtttatttgacttaaatgtgattgtccaataagtatatgctaactcacctctatattatgaatgctctggggcactgtaataaaggctttttcattgcccttgctggctaagtcgcttcagtcatgtctgactctgtgcgaccc

SEQ ID NO: 55607 - DNA, 1141 bp, Bovine  19866881958253
  misc_feature (1)..(1): n is a, c, g, or t
ncagagagtgctacagatgcactcaccagggtatggacagatgtaaaccagggtcacagaccaagggaaacgcccaaagggatgtgggcatgctctcaacagcaggccctgtactgctgctctgagcctcagcttccatatccacagaaggaagataatcccttcaaatctctaaggaccaaagagtccagtagaaaggctgctttataagaaaggctgtgatttccctgacatttcagcaacaaattgttcccataaatatctgctgaatggttgaacacgtgaaattgtatgcgggagccagcctgtccaggcttactagagcagattgttaaatactcaggaattttgcaagtcagttgttaaactgttgatagctcgaaaccagccatgctgggtgtctttacacacgacaaagtcagcaaacactgccaattgggtttttggttttcctttttttgcctgggaaagtcagtttttcagcactgaatggatgtgaaatggcagagtgtcaatcatgtatgaggtgcttgaaaaacgtgcatttcattttcttccattgaatgcgaaattggcattgagaaagctacccttttcactgtgttttgcttttcatttctggttaccaacatgtgttcctcaaagtgggctacaactgtatctgtaatcctgtattcatttcaagaaattaaaagggagagttacagtaagtataataaaatgtcagatctgggtgatgcattcatgggagtttattattccttgttatttctgaacatttaaaatgtaatcaaaaaaaaaaaaaaaggaagacaaaaaactgaagatgctcctcagctcccagactgatgcctgggcccctgtgaagtggatggaaggaaggtttcaacagcaacacacccagcacaagtgtgaacacatgaacagcacaagtcctgtccatctactgtaggaccaaggcaggcctgcaattaagccatcaccagtctgcaacgctgagcacagagttacaagagcctcccagactcagatggagccttcctaacatctataatcatgaggtaatggcatagaaactgtaattaacacatgtcacatacaccttgtaaatgtcaccaaagaacacatctaaaaattcaaa

SEQ ID NO: 55608 - DNA, 2374 bp, Bovine  19866880566562
  misc_feature (1)..(1): n is a, c, g, or t
naggagaaagagtcctggggccagggtgccccagatttctctgtcagggccccagggaaggctggtgagcttgtgacagggagcgtgtgccgcctagcagaacagtggggcaagaacgtgcttagctccaaggtgggtggccgctgggacacctgcagctcacctctgctgaggtgccaggttcaagggctctggcatacgaaggctcaaagcctttagaaagggagcaagatggaaatttctaaaaataggagccctggaatatagcagcagaggggctttgtgcttgcttggatatgttctcttgagagtgagggttaggggactctttggcaacttgtggggggcaacgttggtctctcccaggaccaccaagctatagcagtgggaaatgtaggggatgggctgggttctgccacttgccagctattatggactgaaggtttgtgccaccatccccgccatgctgaattcctatgctgaagtcttattccctaatgcaatatttggagatagggcctttgggaggcacttagagtctgatgagggtggggcccccacaatggggttagtgcccttataagaagggacaccagagagatgctcgctctctgtcatgtgaggacgcagagagaaggtggtcatctgcaagtcaggaagagttctcaccagaagcctagcctgtgagcagatgtttgagcctggcgggtgtggtattttgttacaatagcctgagcagacaaacgcacaagccacatggtgatctctgaactgctctgagttgtagaaaacatattttggagaggaagatacagcatgtgtttatgtttgggtctgctcagaacaccacacccttttctctgggggaatcttctctccagtcatggggctctcagggtgtagctgaacaaatgctgttcttatgagaactgatggcatctgagagcacttggcacagtgttggccatagagaaggcatggggtgaacaccatctctccactgttccctccccgtccaccaccacaagggatctggggccggaggcagggctagaccctgtgcccagcgagcactgggcagataaaacgtggtggaggggaagagctttgaagtgccttctgggatttgcatccagttcaccctcgcaggctgcctctgggcctttgcctggctccttattcttcaccagaggggagatgaggaggtctcagtcttcttctgaggctctgagcccctgatgactggcatccggggcactggctggctgtgtgtgtgaggatggaggcggcatcctcagggacctcggtggaggtctggggtatgggcactgcccaactagctccctctggggaagaagctttctgtgagggcatgaagctcagaggccaaagggagaccagggctcagcagctaagaggccacacagccaaactccaagtgggaatagatttagcatctggcaagaataccatattaagaggtaatttttcatctgttataaatccattaggaaattaaaaatctaggctgtgactttaaaatatggaatgggattttcttcagagcccctgaaggtaagatttttttttccccttaataaatgctgaaatccaatgaatctaaatcccctggccgaggataatgctcccagaggcggcggccgctccgtaaccatttgctgacttggggccaggaccatattttcagaaatattaacataaactctggcagtttggcagtctttgccctgggctggacttggagcggtactcacaagtgttaggagacagtgactagttgccaggacccaccaggcgctgagctggggccatggaggcgggaggggccgacttccaggtggctgaggtcagctcagaccctgcagctcagggctggttttggagacaggagggaaacaatgtgcaaaggtgtgtgtcgaccagggcaagtcagagttcaacggggactagttagtcttcaactagggaagttactgtccaaccaggtcaagttcttgcagagtcagggaaatcagtgtacaattaggtcgtcactgtacaaccaggttaagttagtttttgacaagagctagttagtatactccaaggtcaagctagtatataaccaagacttcagtgtaccatcagagaaagtgaatggactgcatggaagtgtttttaatactccaccaatctggaaatcagacttggaggaaatcggggtctagaatctgatgtctgagctgggagtgcggatgggggaggcctgcggaggaggctctgggtcttcatgcctatggctcatccctcacctgggcttccagtaacacccaggttggagcaggagtgagtctcccagcccggagccggcagg

SEQ ID NO: 55609 - DNA, 1428 bp, Bovine  19866880840093
  misc_feature (1)..(1): n is a, c, g, or t
nctgcccattgacccaaaggtgatccagggctccccctgaacctggggcccagggctctccaccgactttacttgtggtggtgtggtcatgcaaaaggttttattttaatgtgctcaaacatcatagtcttttttcctgactgcttctggttaagcaactcttttctatacccaggttgtatagacccttcacacccgtgtttccctctactaccttaaggcttcagcttttctatttaagtgtctgatcccttttggattttatcccgatgtgtggtataagctccgggtttgactttttccatatggccatccaattatctccagaccactcatttggaaaaaaaaaaaaaaaatcaaatttccacacagatttgtgaagctgcctttctcatggaataactttccagacgcagttgggtctatttctgaattttcctttggtccagtcggtctatctgtttattcctgtgccaacaccaaactcctaattacaggcattatagtgtatgttggtggtgaggaactctgccaccatatggctcttcttcttttgggttcttctggcttgctttgcttttttgttcttaagcataaactttttaaacaagttgttcgctccggaggaaaaagaagcctggtggtatttttaaaattggaagttcattaaatctgttaaatgaacggaggcagaatagacgtctttatggcgatgagtcttttcagtcaagaccatatctcttcatccgaaatagcattttgagggaaaaaaatgtaaagaggatacttacagaatggttagtattcaaatgaatttttttaaaaaacacacagaacagtctgtctggtttatggattcatattaatgtgatgtgctgtgcttagttgctcagtcgtgtctgaccctttgtgaccccgtggactgaagcccaccaggctcctttgtggggcttctccaggccagaatacggagtgggttgccatgccctccttcctccagggaatcttcccgacccagggaccgaactcaggtctcccacattgcaggcgggttctttactgactgagctatcaggacagaataggaggggaggttggtagatagaaagggagagagagaaagagagagagggagagcgaaagaggtttgaattatggcaaacgtttgatcttggtggagatgaagtagctgttatattatttttctatgcttttctatatgtttgaaagatttcataattaaaaacaaaaggaaaacagacctgtctccactgcttgagggtgctccccagaaaacagcacatttcgatctcttttcatgtggttctggagtggtgtccactgctaggcctctgtcaggggaagcctgtagctctttctgtggaaaagaattctattaaagacttgtcagctccctcagcagctgga

SEQ ID NO: 55610 - DNA, 994 bp, Bovine  19866880862175
  misc_feature (1)..(1): n is a, c, g, or t
naatgataagagttgggacttgaacccggcagtctgacttcagaggttgctgactcttaccttgtggggctgccctcactttttcaggcctttacacgtctagttcctgttctcactgactgctctgtgtcctcaggctgcttccttgacttctttgagcctctttccttatctgcaacatgagagacttgactgagaagatgttgtgtcccttccatctttgaatggtgaacacaggtatatcagtagaggaggaaacactccaaagatctgaaggaaatttctaccctgcccctcgtaggtcatttgaaggttgggaagatctctgcagcctcatgtggtttgatggggaaactccattccaattgaattatgctctagtgccttatattttattgtttttcactgcactgcatggcatgcaggatctcagttccccaatgagggattaagcctaagccccttgcggtggaagtacagagtcctaaccactggactgctggggaagtcccttgccctggtgtattttaattacaccgcatacaaacggatttcttcaagatgcaaaatccccatgcagcctgctatgtctgaagcccctatattcagctctgggtcagagtgatgcttgtaataaccagaaggtgctgtgtgaagctgctcccggtcagcctcacgggcagcattagttaccagatgccaccagcacgagatgtgcagacgttatcagctgatacgtaattgattcggcatcctctgtaaaggcaggttaaaattaaacttgttggtaaatggtgtttaaaccttggtgtctggggacgaggggcaaaaactaacggagcagggcacttgtggaagggcttgatttttttttttttttccccagattgtggaatgagctcatccctcaactacggtaaagattttcctatttaaaggggctggaagcgtgtaagcttccgatcataaatttcataggaggggcctctacttg

SEQ ID NO: 55611 - DNA, 968 bp, Bovine  19866881095529
  misc_feature (1)..(1): n is a, c, g, or t
ncccgccccccagccccccgcccccgccccgcaccgagcagtggccccgggcgcggctgctccaggaaaccaccgggctgcctgaggtcaaggaagtgccgcacccgtggccgacctggagactctccaccgaagataaaccagttgaagaaaacactttgaattcggaaagactcaagcccagcctctcagaaaacaggtctaaggggcaggaaaaaaaaaaaaatccttgtcttcggtcacatagccttttgccggccgagtccccttgaccacagtccagcatcttgtcctaggagcgaccagaagtggggctgaaaattctccgtgtcaagtgctgacacaccgctaagggatgcgtcctgagggtatctccccccaccccaaccctttcctctctttctggaaaaacatgatttttattgcctgaggctcctctcacccccagaaactgtagcccaccctgaggtcataaacttctgctcagcatccatggcaactaacgcgggggtcacaatcagaggattataactgcagatgtgaagctgggatgagaggggaattcttcaaaacggtatcttgttttcctgcaaataatgcctcttacataaaatctacggagagattaatgcagcaaagagaccagccttagaatctcagactagattgctttttccatatacactccacttggtgggttttgttcattattattattttttttaacaaaaagctttttctgaaaatacaatgagctgctttttgcagggttcacaattcccaatagatgatgatgccatttttcaaggtcttacacacgttatggctttggggcttatttattagctcccaagaaaagcctgcctttcagtgaggtttatatactcaagtaattgtgtgggggggggaggggcacagagcagggtgctgttaaagaaggtggttgtgcatgcgtctgcaaggaaggc

SEQ ID NO: 55612 - DNA, 807 bp, Bovine  19866881158992
  misc_feature (1)..(1): n is a, c, g, or t
nacaactgcaaaataatttctggccccaaagataatcaatattacccagcagaacattcttcgagcttcaggaggctattcatttctggtactttcaaaaccggagggcaaagtgttatttccatcttcatcagaaggctccttcatgtagagtgtttaagaagacactgacatctatatggctttttctgaccatccatctccacgtcatcctccagggtacaggcataaaaccctctgcggcggacggtgaatgatgttcacgttattatgaacacgagttgctgtcttgccctgagccttcccaccaaactttctagggtgtgtaatgggatatgagactctcaaccatctgccaggtggtatgtcctagaagcccccctgagcccatggacccggcatcttcccagaagcgcctctggaggggccggtggcatcttccctccccatgctgcgatgcaggcaattccagggctgccctctctctcagtctccctgctgtcacaagggatggtgtcctgcctgcttggcgaggtccctgacattctgtccagctcaggcctggccttctccagggtggagggtctatgcgtgtggaggaggggagacgtggaataaaggtttatagttggttcttgctctctattcccctgctcctttttctggattcacttcaagttctgctctgaagtctgcaggacttcaggtgggagggaggtcaccaacagggacgatcaatggaatgggaagagttttcctacactaacagaaaaagtgatcctcagagcaccattcatgtgcagtagg

SEQ ID NO: 55613 - DNA, 1786 bp, Bovine  19866881242565
  misc_feature (1)..(1): n is a, c, g, or t
naaactgagctccatgcaggcaggaaccaggaatgtcttagccaccaccagctccccagtagccaattgtctatttccttgtctgtgtccatctgtgggttaaggctcagaatggggacaccgaggcatttccaacacctggctgtccgtcagtgtcatttcctcctctccctgacatcttctgtagaaagagtggcgtgcagccatggggcaagtcctagaaccaaatctcagcccagccacagccagctggttgaccctgggcaagttgcccaaacctgtctgagttttatcagcctctctataaacaaggatcggtcatctacctctcagggctggaggggagactgacttatgttaagcactgaccacaatctttacagtttccttccatttgaggtcattgcccaagaaagccaattcacagcccaaaacagggatctggactgcgattcattcattcgtcagcaggacccacgcagtgtggctgggtgaggcatggacacagtaggtggaccccacagacaagatcctggccacttcagtgtttgtgaggttttgcagaggtaagaggtatttgtgaggttttgcatgttcatctttcgtgtttctctctctctctctcttttttggtttatgcatcaaggtttttttccccaatagttttaaacccaacattatcattaaaggtatctaaatctcccacaccagctaataaaaatattgtgggcttttcttcctgttatttttcttttcaaagtaaaaacaatgactgcggatgtcttcacaaggaaaataagtaaagccagcttttgtttgcagaccaaggtgcgataacgtgtcatttcctgagtgagttaagtcctggctgagcacaaccttgaatgggaggatgtgattccggacacccaggtaccgcagactgtctcgggctcagcaagagtagatgtggcctccagaaccactccgactgctgagcagctctttctgaaaccccagccaggacaggcagtaaagacggcttctttcttggagcgtcgcagccccattcagacccagcggcttgtgacaatgaaaggcgagcacggcatcctggctccctttgagctcacacccctggtgacctctgtacaaactgagaacaaaagaggggggaatccacagtagctccccacacaccctcccccaactcccgccccgagacacagctctaaagagctgtccttagggattctgagtggagcaacccccagcctcctccctcaatataaaataactttaatcctcattcaagatctccggttccaatgtaaacccagcaagtcccagctctcctccgctggaacctccccctccctttggcagccagcccggggatgctaccttccgcttctccactggcttctaagaggaaacaggcacccactgagcccgtacaagccccagctcaacatgccggagagaacaaagacttcacacaaagaagaagtgggcttttccaagccctgcagccactggctcctgaagagagatgcttcggcagccggggtccgcttcctcgcccagatgccccgtccaccccctcccatctccacggcttcactccagggctgggaaatgacgaggctgacctatggaggccttggaatcctggactctctccaggggtcttccactcagctgacagggcagagcccaagtcagggacaaccagagatgaaagtccagagggatggggctggttctctaaggaccgaggccccggggctgcaaatagaaacacaca

SEQ ID NO: 55614 - DNA, 1710 bp, Bovine  19866880709566
  misc_feature (1)..(1): n is a, c, g, or t
nacataggcaactgaactagcagaatttgtctaatgtaactgttttgcaactcagaaacctattgaacatttgtagtttccaggggaagacttgggcagcaaattgccgttagtttccgtcagtttaagatcttacttcagaagaggctactcattctgcccaccctttccctgcaccatcagcctcatggcaggcaactgtgtatgtgtacctgacgcaacttgcaggaaccgtggtagataataaggatcctgtttccaaatattgaagatctgtgttctgactgctgagtgctgcttctgatcataaaggtggagacacagaggcagacagctatttttgtaagccccgccccccgcctttgttacaagcccctccctctccaaatgaagttatttacagaggattgaaaagggctagtacattttttccaccttcccccccccctttggaagcctgacattaaagactaggaatattcaaaagcaactgcatacacaggagaaattagaaagtcactgcacatgcttagggaagtgtgcaggctcagaaaaggcctcagaaaacttaagtttacttctaagggggtcagtcctggtcatatccagatcaggactcattatattcaatctatcaataaccagagacaaagggaaccttgaaagcagcaagagagaagtgacttcttacatacaagagaccctcagtaagattgccaacatttctcataagaaactgtggtacctaggagacagcagaccaatatattcagaattaaaaggaaaaaaatttttttaaactatttatctggcaaaacagcttcaaaagtaaggaacaaattgacatattcccagataaatgaaaaatagttcattagacttgtccttaatactaagcagagtctttgtcggttgaaatgaaagaacaccagaaagtaactcaaagccatatgaagaaataaagagctcagtatgctgctgctgctaagtcacttcagtcgtgtccaactctgtgcgaccccatagacggcagcccaccaggctcccccgtcctgggattctccaggcaagaatactggagtgggttgccatttccttctccaatgaatgcatgtatgctaagttgctttagtcatgtccgactctgtgcgaccccatggagagcagcccaccaggctcctctgtccacgggattctctaagcaagaataccggagtgggttgccatttccttctccattactctaagagatggatccaaaaaaaattgctttttaagttgaattaaagtggcaagagtgggcatttttatcttgttcctaatcttagatggagtcttttgagcttttcaccaatgagtataatgttagctgtgggtttgttttatatagcctttattatgttgagatatgttccatcaatgcccacttttgggaagggttttgtcatacatgggtgttgaattttatcaaaagctttttctgcatctcttgaaataaccatatattttttattcttcaatttgttgatatcatattgatttgcagatattgaaaaaaatccatgcatccctgggataaatcccactttgatcatagtgtgtgatccttttagtgtattattagattcaacttgctagtattttgttaagtattctgttgtctgtgttcatcagtgatattggcttctagttttctttttgtggtacctt

SEQ ID NO: 55615 - DNA, 804 bp, Bovine  19866881197961
  misc_feature (1)..(1): n is a, c, g, or t
nctcttatatgggaatctgtatagtaaagctctagtatatttctaggtgtaacacctataatgcttaagaaagagaatttgttcatatttgttttggtgtggcactaacgtgaagggcaatatattacatgacttgtgtaaatcacttgcagttctttgattctaggatgttcatccttttgtatgcttgcaatttttttaatgaaagagaaatcttaatcatagcattactatggtttattataaagcagctgttatttccatgtaaagccctacatggattctttatgtaatggaagtttgatcaattctttccctaagcatttttatttcagagaactgatggacagagtgagactcatagaatataaaattcatcactgcataatacccattcaaatggtaataataattctcaggtatctatcatccctattttgggggagggagtaatttattcatgccttctattttcttttcttactactgttcattctttggcagtttcactgttcattagcatatctgtcagatagtgaacaagaaaagcaaggaaaataagtcgaaacaaatcagattgttttattattcatcaccagatctcaaaaagcagctgtaggaagagattggaaattaatttttgagtggatattttggatatcctatgaatgcctatgaatcacaaaaataatcaactttattactgacagaactaaatctattggttttgattttatatatttgctacacctctctttaaatagtacaaataacagaatagtccataaatattttactgtcatt

SEQ ID NO: 55616 - DNA, 1371 bp, Bovine  19866881330707
  misc_feature (1)..(1): n is a, c, g, or t
natgatatgatgtacctgaaggaaattaggattgtgagccaaatcagtaatctgcattctttccttaattccagcttttttctttttaaaatatttttaccattttctcccccttctattcattttttctgcctttttcttctaagcaatccttcttgtctttaatcctattatttctgatgacaaattagtaatacttatatgcatatttgtgtatttacatttcaaaagttccattgggagaggaatctctaatggtgagatttaatatattgtggcacctaaaaggggggatgtgtagaaatactggggtgtcttctctgtgccttaaatctcaacattccctacactacattagtctatgataattataactttttagggtgtctaactaatggagattttgttgttgtagttcagagttcagaggtaataatccttttacacagtttatatgcattatttccataatgaagtagttttaagaataaaatttaaaaaaaaatcaaaatcaggtcaagaaaacacggaaaggttgacatagctgctacagttaagtatcacgtttgtctctgtgcttcctagcagccaaggggaaaaatattaaatgatttttattgtatactgaacacatattgtgtgccaggaactttgatagctgtattgactttatatctatcttcactacagccatggaaggtaggtgttataatcctcatcttgcggggaaagttcctgaagttggaacattatcttgccaagtgtcacaaaactaaatccttaagtggagcaaagattcaaatccaaggactctctgacttcatagtctgttctcttatctaattctcatggtcagaaaggaggaaatataatgattccagagataaagacttgtcattatattataaaattaattttctgtgtgacattgtataaaggggacattgagcaatgtgatgaatggtgcccttcataacagatttacaataaatgcagaaagaatatccatatagctgtttggctatttttaatgacctttgataactgtctaaagcataacattaaagtgcaagtgagtaaaactgattcagcaaatactaagctaatacgatcctatggtacagtcttctggtggtccaaggtaattaaaaaataaaactgaaaatacatgaaccagacttcagaatgctatgatattagcaagggttttgacagagaccaaattcaattgttcattcattcagcagaagattatgggccatctatatgccaggcactgtgctgggttctggatattcaaatatatttttaaaaaatatttatacttcaaagggtcttgcacttattttagaattagggagccagtgcctg

SEQ ID NO: 55617 - DNA, 801 bp, Bovine  19866880240105
  misc_feature (1)..(1): n is a, c, g, or t
naacagactcattagaaaagaccctgatgctgggaaagactgaaggcaggaggaaaaggggatgacagaggatgagatggttggatggcatcactgactcaatggaaatgagtttgagcgagctccgggagttggtgaaggacagggaagcctggcgtgctgcaaagagtcggacatgactgactgactgaaatgaactgatagggctggcagaaatggggaatgactgctagtgaatgccaagtttctttttggggtgatgaaaatgttctaaactttataggggtatggttgcacaactgtatgagtgtactaaaagctattgagttgtactttggtgaattttatgttatgcgaattctatctcagcaaagtgattatatatttgggaaaaaagcaaagtgccctagacctgagccagactggcacttactcagcaccagtttattaagcccctgtgtgtgctgtccacatggctcagcatcgcccttctggacgttttctttgggggccgagtgaacggtaagggtgagatttgtagggggggtgggctctgctttgtcaccaacaccccttggcacttatctaaggaattcgaagatggctttggggtactgacatctcttccttgtatttatagacatgctccgggaattcaacccttccctgaagggcttctctgttggcaagggaagcgaaagcagttctggggcctacctaaaccaggccgtgccgggagcccaagctgagtgagaatcttgggggtgaaccccaacggtcccctggggacctggttgggct

SEQ ID NO: 55618 - DNA, 1859 bp, Bovine  19866880427437
  misc_feature (1)..(1): n is a, c, g, or t
ntggccctctgtgacccaggagggtgatttccaagcatcacgtgcaggtgtgctgcccttgtacgtatcaaagcgtcacacaaacaagaggccttatggtgacttgggtttagataacactgctggagcctgattttctctgtaatgctcctgaataccaggggaaagcatgaccctactctttctgaggagtatgcttcacaaaagtcaaatcaaagagaatccgcagaaagtccaaacctcactcaagcatgtcctaaagacaattaggtaataaatcccaaatataatatataaataaatgctcaagacagaactttccaaattttatgtgcacagcacaacctatgaagcttttaaaagcctagatttcagagccctcaaaagtctaacttggtagtcctgggatgagttcaggaaatctatactacacatgaacagtcttctggtcacacttttgaaaagcacttctttggggttccagaaagccatctaataaaacagcaaaattctgattcaacacattcaacaaaggacttggaggtctcagagacagcaaaacaagtgaaatgaatgaactacttttttttttttaaacacagctttaattaaacagcaatgtaagtggctaagatttagactagaatctctaaaatcttgaccaaaaagaagctgaactgaaaagctgttccaaaaacgcaacctcaagaaatactcacgtatatgaacagaataaagcagaacaaaagcctttagatagaaaaagtgattgctacaggctttgcattttcaaatacaccaactagcagctcagaaaacaggtgtgacaaacaatgggccaatttaatgcccattaaagaaaaagtatgagggaaaaaaaagccatttgtgaataagcctctgaaaagaggagcatccaagaaacaggatccaaaatcctaatgtgtctttgcattcttaaatgctaaagtcactggggagaaaaaaacaactctatgtgaaatgttatgaggtgttaatgtatcaaagtgttacccactaagaataacacacagaactgctcaagtgattactggaagcttttattacaaagaggagaaggggtagaaaagatgcagctgaatgaagaacagaactataaacgaacagaactaaagaacagaagagctatctacaccattccccactctgccccccagctaaattacagactgaactcctgcaacgaatagcatgtaactcagttgggaagattccctggagaagggaatggcaatccactccagtattcttgcatggagaagtgcatggacagagaagcctggcaggctatggtccatggggtcgcagagagccagacacaacagagcaacgaacaccacgtgaaactcttcttgtcgtcaccagccaaatcaactgatgtttttttaggactcaaggcctagtagttagtgactgtcctttaaaactcagctcaaatcacacttcttctgtgaagtcttcccttccttactccaccaagggaaattttactagttttggtattctggtatcacactatttttacaaatcaaaatactgatatttctgttggtattccagcatgaatccacaagggccaggcagcatcattcatcctgggttttttcaattgttggttctctgcaattccttctgtccagtcctgcctccccaacctccaaccacagacacctttatggtagagcagggaagcctcccagctcctccttgctactcagctcctgcaaagtcccctctcctcgccaagaccaaaaaaaggcccacgctagattcaaggaagatggaaggtcccctgaaagctctggaaattctcctgt

SEQ ID NO: 55619 - DNA, 2562 bp, Bovine  19866880516230
  misc_feature (1)..(1): n is a, c, g, or t
ntgtgcgtaggtggggcaggcggcaagctttcagcccctgacaaagttgtgtttaactgacttttctcttggctcccttccctctgtgcagagatttgtggattcaggccaaagacctggtgaggaacatgaaagagaaccaggtaagaatccatccgactctgctgggggctgttctatctgctgggaggccatcagaccaaagacaccaggcaaccaagggccctgcagccatcatgccctgagcttggcaaccagtgtggcctgggccctccaagaacacccctgcccctggtaccctctggaggccagtagaacacaggacctcttctcatatccccagtttggtcctgtcgaagtcagcagatgaactaaataacttcttgctcagtgaggtggttgaaatctagggttctagagggacacctgttggagggtgaatcctgaatttccacctattagctgtgtgatgctgggtaaggcacttaacctctctaagcctcagttttcccatttatgaaatgagaataatacgagggcctgcagcgcagggcttggggtggattcagtgaggtgctgggtgcgcctagcacagaggcagtgcccagtgccagcccacagctgtcattgtcgttaaagagactgttgctgtcattattaatcatcacacccattctagttcttgggtggaggcttctgtcacatgcatcctggggccctagtccccacactcctagcagtgtagacaccctttactcagaagctcatatatgagtttgtaataagctgcctctaatcttttgtgctctccttatggacaagtatcaaatccaggcaagatctgctaccaagctagcttttaatgagggacttagcctgaaccactggaaccacgggaagccactatctcagccagccatgcattcattcaagagtcagggtgttcaagccaggtcatcccaatatatacaaggagaggggcaaatagagcagcaatgctataaagagtggcttcttccaaactacagacttctcaaatttctggaatgatcataacattctggagaatggctagaggtcttgaatcaaatcctgtcattttacagatgaggaaactgaagccccagaaagtcttatgacctgtttgagttcacagccagttagttagagctaaaatcaaaagtgcctgattcacatctaatgctcctccagagcaccatgctgcctcttacaaaacagaagtttgttttttgttccacaagtaacacatgttcattagagaaagatcagaaaacccagataaacaaaagaatactgaaacccatcccaaagcatccttaaacctgatgtctagagataattactgttgacagtgtacattcccttatataatttttccaagcacatacgtttgtatacattttataaaatagccgttacttgatgtatatactttttacagtctgcttttcttgatatcctatttctgctgatggcaatatgctttccagcactgtttgaacagtcgcatggtatttcatgtcatgagcattccatagtttacacagcaatcctctgttttagacatttatgttgtttccaacttttgactcttatgacaaggcttcatcattgtagctaagtctttcacacatccatttccttaagactcacttttggaaatggattgttggatctaatggtaagcctcttaaaaaagttttgatgaatttttccatattgccttctagagcagggattgaacccaggtctcccgcattgcaggcagattctttaccgtctgagccacggatcttggggattctgatctagcagattctaaagttctacagctttaaatgcctactctatatgtctccttttgaaaaaacccatacatatggttttgggaggggttgtatgaaatcaaaagacatgcaaagaaagaagctcttttggcaccaggattccctgccatctctttttcatgctatcgtcctttatttcttttttacagcaacttgactttcaaaatgattggaagctcatcaacgtgttcttcagtaatgctagccagtgtcgcctgtgttcctccacccaacaggtaaaccgcaggcgggaggcagagggattgcagatgctggggtgggtgccgagtgaatgaactaaacctgactgacctgcacctggcaggctgggcctgatggcacatatttccaagttagggcaggcaggtagacagacggacagatatctaagggtcaaggaaccatattgaaggacatgcatatatgcatgcttagtcactcagttgtgtccgactctttgcaaccccatggactgtggccaccaagctcctctgtccgtggggattctccaggtaagaatactggagtggttgccatgtactcctccagggaatctttccaatccagggatcaaaaccacaactcctgcattgcaagaggattctttaccactgagctatgggggaatttttaacttaccatcctatcaggaaaaggaaaccataatatagataaactagtgatcattctacaa

SEQ ID NO: 55620 - DNA, 4834 bp, Bovine  19866880550699
  misc_feature (1)..(1): n is a, c, g, or t
nctcttgagattagaggtttgcctgtgaggaggttatactctttttgttcagtcacttctagcaaagggctctctttgattcactgtacaatgctgaagctcctgctttttcctctgttcatcgagtctttattggatattcctgaagagctatctttcctataagtgaaagagcatttagtgacttttccattgtcatttattccctaagtcaacccactcattggggaaaaatcattattattcttttaaaggatgtatttctttaccttctgtttgttttcttttgatagaagacttctctggtgagattggtcatggcattaatgaatgtgattttttggtattatataaatgaaatgtgttaacatttggaatatctccataactcagtgaatcagtattttctaaatgaccaatgaatgatggtgcaaagtcatgcatgagtaagtttcatttaaagtacaggatagacaaatggaatttagggtaagagtgtgaaatatttatcaatataattttatcctactgattaacacagggaattgcattcagtatcctgtaataaaccataatggaagaggaaaaaagtagctttagattccacgttacaactaacctttaagaaaccaccacttgttgagttttggtgtagtatcaaagaagaacatccagaattatttggaaaggctgtggaactactcttcttttttcgaagtatgtatttgaatgaggctgtattttcttcataatacttcagccaaaacaacatattgcaacattgaatgtaaaagcacatatgagaatccagctctttaattaaatcagacattaaagagttttgcaagaatatgaaacaatgccatgcgtctcatgattttttgggaaaatacagttttttcattataaatgttaacgtagtaggattgttatttttaaatgaattagtatttgaaactttctgttttaacttttactatagtaaatttaatccatataattcatatatgtagaagctccttggggtccccaatacatttaagaaggttcctgagaccagagtgtatgagaacctgtgctgtagtgcttaaacggggacttggagccaaattgtttatgttcaaaactcagctttattatttaatagctctgtgaccttggacaagataccaaactacttttggcctcagtttctcatctaaataaaatgctatagtaatgtaacttgtaggttgtcttaaggattaatttgaatatatgaaaagttcttagaatttatatagtactcagcaggctataaaattatcaccttttgagcatttataatgtattggagttttcctttatagatgccagatttctaaatttctggagattcagtgttttgcggtattaacatggtctgtcatcagtaaagtcccagatacccttaacttctctacaccattccccccgccccaaccccgtcaaagtcagtggttctcaacctttgctgtattttagaatcacctggggagcttaaacaaacaaaccctcagtgcccaagacacacttcagactgactcagttaaaccagaatctgaaggtgggaatagggaccaaacatagtatttctcactcctgaagcctgaatattcagatcctctgccctgagattctgtctttccttccatgttctcaaataatttatttattacagctgatttctctctcatcttttgtatcactacacttggaggggcggtaggtgttctccctgctcaatgctgctgctaaggaaaccatcgttcccttttccctgacaccccatccccagccttgaaactcagcccatcagacagtaggacacacccctccctccttgttatctagagacatcctttgaagattttggcgcatggctcacagttattttctcagcactgttgattgctctttttgtgattgcaggtgatttaatattcacataaatgctccttcccacatgtgggcctctcagtccctgacttcctttcctgcagggatcttgtccttcctccacccccctcagccagacacatgctcatccagtccttgtcagtacccattacagatcaaacatcccgttctctgaccacacctcctgtcttttagaattcatttttttttagaatctcccagctcaccaggaccattgttcctgtcattttcccactaactctcacttgtcttatgaacttactttgctttttcctggcttagggagtccatgtccataattacaatcagtcttctgcaagccctcaaagatctcttgcccctctttctttctattgtacttatctagcaaaatcccaacctttgttaaatctaaattcctcccactctacattgcacccaggcgagggaatttatgctgattggtctcacttacaaatcatacctcaagctcaatggggcttttagtgctgtctggaattcctcctccatttccccagttcattcattgtttattgttctaaatgactattgcatactctcttctcaaacttcctgtatcccctccttcttcctcactctcagctgatggccttgtttctaggagaaaatgtaaactcttaggagagaaccaccacaagcttctatcaccgcattgagcaacctgcctacatttgtaattctaagctggccttttctcttatacctacagatggattctctgtgctggtttctaaggcatccctcttggagatcccattctgcctacctaattgttatcttctctgatggtgttctgtgcccacttccctttacagcagcatgttcccctctctctatggggatattccctcagactataaacatctgagcaaaactttctcttctcctctggttaccagttttcattgtctgtgtcacgtttctaatttctttctactcattctctcttaaagcctctacagtcaagcttctgcttcaccaagatagcccttgtggagcacactgctgacctgtgtgtcaacaatacccagccgtcagttcctaggcctcctcttactcagcaacgccatttggcacagctgatcacttctctcttttgaagctcttccttcaccagtgttctcagtagcatttattaccatatgattttgttgattatttattttggccaatgaaactgtaagctcctttagcaaggactcggtttattcctgtcactgcctgtaacagtggctgatacggaataggcacttgatacgtatttgttgaatacgtatcaacatacgtatactgtgagcttaaaatatgtgactgtgagcttaaagcagctatatacttgtcagatctttcccatctcctttcctggtcaggctatcacagccatgtcctttctctttttctccggaccttgcatttcctaactgtattttctgtcatctctactccagtcctatctttttcaggctgaaccaccaccattgtgcttacgtgtctctggggctctaatgtttacagagcgttcatttatatctggtattatagatgcagatggtctgtggatctgagttgaatgacattagcatttaatgctgaatttaggtgcagatggaagaaattaaaattatgaaaaaataagaaacaagtctttatggtcttcttattcttcttaaaattatggtcttcttaggatgttttggtttcttgttttgttactaccctactttacactttactatttctgcctgcccatagtggaattctccttgattgtctgcaagaatttttagaaagcaggagaaatcaacaagttcaagaggcccttttgacttcagctctgagcttatcattaattaagagtagtgtgtttttctcttagattatttgtgggaatataaattggttcagcttctatggaaaacagtatggaggttccttaaaaaaataaaaactatagagttgccacatgcccagcaatctcactcctgggcatatatccagaaaaactaattggaaaagatacatgctcaccaatgttcatagtagcactgtttataatagccaagacatggaagcaacctaagtattgcttaggcagcattcattggcagatgaatgctaaagaagatgtggtacatacatacaatggaatattactcagccatagaaagaaggaaataatgccatttgcagctacttggaggttagagattatcatactaagtgaagtaaatcagaaagagaaagacaaataccctatgatatcacttccatgtgaaatctaaaatatgataaaaaggaacttatttacaaaatagaagcagactcacaaacttagaaaacaaacatggttactaaagggagaagggtgggggagggataaattaggagtttgagattggcagatacaaactactctatataaaatagagatgcaaccaagtcctactctatagcaagggaactgtattcactatcctataataaaccataatatgaaaaagaatatattatacacatatatatctgtgtgtataattgtgtcactttgctataccccagaaactaacaaaacactgtaaatcacctatacctcaattaaaaaaaaaagtagtctatttctcttagattttcatccctctttccctctatattgatgagccagtgtgatactggatttgtgtgaaaactcatttgttactgggcttttctttttggcttctacagaaccttgcctcctggaatccatcaaaccctgaatgtctcttactggtggtgaaggaacttgtgcaacagtatcaccagtttcagtgcagccgccttcgtgagagctcccgcctcatgttcgaataccaga

SEQ ID NO: 55621 - DNA, 1821 bp, Bovine  19866880601907
  misc_feature (1)..(1): n is a, c, g, or t
nctcgctccctggagaggagtgtgccaggaaacataagaaactcagatacagggttaagacgtcagtttcctcagctgatccatagcccaaatgcctgactgctgtacttgactcctcaggtttgggccagaaggacccttccttgggcacctcttacagtccaggctgaccagctcaccagctctccaccccacaggtggtctcccgacttttccacctgttactggcttaggagagattccaccctcttctggggcagccaggccccaaagcaagaagaggggaaaacaatctggacttgaacttcatcagcagtacccactgccaggacctctgtgagaatgtgatgtaggaaagggtgaggacaaccatcgggtccaggctgacccagctatggaagctggtcaggcagagaaaacaagtccaggggcttgcatagaccagatctcacagtccagagaggtgggtactggactagtgtggggacccaggttctattcccagctctgatagtctccaatggtgggcaactcacaagacttttctgagcttacgttcccctcagagagacacatgggataatgtgttagaacaatgtgagttcatattttatcaataagtcccagaggtatcctactggcaacccttctctgggctaccacactttctcagctgccttggaatgaaggggagaagtccttattgctttgggttccaatttccttaaactgtcagcattacacacacacgcacacacacacaccacactttgcagcagattaaggatgcattacttctcaaaacaagtaacatttccagctttggaataagagggatgagggctcatttggggccacgttgcctcttcaacatcatcccacccccacaatcgccagtcctctcccctccccctccctccctgaattactcacactcctggaaacatgactgatgacttcgggatgagtaagaggcccatgcgcgtcatggcccaactgctgggagggtgaatgagttcaatgctccctcaagctgggccacttaaacatgtgccaggagtcctgctggaagaaggggccacaagaccctagacgggagctaggaaaagccagtcaggacaagctagaagtcctttcccccttcccccaggctttctgccaacctttgggtgaggtgacagtagccttctgaacatgggttgacagcccccacccctttctgggcagcgggtgcagcggctctcactgggttccaagacactgtgtttctttgacccaagcaccccagcctcaccccagcacagccaggccccaggcaaccctgaacttggcagcctagccttggctgctttgaaaggaccttaatccagggctcaatctgcagggtgcgtacgtggagtgggtgtgtgtgtttacactctcctgtacgccctaatccatggtgccagtcaagcaaatattttgggtctgttttccattatccacatgtcccatttctggacatttggtggaaatgggatctcagcaaaggggaggtattaattcaacatgttctgaaatgtttgctttacattcttggagttaaagtacaagcagaacatactactataagcaaaacaacatgcaaactagatttcctgcacttagtaaatagtgctgaagcatcagtttccccattcctagcatgggcgcggtcaggacatggacggcatggatggcatggacgacaacgcagggctgtgaagcggaggcagacccacgtgggtgttctctgcaaccagggtaagacggtgtcctcactctgagcctcggctccccaga

SEQ ID NO: 55622 - DNA, 962 bp, Bovine  19866880662984
  misc_feature (1)..(1): n is a, c, g, or t
ncaatccagaggatgtgatggcgtgacaaaggatgggtaacatttactaggcagggctcattgctgagtggccttgtaggcatacttctcttgggagctatcaaaggattttaaacaagagaggaagcctatgagaactgaactctagaaagagtaatctgtctacaacatggaggagggactggggtcagacctgaagctagaagactggggagaaagctggtgtccatgcaggagtccaagcaagccaggcacggtaaaaccagcatctcccggagaaatccacaaggacctcgtcatagtcaaggtctgattgtttgaaaagaaggaaaagaaaagagaaaggaagaaaaagaaaacctgcttggagaaagtcaagcttttctccagtaaatcagttgtcaggggtgcaggttgctaagctacagcccactctaaaaggagctttgggggaggggggtgtcatcagtcaggttgctccctcctccaggcccagaggaggggaaggggtcgctccacctccaggaaggacccacagggtgcaaatggcagcagtacagcaggcagacgaggctgcagggccttggggcgtctgacgttcaagctgggtgcgcatctcatcagctactcagcatggctgcggagtgcagggctccagggccagcgagcacagcgctattttgctatgtagggtcacaagcttccgtctgtcttctaatctgtttttaggccatggaggtttggggtgtttctgcatctctcctcttgcaggtttgcctgtgcaatcaaagaggctttcaaaaaagaaaaagtcagtttaatcatccaatgatttaactactatcacctgtagcttcttaaaattcagaggatgggggtggagagagtggaggctcactttactttccaatgtcttaaattgatgtattttcccctggaattcaaacgtgaagcaacaaggc

SEQ ID NO: 55623 - DNA, 1844 bp, Bovine  19866880674085
  misc_feature (1)..(1): n is a, c, g, or t
naaacctatttttgagaaatactgacctctagtcactgaaaatatggcaaagtttcaagtttcattctgcaattggtctcctatgccaccatttcttggcctattttagctgtcccttactctggcaaatgctcaaatttcatgggtaacaacgaataaaatgtgtgcattttacatgtaattacatacagtatgtacatcaaaaataaatcttaatttatttctgccaataagatctaatacgcaaaccttactctttttaagtctaaacactggagagaccttaggacagagcattatatcgtaacataagtaaactgtgcttcttctctaagggttaggactggggttgctcaggtctttcccagaaacatgcttaatgctactgtgcctgccctgtccaaagcctgaaatgccatgtgcttcattcaataagcactaagctatgcagggtcattttaattgcagtgacagcaaagcaacataaatgcatttacttgtggtagccagtccgtttcttcaggacttatcagcagttaaggaaggaaaaactgaaaagtttggatcttaaaggagcaatgaaatagcaggtggctcagccacttaatgtgtgcctctggcatatcatctaacatctcagccttaaacacataaacctgagactctaaaaaaagcgttcacccagtccatcaacctgtctcctttgcatgttcctcatcatcatttgcggtcctcttcctccaggctccatcactgaaataaaatgcttagctacataatacatacaaaaaagtcctaaagaccactgtgacaaagatgccaagaattatcatcattttgtgaccaaaaacaagcagcaacagtctaatttttctaaaaatttatgaaccactgctttaactcctgtcacccaagaaacccagcaccaaatcgtttttctccactaataagtataatgtcaccaaaatttgtccttgggtggcaaactgccaattactaagccagagaatactcctataaaataatataaatctacaataaaagcttacgaaaacatgttagaacttaagtggcaaggatcataacccagggacctgggagcaaaggtagaaaatgaagatttgcagcaaccactatctttaaaaatcacctgactttacaattttacgaagtacacatgcaagtgtaatacaggaaaattgcttctcttcctaattttcaagtgaaattgatgctccacgagaatacaatcccaagatgaacactggatgtctctacattgctcccagttcgcaattctatgactcaagatctaaggttcaagtaagagcactggatcagcagtcaatgccctcgactctaatggccacaactacttcactggttattaaggcttcggtgaagtcagttaaacgttcttagttctgactctcaagtttttaaaaatgtgactttagggtatttcatagagtcagctggctaaagtgagagcatacgagtaaatggatactgaagcctgtaagaactttttttaatgcagcctgactctttttcaaggaggcctccaaaagtaaagtgacttgctcaatgtgacaaaacaagtttggttcatgggtatgaaaccaaacccatttttctaccgtatcattgtgctataaacaatcccaaactgattttaacagtaagtttaagactaggtaaaagttttattcttcagacatatgattgcaaggcaagagaaaatcaagtgggtgacaaatgtctgccagcctaatagtaacgatttgttgctcataatgaagagctgagctctaaacactggtattctagtcctggttctattt

SEQ ID NO: 55624 - DNA, 764 bp, Bovine  19866880715450
  misc_feature (1)..(1): n is a, c, g, or t
nccccggggccctcccaggttaaccccgccagttcttggtaacgcagggcacagcatgctcagccttgactttctcaagctgattcttctcacctgcaggcagctcctggccaccccgtctactgtgcccgcctgggttggcctgaaaggcgccagctgacagcgtctcagcctttccctgagcacagggaaaagactcctgtgtttctttctgcttcttgcttggagagacaggtatttctgtctttgatccctaagctctgttttctttctcctgttactaaacggttcactccctatctcccctgccccctgccatcccaccctttttgcaacttcatcatttttcccatattgcaccgtttggcacaggagaagaagggaaccacatcaaataaaggaatgcaaccacaaaagctgccttgagaagcaaggccccagagtctttttttctttttctctctctttttttttttttttgccagtttaccgtttttggacttgatctcccataatcaaatcctccctgtcgtgttaacaatgtggtggtgtgtcaatacattggaattctgcttcaatcagcgatctggagcttaataggaaaatgaagcaacaaaatgttggtcttactgttaaccttaggctaggcctgtacttaggatcgggatgttggcttcttgatggtatgtgggccaaaccttcaaagttttgtgagagctcagggctgtcagcagaggcctcaagcatattcaggcatccttctg

SEQ ID NO: 55625 - DNA, 1490 bp, Bovine  19866880728390
  misc_feature (1)..(1): n is a, c, g, or t
ncttgatatgtatattggaaggagtggcttcctgttggtcattctgtaagaaatgccctataagagataataaaccaaaagacccaaatagagatggaagaagtttgactcatctgggatcttattaaaatagaaccctgcacacacatttcattggtttgttattctggaaacctcgatttgaattttgttaatatcatcatatacgataaagacacagcctggaaccacagcaaagcactttagcaattgctctccttggggagagaattcttcagagataagattaaatttgtgtgggctgattagcctaaacattatctggtacagatagtccatcacctcgaaagaagttgataaacatattgttaactcatcaaaatttttacagaaggggcctcttatcagaaggccatctaaactatgatgaaagatcacgaattaccagaaaatggttgactagagaacagaatggggaaagtgcccactgaacacaaaaggaacggcagggagaagctttgatgcttgggagttcttaaactacctggggctataatctgaaaaaccaactttctctcaattgtcagctagagctgcccaaccctttgctctcagattttagggacttatatcaggacttttgcagtggtggtaaactgctggcccaggttaatctatgtttctgtctttgaagtgctttggcatgagtttatatgaaaaaatatgtgactggcacataggagctcaagaaatgtgtccggctgaattaaaggctaagaggccctgtatcagagactttatagctcttgaagctctaaatgatggaaactgcagggaagggaaatacattcatccaagtgtcttggggagagtttgaatttgttcagtaggtgggtcccgccaagggaacaaagtgaagtcactcagtcgtgtccgactctttgctaccctgtggactgtagctcgccaggctcctctgtccatgggattttccaggcaagaatactggcatgggttgccatttccttctccaggggatctttccaacccagtgatcgaacccaggtctcccacattgcagacagatgctttaacctctgcaccgccaggggacaggcaggctgttattccctgtggggcatcatgacttcctcgtcacaggctagttaggtcccaagactcatgaacatgtggtgactctagaaacagcttccaggatgcacacaggacagctcaccactgactcacagtgaagcgaagcccctggtggtcacagggctgcagccttggccttttcaatatcagcgctggaattgctcgttttcaataaatgacgtcagggacttagaaatgacttgttctaatttatactattggtgacagtggcatagaattaactttgttctactttcaaatgctatgaattttccccctttgcaggaattagcagctgacttcaagagagccaacttcaatagacagcctgtgcc

SEQ ID NO: 55626 - DNA, 2346 bp, Bovine  19866880801595
  misc_feature (1)..(1): n is a, c, g, or t
naatctacatacacctacaactgctctaacaatgtttattagctaaaaaagaatgcactaataaaaacgtgaatgatctttttaaaaaaaatttatccaaagagagtgctgtctattattaggtgagaaagggaacaatgcagaggcagtcaaacaagccaaagcaaccttgacaatcagaggaattcagtggccagaaggagcagtaatcagctacaacaacagtaaccagaattcaagtggaggtaacatgaacagatatgtttactatatacctcttgatttttgaccttcaagcagtactttaaccaactgacaatttttagagactttctctaagaaaggaaaattcttcatgatctagttttagtaatagtttaattaatttattcatgaacaatgataattctttgcctctagtagtatatgactcttccccagcagctgacagcccttttcccccttctatagtttctgatactgagtattcatttggcactattatcaacaaaaacatgtacacgtttgtgtacatgtgtacatgtacacaagaacgttcagaggagcactggagcactgtttacaacattcaactcaactgcccatcaacagcagaacggataaactgtgctttacttataaaatggcaactaaaatgaaataaccactgctacatgcagtgactgaacctcacaaacagaatgttgaatgaaagtaacctgattcaaaagaatacagtactaaaggattccttttatgtaagattcaaaacaggcaaaactcatcaatggtgattaaagtcagagtagtggttaccttctacctttggataggataaggactgagagggatttgagaaggtttcaatagtacaataatattccctatcttgatctgagtaataactacatgagtgtgagtgagtgagtgaagtcattcagtcgtgtccgactctttgcgaccccgtggactatagcccaccagactcctccgtccatgggattctccaggcaagaatactggagtgggttgccacttccttctccagacatgagtgtggtcactacataaaaattcactgaggtatacactaatgatctgtgcacttttctgcagctgtgttatgttctaataaaaatttcagttaaaaaaacaaaaagcatggaaggggcaaatagaaagcagagagagggttagacagaaaatgacttgaataaatgtacaaaatagaaaaatcattgcttacatttgatttcaaggagaatgctctctatcacaaagttacgtgaacattttctgaaacatctgtatctatttaactttctgttattatgaacagattgaatgttttctttgtcatctaaattcaattcatttaccctagtctcttacctgctttggataaaaataagctcattccaccagagcccgagccagcttccaaaacagtatcacctgggtggatattcatcatcgacagtatcatatttatatcctatgattgaaatacagcaagggtgattgtgtggccaataaatacatactaagcacctactccttcaaataccatgttgggcttggagaaaagtggagggggaaaaaaaggattaaactttggccctttctacgaaaagtttatagtttacttgacaaaatgagagattgaggaatcaactagcaaatacagaaggacttaagtataatattgaaattacagacaataagtaacattgagagctctgagaaagagaaatcagcagactaccctagcttaaagacatagaaaatgtaaggaaacagtcacaaggtaggggacagctttcaacaaaaaagaggtagaataaaacacagtttgcttatctgaatccaggctaaagcatttaaacttaacatggtaagtaactaggatgtgtcactgaggtaatataaatggcactttataaagattaatctgtcagggcaatataggatgtactagaactgagaaaaattagaggcagaaagacaagttaggaagttattacataatctgcattaaatgatgaattctcatttagaattaggataccaggaacagacaggacatatttgccaaactttataactaaagaattgttttgttaacaggaatatcatggatgatagtagtaatagctgtttattgcaacttcaccaggtgccaggcttctgttaactatgcaaactgctttcaaatattatcttgtttaatcagaataataatgagaaaatggtcaccattgccattataaggatgagaaatcagaaaggttaagtaatttgcccaaagtcacacagccaggaattaagtgggcaagtaacactgat

SEQ ID NO: 55627 - DNA, 2486 bp, Bovine  19866880864823
  misc_feature (1)..(1): n is a, c, g, or t
ngggtctgtgccggacccctccttctgggagttaaagtcgggctcccacttccctgacctcagggtaccactgaacctctatgataggggaagttgctgggcagaggtcagggctgggccacacactagtgtttgagagacagtgcagcccagcctgtgagaaggagtgacatacagatgtgtccacacacggtgaaaccataacaaaagcagagctcacttaccttcgcggggaagaagtgacctggggagcgacacgcagagcttccagttgggagtgttttgtttcttaagtggagtgagaaggacacaggtgtgtgttttattgttcctcctgcattacacatccatttattcacctaacaaatgctttttaaaatcttactctgcaccaggttctgttttgagtagagagatcttttttaacatccggtagattttatgagtgtgaaataattcatcataaaacaaaaaggaacacagcaggacactagtgtgaattccagaggtgtctggggacctgagcaacagaggctcgccaaagcatgcgtttgtacttatttttaaacactaaacatgggcttctcattgcctcaatgcatttgttcagtgtaatttgttgaaggcccagggcccgtggtccaacacttagtactttgttaacgtgagagggtgcccatccatatatcctccccttgtgcctccctgggtcaggcctgaaacctgcccctgagcatgtgtagcagagcctcctgagagccactccccccacctccaccctgaccgcagctttggctctgggtccttctgtctcccctctttttgcagcattttgtgcaattgtgttctgaccccgcgggagagctcccaagagctggccaagttggagtccatcacccgagcctaccaggtaagaccaagaaggtctctcctccgcctcaatcagcacaccagcccagagcccccctggggaggctcatgggaacggaagagctattcagagtttgagaggcaacatcaccatccaggcaacttcctggcttaggtatctcaggcacccaaggcatattcacaaaggaacctaggtgacaaagtcctcatggctgagctgtcttgctggctcagccccaacccttggcctgacaaggggaatagccctggttgtcccatgggattgccttttccctcccctgtcccccagatgcccagctgcccccgcaagcccccaccactccaacaggcaggccacgagccaatgagggtgttgcaggtcccaagcctagcagccctctggagacctctcctagattgctgttccttttgggacttcctgctggcccttcagaacttgcagtccacttataaccaggaccaaaaggaggcacaacccatttccagttctctgggaagagatttgtcatcaagtatgtttgtgttctcaagagaagaactgagttagcacacctgttgagggagattggcacaaagtcactgcccatcacccccagccttgcgctaacgggtacctggagctcccaggcctgtgctgaagatgcccacgggtgtgtccccagagcagcatgcgtgagctggtggagtccggtcggtacgagacgcgggaggacttctctgtggttctgcagcccttcttctacaacattcggctccctgtcctggcggtaggctccctgccctccctgacagggctcccacaaggaggaggaaatttaaagtggaaacaccaagtgcttccacagactgggaacaaatggggcggacccaggcagctctctagctgctgctctggtggctgcagccttcttgaacatcagaactgtattcaagaggcagcccaatgtttgatgttctcatgactgctcgttgcagcctccattttactaagtacctactacatgccaggcactgtgcataccataggtaaaatcttcacaattaccttctgaggtgagctttatcatccccgtgtaagagaggctcagagacatgaagaatccttcctaaaagcatgcaagaaataagggacagaggtgaattttgaacacgtccgactccagactgttcactttcggccccatccccagcactgtggctgttgtttctctccctggctctgctctccacctgactcttccattctgagcagaagggctctgtgaatgggccagggtggacacctgggtctgtccacctgggcctcccatcccaagggcctggcctaccagaagaagctttaagcaccgagactttgcccaggcctgaagccctattctccccatcaagctcactgggaccaactggtcaagagttgggaaatagctgttcccagctggctggctaagacttcctcagggactaggatcttattccctcatccatggcatgggttgcataaatgcgcctaaaaatatatatagcactttttaaattaaataatgggaattgtgagatccagaaagcaggttggg

SEQ ID NO: 55628 - DNA, 2558 bp, Bovine  19866880881526
  misc_feature (1)..(1): n is a, c, g, or t
naagccttgggagattggggggtggtggttgagtggcatggtgatgggaatggagagatcaccacaagcatagtacagcatttactttgtgaccttgttgaattgcttagaggtgaaaagagccttaggaggacttgaagtgaatcccttctggattcaacccttcagttataactacggaatggtagttgtgtaacgtaggtcagggcagaatagactgtggaagtacagtatggggtaggctctgcagcccaaaacagtcctctttcctcagagaacagtgcttttcttccaccttgccttaatttcttccttatcaggtatctttaagcactttctcttaagtcaaagattgctaggcatgggggctttagtaatgtacacacactcattttcactgtttaaaaatttaacatttgaatgaaatactcttatttactttagtgtcagataggagggcaagtaaaggctagttaaagggcaaagagtagggtccctatttctacagctctggagggacgaataaaataatttcctgctttaatttctgaagcataagtcagaggaagtatgtttaacaggaagtatgtttgaaatactctaaggtcagctttgtagtctgtcactctgtccagtgggtctctggaagctctgaaaagcttcctctagctactgggacctaatggtagaggttgatcctgtgatatcatcagagaggaagtttcagagtgaagtcctttttaagaaatatgtggttgagggtacctctttatctagtttctcctttatattgatgttctcaaaaataatatgatcagcacaaagaggccccagcctgcaatttgtcttgccttgcagtttctcctgaccttgtatcattcttttttaaaaatgtattatttgtttttgccgttagtacagtaaaggcatctgaaagtttgagattttgctaggctatgtgacaggctgccactgccgctagaagtgcaagcatttgcttggggctgaatctgcaggcatatgtgagcatgatttatatatttgttatctatgttttgttatgatagtgtcaaagtatcttttttattgtcgtctttctgtagttgcctgacttggtaccccagctggggaccctgtaccagttaatggaaagcagagtaaaaacttttcagaagctctcccaccttcacggaaagcttatccttctaatcacacaagtgagtagatcagattgttttgtgccaaacatttgaatgtgagagtaatggagagaggaataaggattgtttgcctggttgttgaaagtgccccatttcagttaaaacaaaaactggtagatgaagacctaatttttaactaggcagtgctatgtatttgatagtaagtaagctttgttgtacttgagtcaactttagctcatcaccatcaatgtttgaacttaatatagttagagtggttgtggtgctgtgagcaagagttgcagggtattgctgcagcttttggtcacagaaggaaatcttaacctgagaagcattttcagagtaattacacagagtaattctttcttggatttgatgcacttgccttttgcctgatatttgaactgcatcatgttaaggtcatccatttcatggatgagggtgagggtgagtttactgttggggaggttgtgtgatacttgagataaatttacattccacttcacaatagcacttgattgtctttcaggttacagcgtcagagaaaacaaaggaaacgacttgtcctgctcagaaggcaaagttggtgtatgaagaaggtaaagacttagggtatatgcttaacaattcattttcacattggctcaactctgtgacttgtgagtaagatcgtgctttggcacaccttccctgataaaacggacaagcccttggcgaaaccggcagaaatgtgatcaaatgaaagagagggcacaaatagagtaacaaaaaagagcatcaggtatggaagagatttaaatagaacaccatgaacagccatgcacatacagaaaacctggatggtataggtaatttcttgggaagcttcaatgaccaaattgacttagagaaaccttgaagtaatagttttgaatttacttaatcaaaatctttcctcacaaggtaccagacacaggttttataaatgacttttattagtcttttaaggaacaagtcatttttgtcatatatgaacagttcaggcattttatgaatcagaaccagaaaaatgtagtcaaaatagcattttaggccatcctcaaatatcctaagtagcagattaattatagaaataaaatcatgtttcattgtcaagtagaatgtatttaaagattataacatgatttagcgtcaagaaaccttatcactgtagttattaccacattaacagattaccatgagcactatatattaagcaacctaggattttaagtaagggagtttccttaataaatctacatcagacataaggtttagaagcattcccataaagtcattaacaagacaatagtgtaccttttattacttcggatatcctgc

SEQ ID NO: 55629 - DNA, 1702 bp, Bovine  19866880900564
  misc_feature (1)..(1): n is a, c, g, or t
nttagctggaaaaatatatgaagataaagggaataaatacactgagggctggagaaggtgactttgtacttgacactctgttggctctatgatctggagctggttttgcaatacctctgaggttttttactgaacacctgtgtggttttggtcactggacacattacaaattttatttcatttcgtcttcacagtcagcctctgagtcacacttatcttcattttgtggatgaggaaattgccaaagtttgcagctagagtctgggtcctcacgactctaacctcaaagcttttgctatgctcactccctgctgactggtggccacttctgatctggctagtagagggcattttctgaaaagagctacagaactttaatttgtaccttcttctttttttagcaggctggcttatttggtttatttctttttaactttaaaaggtccaaattaataaacagtccagacttgaacaaaattcttgaaatctgacaatccataaaaaaaattcggtctttgcccactcaaacagtgcatttgatgacaaacccttttgaggcctaaaaatatgatgctaaatctgtaatttttttatttggggggggaggttatataaaattccttctctttcaaaaatttacatttgcagacttgcagaattttatatacatatacatgtacacacagttttcttttacatgtgaaatttctcaaatccagagtcttacaaatgtgtctgaaatgtaggaggctctcctataaaactcatgagttgtcataatatggaaaaaaatagttgccatttctcctgtgttcctggggaccaggcagccgttataaaccatcgtcgcagtggatagtatagtcttagtttcatacttatagatacatatgcacatagaaaagtctggaaagatatatgctaaaacattatttatgcttacttcaggatagaggagattgtggatgatttttagttcaatgggcatttcaaggattttctgctatgaacatagattatttatatgcatttttaaattattataatgaagattatgtagccacataataaagatcaataatcaaaagttaaatgagacttctctttatgacgtaagagaataacataggccagatttaccctcccacaataaacaattagaaaaccagacaaaacaaaacatatgaaacacttgttcagacaatggacaacaggtagcacagtgagtcctaaagaaaggaaacagatgaagttaggctggtaggagtccttactttcttcctggaggcaccctccagaccacacagcaaggacagagaaccccaagccagtgtgtcgaggagacagagatgggggttcagagaagctgagataccttggaagtttggaagttgaaggactgagttctgatggagagaagtagggagaaaaacagcttaaaaaaaaaaaaaaaacaccttcccaggagtgcccttgagtctttactgaatacaagatgctcacatgtagaatgaaactccaggttaaagagctaccaagaaacactgagctgaactgctcccagaaattacacagcgcttaagttttaactaaccaggaaggagagagtccttgttgatgataactcagggcattcactagggaattcagtaggaccatgtgatgaatatctcaaaccccagagccatcactaaagaaataa

SEQ ID NO: 55630 - DNA, 3116 bp, Bovine  19866880907746
  misc_feature (1)..(1): n is a, c, g, or t
ncacctactgattctggccttgagtatctccaagtgaaaaagagtgctcactgcctgatcttttccacagctgagtcctcaataagcattccctgctactgctgctgctgctaagtcgcttcaatcatgtccgagtccgtgcgaccccatagacggcctcctaccaggctcctctgtctctgggattctccaggcaagaacactggagtggattgccatttccttctccaaggcatgaaagtgaaaagtgaaagtgaagtcgctcagtcatgtccgactcttcgtgaccccatggactgcagcctaccaggctcctccgcccatgagattttccaggcaagagtactggagtggggtgccaatgccttctccgaagcattccctacacacacacaaacacaaagtcaatctctcttccccccccaccacccactgcaagacacagcttctgtttagactcttaatatctcattcttaaatataaaagaactaccaggttttcaaggaaagcttccaacataaacaagaaagaactcagagaaaaactgaaattaaaaaaacacagaattaatatcctaaagatatgatagcaaagtttaaaatagcaatggaaaagataacgacaaaaacaaaaaaaacaaaacctcccagaaagtagaatgaagaaaagcaaagagaatcaggagaggcataaccaaaaaaaaggaaagaaatataatccagaagtctagtttccaataaattggagttctagagaaagagaacaaagaaaatgaaatggagtacattttcaaagaaaaaatataagacaatttcctagaaagataagagtctccatgccaaaagggtcccaactgcctacacattcaccttctgtttatccacactgaagaaggacaaaatgaacaggcaactatattatgatgaattacatgagtagacttttttgttttgttcgaacagcagggttgcttctctgctaatttgcagagaagatctgcttaaacagatactaaaattaattttgcattcttgaaagaaaaataaatcaaaaagttgctaaagtacagtggcagagcagaggaaaaccaagtcaacatttgttttctcttaatttggaggacgggaagggggcgagagaggatcagatagttggatggcatcatcaactcaatggacatgagtatgagcaaactccaggagatagtgaaggacagggaagcctgacatgctgcagtccactgggctgcaaggagctggacatgactgagcacctgaacaacaacaatttggagagtaggctgactacacagatatttttaagatatatgaagccattagaaacaattcaagaaaccatgttggaatcaaggaaaatgcaatttatttgagacttataggtgcatttttgtgcttgtcctaagaacttttttgaaattattcatttgaagaggagaaaaatacatctctaccaaagtacttgttttactatttcaaagaagttttacagtagttaaattataaaatcacaagactagaaaaatagataaggcccttgaaagcatatttaaacatttgctttccttcaggcaagaaaaaaaaaaaaaaaaaaaaacacctcaatcaatcacaaaaggaacttacatgccatgccatgctaaacttaaaataaaaacaactgttaaccctgaaacaggtgtccacatgcattaaacaagtattcattgataaacccttccactggtaaagtgaaaatgtaagctcctcaaaaatggaggcatgtttactccagggtccaaatttactcacagtggttaataaataattaaattaatttagttaggaagggggaaaaaaaagaaaattgtattatgaactcaaagagtatttgtgttttaaagcccaagtcaagtttttccttgtagtggggattgtgtcaatgtgttagaacactgggtcatacacaaaccagccatatccatgtggatatgagcttcacacagatacatccaaaatgctttcttctatttgtctaagtgctaaatcattttttcctgcagttgggcatatcctatctacaatttacagatggacaagctcatttgaaaactgactaattaaaatatattgatcataaaatatgtactgttatcttttttccttaacacatcctaaagccaatcttagctgaaaatgtataccgtatgtatccttgcacagcataagacaagaatataattcaatgaaacctttacaaaatgtcagatcaattacattttttcagtgcagatggatttaaggaaatcatctctgaaaacagtacttcatttaaagtaaaataaagacataattttccctgataaatcaatgtgtaggagatgccaaaatattaaaactgccatatattaaagatgccatgatatgaatttttaaagtacatacaagtagtttgtgatgatcctgaggcaaagtcccagaaacactaagattctcttcggtttgcccaacaggaaggaaagaatgataatatgatatacgagaaataaactttcagttattggggctaaaaagctcaaattttagagaaatcattaacacatgactcaagtaattaattcatttaacaaatacttattgaatatcagcaatatgtaacttttcaactacatctataattctgaaagtgaagttggtatgaagctgatcacacaggcaaatcttacctctccctcaacacaggtcagcatgacatttctctaaaagacttctttatgaggttttgaaattcagtgccataaaagtcagatgcataaatcacttctgaagaatacattcacaatgcaccatgcattgtgcaatgatttcatgatttggtagactttagagatttactgttacttgagttaaacattaacagacacaaaatatttatctctttgcccattaaagcttaatatgcaccttagagcaatttatgtatttgttaacacaatataagttatcttctattcatctccaactgaaatgtggtatttaaaacattccctatgttacagctgattataaatgacatttaagagcagtattcaagtgggaaatacacaaagggaaaggtg

SEQ ID NO: 55631 - DNA, 1267 bp, Bovine  19866880922411
  misc_feature (1)..(1): n is a, c, g, or t
ngtatgtctttggttgctcctaaaatatccttatgaataaaatctacattgtctggccactcttctacatgacttattctccatgaatcacgccagtgtctataattcttcatagccagtttgtggtggtcctttcgaatttcgaaacttatgactcgtccttgtgatccgacttaatttaaaaaaaaattatgacagtacatagtataagtcagtttattaaaaatgtcaaaaatttatttttcaaagatattacatggatgtgaaaaaataattcaaatggttcaaggttacaaaagtctctatcctatcccaaattcccagtcagtctccctcttcagaggcaaccatatcaccacagttatttacccttcccaagatagtcggtgcctctacaagtgtgcaagtatctctttttctgtttttaacacaggttcccatcatacatactgtcctttcccatcatacatacttacctttcttcttatttaccaatggcatttcagtgattaacaatctattgaattttttaaaagagctattatgttcccttgtatggctatgttttttaaccagtcacctgccaaagaacatttagcttgtttctcatcttagctattacaaacaataccgcagtgacaattattttgcctaggtctttgtaaacataagccatttatatatataggataaagtcctaaaaatggaattgctaactcaaaggatatgtgaattttttttactttgaaaattattaccaaattgttctccaaaaagatgataccaatttacatttgaccaataatgtattaagagtgcctatttctccatacttcctccaacagagttatcaaactttgtatcaacctaaaaattgcatacagtttatcactgtagttttaacttgcatgtcttttgttaggatgaagttaggccttttggatacttaaaaatacttggggcttcccttgtggctcggctggtaaagaatccgcctgcaatgtgggagccctgggttcaatccccgtgttgggaagatcccatggagaagggaaaggctactcactccagtattctggcctggagaattccatggactgtatagtcccgctgctaagtcacttcagtcgtgtccgactctgtgtgatcccatggatggcagcccaccaggctcccccattcctgggattctccaggcaagaacaatggagtgggttgccattttcttctccaatgcatgaaagtgaaaagtgaaagtgaagtcact

SEQ ID NO: 55632 - DNA, 4221 bp, Bovine  19866880927687
  misc_feature (1)..(1): n is a, c, g, or t
nttgacaataccctatgatttagaaggaggcagatttcatcccaatactttgatgtctagaaatggattccagttggttgttgtcctcgtaaaacagcattttatttaattcaacacatactgagactacagccagctttctcatgggcgaggagcccgagctgtataagacagagtctagacaccaatctaaacatctcaaactcaaggcagaccatggctgggcctgaggttagaggccagtgtgccatggaacccagcagaggggagattgattccagctgagagcgagggcctctgcctgaagctgtgagcgtgttctcagtgtgatatcaagctttttgcagctcttgggttagtttccttgctttgtgagcttagattccttaaaaacaaaccaggcctgcttgaggattggcacctctaaggagactgtgtacatgaaccagttataaccacttgtttgttcctaaagcccataccagcaatccaggctggcctggcagggcacagctacagattaagctcccatcatgccaggcatttgctcaccaaggcgcccagagtcggtgggccatctttacaggggcttttggagggcttggggtgatgggcatcgaggcagaaccaggtctctttgtagagatcctattatgaggatgaccctttgtcaccggagagtaacccccgatgagtcagtctttaccatggccgttcaggaccatgaggacaaggcgagaccacaaggatgattagcgggacttgtcttaccctatttacaggaccgctttgattttcagaccacagtcagcttgcatatgactgattaaaaacatgtgccagttgatgtcacagctgcagaagaaaactcgaaaaaagaaaggagccttagatgtttaggaactcgcctctatttgcaaaaatgaattctgacttgatttgtgtgtctttgatttcctgacagtgaggttcgtgtccccgaaccacttctcccaccctgccccacccacccccacactggcctgacttgagcaaacattgtaaggctcatcttatgattgcccaaagaaaagcatttgggaattccagaaagagacctcagagtcctatttcggaagacagcagctgtttaggcttctgcagaaataaaggtcccaagtaaatgaggctaaaggcagcaagatcccaggggctactccgtcaggtcgtgctcccgtgggaagacgagctctggtgggactggtatcagaggctctcttgactgaactcgctcagcgtctgttttctcacctgcaaaatgggaccatgactcctgccgcacgcggcagtactgtgagcaatgttcaatctgctttgtgggtttccttcctctttccccggagtctccaacctcttgggactttttattctctgttttttgctttcattttcttaaagtggtacggattcaaatgtttagatgttaatttcacagatttttgtccttttgaaaaggtccattgaataaatcgaggcttataattccagcagggaaaaccccttttggtgagaaaggctcctaattgccttcatctcaaggtctctgaggattcctctcacagctctctgtccccactctccttagtgtccccagagcccctgcccaggagcacctagatgatggattttccaggcattgttaccccctgatgacttagcttgagctccctgactctggagctctgctcagtgggagggcagacatggccgagagaaacgagcgtccctccttctcaccactgcctgtggttcccagaacatgtgttcggagctctgccatgttcgcaaaaaagcatcccagataatgatgagctctgcctccctgcaccacaagtccttacaatgccttgaggcttgggcttggctggtgccttgatttaaccagtgaaggtcaagacacaaagaggttaagtggcttgctcaaagtcacgtggatttctcagaaccatcactgggtggcacctagagatgaccaagtatccatctgccttttggaggtgaggagccaggcctggactagagcccatgacttctgcctcgtggctcagggatctttctgttcaccccgctgcctctccttttcagtacttgtcctggacagagaaaggtctgttcgaggactgggccaactgtgatacccccacttctggtagccagagccacgtgattatcttaaacatctgtcaggcccacagctcaccttccccccaaccacactcttgaccagaactgtgcacaagagcacacccagaactcaggcaaaagccagccaggggtgcaggtgcctcctgttgcagagcccatccttagataccatgagtccacctccagcctctctgggctgcatttcaagaggttcacagtgtcctgacaactttggctggtgtcaagtcctgagaccgactatctctgtgcctccaactgcgagcgcatatgataagtgaaaagtgatccaagaaggcccagaggaaaggatgatctgggacttttccatccacacagggtttttctcttttgcagccacacatgccctagctgttcccagggactcagtctttccccctcaaacccaactgggtccccatggtaatagttgacatctattgatcaagtagtatgccaggcatcaggccaagtgcttacttggagcatctcatttaatcctcatgaggattactctttaaggtaggcattatggctccccttttatagtcgaagaaattaaagctgaagaggtgagtcacttgcacaggtgggacagccagtaaggagcagggccaagccttgagcccaggtgtggctggctccagaacacacagtgcctatcttgcacagcctccagcctgtgaggccttggagatcatcgagcacagctccctgccttgaagatgagggatctggtgcccagaagggaagaaacttactcgtggaccccagacccagaaaagcagacccactgagctccccagcaccctgattcctgacctcagggaattccctcctggcagtgcctgtgagctgaggccaggagccaatcctgcttccaattcatggaaaacctaccagacctcggcctggagtcagttctttaagttttattctgttgacctgagactctgtgatggactaagttgtgattttataaacccagagtgaaggaactgaggtcagtggaaagggtcagaacctgatgtcatcctcaggcatatttagctctaatctggtctaaaaataatttcccttccagtgtgagtagaatgggagcttgactgactcaaggcctctatcctgcaggtccttttgaccagtgaagggggatgtgagaagaccttcccttcaccacccctgtaacacacttacacttttgaagcttaccacacactttgtctttgggtcaaagagtttttttaaaggtgacagactagtgccattggcaagtgatacattctgagcagctctccactttctctgattaaaaaaaactgaaataaatgaaaacaatgcttcaaaaatatatatataaatggctgggagccagttgtcattttccccttcctccccctttccccgagctgacttcgtgcggctccgtgttgagaggcgctcactgacaacagcgggtagcatcatgcctttaaatagccctgctccgtactgcttccccttggcgtcacacagtttgccctggcagggaaagcccaggacagaacaggaaaattcagaattttctgaaggaggaaagagcttgctgtaaagctttctccctcttgccaagacctttctgtcgaaggagcttgcactggtgtggccccttcccccagagctttccaaggaaaaactgagctgaggagattcgcttcatcagatttgccccatgtgacaccgggcatgaggagagagcacgggagagaggtgcccatcctggagcccagggccccatttcagcagcagtcagtcccactccctcatccggcacctattgtggggccgacagcctctctctatagtgtcctcacctgtgacctaaaacaggggctccaccccacccagtgctctaactccaggtgtcctttgggcaggaaggcaaatgcagtggaggttggcagcagcccattggtgccggaccccctgaagaagggccagcaggcccccctccagcaaacacaaattctgctggggaga

SEQ ID NO: 55633 - DNA, 1678 bp, Bovine  19866880933245
  misc_feature (1)..(1): n is a, c, g, or t
nttaatgatcagcatgcacagctttccacaattttctcttcagttcactttctactctttcttctcttttctaggaaaggagagaaaaagtaaaaaaggagtgtttgaaaagtcttaaaaaaattttttgggggggacttccctggttgccagtggttaagaatctgccttccaatgcaggggacaggggtttgagccctggctggggcaactaagatccctcatgccaaggggcaactaagctcgcttgtcgcaactattgagccctcatgctctggagcctgtgctccacaacaagggagctgcatgctgcaatgaagacttagcacaaccagaaaacgaaaaaaagaacaaaacacctcattttaaaaaaaaattgaaatatagttgatattcaatgttttagtttcaagtgtgtagcaaagtgattcagttttatatatacatacatacacacacatatatttattcctttttagagtcttttcaattataggttatttattacaagatatgagtatagttccctgtggtataccatgggtccttgttggttatctattttatatataatggccgactctttgcaatcccatggactgtagcccaccaggttcctctgtccatggaattttccaggcaagaatactgcagtgggttgccatttccttctccaatatataatagggtgtatattttaatctcaaactcctaacaaattcctccttgaaaagcctttaaacaaagaggatgtgtgtctgaggtttttaatcaccaaatgtacatccacatggtgtggatgaacctgagtggatctctctgtttacttctctacagcgttgtggagcaaatgaggggggatgtagggggaagaagagagaaaggaaccgacttctactgagtgcctctaagaactaggaactgggtgggtactttgcagatattatctcatttaaggctcacaacaatccccagaattaggcactataatattatctcactttatagatgaggaaattgagacagaaagctcaaaggacttgcctaaggtcatgaagttggggttcagagctagaacttgaacctgcatactgaggtcggtacctgatacaaatggaataataataatgaaatacgtttttagaaatcggctaggaatggaactaaaatatgtccaaaacactcgaggcatgttacctctttgctagaacaagggctgacatgagctttagaaaccttgaattttgttcttaatggagacttaagtctaaaagtgtaagtataaaaggataaaagtataaaaggaactgcagttgtagctggaggttgccgcctgcaagtctgctttttcagaagatcttgcattaattaaacattcccagagctctttaagatacaaagataagagctgtcataggtgtgacatactgatcccaaagcaaggaaacattccagaaacactgcaagggcctgaatgatgcataggtgagtcccaaccacctgcatggtatagggaaggccctacactttggagacgcaccaaactgaaattctgcagggagatttcagtgtttggcagaaggttctcattgtcattaaaatataaatgctgggaacttcctggtggtttccagctgttaaaattctgtgcttctaatcctggggacctcggttcgat

SEQ ID NO: 55634 - DNA, 659 bp, Bovine  19866880962713
  misc_feature (1)..(1): n is a, c, g, or t
ncagaataaaaattatcaggaaaaaagaatcccacaaatagattataaactcagtacagtttctataattaactttaaaatttggtttttagttccctagtagtcaaagcaaaatagtatgcagtattttattatttgggaatagaggcatactagacccaaaggaaacatagcttttcttgaagtgaacaagagtgtgataaataactttgtgttttatttttacaggaatcgtgggaaaccaaaatgagacataatcagctgtgttgtgagacaccacctactgtcactgtacatgtaaaatcggggtcaaatagattgcatcagcctaaaaaacccattaccctgaagcgtcctatttttaaagatagttggccagcatctgaaaaaaatgcacataatagcaacaagtctaaacgccccaaaggaccctgtctagttatacagcgtcaggaaatgactgctttctttaaattatttggtaggtttaaaatattgtaatagaggtaattataaagtacttaaaaatgagagaatgtaagttctgttttatcattttcatgataatcaaaaaggatgctgttattttctgtgtcagattttccatctccaaccaaatttgtttttgccttagtctgttgtgtttttttttcccccca

SEQ ID NO: 55635 - DNA, 1455 bp, Bovine  19866881094333
  misc_feature (1)..(1): n is a, c, g, or t
ncttgggggtgtttccctcagggcactcactgcccactgaaaattgttagtgttcccatctaatttcacctctcggcccacagctactcacttctactctgttagagaggcagaaactaacaggtgatcctggagactggagaatttgcccaaggatctctctccttaacagaaactctcagactcagtgactgattgcaagggacacatctggcacaagcaaacaggtgctttcagcatattgtactgagtatcttgataccaggaaccatagggatgggaaacaaatgccgatccccctgcatgtgacatgtctggtgactttaatggaaacagtgaaaatggagtgttgggagaaacccgtacaaacagagcaaggcagttctgtacgtacacgtgattggtgtttgcccttccctccttctgtgtgttttttgccatatcaaacacactaaaggagagctgcccccagccccagccctgactggagagagtggagtgtgttctagcctggaataggcctctttctgggccactctctgggctgtctgcacagagaaaacacaaatagaaacctcgggcacgtaaggacacacacaggccacagatcctgtcaaaggggctccatcgtgttccgagtgaacagatgtttattccacaacattctccttgggttttgtccaacgcattaaaaaaaaaagcaaaacaaaacagtttacactaattattcccttttgctgcctttgcttgttttgctttgctcttttctttttcccatacgttaaaaactattcgtgtgaggaaattctgcccagctgcttgctggaacagacccttccatagcttaaaccaggaaccctttgttcttggatcggagtggagctcagattgccttgtcacatgtgtcttggcgcttcttccctgaagtttataggctttttaaaatccatttcctttttactccaaagatgatcggctttcataacttttcttcaagtgaattaatccagagcccctcattgttttgggttttcttccatggttcagtcagtattttactcagcaatcatgtattaagcacatcctaagtttggggactatcataccactatactgggtattaaaagaggaattaaacacttttcgctgtcactaatttgttcatatcttcatttcattattcatttccttcattcaagaaatattttttccgctcttgctgtgcaccaggtctgcactgggtgcagaagaatcagtaatgaggaaaaccaggcttggtccttgcctcaaggaattcccagtggtagtggtggaaacagacatggagagaattaattgcagttcagggtgatgcatgctgtaatagcaagggggttcaggattctttgaggagtgggaagaatgtaatgggctctgcctcaggcatagaaatttcagagcatacctgatatgggg

SEQ ID NO: 55636 - DNA, 1851 bp, Bovine  19866881124984
  misc_feature (1)..(1): n is a, c, g, or t
naagtcgctgtggatgtaaaatgggaaaatgattgtaaaatgtctgggttattgttgtgtgcaattaatggtaacttgttattaactgctgtgctaagacacttgattctcttttctgtaggcaataagattttccttaaatcagcaaattacatactgatatggtgacctaccttggcataggatcacaatagatcctccttgccttggaaataataaggaaagcagtgaaaacggagatctgtggtcacacatgtccattcctataaaggaatccttgtcctgggcccttttgcctttcctttgccgcctcaatgcccaaagacccagtcctactctccaagttaggggctccagttacagcaattgaaaatacaagttgcccaggtaaatttgaattctatagaaacaacaaataccttagtataagtatatcccttgcaatatttaggatatacttatattaaaacgttatttgaagtttagttgaaatttaaattgatgtgggcatcctatgtgaagggacagctcaagaatcaattgaacagtctgtccactgacttggggaggaggactcacccattttctagtcctctccctctggtaataaaggctcagcaagactttggctgtgccttcaaatcatttcctgggtagagacagtaaatgctgacaggtcctgctgtgtgtctttggggtgggagcagaggtggggggcggggtgtaaggatgtcttataccagccttcacatctcctcagccctctttcttctgaacattctcagagacagttggcagaataaagacagcctttgtggtctagtaacttgtctcgtgaaataagggcaagccctcttcacagaggttcttctaggaacattgctaaaagtggggactgtagctgctcctgtgatgtgactaacttgaaacagccagagcaggcgtgatggtaaccgactggatgctccttactctgggaagtctagggactgcagaactggagcttggaggatgatccagctgccttacagcaggtgaagtaaagaagacccagtgaagggaagtgctttgctcaaggtcacacagctatccagaattggagtctgaacttcagtctgggtctgctgccttgcattcttctgtaataattcagggggtctgagaactccccacacacttgtttggcggacttggcaatgttttctctggatgacttgataactctcatctccagatgtcaactcagtcgtgtgtccttcagcactgccatgctcagcttcatgcttgccacccttaagagcaagatggtagagagctcatggcactttctagaccagcttgatcttggcccgccccaacagtgcctccttgctgatccctttgccccaccctgatcaagtagttctgtggttgagatggaaaaatccacctcaaagcagagagcttttaacctcagtttcagaggagtaatttgtccacataacaggaggtgaaaattaaaataaagcagggcgtaggttggagcagtacagcactcctgagcttaagagtgcctttgacctgtccccccgagactggaatgatgatctggctgccagagagttcttagaggacgccctctgttcagtggtgtcactggcgaggtggtattagccctaagaccagctttatctgcacactctgaaagcggacctgacggtgcaggcagagccagcccacgtggaagcccgggagcggtgatcaatgggatcttccactctttttattttcttggtcttgccacaacctgtcatgagaccaagaaaacttgttttgaaaatgcttgacagccaaaacaacctgttctcggcc

SEQ ID NO: 55637 - DNA, 759 bp, Bovine  19866881203933
  misc_feature (1)..(1): n is a, c, g, or t
nagtaaaagggctaagatattcttatggagaaagtgtctgagttcgataaactgttatttaacataagttcatcacctatgtatgtgtgtattaaaccatcagcaaaaagacattactgaactaatccagtagtcatttctttcaacaaaatcagagattttcctaaaaaaaaaaaaaaattttcaaggtttttaaactgcccagtcacaaaaatattcagcctagtgtacctttaaacaagcacagaggaagttctataatgtaacactcttaaatttttctcataaagatctgatttttaggcaggcttaacttctcattataagtcaatgtaaatctaacattagatacaataaagccaatctcatattcatcacttatattaaccatgtaaatgtgaccaatcctttcaaggtaatgttacctcccaaatccaaaagactacataccagacattaagtaaccggtcatggactgctccagataagaaataaagacctgtaattccatcaaagggttggatctcattaggaggtctgatagtagtgaacgtaagtgatgaaactggtgtcgcatgtcctgtgaagtgctagagaaagttaaatctcatttaggagaagatggatataaagcagtaacaaaaattaagagttcacatgtaccaaacacaatatagataatacatatctgaaatcagagctccagactaattatttgtgctatattcctctcactttaaaaaatttcatctgaaaata

SEQ ID NO: 55638 - DNA, 859 bp, Bovine  19866881301846
  misc_feature (1)..(1): n is a, c, g, or t
nagtggggttctcctaggaattgcaggaaggccccatgaggccccaggaaggcagcgctgaggtcctggggcctgggtggtgttagcacccagggaagtggggggagtgggctcctctagcatagcagttcttgtctcagcctccctccagctagcacccagcgccctcctggagaagccatcacagctcttgagtggacgtggggaccctggcagcctcaaactggatgctcccctgaagggctggcaggccaggaacggccaccccaggaaccttgcagccttgtctctgggtccccacccgctggtgccgctcccttcgctgaagtcagaggccaacagtgtggcccgggataccacccagatcaaggacaagctcaagaaaaggagactctcagagggcttggcagcatcttcccgtggtgagccctgggccctgcccagaccccagccctaaggtcagggaccccaggccacttggactgtgagagtcagcaggtgtgcaactggcagctggggtcagaggtggtcggggggcaccctctctacagcccctgcctcctccgtggaatgccatctcccacttaggcctctgcagcggctcccaaccggactccccattcccaccctcgcctccttctagtcttcactgcagagcaattctttttgaacacagatctgaccaccttcttcctcccactcctgccaactatgctaaagccacccagtggctttcaagtggatacaaggactagaacccgctgctttctctcctaattcagtactgattttgttcccctttctacccaacctgcctctgaattttaattatttaattaatttattctaattttaaata

SEQ ID NO: 55639 - DNA, 1018 bp, Bovine  19866881321393
  misc_feature (1)..(1): n is a, c, g, or t
ntttgttgaaaagctgtctttcctcccttgtgttgtctttgcactcctatcagagagcagttgactctctgtgggtctatgtctgggaactctctcttgttccatggatctctttgtctgttctgccaatatcaccctatagctttacagtaactttcgaagatgggcagcgtcagtcctttgactttattcttctccttcaatattctgtgggctattctgggtattttgcctctccatataaactttaaaatcagtttgttgatatccagaaaggtttttacactttttttaatggttaagaaaaataaaaagatatttcatggtacatgaaaattatatgaaattcaaatttgtctctataaagttaatttgtttacatattatctattgtagctttcttagtacaaacagagctgagtatttgtgacagagacggtatagtcagaaaaatctaaaagactgactatcttgcccgttaccagaagttgactgagccctggtctagatcctaggctgttacttacacttagtttggttctgagcatggcccatgggtccagactccccgttttcaaatccttccatcaccatttgttcactgtgtcacctttaaaatgtcacttaccctttctgggcctgtttcttaactgtaagatagggaggatagcatttatctcacagagtcattgtgaagattaaatgaattatttcatgcaagtgcttagaatagggctgggtacctagaaactgcatataaatattgacttccatgcttgtttttatcctggcttaaaaagaatattaccaaaatggtctcaaatctctcccctgctaattcatctaccccactacttcccagagtgatgatcatcttaaaacacaccctaatgctcatctcttcaaagacctgtcacagcttcctgtttcctatggagtagcctggtgttcacagctccacagcctggctgccatctgtctgtgcagcctcatctaccttgccctccggttatgatcc

SEQ ID NO: 55640 - DNA, 1523 bp, Bovine  19866881331182
  misc_feature (1)..(1): n is a, c, g, or t
ntaaggaacccccaaagcaatctgcagtaatgtgtctgtgcaagatatagggttattgctaaccccttcccagatgacacttttgcttctcaacctagggattctgccttaagaggctgcattaatggatgtacagggtcccaaacaatggaggtgatagttggaggaatggaacctggactttcctaacacaaggcacattaatgagcagggcaaataggtagggtggagaggaaaagcacgaaagctgtgaatctagagcagggagttaattccagataaataaccaggacagttcttgctttcttttaggaacgacccaggcccatacttcccctggagagaacacattggaagagcagctgtggccagaggtaagggctttgtcttcatgggagaggtagtgacttcccttctgaagggtgagtcctagtcttgatacaagttgacaggcccttccctgaggccttgggggtatagactaagtgagctgcttcccctgggacaggcaggttacctggcagagtggaggcagcataactgtagctcctggaatttggggctcaaaatctcttcagactgagcaggtagttcccagaagtgcccagaaagacttataaacagcctggttatctctgtgaaccttgaagcagatgctgtgagttatccgaagtcatttgggtgaggttttcccagaacatctacaagataagagttgagagtaaatgctttatctcttactgaaatcagtaattcatgagaaattaacttgtgtctcctggtcacagatgtgcaaccaatttactgcacattttcccccattggaatatttccccttttactctcggttctggggagaatacatatgacctcctttcccaaagtcctccacctgattcccagaagtggaggctgctttggatgtacatgggcatctgaggcagccaagtggtcttgaggaccagccctccccccactacacacacttgctttcagcagcccctctgggcttaggacacattctgttccagtagggacacaagagtctcccaatttccactttatccaattcccagctttaaataacttaatgccccatatacccgcttttgtataagcaatcaaatttaaagaaggaaagtagataattcaaaaaatataacactatagaagagatttaaaaaatttttagtctagatatattgggtctcttcatggtttcctttttattgtgataaaatatgcataatataaaatcgatcatttttgagtgtacagttcagtgacattgagtacattcacattgctgtgtacctgtcagcactttctatctccagaactttctcattatcaccagttggtttttattctttatcctgcctccctctctctctaccctactgttctgaggcatccttacttgccacctctaaaatcgttctcaacaggcatatgtctccttttactaagtgaactggatatagggttaaaagagcatgactatggacaattggttgcttctg

SEQ ID NO: 55641 - DNA, 730 bp, Bovine  19866881335490
  misc_feature (1)..(1): n is a, c, g, or t
ntccgtcccaagagtgcatatgggcttcagaacagatgggctgaagtatctgatgacatctgaaaggactaaagagagagctggtttgaggctatgttcccagcagccgatggtcacctgtaaagactgacccactctggtgaggtgccaaggtcactgcccctgccccaaagcatgacctgccttgggctgtgaggtccaccttgtagcaggcccttagaagtgaacagagttgagaaaaaggagcatccatcgggtgccaggccagccaagtgctaagccctgaggtatgtgtgtgtgaagggaaaccgaggctgggggaggctacaccagctacctgaggtggcgtgggatctgagcctgagcactcagatcccacagttcttcactgtcctgcactgtgtacttgttagggaaagtgtgctgggatgggggactcggcaggctgcctccctgtcctccctcctcctgagagtgacagcagagcgggaaagctccggggagcacacagaagatgcgtcccagagctgacagccagaggaccgctaaaaatagtgctgtcaggagcagttaggctgtgtctgctccagagagaggagagggcagacgggagagtgtcacggcagcgaaattggtgtccccctccctggcccctctttctaccgcccccatccacaagtgcctggggcttttttggagcagaatccaaaagacagctttagaggggctg

SEQ ID NO: 55642 - DNA, 880 bp, Bovine  19866881405719
  misc_feature (1)..(1): n is a, c, g, or t
nttcactttaaagaaaagttggcaatgaaaaagatttctatcaattgaattgaatggagtgaatcacattttcccattaagttccactttaaaatttataatattgaatcaaatttggcctgctactcaaagatgtccctagactacctaaactcatttaaagaaaatacttatttctctctaatcaaagtaataaaaaaatgcatttcaaacaagtcacaaaatcaaaattccaaataggtctcaaaatttcataaagctgctgcattgggagcaaactacaggaagaaaagataaagcacatatagggcctggtctgcaaagctaaccctataacctcttcccttttagggtaaatactactttctaaacgtcttctaaaatcaattattttgtaagatgatttctgatagcttatttataattctgggaaaggctccataactactaatatataatacaatattctttaaatagtccatggagaactgtaattcacaaatattttaaaatttactcactctgtgactgatactcaccaggttttgtatttggttttgtacacagcaatgggaaaagaaatataaataccatgtagtctctaggatcttccaactagtgacagagataaactgaagaaattttaattcgatgaagttaaaaaccctgattgagcataaaggccatgcaggagtatgaaagagagcacttagctctgttatacagaatagtgccaagaaaggctctggagaggagatgacatttaatctgaatcttgaaggaagactaaaaactgactaggatagcaagattacaggcagaaaaaagtaggaaataaattttctcatgctgtctcttaagtgtgggtacatatacttaa

SEQ ID NO: 55643 - DNA, 1802 bp, Bovine  19866881409527
  misc_feature (1)..(1): n is a, c, g, or t
ntaactgccaggtgacagaagtggttaacagtgactgtccatgagtggtgtgaggcagagtactttcacttttcactgcatttctttctggagtatgtgcttttgtaaccatgttcgtgtttcttttataaaagtaataagcataataagagtcggacacgactgagtgtcttcacgttcactcttcactttcatgcattggagaaggaaatggcaacccactccagtgttcttgcctggagaatcccagggacgagggagcctgatgggctgccgtctctggagtcgcacagagttggacacgactgaagagacttagcagcagcaagcataatattctttgttggtttgaatagtctattgatatgtctacaagctgcaaaggaccattttctgtgtgtttgaacggagaggtcaagttctgagggcttaacagcccaaaggggctgcataaggcacgtgtgctgatgaccagggggcaatcctagtgtgcggctgcaccttggggccagcagagccctgtgcctgagaacaaagcagcagccctgaagagagaataacgcattcacttcaaaaagtctgcttacgtacacagatggttcttattgatctgtgaccacacacgtggatatgtaggtttgtgtatatggcttttttaaaaaacataaaaaaataccctaagaaaataccatttatttcttctactccctgacctgggcacagtgtgggggaagcaagtctttgaaaggtatttctcccagtttaagaaaactagaatttccatgttaggctgaagatctttcatacacacacacacacacacaggaagtgggcttgaatgctggacagctcagtgcagaaagggtgaggatagtggtgccctagggtcaggtggcactgctatggagagcagcagatagaacaggcagatcacccaacacaaaccagagagtctttcaaaggccagagctgaagataaatcaatccttgctaaaaacatctgatggctgcgtgctagaaaggcatattttgctttgctatgtaatttcctcagtccttaactaccaaagtgtatcagaattgaattcaagtgctcgtcctaatgggagctgagtcacaggtacctcggtgctgtgtctgcaatctccagtgggtgactcatgcctgtaaaattctgagagaaagtaccaaccgacccgttgcttagtcatctttcgcatggatgctgggttcatgagctctgtaaactataatgagcgatctagccttttaccatctctttattcttttctaaacagtacaaattacatctctaaaaataacttcatctatgcaagtgagtcactgtgacctgacaagcttccacaagctacccagccaaactgtaatatttacttgtgaaggtataaatcttactgtcacattagccccatttgtttttgttttttttttaaagatcaaaatttggtagacttggggaagggaggagaatttcatcagatggcttacagaaaatatggtttactcctaacctttgacatgggcagggctttggggtgcaggatgggggaaggactcctttgaaaaatatttctaatagcttatgaaaactagatttttaatattttaagttgaagattaatcaaagactctgaacttttagtaaggagtgcttatcagcttttgaaagaaatatcagtaatcttgtttattctaaaatcctaaactgtgaatgtatgacatatttgacaaaagacccagccatgctaataaatgcatggggtattaagcattcatcttta

SEQ ID NO: 55644 - DNA, 686 bp, Bovine  19866881616777
  misc_feature (1)..(1): n is a, c, g, or t
ntactgtttgcacctgtgaagtcgtggctcaggtgggcagggctggaaggaattcggagatcttagcggtaggggtggagaggaagttggcactcatttgtggagctggattctgagagaggtggccaaaaccttactgtgtccacatcagtaactggttttgacatacaatggggcttgctagagcccaactgtgggacacagaaaggggagtctcttggtcatggggagaaggaagcaagagttggggggtagccacctaaaaacccatcaggtttggagctgggtgagccggggcaaggtctcatagcagggaccagctgaggaggcgggtgctccaggcctagaagcagagctacccaagaactcagtggtgactggatggttagagaagagaaggtaagtggacatgtgggtgtctgttgcaacagatgtgcgcctggaaaggtgatgtcaatgtcctggctgggggctgagagggctggatgcctgccgggattggcttcagatcaggaaaggtgtgggggcagggggaggcggggctgtcaatgcctgagcccagattccattgctgggaaacgacgtggggtattatcagttagatagtttccaaggaggtcatggattttccgagctttaatgacaagtctgccttcactcatgcgccccccacctccccacactgt

SEQ ID NO: 55645 - DNA, 1705 bp, Bovine  19866881986931
  misc_feature (1)..(1): n is a, c, g, or t
nagaacactaattaatgaagaaacttacattgttcctaagcagacagaaacactataataagagatgttattgctccaaaaattgatttaaaaatttaacaaaatctcatttataacagtatcagaaatcctaaagtaacttaatttactgcaaaagtaatctgaaggagaaacaaaaaaacaaacaaaaaaacagaagagggaataataattaagaataatgtgaattattttatcagaaatgaaaacttactgttaaaccaaagagattcagacaatatagtgctcacccagaatgtgcaaatagatcaaactgtttcagggtccagaaatcaaacttaacatacagcaatatcagttcagttcagttgttcagttgtgtctgactctgcgaccccatgaactgcagcaggccaagcctccctgttcatcatcaaatcctggagtttactcaaactcatgtccatcgagtcggtgatgccatccaaccatctcatcctctgttgtctccttctcctcctgcccccaatccttcccagcatcagggtcttttcgaatgaaatttcaaatttgaaatccttagatgagaacaatagcgtatcagagtgtcttaagacttagagacttctaaaatgatttaatccaaatctgttattttacattttaaaaaactaaaccctatatgtaaaatagataaataacaaggtcctacggtatagcattaagtaaaaatgttagttgctcattagtgtctgactctttgcaaccccatggactgtagcctgtgaggctcctctgtccatggaattctctaggcaagaatactggagtcggttgccatttcctcctccaggggatcttcccaacctggggatcgaacccaggtttcctgaattgcaggcagattctttatcgtctgagctgccagggaagcttgggaaactatattaaaatcatgtaataaaccatgttgtgaaagaataggaaaaagtgtgtatgtgtgtataactgaatcacttagctgtacaccagaagctaacataacattgtaaatcgactatagttcaattaaaatttaaaagctcaaaaaactaagccttagagagtgactctaagtgactggctcaaggtcatgtaacaagcctagggttcggatttgctgtattgggacgagggaactattcagtgtttttcagcaggggagtggcctaatggaagtggtcctctgggcaggatgagcctgctggcttcagacatagaaggtcacaagctgaaagaggcgacaggctggtgagtcagtgggcctggctcctagcaagaggccccgcgtggtgtgtgctgggctctggcaagccctgctttcctcctggcttaggcagccatttcctcttacacccctgcgtctcagggagaagcagtggtcctcaggcaatggtcccttcttcacacaagcaggtggttttccagggaactccaagcccttcatagatccatgagcttgaggataaagcagctttccaaatgggaaaattcccttgggattccatgattagcgtccaagcaattcacaaatgctttgatgatttctcccaaaaggcctaagggtgatgtgagaaaggcaagaatttttcttcccatttacctggtaggaaacagagaactggagtgaaggccagagagtcaatggggacaggtccgaggggtc

SEQ ID NO: 55646 - DNA, 1034 bp, Bovine  19866880097821
  misc_feature (1)..(1): n is a, c, g, or t
ntggtaaatagttggggaaacagtggaaacagtgtcaggctttatttttttgggctccaaaatcactgaagatggtgactgcagccgtgaaattaaaagacgcttactccttggaagaaaagttatgaccaaccttgatagcatattgaaaagcagagacattactttgccaacaaaggtccatctagtcaaggctatggtttttccagtggtcatgtatggatgtgagagttggactgtgaagaaagctgagcgctgaagaattgatgcttttaaactgtggtgttggagaagactcttgagagtcccttggactgcaaggagattcaaccagtccattctgaaggagatcagccctgggatttctttggaagaactgattctaaagctgaaactccagtactttggccacctcatgcgaagagttgactcattggaaaagactctgatgctgggagggattgggggcaggaggagaaggggacgacagaggatgagatggctggatggcatcactaacttgatggacgtgagtctgggtaaactgggagttggtgatggacagggaggcctggcgtgctgcgattcacgaggtcgcaaagagtcggacatgaccgagcgactgaacttaatgatgctggtttagccttcatttgaccaatcagagcaggtttttggcctcatttaacagcaaagaaaacagaataatgggcaaatgtaatccatcctaaatgtcaaaaaatttaatttttcagccattgtagccaaattttcatattccctttcatttattcatatttgtgaaactatgttactatgaaatcaccctgagtaaaatgctcaagatatcatcagttttggcttatgtgtattataatttcagataacttttgttaaaatactggtttgtatgttcacatattctttttcttaggtgactgtaagtgaattgcacttcagtaatttattgcattacagagaaatgtagtttttctcttgctgatattattcctgtattcaaattttgggggttc

SEQ ID NO: 55647 - DNA, 1894 bp, Bovine  19866880531154
  misc_feature (1)..(1): n is a, c, g, or t
natacacacatatgagctagccacacaaaaatgtttatgagttgtgatccaaaaatcttgaaaaaatactgatttataaagtatttttatacatttctcatgccatcctttcacaacagtgctgttttaatctccattttgtctaggaaaaacagaaatgaaaagatttaatttaaatatggtaatataactattaagtgatcgcattaaagccaagatcatctttctctttcctttaagcaaaatacgggtctgagagatcttacatgcctgttttacagttaaatatcttacgctgaatattacccactgaaatgaaagagaagttgttgtaattactttagaatataaatgttagttgcagagctccatagttgttaaccataaaagacgcattctattttaagcattccaattaaagtcttatctacctagttcctataagaaattctttaacaacatcctaaaaaactggattacaacagctctaaatatgttaagaatagtattagagaacacacccattttcatgctgttaccacctgactgccgtcactgtggtagtgtgtttgtatgataaacaagattcactcataacccaaaggtaatcccaagcaaccaagcaccaacagcagatagttaagtattctgagggtgggttattgtggaaatgaaaaatggaactgtcacagatgtaaaacaaaatcaaagagctcggagtagaaagaaatccttattgttgttgctgttaagtcactaagcctgccaggctcccatatccatggggttttccaggcagaatactagacttggttgctatttcctactccagggatcttccccacctaagaatcgaacccatatctcctgagtcttctgtgttggcaggctcattctttaccactgagccaccaggaaatccccaaacagaaagtttaggagccatcaattcttactctttaaaacagactaagagatttcctcttatagccaagatgaagtaatatggaccagatttactctcacacttgaaacaactaaacacaaacaaaatcgattaaaaaataaacccaatatacgaaacaatgattttcaaaattctgaacattaggtaataaagtacactgatctctggaagaacaagaaacaagtgcccgcacagctaactgccttagtttctacaccacagcacaggaagtcctctcttaagcggagcccagctaactccctgagttgaggaggggaagctgacactctgaggagaccaaggcaaccaggttcaaaggatacagtaccagaggacagagctgcacacggagagaaggccagggatcttcagaggacagcctttgggtgtgcagcagagtactgagagggcaggcacacaaagaaactaactgcagctaaggaaagaagcgcataaaaatgagaagacacagagctcagcactcaaacaggaccaggaaccgtgcatgttcccaccagacagactggaaaacttcaaattcacggggcactgactgggtagaggactcaaaaaggtcttgcctcagtagtgggaaataattagccccagactaaacatggacctgatcctgccaacaaatcttaaaagcaagacctgaaaggatcgaattgtttccatttaattgcacaagcctcacaaatatttatagaaatataaaaatatctagcattcagtaaaataaaattcaattttttgacatccaaacaaaaatgatcagacatacaaagaaaaacgcaacccataattttaaaaattaatgattgaaattgacctagaaagacacagatgctggaattcacagaaatacattaaaaaagctattacaactgtatttaaaagacactcatgtccaaaaaacatagggag

SEQ ID NO: 55648 - DNA, 1450 bp, Bovine  19866880591794
  misc_feature (1)..(1): n is a, c, g, or t
nggccctgtgcaaattatggcattacaccaacttattgccaatctttttaattaaaacattttgctttcaactctactaatggcagagatcagtaaacagggaagattgaattactgatattgaagctcccacatctcttaaaaggcttaattactggtgggaccacagtgaggccagagaaaggttgctaacaagcaggtgggcctcacgcatgaagaggccagcccctgtgaaggtgaccaaacaaagcccagggcactgaaaagatacatattacaaaaaaattgttttagaactcttaaaggacataaaaagctgctagagttatggctacaattcagcttccaggaactatgtcacattgctggctgctcagtttgtgtttaattaaattgcctggcctgatacctggaggcagaaccctgtgtccatgcatccatggtgtgtggctgatggtaagggggtgacttgcttcaaaggcccctcccaatctcctcctgcagttaacatccatctaaccaaagtccccagggagcactttccctcccagcaggccccatcagggtggctagaagtggctcagcaggaaatgccctcagatgggcctcatttagtgaagggaaaacaaaggccccagagagaagggtcacactgaggctccttctgtgtataatgaattgtgctaattacagtaatctccttcatctccttcaggatctataatgcccaggtaggaatgagtagctatttttaaacggaaattttctgttaattaaaactgcttcaagtgtgtgtatgtgtgtgtgtatatgtgtgcatgtatgtgctgtaagagtgtaggtgtttgtgaggtgtattcgtgcagtaatgtacttgtagtacaaacttgagcacagatacttctgggttctttcctcctgagggttcgggacagtcagggtccctccaacagagcagatcttggttcccatgaatgcagtggacatcacagatgcacctaatcagatcataggaaaaggtaaagggcaacttccctggcagtccagtagttgagacttcaccttccgataaatggacggtgcagatttggtccctggtccagaaactgggatccctcgcggccaaaagaccaaaacatgaaacagaaacaatattgtcacagattcagtaaagactttgaaaatggtccacataaaaaactcttaaaaaaaaaaaaaggaaaagggataaaatatatgcccagaaaatcttagaccaaaatgtcaaaaaaagtagacatggcaatagtaatttcagacacaacagaatgcaaggcagagagcaatactgaggataaagaaagaaaccacggttatgtttgccaatatgactgactgaccagggacttgtgtgaacttaataatatgatgttgcaaattagcaagaattgcataaaactaacaaattgcc

SEQ ID NO: 55649 - DNA, 1124 bp, Bovine  19866880945673
  misc_feature (1)..(1): n is a, c, g, or t
nttttttaaaagatgatgagggggaagtgctttattgcaaagcactttgcaccctgccccctttctccacagaagcgtaaagctacagttgaaggaaggacaagctggtggccgtgctcccaggatgagctgagtcccgttaaattaaaataaatgaaggcgacttccagctggtgactcacacacgaaggaggccggagacaaggagatggctggctgccttccggaactatgcccaggctttgtgatgaggcaggaaaggaacaccttcccaacctcccactctacccggagaatcccgaaagtccacactcacatctgggggagctgaggggatcccagagggaccagaaaggaatcttactcacccttcagaccacaccatccaacaaacacattggcctgacagccatcttccacacctagctgtgggccaggtacacagccaacaggaacacctctaccaggaagtcctccaggatgcagcaacaaggaagtgctatgcagaggcctggggatcaactgcagcagccagcaagggaaggctcatgagcagggtatggtggatgatcagcaggactgactgccaccaaggtaccccaaggggaggacacagtgggcaggaggctgaggagatgctgggtctgcagaatgggaagcgctggggggtgggggcggttcttgctcagcacgtgtggctcagatcctccctaactctgactctgtagcacataaccctcccctgggggtgctccaaccccatccccagagcaacttccagggcccattcagtgcgggactaacgtggaggactgtgaggcccctgagggccgtgtccttgggactctccttctcacgtgggcgagccttgaagagccacacagcctgagtaagaactccttggtggctgccctcccggggccaagtggggagctcaccctcctggtccttccaatcccaggaggcactgtgtgccccagccctcgtccaggtgtgtgcccttccccagctcccaggcctttagtcctgaacaggaatacaatgtgatgtggtgtgcagggcctcaagaacactcccagcctggttctgttaatccccaaaatctgggtggggaactgcattgg

SEQ ID NO: 55650 - DNA, 783 bp, Bovine  19866880965498
  misc_feature (1)..(1): n is a, c, g, or t
natcatctttttaaaaaaaatttcttaacagaagcaatgggagaaatttactggcctgtcagaaaagccattgctcatcagactggagaaaggaaaagcagaggtcatcaattcatgggcagtgtctcaggaagggattaaatcatttagcaacatgttcttaagaaatcattgcagcctcacactgccattttctttcttggaccttcccatcaaatacattttccaaatgtaaggtgagtcagctgctgatggtcagaaggctgagcctgttccatttctagaagatgatgcagacctgcgtgtgcgtgggtgtgtggatgatacacacacatgtgcctatgtgtgccaacagacctgtatttgtgtgatactgttgcataaacacacacataaccattgtctagctgtgatgttcagtttgttggatttttttttttttggatgcatcatggcatgtggaatcttagttcctaaccggggattgaacccatactccctgcagccagaagtgcagagtcttaagtactgggcctccagggaattccctgatgtccagttttcttatgtttgtgttatttggtaagttgccacaaatttattctgataaatatatatatgtatacaatatgtgtacatatatgtatgtatgtatgtatgtatacgccccaactatagggtttcagaggctgggttagagcccctggggtgtgtcacttctggcatgtacagggctctacagcacttggcatggtgtcatcaggtgaccagggaggctttaaa

SEQ ID NO: 55651 - DNA, 1449 bp, Bovine  19866880979478
  misc_feature (1)..(1): n is a, c, g, or t
nttttgagttatagttttgtccagatatatacccactcacttttgctattaaaattcttcactgcagttcgggagatgctggggctccacgatgctgtgcttgcaccccctgtgactagtgcctccctgcctcgggctcgcattggccagccctcccctggccacgctgcactccttgcagactcttgttcagacctggacactcttcattcaatacacactgactgagggcccactgtgtgtcatgcccagctctgggcactcagacgccacagtgacaaaacaaaccagaatcctgcccaaagggcttcagtgttcaccaggcagtgtgcaggtgccaggcaggaggagacccagggccaggtatgccctggagggttagagatgagctcgggtctaacagagcgcaggaagtggagggtgaacagggcaaggtccaagaagctgctgcggggaagaggacggccactgctgggttctgtctttagcctccaaaggacttgtggcttgtgggaagggacagactgtagggcaggtgggcacagaaggacaggcacgggctggtgcgggaacggagtgagagaggatagggctcaggtaggtaggtgggcaggggggtgagtggaggtctgattctggtgtataggaaggtacaggtcacagggtctgctggaagccatgctgtgggggaagggaggaaaaggcactgggagacaccaaggcttggaccctgagaaactggaatgttccacctggggtggggggaggggagggagatcaggcaggtgccttgtgaacacctaccggccaccccagtggaagtgtgtctgagtggacattggatctgtgagcccgcggccccagccccggcccttgtccctggcctcccacggggtcagcacaccaccaagatgcagccagtcccctggggaccctgctgggtgtcatggacccgacaccgcacccaggcctggcacacaggggtgcctggtgggtgtattgtccctgatggctgtttctgctttagtggaaattctctgggagccagtgccccaaccatcgtgaagtgagggacagttttgtgccttggactggacacctcggtactccgacgcctgccctgtgcatcgcagcctccgctcccagaatcgcagctgcgtgccttccctgggaccagacccctgggggttgaactccctgcctgtcactattgagggatgacttttcttctcttcgcaagccggcaaattaattcataccatctatttccccgactcggatcaaaggttgtcaaattccttcacccacttaatgatctgtaatatacctttctatttcctgaccaggctattagatgaattagaattcataatagcctgccgacagcctccgtgcacctgtgtacatgtgtggggtcaggcaggaccccagcatccccctcagccagga

SEQ ID NO: 55652 - DNA, 906 bp, Bovine  19866881059637
  misc_feature (1)..(1): n is a, c, g, or t
ncatggacaccaaaggttcctatccgccctgcaataaaggaaccttggcagtcttgaaggtaggccctgaacttacacgaccacgtaattcaaggctgctagtgatatccttctggatctgtctttaaggaaagcaggatagaacctgactcttgtacaattttttcttgttttgcattatttgaaaagccctttgtcagaatgtggaggtgagagttcctgttccatctctgaaaggccgtggtggccctggcatctcatcctcccttctggccaggcatccctgtgcctcctgccagcatcagagccaccatcctcacagccgcacacagagaacaggcaaacaaggggagcaacatgttcttttattgatgcaagtacgtccagtcacaccagtagctgacatcctgcattatggtacagctttatactcagagttcatctcgaaataccaaaacatcagagttggggtatgtatcaaattggaaaaacaaaatagcaaatgtagacactgtggcaggtcggtactagaactgataacccagtgaagtgcacattgatgtggaagctccttaacacgtggatgaaaaaggttctaacattgtattccaaatatagattctcaacttttaaacctttatttcaaatacataaagcaatatgtactatcagtatacagtatgtactatctagaacatctgaaaagtgcaaaaccactgtgacaatacagtgtgaatatccttgctccacccggggctgagggcgacgtcagcagcagatcacatctccaggctctcccaggagttctgggaattggcaactaacagatccgtcctcacccaggcctcccagctggaggctctggcgaatgccagccatgtgcggagagagagggttccaggtatg

SEQ ID NO: 55653 - DNA, 1241 bp, Bovine  19866881140363
  misc_feature (1)..(1): n is a, c, g, or t
ngaagccaaggtgcccaaactcggcccctgagagcacagcctgtgggtggcattgttagaaacacacaccctcgaagcagtcacatttcatgtagggtatgaatcctaaatagtactttttttaaaaaggaattataataaatgcattaaaatccaaagcaaatgcctttttttaaattgatttgtgccttgaggctgacctatttgttgttgtttaatcaatcagtcatgtccaactctttgcaacccatggactgtagcccagcaggatcctctgtccatgaaattctccaggcaagaatactggagtgggatgccatttccttctccaggggattttcctgacccacagatcaaacccgcatctcctgcactgcaggtggattctttaccactgagccaccaggaaagccacctgatctgtttgtaccaaaaagctctttcttaagttgcattagagaggatttgttaggttgaaccccagcctctccatggtggagggcagtctttcagaggatgctaaaagggccctgggataaaataagtgggaaaaaccagactcaagacactcacactgatttcttccctcagagcttctcagaagggcctttagtgtgttcatttgtgtcagaaattgccaaggtggaaacactggatgtcggtttcccaaactccttcaccctcagatatcaggggagatctcgatggaagtgcttccagcctacacactgggcagcactcagggtgcccctgatctccccagaagtggccacagtggggcctggcttgcactcagcatcagttccttgggaagtggtgcgtgaccagcacgccttgtacagctgtgggcaggccgactggctccctccagtgtctcagccaagctttggaaggtggggctgggacgccagcccctgtgaggctgtgctgctggtctgcacccaggaacacactggagtcattactcagcatcccctcagagctgaaagagcctgagacatgcccccccacaccaggtcccaggatctcagagcaacattaatgcctttctttgactccctccttagggtcggatcccagtcaagtggatggccattgagtccctcttcgatcatatctataccacccagagtgatgtgtgagtctggatgttgccttcctggggtggaggttacacgtatgcacctgtctgggcagctccactggggaacagagctgccctgagtgcctgtcaactcatt

SEQ ID NO: 55654 - DNA, 870 bp, Bovine  19866881174562
  misc_feature (1)..(1): n is a, c, g, or t
nctgaaattggcagttaggtcctaactctgggcccataacttaagagatgaaaaggaagagaagctacagaattaataatggagtattaaggaatgactaattcattcgttcaaacctctgagcacctactatgtgccaggtactacatgagttgcttggttagagaactactgttctgtgaggtttagttgtgaaaggacagaaacctaatggtagttactgggtactgcacagttgggtgggggtctctgaaggataggggagacctaagcatcatttgcagggagagaaagaacttaggaaaatggaaggaaagaaaggtggcaagtaagagacaagcttaggagatgatataaaagtgaaaggattagacttagaaaaaagttaagagttcaaaagaaggaaatgaagagtgaatggaggcaaatacaaaggtgagtgggccacagagtaacagcaccctaatcatgccacgctgaggttaaggaagacgagtcattagagttgcatgaataaactcaggggtgaaacgaggaacttacttccaccaccactcacatctcagccaactttcaacagcaactattcaaaattattaattcattaagtatctgaaattctcattcttctgctattatacatacaagacttcaatgtggacatggctcaccaaccttgcgacagattctaggatagacttgactttagaaagtccttctttaccaaaatacaccactgtgagatgaattctcttgtcctgatgaatacatacatccctgacagggttgaaaaataaagttcattcaggaaaatatagaaggcactgctcattcagaaggcaatcatacgaagcttacaagaaaacaaag

SEQ ID NO: 55655 - DNA, 2024 bp, Bovine  19866881197493
  misc_feature (1)..(1): n is a, c, g, or t
natggtcctaatatacaatggccctggggaggccatatggatatggggtaggagaagggcactggattcgagtggagatgagataaggcaactgagccccccatgtgtgaggtgccattagacagtttaaaggggacttaaaaggggacacttactatgctggtcagctaggaaatgaagcctggattcccaccaggttgatggcacccacacatggtcataatgttagaggaaatctcagtagtgtaaggaaagtagtcactcacattcccagcatcctttcatttatcctgcaacagggatggatgtctttgtacaaaattgtccccaaagcttatgctttagtgtggtgcctttttcacttaaaagaaaaataaaagctgtttttgtaaccataatcaatagagggaaacgtgtaattcacatgtaatatgtggctttgatgtgatttttccaccaagtggagttgacagccctcctgaggttggctatggggtggtcactgttcaccttcaagccttcagcttttccccctttctgggtcgtttctggaggacgaattccgggacaggcttgggttgaagagtatgttgttattactggtcctcccctcatcacgttgcagtgagtcattgaacttttgaatacacacagcatctcatcttctgcggcttccctggtggctttggctgatagagaatccgcctgcagtgcaggagacctgggttcgatccctgggttggaaagacccccccctggagaggggaacggctacccactccaatattctggcctggagaattccatggactgtatagtccatggggtcgcaaagagtcagacacgactgagcaactttcacttcacttcatcttctggcgaggaaactgaagcacaaagagacaagaaccatcagcctcaggccatgcagcctgcaggtgtatagggcagggatccaaaccagacagtcagaaatatttgtgtgttaacatgaaatcacaccacatgtcccccatgttggttttcaagtggtggaattgtggcttttttctcacattctctaaaatgagcatgtcttgcttccatagttaaggaaattcctaacagtttttcgaaaaccagcaaacgctaggagctggatctctgggctgcagcctgactggtgccagccctcgccacagaggaggcaggcagggtgtgtgaaggggtgtgcctctcctaggtgatcaggttgaggacctgaggcagacctcctggttccctctcttccctatcagcaccggtgcaggctgcaggcacagtgatgctcagagcagtgtcttcactgcaaactgtgcttggaggctgtgctccactgtggagctaaacaggggtcgcagcgcagggccagcatgcaccccagctctgtctcctctcctgcgggcccctgaggaaggcagctcgccctccccgcacttcggggtcatcccggggttgctggtctgcttggtgctcaggtgagagtctgcctttccgctgcgatccggacagcctggaggtgagcacgcgctgggccctggaccgcgagcagcgggagaagtatgagctggtggccgcgtgcacggttcgcgtgggcgcgcgcgaggaggaggtgatggtgcccttccccgtgaccgtgtacgacgaggacgactctgcgcccaccttcctcgggggcgtcgacagcgccagcgccgtggtggagttcaagcggaaggaggtgcctatgcgtttgtctggtgctcgtctagtgtctgtcgtctctctgttgggcatctgggtccctccattcgtcatttgttccttggtctattcagctgtccatctagccatccagtcatgtggctgaccactctagttattcgtctttcatttgtccatcagtctgtctgtcggggttttgttggtttccaggacagctgaggaggagagaggaccagccccactggcaccgagctgatccctgccccgggaggagggtgaggggaggggcttggagtgccggt

SEQ ID NO: 55656 - DNA, 1242 bp, Bovine  19866881206818
  misc_feature (1)..(1): n is a, c, g, or t
nagcagtgccagagatctctgaattttcatctaaccctcaatagctggagtgaccttaggaaagctacttcattatctctgaacatcaatttcttccatcagtgagaattatcttagagtcacctccatagagttgtgagaattaaatataataaaaatttaattaaaataaaaaatatataataaattgagcacagggacggtacttagtaggtaaatattacttcctgggctcattccagtgttaggtgagcaagatgattcatttatatctgattatttaaaatagataagttcagctttaccaatagctaatatgcagaccgactcaggtgcctgccttgatcgagtgtcaagtgggctttggtcgtgcctggcaaaggccacatgctttttaaagggcagagcaggagctccctgcagaaggtggacagtgcttctctcacatgctttgcagctgtcatcattttgtacctactatagtttccaagggcccagctacacacaaatgcatgtagactctattttcttaagtagctgaatctttgcttgtactatctctggttcagctctgagggtaatgtgagcctcaccaaatgatttacaaagtcatccgtctacttcagtcttccggaagtttttagaaaattggaatactttcttacatgtttgatagaatacatcagtgaaagcatatggggctggtgtttttggtacattataaattattgattcaatttctttaatagatgtgggcctattcagattgttttttctcaagtggcttttggcagattgtgtctttcaaggaaatgggttgtttcctctaggttatcaaatttgtgagcatagagtggttcataatcttcctttgttatcttttttaatattcatgggctttgtagaaatgtccctttttcatttctgataagttatttgtattctttcttagcctggcaagagacttattgattttattgattctttcaaagaactagcttttggtttcatggattttccttaaaaaaaataaaaacccttatatatatagagttggtttacaatgctgtgttagtttctgctgtacagcaaagtgattcagagttaaagtgattctgttttgtatttaggttcatttgtgctatattttattttatttattttttttttgtgctatattttagattccatatataagtgataccatatgatatttgtctttgtcgacttacttcacttagt

SEQ ID NO: 55657 - DNA, 1185 bp, Bovine  19866881236825
  misc_feature (1)..(1): n is a, c, g, or t
ntagaggccttccctgcttcctgtctcctaggtttaatcgtctctatttctagaattaagtatccttaaagtttaaaaagaaacatggaagagctcatataactggttgtagtatgaacgatagcatataattttgtaaatttataagggattctttggagaagggaatggcaacccactccagtattcttgcctggagaattccatggacagaagaacctggtgggctacagtccatgggatcgcagagtcagacataactgagcgactaacccacccacccacataatggattctttaatttttttcctgcagataaacatgttcatgtttttttttatatagactccaaacttttccagacttgtaggaaatctgttgctgtgtaatacagtggaaagaattatgtgatctaatgctcaaataatccactggaagaaagactttggatataaaaatgtttcttaatgtgttttccagatgtctgtggccttctgaaattgcttctccccccacccttaattttaagtctcttagattcactaagttgaggtatagaaattaataaagtagaatgcttgaattgaataaacagtaagaaaatatatctctctagaaagccattatcagtataacaaaaacagtttatagaagctcaactcccaaatggtgatatgttatagttgggaaatggtgagttaattgaaatattatgttagtatagaattatacataaggtaatttacaaatagttagggaccgatataatctatgtaacacaaactatgctaaacataattttaacgtttccttgattcattcaagttatggacgtgtagatattctggttgaaagtattacatatattttagtgtttcagaaggtgtttttcttaatactttcccccagcattaactgaatattatatagtatattagtggctctcatggtgcttagctatgatatcacatagctaagcttactaaagctgtcaacagtttgatatacttaaggaaacaaaattctgattgattctgatgtgtttctttcagaaaaatcaacacccatggattttatctgactgtgtagatcaggtttttttattctggatatcatggtaacagtattgggaaaatgcattatttctcatgtctgcaagtagtcttcactgctgaaggaagcaat

SEQ ID NO: 55658 - DNA, 3327 bp, Bovine  19866881258933
  misc_feature (1)..(1): n is a, c, g, or t
natcagtgatgaccaggacagctccctgcccattgccgcggattcacctgtcctcaggcacctaaggggagggagctctgctttcctgaggcccagagatgttgcaaacatgttaaggtcacacagactagagacagacagctgggatacaattcagagcccacctacaaccttcacaccaggtcgctgcccccagcctaccacccagacagcaccttggactttagaggacccctggaagaagagccaaaaaaaaaagctcattttctagaaagccagaaactgtgctgattctgtcaaagcttcatttgggttcagcctcacagcaatgccaggtagttagttactgtattattacttccatgttctagtacatgatgaagaccctgagaacccagtgatgcagctagcctggttcttgtgctgcagggaggaatggagaagagattcttccagagaagggggagggaagcaggcagggaggaaaacgaagaacagaggaaggaagggaaaagagcaaggtggggccagaaattcagaggagaaaaacaactccattgaggtggctcatggaagggtgattggggccaagagttgacatcaggctttctggtggaggtgggccttgtttgggtctcgtgggtgtctcatggatatgcaggaccggaggccagaaagcccagcgattcacctctgccctctcctggatgactgtctggtcgggtctctgggcatacacatgggggagagtgtgcatccgcgtccctgtacatgacacaggtacatgctcatgcatacatgtgtacatacacaggtggggacagaactgcacataggcggctccctggacttttttctaagaagaaggcaatacccccaccatagtgtcagatgtcctctcaagacccccaagggtggtggtggagagggagtggaagggcctgaggggatcaggcaggagcacagtgtccaacaggcccttgagatggtcacccagagcacgactggacattcggcctgaccagtgtcagccaaggcttggctggggcggttccacaagggtggggccagttggaagaatgctccaggctacccctcttccttctgcatcctcctgccacagaagcctgtaacaaagaagtctctcttgggatctcccttcctaactcaggtcccttcgctgtgcacaggcctgagcgctcagccttggtggatattattagcacaagaggtagggccggtccacacccaggggagtcccccacagccaactccagccccagaggtccaagggcctgaggccctgggacggtgaggcaggaaacaccaggtctggtggccgcagggtggctctcctgagctggcagcactgtgccctggccttctgccaacaggccggcttggacatctcggctggcagagcccccagccagcctgtcttggcagctcctcctcctgacggcgagtgacttcactttgacttcatatctgcagtgatgtgcacagctcttactcagccctgagctcagccaggcaggagggcgcggctctgtgcacagcaggaagaaaagaccctgaaataggggcacctcaggcttagggacctgggatcctcccaccccaaggtccaatgtgcttcccattcctctgcgccttggtgggggccagacctcaaaaggcagcttgcaggcgggaggagaacagtggacttttcccacaggagcctagcactcacccaccacctctccccaggacctcccacgttagggatccagaatcttccctctttaatatcagatgtgtttatgggcatcatttcttggggcaaaaatttaattcctttgggctccagttcctccttgctacttgctctgctaccctgtcagccccacatcctaagaattctaatgtgtggtgggggagaaagggtactacccttcaagcatcccgttaaagccagctcccgtctctttgaaaggtgtgcccagtctgattcttgttttcattggctggaccagtcctaaagaggggttcacaaactaacgctaggacacccccgaagggactacagaagccacgcgccaggcgcacccctggagtgcgcagaaggcgcgccggctcgcggccgctcgcgggggctcttccccgcctccctcctccggccccaagagaggccgcgctcccaccgcacctccccctccgagaaatggcggaggatgcgcgccgcgcccggagcctggaggcggggcgcctgcctagtctgcatgtccgctccggcgcaccccccccccaccccccagaccccgcatccccgcctggttcccctgccctctctgggcggcagggaaggtcgaagcgcagagacagcgagaggacgcacaggctgaggaagagtgactgtgcgtgcggaggtgcgcggcttggggctgcggctgccaggccggtacccgggtcccacacctcgcccctactcgcggagctgcaccctgcgtccggctctggtctcctaaccctcgccccggggaaaccgcaccgggcatcgcctggagtggtaccccgcgccccgcccttactcccgcaccctggcccctcccgccccgcccccggcccgcccccctcaccgccccgccccgcccctgccctcgcttcgggtgcagcccgcgccctccccgcctcagtcccgcgcccggagccccgcgcacagctgcggagagtgcctgggagccggcgccccgacgctaggcgcccgcagtgttcgccgcgtcctccgctccgggacgggcatggggcggcccggctgagtaccgcaccccgccgctgagccccccagcccaaggaagcgtccctctcgccgcggccgcagcgtgcatcggcgatggcgaaggcgacggccagcaccgtggggctgcggttgctgcttctgctgctgcccctgctcggcgaaggtgagttctgtcggggactggtgcccgcggcggccggggcgaagttggctccgcgcggtggagtggacgcgttcgaaaacgcccttctgtttgcggcgggcagcgggccacgcagttactggcctcctgggctccactgggagtggggttgtgtggcgggcagcgcgcctcgggccccgggctgggcgggtctcgggcccgagcgggacacgggccgggcggccagggtcggtgcccagggcccgagtcgcagccgcgcttgcctgcctggttgcgcctcgcgccacagcggcgtctcggggcgaaccgagcgggtcttgtcgacgtttcggtgcaggtgggggaggacggtaaggtagccctagaaagcctgtcactgggg

SEQ ID NO: 55659 - DNA, 820 bp, Bovine  19866881331430
  misc_feature (1)..(1): n is a, c, g, or t
natgccacattgctccactttctagcatttatgcatgcttttcctatttctatattttactgatggaaatttggaaacaggttagcattgtgtacaaatgtagccatcttatccagaagtgtattgcatcaagtacaaaagctaaacatttttattgcctctagaacatgattatgggctcgttctctgaactgagacattctttctttcatccaggctaagagctcataccttaagtagtctaaagtatgtgcatttaccaaattatcaggcccaggagaagctagaaggtagaggaggttgggtccttcaaaatgcccccaggttgagcttttctgttcaccccacacggacccattcaaagaccactgtttgcaaggctctttttagggtcatggttttcatggcaaagcctgtgggtccctggggagtaagaaggagggtgagtgtgagactccagagccctgtattctcacttcatccaagcagctctgtgtgtatctatgctaggaacacagcttgagtcctgatcagacacctatggatgatataaggatgattgattcagatgtatcctggtgagagaggcatgggggcttctgagtgaggctcagtcctcatcctgagccaggaagtcctgcggcagagacggaaggaccctgccccagatggtggtggtgagttcatttccatcagtacccaaggcttgggttcaatttgtctccttaaagatgtcaaatttttctcatttcacaaaagaatggggattttttttttagctacatggaaagggaaatatcaaacaaacacatatttaaaa

SEQ ID NO: 55660 - DNA, 1482 bp, Bovine  19866881348783
  misc_feature (1)..(1): n is a, c, g, or t
nttgggcgggccggcggaaaggtcatctcggccgaggcaatgggcggcttgtgggcgttcttgtggtagcggtggatgcagaacgtggacagcagcacagacacgatgaaggagaagagcacggccgccgtgatcactgtgcggcagagctcatcacacagggagtctgcgggcaggcgggggccgtgagagaagacaccccgggagagggacccccaactcccaacagagccacacctgtgacagccaggaagtggctgctgtgactgactgtgagctgcctgccaaccctccggacccatggcaggtactgttcgtatgtttttgctacaggagactgttattgcccttttctggaaggaatgagcactcataagcagcctgcctgaggtcacacaccagaggttgtgcacccctgcaccccaccacccccgaccctggaatgctgcactgaagccagaggcccaggggctctgggggtgggaggagaagctcttctcctgcgctcctaatatcgtctgtattttctttatgttcgatatatagtggagaggaaagacaagtagcccaggatctgggctgtgcaatgatcactcaaatgccagaaaagctccccatgtgttcagtggggcccccctgttctagaagaagcacctggaagctgctgggaggggggacccagctggccaatgccacaggcccagaaaaggctttacacagggacagtctgaggagatgctgagttatttggtggaagaactaatttttcagtccaatctttattatagaacttgaggccgaattctttggtggtccagcggttagcacagggagctttcactgccgtggccaagattcaatccttggttggggaactaagatcccacaagccttgcgaaaaaaaaaaaaaggaacttcaagccacaaggcggtcttagtagccctgagccagctccttgtctgcacacatgggggaaccaagaccccagggaaggagaagttctcctaggtatctcttccttcctgcaatcttctccctcgctccctggaggctcagggaggcatgaggatcccagccagctgtgccccccgcctcccccaacgcaccctggctgtcctctggctcgcagaagcacttcttctcctcagggaagcagttgcagataccgaagccagctttaatcccccggcgctccccaggctcgtgcccaccaatgatgctgccgccccctgaggacagacatcacccactcagcagcccactctcagcctccagggggacctggccagccaggaccaccagacagggtcatgagaggccccttcccacctgatgtcagcactctcaggcccaggaagcacagtgagctcagaagtctgggtcaccctgggcaggagcctcagcatgcatgcatgtgtgctaagttgcttcagtcatgtcaactctttgcaacactatggactgtagcccaccaagctcct

SEQ ID NO: 55661 - DNA, 1337 bp, Bovine  19866881483778
  misc_feature (1)..(1): n is a, c, g, or t
ntggccaggtgagccagcagagacaaaggctgggaagagggttggaagggatggccacctgggctgagagggccaggataggtgtttacgtgtgcagggtgctgccctgcccacggagagtgggctgccagttccccagggggccgtgtcaggccacactgctcccctcttactgtagtcatgcacggttgccctcacaaagctgccgttggcctgggccaaggtctcattgggcgcgtgctccactcggaaggtccggagggccttggggtccccagagagcagcgtgttcgtgtaccgtctcaggagctccccggaggctggcaccacgtctgcatcgaagacacgtaacgtggctaccactgtgccctgcaaagaatacgggggccagtcagggccccgaaagccagagcccataggagggcacgtgccccacaggttgatcacgtgtgtgcggtcagagctggctccagggtcagactgaccaggattcgagctgcaaggggcccccagccagcatgctggtcacccttcctgggccactgcacctcacctttccaacaggtgcgatggcatctccagacttcccatgattattggttagaacagacgccctggtgctctgtggaagacctcattcaggtccccacagtgcagagtggtcacccccacactccttcgaggaagctgggccccgcacagtggataagttagctcagtgtcatggagtgaaagacgacagagctgggacctaagcacagtgtccaccagtgtctctcctaaagcttcttctgtaccccaggctggatgggggtcatgaggggctttctgagtaaagtcacaggtcatttctgctctcactactgaccaggctccacagtgtcaccatggagttgccctgcaaggctcatgagacatttccctacgccatgtgctttcctcctgcccatccatccaccaaacctgctcccggggtgcccagagaagcaggcaaccactgcatatccgactccgaccctccccttgcccccgccagcctgccggctgcaggagagcccagggcccagcaggtggcagtcacgctccgcctgcgcgggccagaggaagacgggacccgatgggcggggcggcgcagggacatccctgtcaggtccactggcctgtcttcctccactccggggtaccttccctgaactcactggccctcccttgaggggccgacagcccgaagaagggaacgccctcctgcagatgtcctctccgtctccttggggcagcgcgcccccgcctgtgcagcagcacagttgcgccccttctgatgtgagccctgccggatg

SEQ ID NO: 55662 - DNA, 1775 bp, Bovine  19866881497578
  misc_feature (1)..(1): n is a, c, g, or t
ngacagtgaaaaagccgtttaaaactaaatattaaaaatataagatcacagcatccgaccccatcacttcatggcaaatagaaggggaaaatgtggaagcggtgacagacttcttcttgggctctaaagatggttactgcagccatgaaattagaagacaatcacttcttggcaggaaagctatgacaaacctagacatatgttaaaaagaaaagacatcattttgccgacaaaggtccatatagcctttccagtagtcacatatggttgtgagagctgaagcataaagaaggcagagcaccaaagaactgatgctctcgaactgtggtgctggaaaagactcttgagagttccttggacagcaaggagatcaaactagttaatcttaaaggaaatcaaccctgaatactcactcactggaagtactgatgctgaagctgaagctccaatactttggccacctgatgtgaacagccaactcactggaaaagaccctgatgctgggaaagattgaaagcaggaggagaagagggtgccagaggatgagctggctggatggcatcaccaatgtaatggacatgaacttgggcaaactccgggagatggtgagggagagggaagcctggcatgcttgtagtccacagggatgcagagttagacgtgacttggcaactgaacaacaatatgcagtggaaagggagcccctgagtcaatcaggaaacatggaacaaataaatcaggtttcagcttgcttccttaaactatgctctgatgctttatttttgctgggtaagacatggtgggattcggcaggtagcttagatcagattcttcatggtcaacttggtttaggggagtggatgactaaggcagtgattctaagtcccttactccaactacaaccacagctagagacagagatttcccgcccccccacttttgttttagatactgaaattctgcattatgttcaaaagacaaataaaggtggtttcctctctaaataaaaaaatatgaaagcccttgagctagataatccaacattacttctagctgtaacaatctgtgactgcaacaccaaagttaggtgcagatcttttgttacagtactagaaacaactgcaaacacgggtattttacctttataacctcatttttctagtcaaagactctaataataaacttattttatcttttgtatttcctgactcttcagctaatctcagatattcaaaatttattaggaaaacattcaaatctcagaccttttagaaaaacatcttaagatatcatagtaaacacctaaagtcctattcttaaaagtaaggtatacttaccaatggtcaggaaatctgattggtactgacaagtcattccaaatccaaaatctcgccaaaagccagaatcctttttgtgaaccttaagtttaaaaatcaaaactcaatttaatccctcaaaaaccagaagtagtttcaatcaacaatgaaacaaattaaaatattttccaaataattttttctgtaaaaaaagaatcatttatgtgattgataatgggatcacatggctttatattattaaatccttataaaaaccaacaaaagtatagtaatccccataagcataggattcttaaccgccttcaacttaatctgattcaagtcttgtacgaggtttgagctgaggttactaataatcaaagagtgtgatgcttgatcctcagggggcttacattctattttaggagggataccagtggtgtaagcacatactgtata

SEQ ID NO: 55663 - DNA, 1007 bp, Bovine  19866881737908
  misc_feature (1)..(1): n is a, c, g, or t
ntagtaacttctgtgtatatgcatatgaaaattgtctgatagactaacaagtatgaatacctggataactcaggaacagacaattaggttatgagtcaagggttaactccccaccactgggtcagccagttaaacttggagttctccccgtgctgaggacaaactgctacagcctctcacgctgagtaggcatttttaataacttgagaaagtttctccctccttctgcatttaacaagacgatcattaagcacatctgaaacccacaagtttactaccatgactagatacctgtaaaagaacttatcacagtgtgtctgaacaatggctcaaactaaagccatgttgcatctgcagttaagtgtttttcccgtgctctccctgagtgtgtgcacacacacgtgcatgcacatacacacactcacacacatacggctcctccacataactcatccaagccttcttggccacaaaaatgccataattttaccactttaccactttggtgaaatggctataaaatccagcgttttcatgagacatcgttaagttctttcacagtgctttaagtttgaaacccaggcagtgttttggcaaccaaccctctcctgcaaagtgacagcgtttggacagaaagaagagcccctgggacttcccgaaagccacccccgcaggatgggaggagtgctgagtgtctgtgaccacaaacaagcagtgaagaatgacaagaagcttatgagtcatggtcagaacctaagaacaaaaatgtcttgccatagcagcgttacgttacaaacacaggaagaatggacacatgtagcttttcacacaagctctataagagccaaaacactgtcgtttcccaatcagaatcgtcatcagaggtgtcacagtccttggtcatttgtcgaccctacttctaacctaactagctgagactgagctcaagtcccaaccacaaacgtgtgagatgagcccctgccactttggggcactggatgggtagg

SEQ ID NO: 55664 - DNA, 1046 bp, Bovine  19866880216700
  misc_feature (1)..(1): n is a, c, g, or t
ncatcaggtggccaaaatattggggtttcagcttcaacatcagtccttacagtgaatgttcaggactggatctgaatccaggactagcatctggtacacactccaaatttgttgactcgatgaatgtttaatttttagcgaccacttcctgtgtggcagacattcttcaagacttggtcatttcatcctcatcaaatctatgactgtcctctgaggggcacaatgactcttccaggtcacatactgcttagggcagagctgcgattcgaatctcggtcttggcagcctgactccggagccaatgggctccattcccacacaacgccctttactctgtgaccctgctccataaactaggacgttttacacaagtaatacaagtcagtccctggaagagggagaggactgtgatggtcattcagtggatgaggacacggggacagaggcagagacttctagcaggtttcccaggcatccatgccctctctttttctaaaaaaatttccagtgtttacaggggagtttgagtaagctccaggagttcgtgatggacagggaagcctggcgtattgcagtccatggggtcgcaaagagctggactctactgtttgactgaactgaactgaactaaactgaacagtgaacagagcccccgaggtgttccaatctggataagatggtcccagacagtgaccccgcccccagccactcacggccacgtccggggtttgtggatggggccaagccggcctcactcggcagttgcaaagccccaaggctgtttgtcttctcctgcttccgccacttggctcgctgattctggaaccagatctgagatgaaggtgagagaggatggagataagcaaaggggcttttctccatccagttcctctccttaaaatacatgatgactgcaccttccaagggaccatccctttacagtttgtaaaggtcaacggcagccacgatttctttggatctgatctgccttgggagagaggatccgaggtcacaaccttccatgcctacaggggctggggggctca

SEQ ID NO: 55665 - DNA, 1205 bp, Bovine  19866880349171
  misc_feature (1)..(1): n is a, c, g, or t
ncaacctcagaagtggtcacatgggaccaagactgtgcccctgtcccctgcctggaggctacttcagagatagcatctgcttaagggaggggaggagtcccctattcctatcttccccatctcacctgattccactcaggtaggcagtatgagcccactttacagaagagaagactgagatccaggccagggaaggaaggggctcacagtccacagagtcgtggccgggcctagggctgaacaggagccttgcactctccccggtttcccaacagcccttctcgctcttggcactgctgcctggagctggccttaattgccaggcacgtgacctgcaggactccctccctctgagccacgtgctaagccccaatccctcttgatgctgtcatggtgggggggatcaagcctgtggcagaaacacctctcttttggcttttaatactaaaatagaataaagtgctgtacgttttctgtgggaaatgaaagatgggactggggagaaaaacagccctccagtccccaaatcaacacccccgtcagcacccctctcagcttccagaaagaaaacattccttccaggtgatttgttagctctttctggggcagaagaaggtggaaaactaattttaacttctcagggattttttttttttgttttagcttttatgtttttcagaccagaggtagggcatcaagtgcccttaggtccactgatatggggaaagacttgaagcgggcagtaattttgcctccaccagccaagtcctgcaaatcttagtgggtagagatgccgagaaggtcaaggtcgggtgctaaccctccccagataagctcccgctcctccctcccccaaatccaaggaaagtgtccccctaagagttaggagactgaagtcagacatgtgaatctgtgaaacctagatctgttttttgtccttgagcaagtcacttcacttctgggcctcagtgacctcagcagtcactggggaacaataattgctgtcttgaccacttcctaggtggctgtgaaggttcaaagcagtgctgggctgatttcttggtcccagtacttagaggggcatagcaaaactggtgagggtcccacaggactcatcagaatggggaaggaacccctcggccatccactggagcaagagagcccagagaccaggccctatcttgtgcttagcccagtgtctggca

SEQ ID NO: 55666 - DNA, 1495 bp, Bovine  19866880434498
  misc_feature (1)..(1): n is a, c, g, or t
nactgggttctcggctgaggctagatgtcctctgccaggttgttggcagcattcagttcctttcagttgtagaactcatggcaacttgtctccaagttcagggccagcaggggagcgtctcccgttgggtcttacctcttttaaggtctcactgaataatatcttgggtcacaaagagtcggacacaactgaactgaactggataacatcacggcccactcaggataatctctctttgattcactcggattcaattcgcttaggaaccttaattacatctggacaggttcttaggaaccttaattaatagcaaaaaaatccccttttgccatatagcataatacgatccatgggagtgacaccctctggtattcacccgtcctgcccatagtcgggggagggtgttttacaaggcatgtccaccagaggggcagaaatcttgggtgccatcttaggatcctgcctaccatagagataacatgactgagtacctcctgaagtgccaaactgatgaattcccacctctggaaacagtattatccaagctcagtggtatcatccaggttttacttacagggaaactaaagtcagattctaacctagctatgtcggcccccaaagcccaggatctttctctttaccacactgtgtctgataaatcctgttaacttttccctccctttcaattgacctgcttctctccaacacccctgacttggccatgggccttcatccacccctcccgggtgctcctgcagcagccttctcacatccacaggactccctgcctccagtccattctccatggtcataaattgcaatctgacctagtgacttcctgcttgaaataattgcctctttcagatagaacccttactcttcaatacagtttacatgtcatccatctctgagcactccctgcttctctggcgtcatctcctacctcctctctgatgagtatcaccacgttgagagcctagaacacttgtaccactcttcacctggataattctacccagctttagggtctaagttaaatgtcctttcctccagaaaggaggaccttcttcaactccctgattagtgaggcggtcctgttgtgtattcctgtagcagccagtacttcccctataataatgtcacattgtattatgatgacacatttatctgtctcctctgttagattctgtgtctggttcttggctgtattcccaatgtctggcatatagtggatgctcagtaaatattaagaaatgaatgacagtactttgatgggttactttgtttcctttgcaatctcctccttgttagtctagtctctgcttttccttctttgccgctgaaatacttttaatggcacatgtcagaagagctatccacttctcctgtgttttatttcaggatcaaatcattagtataaggtgaagctgagaaaagatggtgggcctttaaactttatgtttcaaaagttttccattttatgctgcttgactgc

SEQ ID NO: 55667 - DNA, 1128 bp, Bovine  19866880580784
  misc_feature (1)..(1): n is a, c, g, or t
ncgcatcactgactcgatggacgtgagtctgagtgaactctgggagttggtgatggacagggagccctggcgtgggggtcgcaaagagttggacacaactgagcgactaatctgatctgatctgattatgtggctttgttttggcaagagctaactgatacatcttgtcagggcctgaagtgaggcaagggagtaggaagggccagggctagctcagaccccaggacacttcctggtggagtgagaaccagtatttgggaaaggaaaaatgctctcttgatagggttacccatggcaggaggctgcattgaacaccctcctgggggctgggggaacatgaaacagtccctgaaatagatgcagtagctggatgtgcccaagtctattaccccttgctgtggaggtggaggtagcatggagacccctcatgggagcagagtgtgtatctggcaagaggggttgagctggataattatccatatttgctgagcaaggagccagggagtatttcaggtgctgtgtatacaatggtaaacaaatcagtccatgaccctgccctcttacagcttactttccatttactcatgataataaaattaataataataataatacctatgttaagttgaatacatacatgaaataaggctaagtcttaaaacagaagtgactggaaaaatgactagactgggctgtgtgggctgaattggactaaatttaattttcttactgtcaagtaggaatagaggcttgttaaaataaagtatgggcagtataaaactgaagtgagcttaggtgctcctgtatataacctgtgaccatccagatctaactgtgatgctggcgcacatacgttcccgtatccttgactgtatctctgcctcctgtcctctcaggcatagtgaggggctgcctattccctaaagatgcctcttcacctgtcacccccttgagaggccgtgcatgtcactatgagctgtagaacattcccctggcttcagatcattgcccctgccccatcttggtgcagaagcccttctgctgagattcaaggtctctctcacactgccaccctccatcattcctcgtgatggacattactcaacctcctggtccctcttccactct

SEQ ID NO: 55668 - DNA, 904 bp, Bovine  19866880593166
  misc_feature (1)..(1): n is a, c, g, or t
ntcttgtggaaataagtaaggcagagtctctgctcccagataatagccagatacatgaaataaagtcagtgctacccacacacaaaactggtttatttattactaattcattgcatttgtgggtagaggagatattctgagccacagaagccaaacttactctgtctcttttcaatggtcagcacagatttaccttcattaaagctgagtgatcatttaagccataattccttttagctattctagaggaattgatggaagggaagacttacctaagatcttttccttctttttttttttcagtagtattttattttattttatttttattactttacagtattgtactggttttgccatgcatcaacatgaatccgccacgggtgtacatatgttcccaatcctgaacccccttcccacctccctccccataccatccctctgggtcatcccagtgcaccagccccagatcttttccttcgaaggtcagtgagggaggaggtggagcagagggaggcaggcagaagcgtggctgttgattatgttcaagattatatctgagcaacttccctggcagtccagtggttaagacgccacacttccaatgcagagggcccaggttccatccctggttggggaactaggatcccacatgctgcacagtgtggacaaataaataatacaatccattttaaaaagattatattttaaataatttctaaggtgtcacatagaaaatggccctttaagtggagagcaatgcgccttcatgctgccatttttctcccctccatccatgagaatcttctagctctatggtccctccccctcccacccctgagcaatatacaggcacatttcagagaagccaagaattaaatcaaaactacctttcttgctctgt

SEQ ID NO: 55669 - DNA, 1313 bp, Bovine  19866880618533
  misc_feature (1)..(1): n is a, c, g, or t
ntggcaccccactctagtactcttgcctggaaaaatcccatggaatggaggagcctggtgggctgcagtccatggggtcactaagagtcggacacgactgagcgacttcactttcacttttcactttcatgcattggagaaggaaatggcaacccactccagtgttcttgcctggagaatcccagggacgggggagcctgttgggctgccgtctatgcggtcgcagagagtcagacatgactgaagcgacttagcagcagcagcagagcttacaagtacacaatcttaattctgtttaagctgggtaaaatgttattatttcagcatgtggtttaaataagagaacctgaataaggtaccttgtattctttttagcactaactttgaaattcctgtgtatttcatacacttaagcacaccttgctttggacttgccacagttcaaaggccccttggcagcatgtagttctcaggtctctacaaagatgatgggactcagggtggggaagcttttcggagagtccggagttcaccttactgggagagtgtcacttctctcagcctcagtttactgctcagtgagcccagctcctggaggctgattcatgagacagtcgggctcaggtgagtgatggatatgaacagccctggggagagcctccaggccagctggggctggtggccccccatcagaggaggaacgctgagattgtctgtgctctgcaccccgctgtgatgtgtgaccctgggcgagctccagctctggaggccccttgactcaccggggtcagagcctggggggctgtgttgggccctgaccctcccgtggccctcccccaggtgtacacgtctgggaaaggcagcagcgccgccgggctgacagcctcggtgatgagggacccctcgtcccggaacttcatcatggagggcggggccatggtcctggccgacggaggtgtcgtctgtattgatgagtttgacaaggtgagcctggcagggcgagggggtggctcagtgctggtggcacctggtggccgtgggctgggggcgtgaatggcagaaacccccttggatgacgtagagacctcccatcactataggggcataactaaagctctccgagcctagagagtggggagacaagagccaagcctgcacgttacccgtgtgactagaggtgacctggttcctgccgttggctggcacggagcagggacttaggaacagtagctcctgtagggtgtcctgctcccgctgcaccccagccccctcacctggagctggtggacattcctctcttgcacacagatgcg

SEQ ID NO: 55670 - DNA, 749 bp, Bovine  19866880623851
  misc_feature (1)..(1): n is a, c, g, or t
nctacatccttctcttttcattctcttccccacagctctgtgaattttgcttctttactaagaaatggggagagtggcctatattagaagcagatcttgatatccagataccagataataaaggttggccccaatatttagaaaatgttaagtcagaagtcagcacacttttctgtaaaggaccagagaatacatattttaggtctgagatccatatgcattctctgtcacgtatttttctttatttcttctacaacaaccgtttaaaaatctaaaatcattcttagctcacaggccacacaaagtaagttattagccagatccaacccatagtctacagttttagcatatgcctggtggagctcatagaaagggaaaaccgggaagaacagttttgtggtacaaggccctgggcaagctttatcgctctgtttcttctctgttctcagcttcttctatgggagtactctcaccccagaagaaatccccacccaccgccatgctgttacctgcctcgccagccaaagctcctgagacagagcccattgatgtggctgctcacctccagctgctgggagagtccctgagcctcatcggacaccgcctgcaggaaactgaggtaagggcacccgtcagtggcaagctccagctgctggtacagtctggacccgtgtgctcattccacatccacacagtgagcgactgctgtgtgctgttataccaggtgctcaggatacagtgataggagg

SEQ ID NO: 55671 - DNA, 1965 bp, Bovine  19866880633141
  misc_feature (1)..(1): n is a, c, g, or t
nggcttcctagccgcatcccttcctaccttatcaggaaggacccaatgcctatgagtacggcacttcttgtaccttcctcttgtttatcattgactttctccaatttagtgatcttcacctccaccaacctcaggttctcagctccaattggagctcactcaactgtatgtgtgacttttctctttatcttccttccaccccagccccattccctccctcccttccttccttgggtatcaatgccagaccctgcactgccctttgcggatacaatggtgataaaaacagacacattctgtgtccttgagggaccctccagggagcctctattctttctgtcccctccctctgctcctaagacacccgctcactgacgtctagttctgagactcccattagcccttggaatacaaggtgcattgtcccaatcattcccatatttagtcttcacattaatcttgcaaagcatgtgctgctactgctgttatgacaaataatagctaacccttatattattagtgattcagacctgccagcactgcctgaaggttttccacatactcaataaattcttacaaagccctctcaagtcaacattattgttatcctcattttactgatgaggaaactgaggtacagagagcttttgtgaactgcccaaggaaggtctcactgcaggatgtgattctggagccggagtggaggggcagcaggtggctgtagtgtggcgtgggatttgaggcttggggaaaacattgtgggaagacagggtggggagaggccaggagaggaatggtgagtgaatgcagagtggttctagccgtatgcaaatcattctaggagaaaagagggtcagcacggctgggtgaggtgggctatgggggaaatgcaatcaccctccaccccatgctaagcagtaatgccacagtcgaataattctgatgaaggaggcagttttatctttctcaggaagcttggaaacacttaaaaaccatcctgcattaagggcctctgaggcttatcctatttgaattagaaaaatgcatggggtctccagcctgtgaaatcccaaaggcgccttccatctgcctcccagctcactgcttttctccgtaatgtgaactacagtcatcaaacaatgcctggcctttatctatccagagagttcacttctgttttttcaaatttctttccaagtagctgaaagctattaatagagctgatggtggtaactcagaaggtttggagtttgcttttcattttcatttgaatcataaacttgtggcttgtactaaagttaagaacaactggagataatgccaaagaatttgtgaatcagaaagcagattagtttaaaatctcctttttatttcggttgtaaaaacagaaggcgagtcactggtccgtctgtattctgtggaccagggttgtacattttttctctagcatctattgatatcacagatgtaattgctgggtagtgccttgtaaaactgtctacagtctcttcccccgactagattctaagtgtaatgactttctctttcccttttagtgcaattttccagtgtctggcatgtagaagttggtcgataaatatttgttaaatatgagaaacggatgaatggatgaagctaaatgaaatccagagctgctggggctggtggcatctctgtctgcattaactctgactattcagggtttctgttcttggtgtggggcatgatgaatagagcattctgggaaggaagtgcttatttctgcttggttgggcttggaaatcagctcgccggggtcctggcagcacaggccccaccagtggggaggagggtgtggggaccaggcaagggtagagctggggaaatgtacctggtcacagaggtgggctccagaagggaacagctgggacatccaggtgtagggtctgggggctgcatctatctagacccaggttggcagcgggg

SEQ ID NO: 55672 - DNA, 767 bp, Bovine  19866880716205
  misc_feature (1)..(1): n is a, c, g, or t
ntccaggccgactcggactggtgctgtgatagaaatgcaagacatttggaagaacgagagattcattgccactgggattttcatgcattagtatacatgcgtgcatgtgtgtgtgtgtgtgtgtgttgtggggatgaaatctgacttggactctgcgggatggatgggattgacatgtccaggggaggagtgggtggagggaaggggattagctaatttctctcaccatatctctcctggttttttttttaattcttttgttagaattcttgccaccaaagcaggtggatccttaaacactagagggatggaaatccttggaaagtatttatgatctgaagaaaaagtaccctcattcccagctgcatggacactattaattgggatgccccctcccccgccccgccatgtcatttggaatcatcttggccagctgtccctgcactaggggaggccaggtcacagtgtggtgggtgggctgagtctgtcaaatgaaatgatttactacagccaccttaagcctgagcagactgctctgtaataatgatgccatcaatgtgaaagcaaatattattaaattttagaattgagatttatggtgctgatttctgagccatggagaggctgtagtttcttgcttttaggttttcttggcataaaccatgaagttgagcagctggagcctagagtagggcaggggaaaattcccagctctgacatggctctaaccctgatgctgggaggggagtaagtccaagaataacaaa

SEQ ID NO: 55673 - DNA, 1213 bp, Bovine  19866880894406
  misc_feature (1)..(1): n is a, c, g, or t
nctggctaccagatcagcctgtcagtggcccccaaggaggtgggttgcagactccagaaacactgcactgggggctcctggtccggcctctcctgtggaccacatgtggtttgatttggggtctctcattccctgggcgtcgttcctttgtatgtggaacaagggggttgacccttgattgcaagtattagaaccccagttccgtttagtctttctggaggaactcaagagaagggcttgtgttacaggcaagcctggagatgcagggcccagctgggtctggtctcagggttgtctgcctctgcctcggcctccctgggtggagttttgttctccggcagcctcgccccgcctcagggcagcagggagggccctgggagctctggatgttgttttaccagctgacagcccccaaggaaagaagggccacctcctctccactggttctagccctgggagccctccctctcttcctgctccagctctgtgttgggacctggctcggaaaggcctgtgggctgaccctgggtcccctctgcctcccagatgctggccaaacacgtcatcacgctgcatgtgagcgcattgacacaggcccaggccgtggagggcgagattgacctggccaagctgaagaagttcatcgcctactgccgcgcgtgagtcgcagacgctggcccccgggcgtggggttgccagtcttccctggttggggagatccctttcaggatacctgagatgagcccttagggtttagctctgcttcttcctcccactacagtcacccactccgtggctcttggcctcaagcttccccgtttctaaaatgagggtggagggtttagatggtcttgaaggcacccttgactctgatgtgtggggatgcgttgtggacatggtctctggtagcgcctgcccccactgtgtggccttaggcaaatcagctgacctctgagcctcgctttcctggggtggttgtgccctcaggtttttctaagaatcacacaagatgactcatgagctcttggcacggccctgtgccgaataaacacttagtgaacagcagatgcagccttaaatattgttgttctcacagactgccagcgatggtagtcatacatatagtgattattctgtgccaggtgttattctgagcatttttaaaaattttttaaaacttgggtagcgctgcacagcttgcaagatctcagtt

SEQ ID NO: 55674 - DNA, 3199 bp, Bovine  19866880976052
  misc_feature (1)..(1): n is a, c, g, or t
nggaaagctcttacctttatccagtacttttgattaagattctactgtacatgctttagcaaactttctatcttcttcttgacttaataggggtattagcatattggaattggaatcattcttagaaggtggtttttcagtttcccaccaatgtagaaatcctttttatagcctcctggacagatggttgccagtctctgcatggacacctccagtgatggaggacagaagagaacaggaggcagattgtttcattttggaggcagttctgatgattagaaacattttcaattgagttgaactagattctgctgtgtcagtaaggattcttcctgtttcaaaaaatggaaagcacaactaaagttggatttttaaataatgaggacttatcaagtcagtgattgagaaatgcagtgtgggtgtaagtttcaggtataatttgagtcaaaagcccgtagtgtcctgagggttctgctccatttctccagaattctctctgccctgacatcctccaggtgtcagtgtctccttgggctccttttgttttgcaataagaagaaaaaaatgcagttctagggccttttagctacacattactgttacatggaggaagaaagaaagagattttgttccagtccatcaagaaaagtcataaggcttagtctgaccagacaggattaagatctggtaactcatgggaccatgtggtcagcacatggggactgactgaacctaagtcaaaggtcccaaggctgtgggaaggtgagtttagtgaacactattgaaccctacaacccttctactcttccagcagaaaccagattttattaatattcgtgtgtctacctattgtccatgcagttcataggaccaagaagaagcccttccatccctgggtgaattttcatttttacatcctgattagcctaatacagtcagtgcatggaactcccctggtgactgctcctggcttgggcttaggccatcagctaaagattgtattctgtgcttacagaagaggttatcctttctccttgagtgagataaataggaaagtctaaggtcctgattgctaaaagcagccgttttgtcccaatagcaatggtcagacttagaaagaagccacttctattggaagcaggagatagaaaagaccaggttaccagcaatgttgttgagctcctagtggtttcatgcctggaccttccgtaaccaagttcctgatgtcttatttaagtatttacgttgggatttctacactttgaaataaaaattatctttactggcacaggtggaaaggatcttggcaatactgtcagtcagcaagcataacctcataggatttctctgtcatctatccactggctcaaaatctactgctgaagaatttaagaatgagttccctccaaggtggtataatactttgccagctaacaggctcatctttagaagtctatccttcaggctgtgattcccaggctggttgatagatcaccatatgatgtggcattcagactctcatcatgttggtaagtctcacaaagtttacaaaactggaccccatattccaaatgtggtctggtctccttgggtgcaaggagaatattatgtttcatatatatgattcagcttggtgtactggaaagaaaactggagtgagtgtggttgtaatggattcaagttttaggatccgcccactagaagcaaatctttcaaccacgctgagcctcaggtatctttctgataaaatggggagagcaatctctgtttacctcaaagcattgctatgcgaatcagatgaaataacagatataacagttctttgtaaattgcaaaactattcgaaagtaagaatgaagattaatgtatcttaaggtggtgtcagcttcctttggcagttgtatcacatggtttaattataccctgccttgtttcagaaagaatttcaggcatcttacaagaaaacataaaaaagataatatagcataaattagagacaaagttaaaaaaaaaaagaaaagaactgtgtagccaaaaggcagacattgaaaacctggttcagagtgggcactgagtaaacatttttcaatgaatattggagttggtaagaaaagttcttccaaaaattcactgtatgaggtagggagctcaaatctgcccctctgtgacaacctagaggggtgggatggcatggaagataggagcaaggttttaagaaggatggaacatacgtatacctatggctgatttatattgatgtatggaagaaaccaacaaaatattgtaaaacaactattctccaattaaaagtaaatttaaaaaaatgttcctcggagctttctagaagtcagtgtgattacaaacattgtttttgttagtgcagttctcaattcccatgaaataaaaatgaatgtaacctctctgttggtagcttttctggatttcctaggtgagaacacacattatcatcacatttgcattaatatctcaaaactcatatttccatgaactgtattagcatattacagaacttgtacctctgagatggggctctgcaggctcagaccctccctaggaaaaacttcattgtgtgtctttttgactagcttccaggctattttcacaggtcaaaggtccctgttccctttccaccatgagagtgtccttgtgcatgcccccatttccagccctgaggttctaagtgcctggtagttcagagggaagaagaggttctgttctcactcaggtcaaggaccaccttgtgcatcctcatttacgcttcacaatctactcttctcattagattggcaaattgtcccctgcttttcagggaaacccagtcccatccagagagatgtgactttattctggacagtcctatacagtcctatacagtaggacaactatatcaacatgcaaaatttccacctagtacagttcccctgggcagagttattcactcttaaataacaaagagatcaaaccagtccatcctaaaggaaatcaaccgcgaatatctactggaaggactgatgctgaagctccaatcctttggccacctgatgcaaagagccgaatcatggaaaagaccctgatgctggtgaagattgagggcaggaggagaagggggcaacagaggatgagatggctggatggcatcactgactcagtggacatgagtttgagctaactttgggag

SEQ ID NO: 55675 - DNA, 2459 bp, Bovine  19866881005839
  misc_feature (1)..(1): n is a, c, g, or t
nctggcgtgctgcagtccatggggtagcaaagagtcagacacaactgagtgactgaactgaactgaatacatccttttattttgttttcattaaaacctggctttaaacagactagctctggatgaattagtaaataagtacctcagcaaggtgaaaccgcctagaggcaagattttggtagccacagtgggccacaggaattaggatactgcctgaataaagttcttgtgcatgcatgcttagtcgccgagtcatgtccaactctgcgactccatggactgtagcctgccaggctcctctgtccatgggattctccaggcaagaatactggagtgggttgacgttcccttccccagggaatcaagttcttacctgtcagcatttaccgactgccagtcaagaagtatgcttgcaagaacatttaactggtgaatgcaataaaccaaacattctccgtcttactaacattatccatttcttgcactcctcctctgccactatctctacacacagaaactggacagccagagtttgatttgcagttcatttggtgtgtaattctgtcacctgccctccacctgcccacacacacacctaccactcaccttttaaagtccatcaactttcaaagcagcagtgcttagctgctgagtcgtgtcggactctttgtgaccccaaggactgtagcccaccaggctcttctgtccatggggattttccaggccagaatactggagtgggttgccatgcccttctcctggaattcaacccaggtctcccacattgcaggcgaattctttaccatcttagccaccagggaagcccatgaatactggagtgggcagcctatcccttctccaggggatcatcttaacccaggaatcaacccagggtctcctgcattgcaggtggattctttaccagctgagctatcaggaaagcccttcaaagcagctatttctatgtatatgcgctatttatcagagcaaaccagaacaaagtcacagattaaaaaaatcatgttaggttcctcaaaaatgtcattaaggcttccctggtagtccagtggtataagaatcctcctgccaatgcaggggatgtgagttcaatccctcgtccaggaagatccacatgccctggggcaactaagcccatgcaccacagctactgagccctcactccagagcccaagagctgcaaccactgagcccacgtgcctagagcccatgctccacaacaagagaagccactgcagtgaaaggcccaagcactgcaatgaagagtacacccctcttgccacaattagagaaagcccatagcaatgaagatccagagcagtcaaaaaatagataataaataaaatttttttagaagtcccattgcctgcatgttcagtctataagttgtgtctgccactttgatgggcaccaaaaagaagttcattgaaacaatgtaacattcttaattcagttgatatgctccctcctgttctaacaagttcatgaataattgataaaagaagcttcatctgttttaattaatttggtcttgaaattaattcagtccagtacaaaagtagcaggcaattaagcctcattggcccaactggacaaaaatatgcccatatcattgcctagagaaacaaactggaaatggacaagggctgtggtccactctcccaaacctgaacaccaaacagagcatcaccaatccccatgagaccacggcttgttctcctttctggacctcgtaatcaaacaaaaaacctcatcactggacttttagcatttatattttaggaaatcctgtagggagattccaaatgcatagcaagattgcttttgtttcggttgcatttcccttttgaaaccttcaaataattgatgagaatttactaggtctaaggaacagaacataataacaattatccgctgcaatacttaggcacatgcaataaacacatttggtcctaagaaattatcacagtttgttatgtacatgagtttagcaaattcttggttccattatccacttggcaattacatatagtgttataataatagtttatcttaaaatagtacatttcctctctggatcttggcatgcttaataagcactattttcttaaccctcagaatgccctttagaatggagaagatagaaaatatcattacagttactttgggaacaaagatactagggttcagagatgtagacaatcaaagaggggctttgggggggctgggtttattggggaggttttcggccatgtggcatatgggatcagatccccaaccagggatggaacccatccctgcatgaccagggaagtcccgatcataacagttttaaaagacaactactccatgcacctttatggttgcttgaattctacctggatttttgtaatacctccagcaacaaagaactcattacttcacaaagccaccaattccat

SEQ ID NO: 55676 - DNA, 1672 bp, Bovine  19866881142125
  misc_feature (1)..(1): n is a, c, g, or t
nacccttccgcccctcaccccctagtctggcatgcttctagcccctggacagcagtcaccaggagcctctcgtgggtgtcattgcacatctcacccctgaatgtgttggggggaagcaccgctgtgagcctgccatctggtgggcccagaaactgtgtctgcaagccagcagaggctggccagggtgggtaccccaagattccttcccactctcatggcagctgctctccccaacccctgtcctgcaggaagtgtggcccccggctatcagcagaggccgcagagaagctgaagaatcggtatatcatcatgcggagcggggcccgtcagcacgagagggacagcgaccggcgctccagtatccccatcaccgtccggtgagcgggctgggtgggctgatgcgtggcctcggcttacagggcatggtgtgccctgcaagtctggggctgggacccactgctgaccactggtgctggccatgatcaggctgctgggcagggaccactcctttaggagtgaaaacagtggcctccctaattatccgtatcttttgctttgtttactgttgggaaaatctggaagcctctcttctgaattctgtctagcttcccccattttagggaagcctgagggtgagggaaggtccagggatggagtcaggagacctggtccttgcctcctgcccaccgtgtgacggctgagagattgctttccttttctgggcctcagttgtcttagttgttaactctcttcactgtggtgagtttatccaattgagtgactaagagcttaaacctacctcatttgaatcctgcttccggcactgattagatagaagtgggttttgctctatataatggaaggtccaaataaagtcacttaagtaaattgggagtttatttccaccttaggtgaaaatgtttgaaggcaggtagtctaggatcgtgtgatggttcttcagtcatcagcagcaatttgcgctccttcaggctcacctttattctcattgtccagtgtggctgctcgaactccagtcattacccctgcattccaggtggcaggagagggaggaaaagaagtgccttttttttaaggacacttcctaaagttcccataaaacgtttggacataaaacatactggccacatcttagtcacacagacatacctggatgcaatggagactgggaaatgtcttgtagctgggtaccatgtgctggaatagaagctggggttctgttactaagagagatagatcacggggaccaccagcagccttcgctgtgaaggggctggacagaagagggacgatggactgagtgcaccctggcgtcccgttgctcccacacaggcagctggaggccatcgtgcgcatcgccgaggccctcagcaagatgaagctgcagcctttcgccacagaggcagacgtggaggaggcgctgaggctcttccaggtgtccacgctggacgccgccttgtctggcaccctgtcaggtgagcaggtgtggggagacaggccgggtggtccgtggactctgggtggggctcatgctggatgcctgctgtgctgattgcttctctgcacttgctgaggtctctgtgcttcctcctgcgaagaaagccaccccccactccccgtccccacccccaccagccattttgttccaagatgg

SEQ ID NO: 55677 - DNA, 1616 bp, Bovine  19866881332181
  misc_feature (1)..(1): n is a, c, g, or t
nttcttgcctagagaatcccatggcacagaggctggtgggctacagtgcgtgcggtcacaaagagtcggacatgactgaagcatgcatgctgtgacatggcagagacaggatcccctggctagaccagaccacctgacccttcccaggggcacagctcctcaaacagtacaggtgatctttcctctgactcaccctcctcagggaggaaggctcaagcttccccttgcccctccttccacgagaaggtctgggttctcacaccccattcaggtccacagactcccccaggtatctatcaccctcatgaggacacaccttgtggccagcctggcagtctggagctcccccaagtctcgcttagatgaggccatgacttctaccacaccctcttggtctggacctctgtttccccacacaccccagaaggacctcagaagatggccctcaagtccaggaaagcacatctgaaacggactgcccacagccaatacccagcagactgcaccctggcccagcctccagcctacatatgacccataaattctcccagctgaacaaacacattttatggggcctggggacgcttcctggcctcactgttcccaccttcccgtgtcctgctctggcctggccagctccccaacactgcacctctctgggacccccaagccccatccttaagtctccctccacctcctacccgtctcccccagctcccgccacaaggagggtggaaagtttcttctcttatcagccgttttactgccccctcctccctggttacacagtaattgggaacagaactcctggcaagaacgggttgatcctatcagtttgcagtcaacagtttactagacagagggaaagggtcccctcagtgaggacccaggaggcaggtaagaggtgtgcaaacaagagggggacagaaaggacccccaaaggaagggaaaggagccaggaaggagcctaccgagaggcttgtgcagtgaagtcagggagagagcagaagaaagtgctggctggaccagagacaccaggagaggttcagacaccagcgttcagcccagccccggcacagagagccagcctggcggtgacctcgcgaccctcttcagaagcctccacctgcaggtgctctgggaggaaggcctgttctggaatctgggagcagcagaagccagaggaatctaggaggatttctgggagcaccccccaagctgcagtgtggcccagggctgggttggccacctggggctcgctggtggcactccggcgcccagccgcccgaacacctgcttccagaggtctggccggagccagcaggaaagagccacacaacagagaaagggtaaaggtgcacactttgcctccagatctcctctgggggcagcctcccttttccttccagctcttttgtcctgttcccgactggccatgacttcagggtccctggcctaggctgtggactgtgaaagtgaccacctcggaaaagacccatcacagtaggactgaattcagtttagcaatggtgattcctttgatgttgagtcaacgagggctctaagcccatgggcacaggcacagccccttccagctttcccaatgggaccagcat

SEQ ID NO: 55678 - DNA, 820 bp, Bovine  19866881406873
  misc_feature (1)..(1): n is a, c, g, or t
ntcaacactaatgtccttacagttgagctgccattgatctggttttctgtaacctgaagctgaaagcattctttattgctaactgaggattctctcattgaccgccccctggcatgcctaggctgccttaagatgtgccacaggaacggcagacacaggtgctgggtgcaggcggggggcttgggaagactggggagtgggggtggtgaaatgaggaggccggtgcaggctctaagtcccactccagcacactcatccgaatggtgcaggaccaagtcacttcccctctagttcttctgtttcctccctggtagatgcagggttcagttccatcaggggcctctcctaacaatgactcacaagcttcgagacttttaagctcccagaccacacggactgcctgagcttttactgatgacagtgacgagtggagagggtccaagctcagctcactggtgagtatttggaggtgactcagtgaagaatcagaaggccccagagtttttatttattcctcttccccatttgtcagaaatccttcattgtgccccagtttcagggtgtatttttagtggaaataaacttgagcagctcaagatgacacgattccttcaggagtttcagcatcacctgctggagagaagggcaggtggagtcagtgagagctcctgacccagtggttcaggcttctgggctcaccagagaaatcatttaatctgccagaaaaacaaaagaaaaatctcccatggctgcaagcctggggtgaggtgagtaccttcagtctgggatccaggatcaagctttcaagacagtggcatcg

SEQ ID NO: 55679 - DNA, 536 bp, Bovine  19866881490893
  misc_feature (1)..(1): n is a, c, g, or t
nattttgccatgaataaaaatgtaaatttaaattctgttaaaatgtaaatttcagccagaagcttgctgttatttgactaaataagaaattaaaatttcagagctgtctttacatgacaacatcttttttgctatctaatcaatttcaacacttttgttggcatcaagtccccctacaccatggctctcaaagataagtaaaaaaccacatcatcagtccttgagctcgctttgctagacacagtcagatgtgtgtcaaggagccccagaattccctaagactctttgagtttaatttgttttgtataatcccctttgtcctagagttaatgaggtcagttttcgcaagttctctgcatttttgatgctgtctgtgtcagcaaggtgagggtgagattccagttcaattgtaaggctgtctaaacaacagtaaatgtcaaaagaactcagccccatttccagggggctgcagatttctgcttgcagagcaactgacaaggtgttctcactgcgggcaacaatccacaaaagcattt

SEQ ID NO: 55680 - DNA, 846 bp, Bovine  19866881564621
  misc_feature (1)..(1): n is a, c, g, or t
nagctctgtccccagcgggctggaaggctcaccctctggttctgcacccccaaccccacaaagggcagggaaggaggggaagggagagacaaagggctgggggagcctgggaggtcccagcagaacctcagacccctgtcctctccctttaatgcgacagagaaagtcgcaaagggagagcgctggggacaggcctgggcctagaaacagccacccctaccccaccccaagcctgcctgctgagcgcagggcacggtacagggtgggtgggaacccggccctggaggcccacctgcttggtgaagtcctggatgatgctgtgctcagacacctgggagccgatggcaaagcggcgcttgagctgcttctcgatgcggctcagcagctcctggtcctcctggctggtgaagccttccacccctgtgggtgcgaggagggaggcgggtcagcgggtggggacctcagtctgcccacagcggggaagagccagccagtccccgaagagaacatgagaggaagacagagggggagcctggggacagccaaggcctgagcgagacgacggacagaggcctggagtcaaggacagggcaggcatgagcagaaggatgctgcaggcagagggaacagtaggtgcaaagattcagaggtgggaaacatgcccacttcattcaaaatctagtcgtagggccagggacagggccagagtgggggccacatgggggccaggtcccacaggctagagggcacagcccaagttttcctgattctggtgagtggagcagccactggaaggctgtgaggagggcctcgagctgaggacagcacctgggccccaggtggcta

SEQ ID NO: 55681 - DNA, 1782 bp, Bovine  19866880901707
  misc_feature (1)..(1): n is a, c, g, or t
nacagaggcaggagggcacaagtcatatttgctaagcccttgtctcagaggtgggatcccatgccctcctcccacagtccaatggccgtgttttccttcattttatagctgggaaactgaacccaggtgagactaagtgttttgtccattgccacttaaaaacaagattgaaccagaatcctaaggaaggtttgcgtttccaaagcccaaaggcaggaaatgccaagaggctgtgccagacttggccccaatctcaaggaaactcaccatgtcttttctttggcaggggtgggaacagacctaatttctttggtggtgacaaaccacagattctgtatcaacagaattcatttgtctgctgctgttctctcaaatatgaaaaagtcagaattggctgcctgagacccttgggttggatggggtgttatgcagctttgtgccatagattctatgtcctaaaggcaatagatccaatcataggacttcattcaattttctctttctattgagcattagtaagtcttttttttttttttaactggtctcattctacaaagaatttgagatgcctttttccttttcatagctgtccacttgaaacttataaagacacctctcattatgaagattaccctccgtggcccttcaactcaaaattgcattcagagtccaatgacattcccaagctgttttgcaatttcatgaaattaattttcattaagtctactcaaaagctttttcattttccatgtctggaaatcttttttaagaaagagacacacacatgcacacaaggaaatcattttccaacaaagacttaaatgtatccagagctcccaatttgaagtcatttatttagtcttctccaagcactgctttttaaaaccaggctgggcctcctatcaagttctagcactctgttaactcctgactgtcccattttacgtgggagctgcaggaatagtggaagaccacagccagagagccctgccatctgctgtgagatgaaaagccacatttctctaaaccccaggggtctccagcttgtagcaccctagttctctctctttcttgtccttcttctctttcttcttctctttattctctgaatcttggggaaaattctggtcccagagaggaagctaaaagagatttattagatcctccagttagggagggaggacatgggaatttaacatattattgctactgaaagagctttgggggaaacttcaaaagcaagcaatttggaacaactgtaagaagaccccctccaaagaaatgcatcaaaagcttcttttgtaccatttattttacaatttgaatctcacatttccattccatgaaactgtgctacagaagaaaatcttagccacgcatacacatctgtaagcaatcatctccttgacccaggctctgaaggtgtgtcctgtgatagcaaaacttaactcttctaatcttgagtgtcagcctgggcttcttgtcagacactgagtatcagattcaagacctctggatctccctggttatgtcatgtaaaacaatgtctgttcacgtcttagccactgtaaacagtgctgctatgaacactggggtacgtgtatcttttcaatttagagtttttgtcttttccagatatacaccaggaatggaattgctggatcatatggtagacctattcttaactttttaaggaaactccatgctgttctccacagtggccaaaccaatttatattcccaacagtgtaggaggctccccctttctccacatcctctccag

SEQ ID NO: 55682 - DNA, 1556 bp, Bovine  19866881045173
  misc_feature (1)..(1): n is a, c, g, or t
ncagcaccaggaactgaagcactccatcctcaatccggcttcccagcggacttcacaaagatgtacctctgtgcgtaatccaaggcgtagcccaggttgagggcttttgcctgtcttgagcttcatcctcttcacgagattcaggatctcaggcttattctggtgctggtcaaaacgggactccaccttgacatcatcactgaactgagccactgcaacccgggtcccctcaggtttcacatccagctcgtcgatgaccttgtagagaaagtcacgggcggcagtgaactggcccatgaggttggctgagccgtcgaaaaggaacaggatgtctcgcttgctctctgcaacaaaagtgggtcgtggggcacagtgagggacaaaaacacaataggctccaaaccgacctcagcccagcactgccagctttcagtcatgggaattcaggcaattcacctgatgatcactgtaccagcaagggaagagaaaactcacaccagctgtcattcaaatgccccctctcaaagcagtgcatctgtgcacagggctgggaccactggaccgtttgcccaatctagtgccctgcttcctcaacgctgcaagccagagaaaggccttgggggtctgttctagcatcagtgccaatcattctgggagaacagatggtgttttcaaattgttaccaacttctgaaaacattgtgcttaaaaatcaattctgtctctagtgacaaaggctgctatgggttatccacccaagtgtaactgacacataatcaggtgtcatcaatgctctatttggattctctttccattaaatttgaggttatgggttagaacccaagatagtgtctatcacgactctgtgggtaaggatctctgtcagtgacttccagtctgctgtggtcagactacagaaaacccagcagcagccagtcaggggctacaatgtgtcacgtgaatataattttctgttcaaaccactcttagaactattttgattaggcttcagtgggctccatctagctacccatctgcgtgatgtcagcaactggtgtaagtaagggtccataactcatcatcttactaatttgccaccataatcatcatcacctaggctgcctttggaaaccactttaccatcacaaaaagacacagcctttgttgggtttatgacaaaaatttttctagatacagcagatttggaatataaaaacatcctatcaagaaaatcaattccacttttaaatgttcccaatgtatactcatgtataaaaggggatccagctttctctctctgtttttctcccatttccatccggatttgcatgccagtatcttcagagacattggggcaaaaaaaaaaaaaaagtaagtaaaagcttctgaatccagggtgggataacctgggtagaacataaactggattttctagacgttcaaggacaaacaccctttagacagaggacctaagcttgctggtacagtgtcttgagcctcccttcaaaaatccataaccaaagggaccccatcatctctgcacagctcgtcgccagc

SEQ ID NO: 55683 - DNA, 1415 bp, Bovine  19866881128100
  misc_feature (1)..(1): n is a, c, g, or t
ntatgccaaaagtgttcgttgcttagtcgtgtctgactcttttttgaccccatggactatagcctgccaagctcctctgtccatgggattctccaggcaagaatactggagtaggttgctatgcccttgtccaggatcttcctgacccggggatcgaacccaaagccatattaaaaaggattttagcttgctgattagtttcccctggtaagtgttaatgctaagtcacttcagccgtgtccgactctgtgcaaccccatagacggcagcccaccaggctccccgtccctgggattctccaggcaagaacactggagtgggttgccatttccctctccagtgcaggaaagtgaaaagtgacggtgaagtcgctcagttgtaagtgttaggtgatgaaaactgaaatctggccacgataatgtcagcaaggtatacatagttgtacattatgtgacaattttaatgaccccagaccctctgcagactgacgtgcagtttctcactctgagagtgacagaataaacaggctgccatgcttctttctagacatctgcaacattgacccatcctgtggattcggcagctggaggccttccttcagggaccggagggcagcaggcagtgatgtggacatcgacatggctttcatcttagatagctccgagtccaccaccccgttccagttcaacgagatgaggaagtacatcgagtacctggtccgacagctggatgtgagcccagaccccaaggcctcccagcactttgcccgcgtggcggtggtgcagcatgcgccctacgaggcggtggacaacgccagtgtgccgcctgtgaaggtggagttctccctgaccgactacggctccaaagagaagctgctggccttccttggcagcaggatgacccagctgcaggggaccagggctttgggccgcgccatcgactacaccattgagaacatcttcgaaagtgctcccaacccccgggacctgaagatcgtggtgctgatgctgacgggcgaggtgcagaagcagcagctggaggaggcccagagagccatcctacaggccaagtgcaaaggctacttcttcgtgatcctgggcattggcaggaaggtgaatgtcaaggagctgtacagctctgccagcgagcccaacgacgtcttcttcaagctagtggacaagtcgaccgagctcaacgaggagcccctaatgcgcttcgggaggctgctgccatccttcgtcagcagtgagtcctgtgtgcccttggtttgggaatgatagctggtgtgcccacgtcgacctgtccattcgttcagccggtgtctattggcatctcccacgtcccagacacactggtaggagctggggttgcagggacatagatgggaatcctgccttcttccacttgtttgttca

SEQ ID NO: 55684 - DNA, 1378 bp, Bovine  19866881742494
  misc_feature (1)..(1): n is a, c, g, or t
ncaccgacgagttcttcctgaaggacttccccccccaagcagcagattatcgacgccataaacaaggtggtctacaaaggggggaggcacgcgaacaccaaggtgggcctggagcacctgcggcggaaccacttcgtgcccgaggcgggcagccgcctggaccagagggtcccgcagatcgcctttgtgatcacggggggcaagtcagtggaggacgctcaggaggcaagcatggcgctcacgcagagaggcgtcaaggtgtttgcggtgggcgtaaggaacatcgactcggaggaggttgggaagatagcgtccaacagcgccacggccttccgggtggggaacgtccaggagctgtcggaactgagcgagcaggttttggaaactctgcacgatgcaatgcatgagaccttatgtccaggcgtgactgacgtttccaaaggtaacgtcctttaggtgcatatattcaatcttgtcttttcaatgctggcacgttatctggttgcccagatgcccagtgctggccttgggtctcctgcagcacctgctgcttctgggactgacttacatccatgtggttgggtcctggttgtcacctgcctctgagataggatgtgtttcctggataggagtggacgtctgtcttttcttgctcttaccagatttacccgtcctgtctaatcctctaaataattcagactgattgatgtctatttcaatttgtaggttccttagattatttgagaccagagtgtttgaattctcaagtgtgtttaatctaaagccgacacttgggatgcatctagacactggctatattctgtgctagggctgattaagtccccaaagccaacatactaaaatgccaacagttttggttcctaagagtcggtatgcattttcccggtgagagaggcagatccagttgcttctcagagttcgtacacagacgatctcatcttgcccttgagtgagcgtgttccctgtccgcgtccccagctgtgcctgtacgttgaaagtgtctcagcagcttgactttgagctcatggcctgcttctccctttatagcctgtaacttggatgtgattctgggcttcgatggttcaggagatcagaatgtctttgtggctcagaagggcctcgagcccaaggtggacaccatcctgaggagaatcagtcagatgcagaagatcagctgcagcggcagccagctgcccaccgtgcgggtgtctgtggtggccctcacgccctcgggccccgttgaggcctttgactttgctgagtaccagccggagctgtttgagaagttccagaacatgcgtgcccagcacccctacgtcctcactgcggacacactaagctctaccagaacaagttc

SEQ ID NO: 55685 - DNA, 1703 bp, Bovine  19866880369542
  misc_feature (1)..(1): n is a, c, g, or t
ncagttatcctgaaaattttatggactaattatatagcatgatactgatcatccttgtcattttttttttccttcagttcagttcagtcgctcaattgtgtctgactctttgcaaccccatgaattgcagcacgccaggcctccctgtccatcaccaactcctggaattcactcagactcacgtccatcgagtcagtgatgccatccagccatctcatcctctgttatccccttttcctcctgccctcaatccctcccagcatcagagtcttttccaatgagtcaactcttcgcatgaggtggccaaagtactagagtttcacctttagcatcattccttccaaagaaatcccagggctgatctccttcagaatggactggttggatctccttgcagtccaattacctcatgtttccaggagattagctttaatagtttaaggaaaatggaggagctgacagaatccagggcctctttttaagaaaactctttttgtaactcttctgtaactttttaaaacttaaaactctcaaaagcctcagatgaaaaggtaggaggattaaggagatgacactcttgtccagtgatgcgtttttggaaaaatgaggagatacctcccagacctcccagtggaaaaccacaacatctgggggtgccagcaagtaaaaataaacgtgaaggaagactggattgtaccacacatctcattcccagggttcctcaagcaaggactcctgccaagtcatgtatttctagcttgatagatttactaggtgggaatggtaatacaactgtcatacatttttccaaagcttttttccaagaacaactgacaaaaatatgcattctgcttgggcttcctaggtgacacataagtaaagaatccacccgccaatgcaggagacacaagagatgtgggttcaatctcttggccaggaagatctcctggaggaggaaatagcaacccacttaagtagtctagcctggaaaattccatggatggaggagccttgagggctatagccatggggtcgcaaagagttggacatgactgagcatgtacccacacatgcatgctctcagcttgtctattcatatgcctctggtcagatttagaaagcaaggaaaagcaaaaggaaaagattgagtcagaagaactgaaaaagaaagagaaaaatggaccagttagaaacttaaaaataaaggaaagtcattctgataacaatggggcgatctgatattctttcaaccataaatacatttcctctatctaaaagcatcatcggtatcccaaattagatgtgccaggttttcaaaatttaacctatgaattttccagtagaattttacattagtgcctgaacaatacaagaacaaatccatcattgcaaatcatcctagccatttagggccatggacttaaaagtagttggcaaacttagggtgttatgaagcttaattaaaaacagctcattttttctgaacatcattacttttggcagcacatttatcagcaagcctgaaatgagttggatagcacagaggaacagatataagcttttttaaaacaaactcagagaccctgagtattacaaaatcttacttaattcacctcactaatttcagaactgggagacccactgtgtcagccctgcctgattgccactggctccactgatgggtgcctgcttctgcccccttg

SEQ ID NO: 55686 - DNA, 1682 bp, Bovine  19866880427741
  misc_feature (1)..(1): n is a, c, g, or t
ngtgaatctcttcctaaaaataaggacacaaaataactttatgcactgataaaagcccaagtcaaaacaactgtgacaaagcacagaacaaattataaattacttaaaaaaatcatcatggttactcataaaaatctcaacatttgccaaccaatttttcttgtcaaaataccttgtttcttctggggtttataacctcaatttgtccaatttctctccataaatgctctttttaatggctggggcacacaatagtattcagattctaaagacttctttctgtaggaacaacatttgagaagcagatgaatacctttcaaaggcatttgtagttgagattgtggatgagaatgatggggaaaatgaaaaaaagttatctgaggactctggcctatgccaagaaataagtgagtagagcaggaggtttgaaacacagctcaggtaactaaatggcaggcaactctcagattgttgacatctcattttttcctttctagccctatttatccctggtcttcgttcctttactcaacccatgctcctgttacttctcttccctgactccctatcctccattcttcttttcctgtcgttctctctgtgcatattggccttctgagatctatacttcagagaaaactgggctgtgagacctgcaaaaatggatatctatccctttgtggttgcttctaggaaatactaaccatacttaagatatgattaatttcctaatatcttaccaccagtaagatattaaaactcattaaaagttaaaaacttttattattattaagaacatttagtattttatggttgtgggttcagttgctaagtcgtgtactactttttgtgactctgtggactgcagcacgccaggctcccctgtccttcactatcccctggaatttgctcagattcatgtccattgagttggtgatgctatctaacaatctcatccctctgcctccctcttctgttgccttcaacctttcacagcatcagggtctttttccaatgagttggctcttctcatcagttggccaaagttttggagcttcagcttcagcattagtctttccaataaatattcagggttgatttcctttaggatttattaatttgctctcctggcagttcaaaggattctcaagagtcttttctggcaccacaattcaaaagcatcagttcttcagcgttcaggcttctttagtgtccaactcgcacatctgtacatgactactggcaaatccatagctttgactatatggacctttgttggaaaagtaatgtctgtgctttttaatatgctgtataggtttgtcagagctttctttccaaggaacaagtgtctcttaatttcatggctgcagtcaccctccacaatgattttggagcccaagaaaagaaaacttgtcactacttccacttttttccctatttgtcacaaagtgatgggaccagataccatgatcttagcattttgaatgctgagttttaagccagctttttcactctcctctttcaccctcatcaagaggctcttgaacagagaatggataatagtgggaaaattgctgaaatttgaggaaaagggttatagtttagttgataatactgtatcaaggccaatttcctgttcttgattgttggattatggggtatgtaagatgataacattaggg

SEQ ID NO: 55687 - DNA, 3721 bp, Bovine  19866880458068
  misc_feature (1)..(1): n is a, c, g, or t
natactgtatgtaaataccttcttcttcgctcgggtttgactattatgattctatgacaaggagagttacatagaatgaaaaatattatgtgatatttattttcttcataaagttaggatgattttttgaaatgcatgttcatttatgattggggagtattggaagcgatagtgaggaatctcaataaaatgacatctaacaatcatgaaagtataaagttacatattacttatgttaaaatcagaatagcaatagatgatatgtgctacgcgtgcatatgtgggtgggggaaatttttattttgggaaagtgtcacaacattccaagaaactgtgattttactattctcaccaaaaggctgttagtaatacagaaaaactgctttggaaaaatgttttattattaagataaaattgcaacaaaaatatcctgtcttgaagtctgtaccttggtgtaaatgatgtgctaagtgaagtgaagtgaagtcactcagttgtgtccgactctttgcgaccccatggactgtagccagccaggctcctccgttcatgggatttcccaggcaagagtactggagtgggttgccatttccttctccagtggatctcccccaacccagggatcgaacccaggtctcccgtattgtaggcagatgcttttaccatctgagccatcagggaagtcctcaaatgatgcgctaaagccccccactattattgtgtaactgtcaatttcccctttcatcaatgttagcatttgccttatatattggagtaccctatgttgggtgcatgtatacttacagttgttatatcttcttcttggattgatcccttgatcatcacatagtgttctgccttatctcttgtcacagtctttattttaaagtctattttgtctgataagagtattggtactccagccatcttttatttccatttgcatggaatatctttttctatcccctcaatttcagtctggacgtgtccctaggtctgaagtggatctcttgtagacagcatatatattggtcttgttttggtatccattcaaccagtttatccttttgattggagtgtttaatccatttatatttaaggtaattaccaatatgtatgttcctattgggcatcccaggtagctcagagggtaaagaatctgcctgcaatgcaggagacctgagttcaatccctgggtcaggaagattccctggagaagggaatggctacccactctagtattcttacctgggaaatcccatggacagaggagcctgatggcctatagcccatggggttgcaaagaataggacacaacagagcgactgagcacacacacactcacagattcaacaggttaaaaattagaggcctttctttagttttccagaaggtggtgctatagcacaagtgtttggtttttttggcctgtgctatttgtatttgaaaagcagcactttccaccgtctctgcttagagttgatgtccagtgtccccatggtcgctgcttctgctccggagtcacttgtgccttgctgctgctgttttctctgtcatcactgcaaggggtaccaggacattgggcacttaagtcacatttgccatttcttgagccacaggctcagccaccacagggagtggagggttgggggtgcctgggttgtggccccttctgccatgtcagattcatgggctgcactcctgtgagaaagcagcaggggaccagattcttggaggctcgtttcacttccactgctgccccgctatctatctgactgtgggcgctgctgtggctgggaggccagagttgtgtgtggtttcccttgctgctcccaagttctctgggatggcaggccgagctgctgcaatcagagggccatgattgcaggcactgcctctgctgtccccaggttccacctcctctatgagttccagtttacccaccttcagatgtacaggtatgtggaattctccagggtcccctgctttgggcagaggaaccttcatggtcagtgttttgctggttgtagattgaaggggagagatagtgtctcacccagttatgatgctgatgttaactctgcttctctcacttttaatgttcaggtaatagtttaaaattttttgccttttaatgtacacatatacacctgtgttttcggtattttgggggaaaatcttcaaaattaagttttgagtagcacgattaatagatccaccaatatgatttttaaaaattgcagtcaataaaagttttaattatataattttattttagcaccttcttttgtactggaacacagaattctccagcttggataatattataacttatgtggttgaacagtcttcctgaaggaaaaaaggctaatccaattttacctctaaaatctgttaggtatttagtaattttgtccattctctttgggggggaggaggggtggactgaaagataattgaggcagggattgcacttggtactttataagtatgcaatgttgtcagtagctccattttaaggataaggaaatgggtttatagacataaagtggtggccgggaacatgtagtaggcagcagaggtgaagctgaactccactggatttaccagcttcccccttctcctgccttagtatctatgagccactccaatttaacctccatggccacatctatctacttcagtggttacttctcattttccttctgcctcttccttggccattctcttttacagcttcagatttcctttgtttaaatgtcttgatatgaatagcccccaaattattgatgaaaatgagtagtttccattgaaaagtcttcattctaaatccctttctcatctgattgaggcaaaaaataagcacacttgaccacaaattcttaaagagaaggctcacctattagagtagtgctatatgtaggaaccatatttcattatcttctaccccttaatcctagagacagaggtcttctcaatcctggatcccataggtttatcaatgagtatgtctgatgctcaggcttcccaggtggttccgtggtaaagaatctgcctgccaatgcagcagacactggtttgatccctgggtcgggaagatcccctggagaaggaaatggcaacacattccagtattctcgcctgggaaatcccatggacagaggtgcttagtgggctacagtccatggggtcacaaaagagtcagacacaacttactgactaaacaacacgcttgatgccaatacagcaaatagattttaatgagctcttttggtactcagcaccctgccctgcggctggatagccataattatgtcttttgtggaagctctgaagaacagggtcaagtgtcagccagtatctcaggttaatcacaagatataccaagacaatatcctcgactgcctggcttcacacagttgtattgtggtcttgactctttgcttcttggcatcacaaatggcagacagtgatcagcagcttcttttatctcactcagattccagatggaagtagctctaggttagttgctcaaagccagttgctaaatggccaatttaatgaatttgctttaaaaaaaaaaaaaaacctaattcattttaccttatcaagaagttttaatcttagtatcttttaaaaaacattaaatttgtctctcaaatatttcttgctgcggtaaggcaaaagaacagtgcaagacaaataacatagccatactgaa

SEQ ID NO: 55688 - DNA, 3826 bp, Bovine  19866880462408
  misc_feature (1)..(1): n is a, c, g, or t
nggcaggaacaaagttgcaacatttctgtattccttcccaaactttatacagcatctcactcataatacgtgctcaactaatttaacagtgtatataacattttaaaattgtgtcattttgaaagtaatctatatcagaatttaaacattttaacaagaaggagggttatgatatgatttcttttgtgtgatgattcctacttatcctgagtgaaagttataggatttatgctatgttaagccacgctaagtatttcaaaatggagtcacagtggccaatgtgctttcatattagttgatttgacatgtctgctgtaagagttcaagtgtctttgagtaatagactaacagtgctaatttagataagcgatttactaggcaaattaggatttatgtcactggaactgaaagagcaaccaatagagacaagatcccctgggatgttactgttatgcctactgacagacagacttctcaaaatgagaccatggagctgagtaactgtaaggctctttactggaggacccaactctgagctggtgagagttgttccagggataccgctgggggctccctcagagcttcagatgactttccactcatacttgtcgcttgcagtgagccttgctgctgaacttgagactccttctgcccaggcttctccttggggcatttcattacccctttccatctccccatgttgactaactcatgttgtgcaattttctgtgccatatacctagtgacttgtgcattgaattgggtacaattcatatgtctctaattctgtgactcttacctggcttcatggctggaccctaataaacaaggagaaaggaatgtactcctgataaggacaaattttagtttaaactttttttttttttaatgccagccctctgacattggtatgggagttctaattagcaagaagatacccataaaatagacaaaagaatggtaaacatggggaataattcattaataagagtattgtgccataaattgtgcactgtagtcaattgagaattgactacaaagaagaaagtatttcttaaaaatctgttatttgggagaagatttcttaaactgctttgtgtttttcactctgcctatatcaatctcaaatcaattatcccttaaaatgccaatgtaatattctgaacagtttaatccatttaacatgtcctcatctttatccttgcccctgtgtcacttacagtttcttcacacaataaaagcctcgaattaataaagtgctttcttctagaaattcaaaatgctttctccatgttactgtttaattaattctcaaagcatttctctgtggagtgggagtggagtgggaagaggaattttcttttcctttatgacacaggaaacaggtttgaagagcaaatcatttctatatactgtgaaacttgatgttaattcagttttgttcaaactcatagaccatggtcttctagcacacctagtctttcaaacagaatcgtgttcatggatttattcactcaataaatcatgaaataattactgggtgctcactatatgtcaggcttccctggtagctcagtggtaaagaatctgcctgccaagcaagatctctgggttgggaagttcccctgcagaaggaaatggcaacccactccagtattcttgcctgggaaatcccatggatagtccatggggtttcaaaagactcaaacaagacttagcaactaaacaagaacaacacaatatcctgttctagaccctggggatataatgaacaggagaggaaaaatgcttgacctcacagaacttaaattctttcagagggagagagacaacaaactcatcaattgcactgtaagttctctacaactggacaaatggatacattatcacaccttacaatttaatttgtttgagaaaaatatctcaaaatatagggttcatgaggaaaaagataagtgattttgagtgatgatagctaagaatcacatatttacacggttttggaaagatacagaaaaacatcttagagtaaccatattgttttggtgcttgcaacataaaaagtcattacatgggccaaaaatacaacaagaacatattaaagcctcatgttataagatccagatgaactttgagggataatctagtctaattccctcagtatcatatgcaaaatgtgagtcttagaaatgttgagatgatggacatgattttgtttccagcaccctgttacaaaaattatgaattgcctaatgaggcttagtaacaacagtagaagaaatagtgaaatgtgctgttccttgaatcttcctccttgatatttgccttgcaagagtaagtggtcagaagcattcttgaggcataaacacagagagagagaggtgtaagtcaggtacatggagggatgacagtgagatgagagatgaaacagacaatagaatgaaaggcatcttggtggggaacccctgatttttttgaactcatatttttgctggaggcatttttacacattattttccacaggactttggagacacacacacaggcatatttgaatccaatttctaatagaaggtatatgaccacggtcaggtttcctaacttgaacctgttcctttacatagcttgaacctgttccttctgacaaattttgtcagaaattttaaaaactgttgagaaggaatatagatacaaatggtgtctatatataaatatagatatggtaggaatccagtacattttagtcttattacagtaattttcctaacatgtttcagaacctcttgtgtcttactggaaaccctttccgtctcatcatctctacatggagatatgctctcagtccgtgacgagttcaggcttcatgtcaccccatttccttcagtcagttcacctccccgcgatcatccagttttgcactttcccatagttatcggtttcagggttttatctccctaacttggatttcttgtagaatagtgaacagcactaggaagacttggatttgaactctgccagccactcagtttgaatttgagcaaactccaggagatagtgaaggacatggaagcctggcatgctgcagtccatggggtcacaaagagtcggacatgacttagtgactgaacgatatatttttaaaaagagtgatgagtttcaaatatatgcacactgatcaaagtcatcgttgcccttttttaggcaatctcacttgaaaagagtcctgcatatgagtgttgctgttcttattgcatagataatatcatctctttagacagagtaacaccgaccaggaagtccagaaagctatacaatattagatgtttatttcaaaagttgcatatataaatagtactaactctagtaatgcacctctttcctagcttctctgctccattttttttgctttttgttattcatctacttactaatgatgtacttagtaagcatgtacttactacaccaggatgcatcaaagtttcgattgagatctgttccaaaacatgtgccattattatgggatgaacgggacttcctccaaagccgatcctgtaacagggaaacaaacagggatgttgtcattctaaggtctcataaatcacagtgttagtgatgatgggtggtccttgaacatgaaaactagttcctaggactgtctggaagaacctgcctcaacattatgaagctagtgcatttaatttttagtcccccagatgggttagtaacccccaataacaggaacatctgtacaaccctaagtgcacatgtgtgtaaaccatcactttggaggggtaatttggcctctccctcatgggcagattaatag

SEQ ID NO: 55689 - DNA, 1802 bp, Bovine  19866880497814
  misc_feature (1)..(1): n is a, c, g, or t
nctagtgatagataaaatttttgagatcttggaattcagtaaaatgcggtagctgtttgcggggagctgcccgtgagaacggggtcctttatctaaaggacacagctctgggagctgcctcagtccttgagggtttgcttgcaaacatagctctctgtcccgccaccccagagattaggcgattatttactgcagacacctggagttctggacaaacttctcacgcacagagaaatgttatctggtgtaagaaataataacagggtgccattcccatgctctcaagatttcttgtgactttttgtaagatgtataggtcaaccaagaaaaatgctgtcttgtctttctcacggtctcctgtataaatataagatgctgaataaagtcatggtcagactgcgtcccttcgtggagatgtgtctgtccctctcgaccccatctttgttgtagaactcttttgctgtagttttctttctcagccgtgccgtgcacgttctcgggacctgcacgttctcgggacctgatcgactttgccggctggcactggcagctgttactttgtagccgcttagattttctttctaaacttaaagagagctgattcaaagatctaggagaccagattctgacgttggcactgtcatgaattatgtattgactgtggccacgtccattactttttctgatccctggtttcatcatctgtaaaatggaagaagttaaaagatccttaacgttcttgctaactctacatttgaatctaggccacttggtagtgagataggctagacatttacagctagcttcctgtttacacttccaggtagaaataacaccaggaacaggataaatagctggtctttgtctgtggtggacattctgagatagcagcaatggcaggggcagaaagaggctaaatactgcttggttaaaagatcaagagacttatttctcatccttggggtcagtgagaccttaagtacgcatatggtagaaaggctcctcctggtcaaaaaggaagggccctgagtcaaagaacaaagcaagactggccagaggaaaacaaatacccagaagatcacccccttataaatgactcatatttcccaaaggcacgacttttatctgagcttgcccatgcatgtactctgcttttgtaataaacgccttactttcctctctaccttctgtctccttgtcaaaaaacattttttttttttttttccaaggcaggcaagaactgggacccaaactttagtcactggccctcatggtctcttggctaggatttggcattcttactgtcgtggtcagtgtctgatcttgcttccagctgctgctcactgctatctctctgaaatcagcagaacaagacagtcaaagtgccaaagtgatacaaatgaaattgaattattctcctctccctgtgaagcacctgggttgtttccaaatagaaaatgcacttagtaatagttgtgagcaagaagtagccaagcttagtgaggaaatagcagcagaatcacaagacttggagtatgcgatcacacattttatatatctggcactaccttgggctttcatatgcataaaaatgaaagacgtttttaggttttgaaaataaaatgtttcagatttgatttgcctctgatttatacttagaagtaaagggaaattaactaaatctccaagacatcctccaactctccatctgtctgctcgccccatgcattcccaatgtccttctgcctaccccaccaccagtgccactgagtattgttcccaggccacttctccaggcatct

SEQ ID NO: 55690 - DNA, 1117 bp, Bovine  19866880853310
  misc_feature (1)..(1): n is a, c, g, or t
ncatttttcttccaaggatcatgacttggctaaatttaagaccttcaaattacagtcagaaaactgaaaaaatacaaaagaacccataagtcattactagcccataccaggttaaggggaagataagagaaaaataacatacacagaactcaggggaaaatccttcaaaacagaaagagggtaagaattccacaaattctctccatggacagcaatgaaataaaacatctgaagaaaaagacactaattaaaaaaccactaataataaattgatgtgtcttgtgaaacaactctcttcagagtatgagttgtctagccattttgatgaaaagtcattttggaatttttaattcatggacataataataaatacacttggtcttctgaggaaagagaaaaaagaacaggctttcccttgataattgaaatatgggcttggttattttaatcagaaatatcctggggcttcctctttggctcagtggtaaagaatccacctgccaatgcaggagacacaggttcaatccctgatccaggaagatcccacatgctgcagagcatctaagcccatgcatcacaactactgagcctgtgctctagaacatgggagctgcaaccactgagcccacgggtcgcaaccactgaaacccgcgtgccctggagcccatgctccacaacaagaaaagccactgcaatgagaagcctacctgtctgccagtgtagctacgaaacatgcccatccctccagtcttgttctcaaacatgatttgagtgttataagaatagaactggaactgacactcaaataagaaaagagtcagatatgagctcttatttcagaaaaagaaatacaaatggactttaaaatatgaaaaatatgttctcctgattcataagataaatgtaatttaaaaccacactgacaatgcattcaatgcaagccctatagaaatgtctgccttttttttttttgagaaatgtataagctgattctaaaaatcatataaaaattcaaaacaatcttgaaaaaggaggaaaaaattggagaatcacacttccatacttccaagcttattacaaagctatggaaataaagatagtctggcactggaataag

SEQ ID NO: 55691 - DNA, 3371 bp, Bovine  19866880857501
  misc_feature (1)..(1): n is a, c, g, or t
naatgagcgttgacttcttggttttttatggactttcctatggttttctatcaaatgtctttccaggaggcaaagaaagccagattgctgtcaagtttctgtctttgcatatgctggccctttctctgcctcaaatgccttctctgccttgcttcctgaaaaatttcccctcttttaaaatccacctcaaatgctctcagttcttttgtgagatcactctggaaaccctcaaagtaattctcttattcttacaaacttccatctattttacatataccactattaacattcactaggcacttcacagcaacttcttttgtgtaattctcttttctcacttagcctatgagttactcaatagtgtagataaagtcagagtctccttatcccagtacctactatggcccttggcattgaaacaaatcttcaataaatactcgtaaaaatgatatttaaaaaccatgaaatattacaatgttttaaaactgtagccttcaggaaaatgtaagaagcagcacttattaggagcctgtttccttgaagagtttaattaaaatcatggttgttgaactgagttcatttgaagtagactgaatttgattcactatgattgaatttcctactgtatcttttctcttgtttgcatttggcctttcatgtttaacaaaaccttctgctaacaggatcacaagatccctcaaataatagtgagaaaagtgcagtgtggaaggcaagggacttactacaaatcatagctaaatagaagaggtgaacaaaaattctggctctctgaacccctttgttactctttccagtagagtaacaacaataataataatccttttaggtttatttatagctctttaatctattcaaaggaaaagtatttttttaatagtcacaggaggcactataacacggaataagctgccaccagatttggtgactttccaaacaaggtcatttataaattcaatgttagaaatattaccccctattgaaatttttagtattctcttctcagtgacaaacaataaaatgcaagcacatatttatccatacataatggtattgtcaacaacaaaatgaagagatagtgcactgaccatagtctgtgttttccggctcccaacaatttgatggccaaaaatagggtgtctgtggaatgaaaagaagtggaacttaggttaaacacatgaagagttagtggggctcctggtttatgagccgtgtttatctttagcaattatctagaacagtttgctaacaatgtgttttattatctagaaaaaaatactcagagaggcactgtaaggttttccttttaaatttactttgctaatcaattgttcagcctctaaataagtacagcatgtatataaaacagtgtgcctttgctacagttgcatgtcatctgacataaaggtaaaaggactgattgcactatttatacagaagtgttaatagaagtgttaatccacaaagactgaaagcaaagtattatattcactgagactcatgatgaaataagtttatatttagacaattaattttgttgattcatgtatttcatcgttgccctccatatgtccaaaagcacaaccatcagaatctttccttaagatgggcaaacagttgcttggctctattaattatataattcaattctcaacattatccagctagattaaaacaacttttctccttcactttaaaaaacatttcttcatagacacacttactgctctaaatttttaatctgcacaagtcagagatcagttttttaaactaatatcttagttgactgcttaacaatagatatatatgattctgtgaaattctagaaactgactgatgaaactataaagaaactgtctgattgagaaaaccaattattatcatcagcaggttatattttctgatagggtttttctagccctgatggctggacatgcttgactccaaaccctaagcaaactccatgactatctgtctgctctttcaaattgttccttggatgatgatggccctgggattcaatggaacagtctctgtagataccagacttgtggatttgattatatttttcaattttacattaacaatctgtgtgtagcaagcatatttggtgtaatctctgattgcatgcatgcatgctcagtcacttagtcatgtccaattctttgcgaccctatggactgtagccagccagggtcctctgtccatagaattttccaaacaagaatactggagtgggttgccgttttcttcttcagatgatcttttcaacccagggatcgaacccacgtctcgtaactctcttgccttggcaagcggattttttgcccctgtgccatctgggaagcccaatctctgattactggtttgataattctgcctcttagaagagggattctcaaggaggggaaaagggtagttgggaaaactttttgaatctctgagagagggtccttccaaacagttcaggactcccaggggatttgattcactctctatactttcttggaaattgctctggtatcataaagaaggctactaatattaattctgtatacaggtgaacaaatttagagggtaaaaaggttgaagcactagataaagggggatatcaaggctttatacagcaccccctcattggcaaataaattcacttaacccaatttgagggcaaaattgggtcactattctaggggaagcatagagaaacaaaatagaaaaaatcttcttttcatgtgggctgctagtgtttgagatacttctcagagaatgcattattccctttgggttgcttctttagtttgggggatgtgtgtgtgtgcaagcatatttatttaattttaaaaatatacactctagtcagactggtcagacacataactttttttttttcctcaaaactgcaaggaatgttttcaccagtattcttacaatttttatttatttttctatcatttacttagtgaaaacttcctgactgtaaaaataaataaatgaaactattttatcctgtgatattatgtggaaagatgttttcaggtcttccaaggagatcaaaccagtcaatgctaaaggaaatcaaccctgaatattcattagaaggactgaggctgatgctgaagctgaagatccaatactgtggccacctgatgcaaagagtcgactcattagaaaagaccctgatgctgagaaagactgaaggcaggaggagaagggagcgccagaggatgagatggttgggtgtgtggcatcactgactcaacggacatgaatttgagcaggttccaggagatggtgaaagacaaggtcgactggtgtgctgcagtccatggggtcacaaagagtcagacacg

SEQ ID NO: 55692 - DNA, 2205 bp, Bovine  19866880910741
  misc_feature (1)..(1): n is a, c, g, or t
nttggtgatggacagggaggcctggcgtgctgtgattcacgggattgcaaagagtcggacacgactgagtgactgaactgaactgaatgaaggtcttgcatccttcttcctgcattatttcaaaatagtctcagctggtgtcagctgtgttcgtttgtctctgggttattgaccagcaaccttccttctgaaatacaaacagctataagggtttttttttttttttggctgcaagagagttcagagagaataaacaccaggtgcaggatataatttacacagtgtggaggtggaggggggggtgataggttaactttgtgaaggacaaatctaggtaccaacactgcagattagtaagttaaaaaattaagattgatcagctctttcaggctcatttgtcctgttctctgttctctttacttgttctcaggagaggaaaaacttcatttcttttttgctgcaacacaaatctgatagtcaatgtcctatattttccgcagcagtggtgccattgactctccttccctttggaaatctctttactgatcttgcaatattggatctccctctagttattccttcataactattctttgttagctcttcactggaagatgagaaagtgcctcagagctctgtcttagatgatctcttctttttctcctggtttaaaaaaaaatctttttagcaacctcaagtagaaagggttgaattaagtacacacctaaatttatgacattatggagtattagatccattcttaatttattttaatatttatttccgtttctattcatcccctgtgcttccccagtggctcagtggtaaagaatctgcttacagtcctggagacaccggtttgattcctgtgtcaggaagatcctctggagtggctatccactccagtaatcttgcctaaagaattccatggagagaggagcctggcagctaccgtccattgggtcacaaagagtccgacatgactgtagtgactaagcacattcattccctataccttttttctttttggacctaaacactcagagccagccctgcaaagatagaagaaaacatagagctgcaagtgccaaaggcctggtgtaatgaataaacaattactgagcaagcagagttcatcaaacagagtgagaccatattctttcaacttcaacagtttaatgaaatgaaaacaacagagcaaatattgtacgaattaatctctactaaattttaatttttataaacttttattactcccaataatgcagattttttaaaacttaaatgtagagaaatatggaaatattcagtgtctcctgtaaagtaaacatactgtaaagtgtgccgctcttgaagtcattcagttggaaaaggacctgattaaaggattaacaagtaaccaaattccaatgagggtgaaatgcagctgctccgctcctgacacattagttaccccataaattccttgtcccacagcctcacatttttcaggctcagaggaggaagaaaaaaaattattaatttctttttttctcaagaaaatcttccagagaaaaggaatgtggtcatctttaactttgctgaagcccctctgaagcaactctttctactagatttttaggaagactagaaagacaagtagccatggctgaaatgtagctttgtaatagttaaacattttacaagcttttggtgccctttctctcacagatgcccagggacctcatgctatccttcaatttataaagttattgactatgttattctactcagatctgttttctcctgtctaacctcatacaaaaagttaattttctctttcattctcctccaacccaaagaacatcaaatccacattattcaggtcttacaaaatgtagctactttataattcaaatttcatttagatttgtattgtcaaaaaaaaaaaaaaaaaaggaaggcaagatgagtcttgaaaattgtcacctaattggagaagcagtaatactgattctccctgctatggggactggggaaattcctgggaggcaacagtacaaaatatttttacctattctactgagagtgaactgagacaagaccagggtcttgccagtaaagtaactaaagtgataatgatcattgcctatcagtccacaagcatgttgttgcagactgcatagaaccccatgattcatcattaactcttacataatctacttg

SEQ ID NO: 55693 - DNA, 1364 bp, Bovine  19866881032169
  misc_feature (1)..(1): n is a, c, g, or t
nctgtgaagtcaaagggctgaccggttcttacccaagcactgtgatcactcctttctcgggattacatttcaccagcctgtggccaaagtgcacttttgcattggagtatttctcaacagctgaagaaacaaagagagaaaactaatggaaatgaaattccaattcttatttcacttaaattgaattaatcattttctgagactggtgtgatagagatacttaacaatgtaaacatcaattagttaaaatgtgatttgacaactgtttggcaaatgttctaaggataatctggtagtaaaagagataaataaaaatcaactgtctccatctcaaaaaaaaactaactatgtatattcttgcatcactgtaattgttggcaccctaggaaagaagcaatcatcacatattttaaagttactcccaaattaaggcttaatttgtgattggaaatattcagtcaaacttcttttttcatactatgtctgactttgtatctctttttagcaagtcctctagacttctgactcagtttgttataaatatagatcattgatatataaatatagatctttttgtatcaaataggggaaagtgagtaagaagactggaaacttcttaataaatagaatcaaattattttagtgcttttttggcctgctaaaaaatctatagtgaatttaattttcttaactattagtttttctcatgagcagcagatctataattaggggctatttattgttcttaaagccacaaatctgaatgtagatgttagagctggtgtagacctcagagagagtttattttaaaactcttcatttcataaatgaagtaactgagcttctggagggaaaagtgagatgactaagatcacacaaagtaaagaatttaggaaaaataagccagaagtctgactttgaattcaatatttctatctgtacccatctctccttttcatctcaggttttgtatttgttgttgttgttgttctgctttgcttaagtttgatttggggtttgcagactttaagattcttgaacacaggattggaagctttagaatattgaaattcgagatatgccaaagacttatcgacatttaagaaatcttttgacaaataacttggagaaatcagggtttactcaaaccactatgggtatctttgacaaacacaatatgtgtttgtggaatcaagctttttgtaatttttttttcaaattaaatgtagagaaatgcagctcaaagaattttccatgggacactagtcctatgataactgaaataactgttctgtggtcacagtcattacagaaatgctcacactctgaccctctgactatgccgtcttggtccccagatacat

SEQ ID NO: 55694 - DNA, 1091 bp, Bovine  19866881198072
  misc_feature (1)..(1): n is a, c, g, or t
ntttttttatttttattttttattttttgggggcaagatttattgtgattgtgaacagaggagaagggctcagtccttcttggctgctgctttcctcattggcggccaagacgttgctcagctcctttctcttcctcttcgcgcggatatgtgtccccacccttttcttgatgaacttgagggcccgcttgtccttggagaccttgagcagctccatggctcgtcgctcgtaaggggcgaagccacacacctcccggatcatgtcccgcacgaatttggtgtgtttggtgagacgcccgcggcggcggctgtgcctcggcttgcccacgttcttggtcaccttgtgacccgtgttgaggcccacggccatggggtagcgcagagccatggctgttgttccacaatggctgccgcggcggaaggcggtaccttctaataagtttttaaaagaggtaagagccatttggccttagttataagttgcaggggaaaaggggtggcttgcaaatgctccacatgctttccctgccgtaattgactttgactcaacctgaagcccaggaaatagggcacccatgagtgtgtgctaaggcatgctgtgttctatgcgcatgctccatgctctagcgtgctcagaatgcgttcagcttccaaaagtccagactccatctgcagggtgggctcgctctgtgattcctatcatgctctgcaagattcagttccagttcactaatgactgctctctgtatgtgtgtacatacttatttaaaaagtaaagtctacaattacatttcctaagtaagttttattaaatgaatacttgtatttgcacacagtccctagagagtaggtttgacaataactggaagaaagactgggaaaaaagtggaacttgggtgagtaagtacgtagatgagggggacgaagactgtgtgggtaggagagcagttgagaggccagtgaagtgaccgcaggattagtttaggtttagtaaagtccctaggctgcagaatcccattagatggactggactttgttggtgctgcattcgtttcccagtgtccatttgtttgtcatcttttctgatttca

SEQ ID NO: 55695 - DNA, 1574 bp, Bovine  19866881332936
  misc_feature (1)..(1): n is a, c, g, or t
naaaaatactggagtaggttgccatttccttttccggggatatttccgacccagggatcaaacccaggtctcccccattgcaggcagactctttaccctctgagccaccagggctcctttgcatctactgattccaaactcccaatccatcccttcccaacccattctccaccctggcaatcatgagtctattctctatgtctgtgagtctgcttttatctcataggtaagttcgtttgtgtcatattagattccacatacatgtggtatcctatggtatttgtttttctctgtctgacttcacttactatgataatctctaggttcactcatgttgctgcaaatggcattatttgatttttcttcttatagctcagtactattccactgtgtatatataccacaccttctttatccactcctctggcaatggacatgtagcttccaagtcttggctattgtaagcagtgtggctatgaacataggggtgcatgtatcttttcaaattagagttttatctggatatatgcctagaagtgggattgctggatcacatggtaactcgatttttgttttcttgaagagccttcacactgttctctatagtggctgcaccaatttacattcccactaacaatgcaggtgggctcccttttctccacaccttctcgagcatttttcagttacacactttttgataatggccattctgacctgtgtgaggtgatacttcattatagttttggtttgtacttctctaataattagtgatgtgcagcatcttttaatgtgcctaatggccatctgtgttatttctttggagaaatgtctatgtaggtctcctgtccattttttgattgagttgttttgtttctcgttattgagttgtatgagctgtttaacaactgactcttgtgaaacatcacaagtcagctttataatcacagcttgagtttccagtaagcaagatgacctggagccaaatatagggaaaagatgtgcctcttgctttctgcattcatctttttgtggatctctcaatatgcctagaagaagctgccatcaacccttcagctgaggctttttaagatctcatgtaggaacccaccatactaaaccacacgcctagtcatccaggattctgatgacaggttttgaaagcagagaccagtgtggttcccacatatcaaagtatgcaacctttgtaaaacatcatggaataaacatataaattatttacactacagacatatctctttggattatcaagatttcacacatctgtttctcaaccactcctcagttgctgttgttggatgtgttcttaggttctgaatatagctttaaggataataatatcatcatctcctttgccaaagcagaagataacattgtgcagtaaacagtgattcatatgccataccagttattctgagattccccttaagggccttggcttccttacataaactaaatcctttcttgcatatccacatgaaagctatctcctgccatcttgatgctcctgacctatgaagaatgagcatgatacttattccttggttaatacattt

SEQ ID NO: 55696 - DNA, 717 bp, Bovine  19866880552139
  misc_feature (1)..(1): n is a, c, g, or t
ntaaaaaaaaatgaatacatgtaattagcaacacatattaaaagtgcttgaacataaataaaatcttgcacaaattccatgatgctttaaacataatagaataatctgtgtgctgtttcttaaacataagaaacattatgtttcttaatttagtacacaatgaaatagttcttacttttttttcttaatttaatatacaatgaaatctgctttggcacttggacgtctgattgtggctaataggtagaataaatattttttccctaaaggtatacttgtgaaattccagaggaattttccctaataaaaactatgaaaaaataaaagtcattttgccaaaatataaagtcacagtttctaggactgagtttattttcttaacaaagatcagggcttctctttgaaaatgatgtgtttcctatttatagtttgatctttaaaaacacctccacattaaaataatcaggatctaattggacttcctattaaaatgcaggcattattcacagctctcttaatcactccttcccctgttcttatcacatctctgagctacaataaggctcccaagctattcatctaaacttagctttccatccgttggactaaggagttctttgggccatggggaggtctgtgcattttactaaggtgtaagcattagtgcccatagagatgtcccaaaacaatgcaaggaagctccaacataatagaaaa

SEQ ID NO: 55697 - DNA, 1067 bp, Bovine  19866880588693
  misc_feature (1)..(1): n is a, c, g, or t
nttttctcaaaaaataaatctttctgaaacttttagctcttgtagttctacacagtgagcacagggactgtacttaccctacttcctgctcacttctctccaacatgcagaaggtgctgttatccttgatagtgaatggaaactaagacaagggctattgaaaagataacaataatacagtgtcttggttcaaataaaagaatatatgtaaaaatgcttattgaacagaaaccaatttttatttttggcttaaatttaaatatttgatatgttttaagggtgccccttaaaatgaagtggtttaaatttggagtttaaagtcagtgtgtggactttaaaattttagctgtaaatacacataatataaaacttgccatcttaaccattttaaagggtttagttcagtagtatgaagtatatttgcattgttgtgctatcaatctctaaaactttttcatcttgtaaagctgaaactgtatccagtaaacagttgaaactctttatcagttcaagggccaatattatgtacgctgttttggaactttcatctgcaatcatctgttggaaaacctgctttcaattcttttgggtatacacctaggagtggattttctgggtcatatggtaactcttatgtttaactttttggagaactgccaaactgctttccacaaagtttgaatcattttataaatcccatcagcaatgtacaagagttccagtttctccagtcctgattgttttcctttttaaaaaaagtatagccatcctggtaagtttgaagtgtctcattgtggtttgatttgcattttttttttaaaagatatattgaactttttttcttttttaaaaaatttttttattttattttattttttaactttacaatattgtataatggtattgagcatttttccatgtgcttattgcccatttgtatctatatctttgaagaaacatttatttgaatcctttgcccatttaaaaactggactgtgtttgttgttgagttgtaagagttctttatatattttagacatgatttgcagaattttcttaattctgag

SEQ ID NO: 55698 - DNA, 1051 bp, Bovine  19866880600515
  misc_feature (1)..(1): n is a, c, g, or t
nttatgggcttgtgattctagtaatccagagaaccgaatccaaaacagtttaatcctctgactgacactaatgctgaaaataattttcaagtatttttccatgattctatataaatatcatatcatagccagatcatcaaagcagtgagaaccaaccagaaaaatgccttcacctacccccatacccacagaactctgtcttcccccattacactctaactgtattatttgaccatccatctttcctatttgtccatgagtttcctgagaatagtgctcatctgcctctctaacttattattgcaagcccagtgctgggcccatggtaggcgttcaatcaaccattggggaatgtctttgttcaattactatgcacaaagcacaagttgaaccagaggcagtttttcattattaccatattcatccttataccttaaggactcaggcttaaatttctcttgggaaaactgccctttgactcattcatcagactctgaccttagactgccttgaacagatattcattagtcagttaatcaacaaactgttctatgtcccacacagtggaataagaacactgtgtatcaccactctgattgtgttactgatgaagttacagaagtggaaattcctcttcagagcatcttcaggttgagtcttgacacaagaaacattccgtgggtgttatctgagaacacactgtaagcaaagtttataagttgggtttatttgatttttatttcatttttcaaatctaactcccttgaatctgtgagtaatcttgtgcaattatgaaaatttgattcatcctgggaatcaattccaaatactttatcctttcaaagaggtgctgcttttgtcatgatggtgaacagattttcaagccgtggttcacggaaccacagactttcctaggggttgttgagaagcctatttatgtaaaacatgcaatatattttctcaaattctaccctaacatggcattaaaagctttagctctacagtagaaaaaagtttaaaaaaattttttaaaagtcagtgcacattaaaa

SEQ ID NO: 55699 - DNA, 4736 bp, Bovine  19866880620450
  misc_feature (1)..(1): n is a, c, g, or t
ncggatgttggcatttgatctctggttcctctgccttttctaaaaccgcttgaatatctggaagttcacagttcacgtattgctgaagcctggcttggagaattttaagcattactttactagcgtgtgagatgagtgcaattgtgtggtagtttgagcattctttggcattgcctttctttgggattggaatgaaaactgaccttttccagtcctgtggccactgctgagttttccaaatttgctggcatatagagtgcagcactttcacagcatcatctttcaggatttaaaataccttaactggaattccatcacctccattagctttgtttgtagtgatgcttcctaaggcccacttgacttcacattccaagatgtctggctgtaggtgagtgatctaaatgataaactatcccataacttagtggcttaaaaccactaatattaataattgtattatttcttaaaattctgtgagttggctgggtccagctgatcctttttctcctgctctacctggtgtcagctgggttctctatgtggcagcatccttctggggcttactgatacaaggtggtttagtcatgcatttggtggttagtactagctattgagtgggacttctttttacatgttgcatgtccactagagtataactaaatttctttgtgtaatacctcaggattccaaacaaaagtgagaagctatcttgtctcttgaggcatgggcccagagctcagcctgagtcacttctgtcatattctattggcaaagcaaacagcatagccagcccagatgtagtcttgaactcttaaagggcatgttcctataaagatgagaatacttactaatggccatctttgcagacaatataccatatcatccatagcatgtaagtgacatcagagatggtgaatttattggtggccatctttgcagacaacataccgtgccaaccatagcagataagtgacatcagagctggtgacaatcacagtacctggatactgagcttaaagcacaaagacacaagcacaggcctacccaaattgtcctgcatcccataaacacacttggcagccttttacctcactaaaattgccaggtcaagtttgcaggtgatctggtcatcaaaggtacagagatatttctgactaattacaagagtgtctcagagaacaggagcagagcaaatggacaaatcatgatttaatgatcccagaaattcttcagctcaaagtagcaactaaaactttggccattgatttcaggattaagagacttagtcataggggaaaacagagggctttggagagttagagctaaggttgagtcctgactctgtcactgacaagtttggtgattggggtaaatcacctaattctctgagtatcattgttctcatctataacatgtggatgatatcccctcccttgcagagtggctgagaatataaagtatctggcacacagcttcttatataaaaaggcttagtaaatattaactatttttatctttgaatcattcagctatgaaaatatggcctatgactttaggacttcctatgggacagtcagcccctccacactcactcacctccagtttgtgttaatattttgaaggagcataaatctttccaattctgtgaatatataggtggatccttctcctctgggtccattggttcagtgaagatagcctttcagatgacttttccttcttcctatcttcctgcccttctatttactctttcctatgtggtgttagagaagactcttgagagtccgttggactgcaaggagatccaaccagtccatcctaatggagatcagtcctgggtgttcattggaaggactaatgttgaagctgaaactccaatactttggccacctgatgtgaagagctgacatatttgaaaagaccctgatgctgggaaagattgagtgcaggaggagaaggggatgacagaggatgagatggttggatggcatcactgactcgatggacatgggtttgggtgaactccaggatttggtgatggacagagaagcctggtgtactgcagttcatgcggtcacaaagagtcagacacgactgagcgactgaactgaactgaactggggagaagccatttgaacattatacatttttctgtcttttaggaagaatggattttgctttgtttgtcccttcgatacaactcagaaaatcaccctccatcctgaaaataagtgcattgcatttctaaatggttaggagtctttgcagcattgtcagtatgacctgtaaagaactctctgctaagagttctctaaaggtacagttaaaacatatgtttccccttgcgtcatactctaatgacagaaatgtcttatttttttgtttgatctttgtggagggccattgattttagtcctcctgccccagatcacttgtctcttccctccgttcttcaagaacaacaacacaaaaaaatgagtaaacaaacacatacacaggcatagtttgtttaaccctaacgtaaatcccgggcatccctagagactcagtgataaagaatctgcctgccagtgcaagaggtgcgggttcaatgcctgggtcgggaagagcccatggagaaggaaatggcaacccactccagtattcttgcctgggagatcccatggacagaggaaactggcgggctatggttcatggggtcacaaagagtcaaacgtgacttagtgactaaacaacaacaatggcaaagtaaatcccattttatatttgtataaagcaaagacccaattgttttaagatgaataagcattacttgattatttttaacaagtattttatagttttcttatgttcagttttttcagagtgtttccatcattgctctttgttgaagatcaggttccctgggaagtaggctctgagaaggcagtagtgtccaggagaggcatgggggaagggaaggaaacaggattgtatagacgagaatctcactgtggtgcagtctcagtaaaggcctcagctaactctcggggagctctgaggacaggatgtcccttcagagttttccacagttgagacgagggtccaggtggttgtacactcatgtcaatcagccatgggatgcaggctgccatcagggatgggatatgacttatttgaggcaactttgttcagtctcgagctattccaagagagggagagatgtcattgaggttgagggctttgagctacaggacttccagcagctggaggcatgtgtctttctgtcccacagaggattctgggaggtacatcagtcttttagactgtgacactttagacatggatccttgccttgggtcctgtcatttggaggattccaccctgatatttcttctttttccaaacttgcccctcctcaagggtcaagggccttagagcccaaagcctgaatccctcctaactgcactttcccaaaccccaatctttcaagcttaggctgcagaggtggccaagagacagacatttggaagggtacttgcacacaccgggctgtccacaatcatccgaatgaagacctccatatgtagaaccatgggaagtgggaagaacagaacacttggagagaggtccatttggacttatgctccaggccctgtaaatgttggacgtctgccctatttgatagctaacccttccctacagctggagaaatggagacaacagggagactcatctctggttacagagaggcgcaaactcagagacgtgactgggcctctggttattgccactagactagctgctctcctcaatggaaagtgttgagtcagatagagatgactaaacttttcctcggaagacttatccttcactttctttatctcattgaaatgtttgtgaggctcagagcaaaagtctatatctatgaaattcccaggagaaaggtactttagaaatacaaggtattatagtataatcctcagaacacaccagcattagagtcctgggagcagaaactctgaattgtgagttctgcttggcttgctcaaatgtcaaagccttctatgattgataggtcaatagtagctgaaagattatgaagttttgtaaatgtgtgattagctcataaggaaagccaaatattttacctgataacacccaagaaaaaatagttattgcaacttgtagaaatgttgccatcaataaactgaagagttttcagtgtcaaaatttggtgccataatttctcttcatctatcactgctaaagctcttatttactgaaaacaccttccaaagttctctcaaggttaacccagtatccaggcaatagataactggcattcttttttgcttctgaatcatgtttccagtagacttcacatgactatgactcctgcagaaaacacagagaaagcaggagggacctttgcatcttgtacaactccacctaattagccagggagatgctccattccaaccagcacccctgaactcaactctactccttccccatggagatatgtgctggtcaattattcatagtctcctgtaagttcactgtcttctgggttcttagtttgctttcttcatgaagattttatattttagttcataaacaaatgatctagaattatgaagaaatatgccctgtgaaataccgtccttccgtcctctagataggaatagccaagcattccattctgtgtcctactccctaaagttaggaaagcactaagaaaactcaagaat

SEQ ID NO: 55700 - DNA, 1571 bp, Bovine  19866880724948
  misc_feature (1)..(1): n is a, c, g, or t
ngactctggtggggttacaaagagtagacatgaccgagtgactcagcatacaagggagacccagagagagaggtgagcagagaggactgcctaactgtggaggagtacagccaagccacagcccagcatggggatttcccggggaaaaaccacccacgcccacttgcttcttgcttctcatctcctgacactgtaccacctgtgaaatctgacaggcgccaacagcaaggggttatgttgatgtattctgaacatgtcatcttcttagggcagagagcagggtttagaagaatggagaattcacttggaggataaaaggaggacattatcccaaatatcattttcagtgcagcggagagttaggaagtgatcctgcctgctgtttaagctgttctgccttttttctgttaaaggccataggtggtagataatctagtgactggaatggttcacttagtatgtgaaatgagaaagaagtgtgatagactaactttaaatatcttccttacccaagaagaatgaggtattacatcctaccatactcaagatctgggtttagagttaactacaaatcaataatactcttatatataaatttccatggattgggtaagtacaatacttaagatcaattgagaaattcaaactggtttatgagtacattttgtagaaatagctttgacagccaacctgaagagacttgatctggtaaactgtggctccctatttctacactcccgggaaggaatagtccctggagtcagggggtaaaattgtgggtgtctagctttgtcactgactagggtatgtgtgtgcatgttcaagtcacttcagtcatgtccgactcttggcaaccccctagactgtagcctgccagcctcctctgtccatgggattctctaggcaagtatactggaatggttagccattcccttctccaggggatcttcccaacccaggatcaaaccctcatcttttacgtctcctgcattggcaggcagattcattaccacttgtgccacctgggaaccagggcatatcagaccatcttagcttgagaatggaggaagataatcgtgcctccccaaagggtccttgtgaggacccttagcatagcgtctggtgcagaggaaggatctgttagatatgagttgttctagcttgggtgagtcagggagtctggctaacagcagaggagccttttatttcagttgaaataaggaagtgatacctttgctggaatgctggctttctgaaaatgaaaatgcagtttcaaaggggatatgtgccttctccagaaaatgatgaattatgggtgtttttgcagtctgtgataccaatacaaataattaaatcaaagtgagcctggaatggactcaaaggctaatggaagtgtcaggatggagattaagaactgagaagcagctgaggaggaggaggaggaggagaaacacttcttatctaccaagggaattttgctatatctgtggcagcctgttcatagcttcagggtcaaatgcaaagaaggatgtgcacagctgtcactcccgtgactatatgagatcaggaaa

SEQ ID NO: 55701 - DNA, 1887 bp, Bovine  19866880781113
  misc_feature (1)..(1): n is a, c, g, or t
ntcgtattacctaggaaactcatgattttaggagaagctgtatgttcatttaggaaacagctgttttctttatttcagtgctgggtattttataaaggaaaacccccatttttctttgatgcttgttgtttctctgataatccaagttcctatcttcattccacatgatttaaaatcctgtttatatccaatattcattcagtaaaatggcttgagatttgtgatgctccaaatgaattccagttcgagagggggaaatctcagagtcctactggagctggctgtctgaagacaactgaggatttacactcagaacagataataatagaaatgggatataaaaaatgaaaaagatttgattgcatggactacaatgattatggaagctttttttttctccttagccaagtgtaagtgagtaaaaaaaaaattagaggccatgtatgggagccttcacaaaattctgggtcacatctttcaaaacaatgaacatagcagcaaacaaataattataaattccacggactctgaaaaataggctgatctcttaggttttgtaaatgctttccctaatgcattttccttcaccatcacattttaatgccatctgttgcctgttttcatgagtgaggtcaattctgagtcactttatgcaattatgcaaatatggtttctatgaagtacagggaaagtaatgttgctttcaatcatttttgaaagccttccagtgatcaagtctcactctagactggtaaaactatattgttctttcaattgtttaatatagtttagcagtaaaagtttgtcaatgtcttttagaagtggtttctaatatacctctctcaaaggtttgcttatttttaagatgaactggaatagtcttatttttttagttggtgtgcattactaattgctactcccagactggggccaatctgactataattgtatttctgcacattaggcccagcaaaacacagacacatcctctcatacacaccgtgataaccttctgccccagccccagtcaaggggaagaatcatgtggggttttctcattatctgtcttctgtgattacgcagcttacacagcagcagacatagactgacccacagcacgatgcaggaagtgacatcagcccggcagtgctgtctagtatttgtgtgtctagggcaggagggctgggaggagacagagataaggagggaaaatgttttctctctagggcctaatcagaagattatacttgtatccagaggaacataataaaaatactcttgccattcagggtacataggctgtatttggactactcagagatcaagagtatttaggtaaaaaaggcagagatgtagcatctaaaaaatagaggagtaagtctagccataattaggaagtgggtaactggtattgaagggataaaaattcagtgtatgaactataaacaaaatgaacttctggcaactatataggaagatactaaagataaaggctatattgggaaaagtaacagagcatcacagaatggcattgggcatccagaaaattcaggtattcaatgatcacatttattgagtgcctgctgtgtttcaaggactgtggttagcagtggaatacagcagtgaaaaaaaaacaaaacaaaacagatgagagattacattctaattggaaagcagagaataaatgaataaataaatgggtaaatgaatccatttatggagaaatgtatatggacaaataataagatagttatgacagtaataattaaaataattccaggtaaagggctctgaagaggttaaagcaagataaaggaatagaactaggggtgtttgtgtttcatggtagaatttaactgggacagtgggaaagtcttctcagaaggg

SEQ ID NO: 55702 - DNA, 993 bp, Bovine  19866880797954
  misc_feature (1)..(1): n is a, c, g, or t
ntggcagtaactgaaaacattgtaagactttattcttattaagtgttttacaatttagaatatctttaacatatgcaccaatctggatcattcatttttttacagcagaagaaacaatctcagtaaaatttagcgacctacacagagccacacacctaagtggcaggatccatggttaaagagacataccaatgtgaactcagactgtagacacctatttgcactcagactacatacctggtgggcagggtgaagtctctctcgaagtttctcagatcatgtcattctagatttacttttactaatacagctggtgagcactaagagaatacagcttggtttttcttcctctggtttatataaacaacacaagagccttagatactataaaatcattagcttgcttaactgtatggttaagaaacctactttcagcccctctcatatccaagactctccaccccaaacaaaacaaaacaaaatccttagtttaaatttatgatatgttaaagtcaagaaacatggatgtgttccgaactctgtagctaataaatgtcttcatctctagggtcctcaattccccctctgtaagatgagggcattagagccttaatagcctataatagactataagctttacatcctaagattcaatgcgggcctggttaaaaagccactcaagcttactgaaaggagttggacatttcaaaagttaagatccatgacatgataaggaacagtaccggaaaaacatggcttgcccacatgacacgatggcctctataaataggaatctcagaatatcttttcatgagactagctggttagctctcagctgcctggagctgctatagatttagaagaaacttcttagtttggctctcatcctgtacttctaaaaatccagtagctaatttaggatttaggactgatagatcactgttttatgcagcttagtacactgacaagacttgtagaaccaggtttccaggt

SEQ ID NO: 55703 - DNA, 2566 bp, Bovine  19866880805584
  misc_feature (1)..(1): n is a, c, g, or t
naaaacatctatttctgctttattcactataccaaagcctttgactgtgtggatcacaataaactgtggaaaattctgaacgagatgggcataccagaccacctgacctgcctcttgagaaacctgtatgcaggtcaggaagcaacagttagaactggacatggaacaacagactggttccaaataggaaaaggattttgtcaaggctgtatattgtcaccctgcttatttaacttacatgcagagtacatcatgagaaaccctgggctgaatgaagcacaagctggaatcaagattgctggaagaaatatcaataaactcagatatgcagatggcaccacctttatggcagaaagtaaagaagaactaaagagcctctcgatgaaagtgaaagaggagagtgaaaaagctggcttaaaactcaacattcagaaaacaaagatcatggcgtctggtcccatcacttcacggcaaatagatggggaaacagtgtcagactttatttttctgggctccaaaatcactgcagatgttgactgcagccaagaaattaaaagatgcttgctgcttggaagaaaaactatgacaaatctagacagcatattaaaaagcagagacattactttgccaacaaaggcccagtctagtcaaagctatggtttttccagtaatcatgtatggatgtgagagttggactataaagaaagctgagcactgaagaattgatgctttttaactgtggtgttggagaagactcttgagagtcccttggactgcaaggtgatccaaccagtccatcctaaaggaaatcagtcctgaatattcattgcaaggactgatgctgaagctgaaactccaatcctttggccacctgatgctagcaactgactcatttgaaaagaccttgatgctgagaaagattgagacaggaggagaaggggacgacagaggatgagatggttggatggcatcaccgactcaatggacacgagtttgagtaaactcagggagttggtgatggacagggaggcttggtgtgctgcagtccatggggttgcaaagtcagacacgactcagtgactgaactgaactgactttgtacaaaggagagagaagaagtttacttattgaaagagaaaaatcattcattagaacctcatttttctggggtcattatctaacatggtattattgatgggctgccttggggaacttctcttgtgcaaatcagacccctgttcaacctttctcccaacgtgccggttttagtttgcctcttctattgctaacattcacccctcaacctagatgactttatgtacgcaaacctgcatgagacattggcaagctttccctcctacctgtccctgagatttaagaaagcatacatatgaaccttgacgtaaaaagatttaaagctcaagcttacactgaaccccgtaaggtttcctgaactcagtatgggccaattcccataattcgcctacaattcccttctgtcctctgtgtgccttataaattattattcgttaaaaccaagctaagacatcttctggaaagcctcccctgagacctcttaccctacccctaactctacacactgcacatattttgaaaactcatttacattaatttatcctacaaagccgtgatcaatttcagcacaggggttatctttattctttgtactttcagcacagggcctggcctagcaggccctccttttacagacttttctatttgttttaacttgggaagttccagatataaggagtatttactgctaaataagtcactggtcaaatttaaatgtaagctaacaagagtttatatctccacattttttcattctccattttagatcaaatccctcttatctaggttggatgacagagtatttaaacctggagccagttaaagaccatttagtcctgtctcttgtgagttatggctggggttcagtcactgctgcaggaacttactccttattcttttctatggatttagaccccatgcggtatctgtgcagtggcttgactgcactgttttgcagctttactagctgaggaagctgtttcctatcatgaatttctgggttcagattcaatacactagtcttacctttttccctgttagagacctgagacctttccctcactccaacttgaggaataattttgtactgtcctcttttctgtgccaaactgctattctgaacatgcactaatgagagattatccaagttattatctgggcagtcatctaagcagccaccatacttcaaatgaagggacccaaaatctaatgggaacctgatgtgttgtaatagtaacttccagtaccaaacagagttgcttctctcatgtttaacagataaactattcttcaccataaactgccgcttcagagaaaaattctaatttctaccaaaggctttgcctaaaggcttttcctttaaaataaatggttcatattactgttgacaaaataaaaaatgaaaaaaaagtttcttttttgtgtttataaacacatgaagtccagaatgctggcagagtaacagaagtca

SEQ ID NO: 55704 - DNA, 1305 bp, Bovine  19866880946778
  misc_feature (1)..(1): n is a, c, g, or t
nttacatagcagcaggataccaggttgggtcctattttggacagctgtgaaatcccaagagagaagctcagccttgattcagtggagagtggggagtggggagccaggctaagtgcataagcagaaatgcaacacaagacaaatgagtaaacacagagtcctgccccccatgcagcccagggacacctacacgctgccattgccttctcacctatgctagcacctacacggctctttctgcttcaccctgctaaccctgaaagtgaaatagaaatcaggttcccgagagctggctattcttattttcactaagttctctcctcttttttttttatattactttatatcttaaaaacaaacaaaacaaactttgttgctgttgagttcagaataataaaatcgtgatggtaatcatatatgtaaaaaatatccagacttatcctgaaaccatcttggacattctcgtatatcgtaagtttgaattactgtttgagttccgaaacaactcaagatgcacattgttgtgttcagtcagtcgtgtccgattctttgggaccccatggactgagcacaccagccttccttgtctttcaccatttcccagagtttgctcaatctcatgtccattgattcagtgatgccatccaaccatctcatcctctgttgcccccttctcctcttgccctcagtctttcctagcatcagggtcttttccaatgagtcagtcagctctttgcatcaggcagccaaagtactggagcttcagcttcagcatcagtccttccaatgaatattcagagttggtttcctttaggattgactggtttgatctccttgcagtccaaggaactctcaagagtcttctccagcaacacagtagtatgctttccatttcttacttaacccatgtggggctttaagaaaaacagaatctgaacattgcttatcccttcacactttagtaggccaaatgtgatttggaaagagctacttgataaatccaaagaataactttctacttttaatgagtttcccacctcccttaaggggtaataataataattctaatgcaaatcaactcagaattctccaattctaaccagaaattttagccacaaatattcaactcagtttgtttctttgtttgctagtaatgcacccatctcctctatacattttaagacacattttgtctacttggtgtcactcccacccccttaaatctgcatgtccattttcacagcagagttcagctgagccagagcacaatgggcttcaagagatattgctagcacattgatcttg

SEQ ID NO: 55705 - DNA, 818 bp, Bovine  19866880981696
  misc_feature (1)..(1): n is a, c, g, or t
nactgcctttgtatctgctagattggatactactgaattcaaatttttgctcaaataaacacttaaaatgtttaacatgcctcagtttatcttttagcaccagcttcgcaggaaatagaggatggatttcaggaggtggtctctgcaggcttcccttctgggatattaaaatgtgtcagtgaaatactaatattatttctccaaatatggcatttaggcaatattacatagcaatcaattgttttctcttttccacacagccctctctgacctgtaccacagcttcattgcccaccagcaccatccccatatctgacaatgtccttcaggttttcggctgggatatctacattaattgtactgtttagagtcatggaattagaagatgcttccgagaaaaaactaccaaaacatcaaaaggtgatcataaatatgagaagtaacttgtactacaaactaataagagacagaattcactgctgaaactgttgcagtgatgatcagggacagaatggaaagctgtcatgatccttacgtgtgaggacaagaaaagctgaaatttgtaggtcgtgtggtacacatcagacatactagccccactagactatgctaatccttgtcctcatttaactgtcaaaagaaccctacaacccaggtaacattttttaaaaatactttataaataaggaaatttaaattcagaaaggtttagaaatttgtctgaggtcatacacacagtaaatagcagaaataaaattaaagacttagaaaggaccatgaagattactgaccagtgaagcaagagctcttgcacacaa

SEQ ID NO: 55706 - DNA, 1336 bp, Bovine  19866881056522
  misc_feature (1)..(1): n is a, c, g, or t
natcctttccccttggcaaccattccctaagtctgtaagtccccttctctaagtctataagtctgttttgcaaaataagttcatttgtatcatttctttttagatttatctacttttacatagtagtatgtgtctgttaatctcaaattcctaatttatccctccccctctttaacctttggtaaccataaatttgttaccaatgtctgtgaatttccttctgttttgtccacaagttcgattgtattgggtttccctggtggctcagacagcaaagaatctgcctacagtgtgggagacctgggttcaatccttgggttgggaagatcctggagaatggaatggctacccactccagtattcttgccaggagaatctccatggaggagccaggcaggctacagtccatgaggttgcaagaatcagacaagaccaccaccaccactagactgtcttctccactagaatcaaagtacctctgtccagcactctatcctcagtgcccaaaactctactgggcaataaataaacgatggaatttgtccaaagacttggggtcactgaatggacaggacttccttccaaatggtctgtctagagtccttcctcttccccccttctccccgacaactcccggcacacaggactgcctctaagatgatcctcccccactctgtggatggggaatagagtggcatttatttacacttgtatccccagtgtccccacccaggttggctgaactgaaagaaaaggtgcatgccactgagccaaaaaaggaaaattctgcaccttatctccagtcccagccattctaagctgggtagaaacttagttctgcttccccacgaagcaggagaagccactactgttggcattcagaagacagggacaaaggcagcatcattacccggaggtgtcaggctctggacttgtaccagctttccctcccttcccacattattcatctttcagctgaatcacaaaaagaaacaggatgtacaaagccacaaacagtatcatctctttctcctggggactatagcaccactccttttgtataatctcctgaagcttttatacatttccttcctctggtgctgttttctgcttctcccagcctttctaactcctccttgattttctttctgccagagaatttattcactgtgagcacgtgcacacgtgtcttttaaagcacaacgctggctgcattcccagcaagggaggaagcagctttgtggcccaactaattcaataagcttcaattattcatggaatatttattaggtgggacgaaagcaatggttccaccacttgttattagcccacaaat

SEQ ID NO: 55707 - DNA, 1540 bp, Bovine  19866881083373
  misc_feature (1)..(1): n is a, c, g, or t
ncttcttttggggattatggacattttattagtatcaacactcaggatggagaggaggaagaagagagaaagatgtatatttactgactttgaatacttaatagcttacacatttctttctcatttggccagctttctgaaacttttagatgagggactttcctgaccagttcagggacaaaagacacttgtgactatattgtaataactgagattgttctgggtactataatggaatattataacccctcattgactagttctcagtcatagaattttagagctgtgctagaaggacccacattaccagctggttaattgtggcttcaattcattatagtctgcagatgttattgctaagttaagcattttgatgtattcccaaggcttaaaattcctgtgacacagaattccaacattctctttccttctgtattccactctcaatatatgaaaaataaaaggactccaatacaagtccctttaccacgctcctctgctcttccacaaaacttcccttgtgaaattctatatgataaacccttagtgtacctgtgcataaataattatactagttcgttttggaaactattattagaaccttcgaactctgtggaacacagtttttaaaactgctttttaaaaaatatatataaaaatatttaacaatttcaggatccattttataaaatagtatttaaaactcctaatttagaatcataggtcttagtattatcagactttgtttctcagataagaaagattttatatttagtcattcagtgcgatagattaaaaataacaaggatagtagaaaatacaatttaaaatcaattttgtatattgtgaagaaagtgaaatagaaagtcattatagttgtgaactttatgttgatattagttctctatgtatttatcaacattctaaatttttttcttagtgtaatcgctcaaattcttcttcacctgttgacaaacttaatcagcagcctcgtctaaccaaactgacacgaatgcgcacagataaaaagagtgagtttttgaaagcattgaaaagggacagagtggaagaggaacatgaagatgaaagccatgtaggctcagaaaaggtaattgaacgtgtagtgtaattcttgggcttgacattagcatgtcattggaatagttggacagatattatttaggatctttgaatattttcatattgatgaaagcaaggcctagttagctatttgcataaataatgaattcctttcttaatagatttttcttactctagttgatgtgcaaaaatgaaatttaaaagattgctgttcatatttgtatttttggttttccccatcttgcctgcctttgtccttttaatttttggttgaatagatgtgaatacttgaagttagtaagttgccttcacaacttagttttacatcttacgaaactgttttctacatgattatataaacattacagttatgttttatccatgaaaatctaaccaggatctattaaagtttccttttttaataactattctctaattt

SEQ ID NO: 55708 - DNA, 1635 bp, Bovine  19866881314273
  misc_feature (1)..(1): n is a, c, g, or t
nctttttaatatgctggctaggtttgtcatagcttttcttacaaggagcaagcatcttttaataccagggcttcagtcaccatccacagtggttttggagcccaagaaaataaagtggcagaaataaatagatgcaaaaattgtctttcgagtgcctttaatatcaagtatactcatagatatttagtgagtcaaaaatctgtcttttttccctaaatatcatcttaagaagagttattacctggaaactcttagaaatgatgtggtatgggagaaaagacacctggcataaccctgtctaataaacctgcctcctctagacagccatgctacctctgagctgttgcatgagagacatataaactttatattgttcaaggtttgtttttttttaagaatagttattgtatgaagatacaaattaactgtgtccttcattccagactccatgaaatcccaaatgaccaaaaaatagaggttaaatcccgtcaaattaagatttctgtatgaagaaatgactgcatagtactacaaaatacatacttcaattccaaatgggattttggacacaaagaaatgggcaggaaaacaattctctcacctctgaatttccattgcacagcagttcatttttcttgttcttgacatttaatgtattgtattctgatggccgttcatttctcttatctctctgccaaactgtaaaatccttaaaacaggaactgtgtctcacagtaaaagacagggtgctagaaagaaaagaataagatttttattagtaagtagaatcaccatccactattggtacaactttgggcgaattattcaacttctttcgtctttgttttattcatctataaaatgaggttgataatcacatggagaattattaggtaggcttttaaaagaatatttgaaactttagttaaacatagcagattgaaacatacatgctttattccagaaacacattataatttcagtaaataaaaacttcttaaattgataagggcaaagaaagcaaggaaaagagataagagaaaggaaaacaaacgaaaaaaagaacagatgtatagaaagcaatggactgatttgtggtaactgattagccagaccagccagcacggaaactcttcaccagataaagtcagtaagaaggtctgtttgcctttcaggatctcagaaggctcaggcttggaggcaggaggaaacttggaaatgagtgttggtgggggaaaaaagaacactgatggaaagtctttgtatggagcagtgaaaccctggatacattctgttccccacacacccaggtgtctacctggcttaatgtgaatattgtttatgtaaacctagcaggaaatggcaacccactccagtgttcttgcctggagaatcccggggacgggggagcctggtgggctgccgtctatggggtcgcacagagttggacatgactgaagcaacttagcatcaatgtacaggctgaatatctgacagaaaattataagttatattataaaaacagaaggtagaagtgtgtattagggtgaaatgagatatttgaccactatctttccctgtagaaagttcataggcaatatctaaaacggacaaataaagagcagtgtagcatat

SEQ ID NO: 55709 - DNA, 1704 bp, Bovine  19866881334783
  misc_feature (1)..(1): n is a, c, g, or t
nctgtcctctctcccactctggtattgtagaagcatagacataggactgggggtcaggaaattgaatgttaactcagctcctgcattccttgtacaaaccatctatcatctctgggcttcagaagtctgatgtaaaagaaggttcaaacaaaatgatctcttagccaattatcaaatgtcttttgtaaatatcctaagttctggaactgcaatagtgagcaaaacacctgctcttgtgcaaatcatagtctaatgcaaaaaacagacctaaaacaaattattcagccatataaaattctggaagagaaaacatacataaaccagagatatgggagcaaaatcaaagagatctgagccttaagagtccaggaaatgctttcctaaacaagtcacaatccagccaagacctgaatgcaggggagcggctagctagaggaaagaacagttgggatgaagagccttccaggaaaggaaactgtatctgaaagatttgagagagaagattgcttggcatctccaaggagttgaaacaaatccagatgtctaagtctaaggactggggagaaagaagtctcaggctagtgatgcaggttggatggagaggtggtggtgggcgggggagggaaccactcagagtgctgaatgctatctcaggaatatcaaaataccttcctaatctatggttctatttaaaagatatttatatacagatatttgactttaaaaaagaattcaagggacttgcctggtggtccagtggttaagactccgagcttccactgcagggggtgcagtttgatccctggtcagaactaaggttctgtatgccatgtgacacagccaaaaaaaagtttaaaaaaaaggaaaaggaatttgaagtccataaatacatcataacatggcttgggatttgagtgtctagctcataatagttgctcagaaatagttgttgaatgtcaaatatattcattatcctatggctcttgagcctaacaagcgcatctgataaaggatgaggaagtcatcataaaattactaccctttccattagacgctggcatagataaatctgatactgacagagaagttcatcaacagtgacagagagggaaacagtcctcagaatagaatgcttcatggctgcaaaatcacttcaagttgtagccacctaagatctgaaatgaacagtgaataatcatcccttggctgaaagactgacaatacaagctaacatctcctggctgtaaattagaaatgtagattagttcatggaaagttacacatattatgatttctaaaacttctctggaataataaacatcactccctttggggcttatgttactctgattttaagagaatagcatatgcccaccataaaggttcaccaagaaattcatgctgttataaaatggggacaatatgggtcaaaagctttattttttaaattaatttttattggagcatagttgctttacaatgttggtcaatagctctaaatcagcctcagctaaaaccactgggcatcagcctcagctaaaaccattgggcttcagaacattttccagaaaacattgtgtctggatttttatcttctgcaaaggccaataaggctgctaatctaatctgctgctgtgttccctcagggcagaatcaagcacaaagcccactcacagtgtctactctctcaccaaaaggtactga

SEQ ID NO: 55710 - DNA, 1359 bp, Bovine  19866881508010
  misc_feature (1)..(1): n is a, c, g, or t
nccagatattttctatgtaaatgtattttataacaccaaaattcaagtggaaaaaaattgacttaaggagttataattcagtcaggaaattcaaatgaactcataaaatacaacagcttgattgaatcagtctctcgctagtcagttctctacccacataaaatatgaaatgaaaaaattcttttgccaaacagttggaagcaaaagttcaaaaattttaaagtcccctgatcagcaggaagaatcagatttgttactttattttctcctctactgatatccctgaaagtaagactttgagagaagtgctttataaaaatgtttcatctaaaactgtcatcaggctaaagagagaaaagtagatcactacgttacctctatgtaaacaatttcccctggatatttcagtaaccttcagtgccactctgatgcaactttatcattatacacaaagcttaaaacttatgcttcaaatttctgggaccattaagaacataattttattgttctcaatgatgcagtaaaagaattacaaaatacacatttgtagagacctctatagtttataaagtgtttcattaggtcagggagatactattctttttctcagataagaaaacgaaggctcagagattgttgggtcacctaactcgaaacggccgtgttgtggttgtaattaggtttcctgtgcctcaagttcacgttgatagcctattgtactcaagtctgttaaagccccatttcaatggatccagggggacgtttgagtcacttcccataaaagatcaacctttacctttggaactgctctggccaacttttgtttcatatgcatgtgttgcttatcacgatgtcttgtgtttctattgctcatttctctgagaaaatccaggcacattccagacactcaagtctaatctactctgatagcagggagcaggaatggacaaccatgggggttgtttggcgcgtgcccagaggctgtggggtagactgctcatttctggtcttcctgaaacaagaatgggcccctgccacctccggtgtgctgtgtgcttgactggttttcccttctccttagactcatactcacacgtctctgttgctgatctcttggctatcatcccttttgtgcctaacttctcaaaagagtagcactcacctgcacattctaattcctcagttcttaacttcaacttgtctacctggcgttagctttgactttccctctgacttttctctccaaaagtgaaagtgaaaattgctcagtcatgtctgactctttgtgaccccatggactggggcctgccaggctcctctgtccatggaattctccaggcaagaatactggagtgggta

SEQ ID NO: 55711 - DNA, 1524 bp, Bovine  19866881512062
  misc_feature (1)..(1): n is a, c, g, or t
ntcattgcttaagcccaacctcatgaactcctccctctgcctctcattaatacatttgtcactcaagttaccagattttcactattttgcattctaattagttccttgtatgtgcatcttcccaaagcttccctctactccccaaccccctaacatacacattagcacacagggaaacaaactcctattaatttagggccatttgtggctccagctaaaagtttaaacttagtgccttatgatcaagtaaaacttgttttttcagacctaagcacccctgcagagaaggcaatggcaccccactcctgtactcttgcctggaaaatcccatggacggaggagcctggtgggctgcagtctatggggtcactaagagtcggacataactgagtgacttcactttcactttcactttcactttcatgcattggagaaggaaatggcaacccactccagagttcttgcctggagaatcccagggacgggggagcctggtgggctgccgtctatggggtcgcacagagtcggtcacgactgaagcgacttagcagcagcagcagcagcaagcgcccactgcagtgctgttctcaatgaaacttcaggccacagagaagcttttcactttctacttttcttcttattgctatgtaagtgactagttcttcattcccctgctcttcaaattcacccctaattactctaaattcctacttaactttttatagtgtttttaaatgtttactttataattccctggaaatcatggctttctcttaaacttttcaattaaaatctgtaagaagcgtttaatgatgacctccccccaaaaaatggtttgagaagccctacaataatatcaatagatataagatgagcaactacaaattctacatttgagcctgtgagatctcccaagttcataagatgtatctcatccaagaaatataaattttccaaataaattcatggtctagtggtaaaatgtcttggatgttaaaaagtgcacattttgttcatttttcattagggtgaaatggtctgccaaactaataaaattgggctggactttgctcaaaagatattttcacattccaataagggaacagactgaagctaatgaaaattttgcccaaccaaggactctctagtttcatatccagaccctacaccttctgctctcagctttgctccagtaaatccttgggaaggtgaacacaaactgaaccttgtcatttgcctggatgctttttctcctctgtaagcattttcaaattcaaaataagctcaatttacaggaagttggaaatcattctgtttgctccacacattcaagggatgtgcatacaaatatttactggacatgaaaatgtaatgtcctaacacaaaccatctgacttcaggaatttggatacatacagcaataattaaccacagatgaaaattttacactctcagagttccacattttgaacttggtcatgccctgcaggggtaggtgctcactaggggactgtcgggttttgg

SEQ ID NO: 55712 - DNA, 772 bp, Bovine  19866881523770
  misc_feature (1)..(1): n is a, c, g, or t
ntggtttgctaaatgaatttccttctacatggaggcccattaaatcctatgacctcgaattaaaagcaatgaagacaaagccaacatgataaattggagattataaaatatgactgtttctgggccttgactccttcacttaaaaggactgcaaagattgcatcagtcccctactcatgtgagatggctcagatctcctacagcactctcctcccaagatacatggaagaaataatgaatctgattatcttttcaggttcctatcatgccacatatttacacgggcttatctggtcgaaggaaagcgtgtggtacatatcttcactccaatagctatgagaagtccctatatgctaatacaataaaggaaacatttaaaaagcttgacacttgttaatctgagaatagtgctctgcatggaattcaaacttattatacatgaattcatgtacaaggctcctttatgggctaccatttgcaggcatgccatggtctcacatgcaacaaggatttaaatttgaatcttcaaattctgcctataaataaataggaaaagctatatctggggtgtttctataagtatcattttatcttcccaattatatcattctcttttatgtactccaaagaaaattaaggttacattcttgtgtgattttccagctaaagtggttgtgattaaaggcagacaactaatctaatatgagctctacacatgggagattcccaccttcaggcatttgtcaatccttaagctacacaggaaaataga

SEQ ID NO: 55713 - DNA, 757 bp, Bovine  19866881540796
  misc_feature (1)..(1): n is a, c, g, or t
ntggaaatctatgaggtcactgagctcagaccccattcagggcagcacagggctgcaattatgccatccaagacagacaggcacttgtctgttttctaaggcatccaggggaaacaatttgcaaacactctgattaccgtaatctagatctcagaactttgctgactagaaagttaccttgtgcaactgaagcccgttctccttgtgctcccaggagattatgggaaatagctggtcattacacagataacgaaaataatttctgaaatggtgccacaactagttcaagtgtgaaaaaataatcaattgttttatcaagtcagtaatctcccacaattatttgacaaaatttttttccctgattttcttatttaagactgtgtttatactatactgagcattggctcagtccatacaactaattcaaaacataaatttttcttagctttatgtaaacatgtagaatttattgttattattattccatagaccaaataactgaatcatgacaattcattgtaagatattcctgttgctaattctaaatcatttaagttttcctaattatcatagtaataaagtgatctaactttttaaaactaagtctttgatcacaataacaacaatggaacaatatatggctacttggtctggctagttttgcagtagtctttgatccttttctcaagatatcttacctaagctttcccacattcaagtaatgcaacctcctcagttacatcttaagaggaaagga

SEQ ID NO: 55714 - DNA, 794 bp, Bovine  19866881553776
  misc_feature (1)..(1): n is a, c, g, or t
ntgggacttttgttctttccgattgttttgtgaagaatatgctgccaaaacccgtttttttgttttgttttgtttgttttttaatttaactgcttcttttgaaaggcctttatttttcttccatggaagtttattatcctctcatttcttctcttatttgttttttgaattatgtaccccaacgtctagataactgggaccattagttttcgtatttcccagatgatagttttatagttcattctgcaggtttattcagagcactccagtgaaatttaatccccagatcacctttgtttgattctaagaaactggatgtgtttcttcatagttcacctgtcccgtgttctgaaatcaccttttgttcatgtgtagttgctcagctgtgatcaactgatgctttgttgggcattgtgcatttttctgttttgtttaaaaatggaaaaaatacaacatgtattaagaacaattatgacacaataaaacatgaagcatggagggatagtaaaagagtttcatcctgacactgaatatttaaataattttcaactttaagtcattcgctttttttaaaaattgaattgcagttgatttacaatgttgtattcctttcaggtgtacagccaagtgattcagttatatatagattctttttcagatgcttttccattatagtttattacaaactattgaatatagttccctattctatacagtaggtccttgatgtttatctattttatagatagtctgtatctgttaatcttaaattcctgatttatccctcttcccat

SEQ ID NO: 55715 - DNA, 986 bp, Bovine  19866881795293
  misc_feature (1)..(1): n is a, c, g, or t
ncaaaactaggattttgcctttcctcttctttgtcctcattagtcatgcccagtgttctaagtaactgctctcagcatggcccaaatcaggggtgagatctcctgagttccagtcctagttcctctttttttcagggaaatccaagcttagatgccaggttggctctggaaagggtactgaaggcctggcagggagtggtggtgagagatgaggaccacctaatggcatttttcttgtgtaatttgagacactcccttggttttctaggcccaagtgtggctgaaccatatcagcctttgctctttcctgtgctaattagtgttgctttctatcagagaagccggcggagctgactttgcagttccttccgtagtatatcatcactcttgccagttttctccagatgatttttcttcagctcagtaattagttatgtttgtagaaaatggtttgggatgttgagatcagagagatggcctttgtccatggtctggaaagtctgctttcctgctagttcaaagatgaggaggaaagaaatgttgagcagctttgaccttggtttcatagattcagattcattgtggctgcatcagttattttcctaagtaataaagccacgcaggcatcctctttatatcttcttcttttaaaagcttctaggtttgcttataaaataataaatcctataaatatacaaatcatgctatacttgggatgtaagtggatatgctagcttacttcactgcagcctatttatcatgctgctaactcctggagtagtttaaaaatattccagtagtcctagctagattgtgctatcaatgtctcactgattaaaaatattgcatttaaaatccatacatttctcatattgtaattatttggttatgtcctatgctaccagtgtggtttcccagatggtgctagtggtaaagaacctgcctgctaatgcaggagatgtgagagacacgggttcaatctctgt

SEQ ID NO: 55716 - DNA, 695 bp, Bovine  19866881895242
  misc_feature (1)..(1): n is a, c, g, or t
ngagtccctcttctgggccgttccctgcactctcactctcactgcatacttttggatggtataaaggggaaaaaatggcatgagaagcctttatttaaaaaataataataataaaggatcaaatataactgactactctcctcctccaacatgaaattactgtgccctgaaaatgtgcttattccacaagacctagaaacaacataaatctgctctgacctggcagtcaggtcttagaagacaagcaaataacaaaactctttttcactgggcacctgtagcaatgatgcatgaaggtagtacttttgtttcttgaggcaatcttagaaacatggttttaaaatatcatttttctcccgacagcattaatcctaaaacataaattctgatttcagctctcttctctctgacactaatcctgggcccagcatggaccattccttaaatttataacatatgaagcaacagaaaccaaccttaatcctctgctccaagtttctaaagaaatgtaacatcttgattgattgaaatactttctcattttggagagtggtgttcacctctgcgtgattcctgttgagagaaagctcttgtgaaatttcttttctcccattagtaacccttttcctacatacctaggtgtgtttcctacccctagataaatttatgttcaaatgtaaaatgcttctgcagca

SEQ ID NO: 55717 - DNA, 1090 bp, Bovine  19866880736608
  misc_feature (1)..(1): n is a, c, g, or t
ntagcctgcaaatttacctaatcatagatgagtcttcaaccaattcaaaggtaatttatactaagttaccactgatagcgccttcaatttaagaaattatttatgatttagggaattacataatttgggttttttgcatgagaaataataagcttaccatgtattgtatgtgtagaaatgaatctgggatagatgaaaacaatgattttaatggcagccttttcagtaggtttttttttttttttttagtagaattttaaatgtgatattttagttcaaataatgatatatttttctgttttgtaatataactttgttcatagagaaaaactcaatacacttttgtatgtacttcagggcataatgttatcaatattctttaagcacagtgtaatctactcagccagtaatacatagtcataatactcagcatgtctgatatatataatgctgttcagtatatattattttataaatatcatgtatataaccttgtttataaaggcttatcaaagtaactaagtaacaaagtaagagtaactaatagatatatatcctcatccagccttgtagtgagtaggccaaatcatacttgtgtcttaattagatagataaagggacagaatgttctctaatttaaagactgtactctccatggtggggagaaagatcttgcaccaggcaattaggcatatttccattgctgcaatggctcaaaaaattgatctcaggcactagtaaaatgaaagttcttcaacataaacattggttatgggtgatgcagagaataaaagctacataatgtccatatttatcttccaaaaagttctgtagtttttctacaatacagagaaattattttttttttaagtcttttgttttcacactttactatgagtatgaagtctaattataatattgtctctttttctatttgatgggggtcagttttcatattatgactttcacacctgtactagctaagattaaacaatcatgtcatctgagaccacccatcaactaaactgtgaaaattaatttcaatttcacctaaactcaaccccatgctgcttttctattactcccatac

SEQ ID NO: 55718 - DNA, 2034 bp, Bovine  19866880755317
  misc_feature (1)..(1): n is a, c, g, or t
natgtgtttcttattatcaccatgtcttagttagctcaggctactataataaaataccaaagactgggtggttcaaacaaccagtcatttatttctcagttatagaggtcaggcagcataagatcaatgtgtttgatggtttgatttcttgtggaaccctcttggcttggactgctgccttctcagtatgtccttctagggtggagacagatagacagagacagagagacctggtctctcaacctcttcttataagggtaagaatcccatcatggagatttcactgtcatgtaaacctaattaactcctcccaactccaaatgccatcacactgaattgaggagggggactcaaacattcagtcataacaaaatggatattcaatgtgtcagagcataaatagaatctttcaaattttcagttcaatctctttttataatcaaaaccacatagagaatctagtagataaataacagatcacctcttcctttactacaactctcttgcaaaaaaaaaagaatgtttattgtcattaaatatttactaactaaatggaggcatataagaatgaaattgtgaattcatgaatgaataaaaagatagatgatgccatttaggcttgaagttaaatagaaatgattcaactaaaatttatttttaatcatgaattatgaaggcaggagaagaaggggacgacagaggatgagatagttggatggcatcaccaatgtgatggacatgagtttgagtaggctccgggagttggtgatggacagggaagcctggcctgctgcagtccatggggttgcaaagagttggacatgactgagcaactgaactgaggctgataaatgctacttataggaattgttttatttattcatattttaaacaacatattttattatattacacacatataccacatctctgcaaatattatcttctcatatttgtgcaggttttttttcctattgggtgaattagcttccttcaacctcaatactaaaacctaacttgttcacatcgtcctgcacatcaacttgtcaagttttaaaatgttatcctattctccgaggtgccaacaaactcattcaaattaatgttgtcagttatttaatgaataagctttctactctagcatcctcaaaagctgaatacacttgtcatagcaaacttggacctgaacaataaaataataacctttgttccatacaaaacaagtgtgaaggtgacatctataattcgtatagcctgattattatttccagtagataaaacagatatatgttgagccaagctcagtctcactaagacctcattttctgaatttttgtgacctgtgtgtctctggtccactcaggaactgagtatttgagattctcccatatttacttagctaagtggatgtatctatatgatatttaaggcacttaacaaacatatataatcagcacttagtttaccaaaatggattcaagttaatggtctaaaagaataaaagtgttagaaaagagttcttggatgttatagtatattatacaaaagtacaaaaatatatttcatgtaaaaatattacatataattgccattgtataaatgtacagtcatcataccctagaaatagttcagaattatactataggttgaaagattaaaaatattggtacaagttataaaatagaggcctgaccataccttaatatgcttactattcttaaactagagaggaattaaaaaaaaaaaaaaaaaaaacttaggagaagaaatattgatgcttcaaaacttatcaaaagaaaaaaatattctgtaacaagcttccttcagaattcttaataaaaaagaaaattatgccattgaagaagatattttttatgaaagaaaaattttaagtaatgaaaggaagaattttttatctctgtaatttagaagattttttgaaagcaaccataccaggacagatatgcatatgaataaagcaaattattaagataaatgatccttcatctgtgagaagattaagctaaatgatct

SEQ ID NO: 55719 - DNA, 799 bp, Bovine  19866880789290
  misc_feature (1)..(1): n is a, c, g, or t
nttgaaatgcaatctgaaaaattaaatagatcaacaacctctcaatcacacatatacatatcacacactagggattttgaactactcttatgtcaaaaataacatatatttttaagactccatgaaccacttaaactttgatagaaactcattaacaatgtaaattcaaacatgctctttttagccaaaggttaaaccttggaggaaaatgtcaacaaagaatcctgttgataaataataatatttgtaatgcacagtgaatgaagtatcatcaagcaaagcaaggcatctctttcaaaagtcattttgaaatatgttagcaggtgaaatattttcatttcaactgcagacttaacattacattcactttgtacaacagcatccaaagctcatttgatctggctgatgattcagaggcaggagctaagcctgggctctgtttattattctctgcaaattttatattactttgtgatactctggaaacaaaacaattattattcatctcccacagggaaagccaagttgtatataatgctgtagccagtcagctctgtttctacagtagtgttatataaggagaagagttttcttgcaattttgtcaaggaaagaaaaacaatcagaatgcatttcaagttcaaaatccttcaaatctgtcccaccagcatctattacatcttgatatcatattttaatgcagtaggaattcagagaaaattagcctgtcctgctaaaaaaagaaaaatactacagaaagattctttggtttaactttaccttttcagaaatagataaga

SEQ ID NO: 55720 - DNA, 1276 bp, Bovine  19866880813306
  misc_feature (1)..(1): n is a, c, g, or t
nccctgttgtaaaaaagatttgtatcataaaaaggtttgaacaaatgcataaagccatgaatccaacctactattataggatcatacagaatagtttcaccacaaaagttatttttactcaatgaacaatattcttaaagaaaactttacttaatatttatcagggcccttgaaaattatcaccatctgattgaatttttgttattctttatttgatgatagtgattgaaaaacaatgctacactattattaatgtaattagtattaaatttattatcatcattattaaggtaaattctatctgagctaattagaacactaggattttgcagtgaatttttggacaatgataacaggaaatatactgattttcaatgtttcaataaagtgttataaatcaaaatctttacaacaccaaggaaaagcttgtatataacttgttctggaaatattccctcacataatgtttgaaatcactgcacaatcagtttgtagcttggggatattctgaacacaatgtttgtttgaataatacttttattagttttgagtaagtctttgtgctgaccatgagttcatgagacttgtgaacagcattatgctttgcaagcaactgaagcaaaaaatgcttatttattgtatcagtatagtaagtaataaaataactgatttgtaaaatagtttggagaaaaagcaataaaatgttatctctaaatcttaggctactaaataagcacaattagttctataactcaaaattcagagtgttatagtcttgggacttaatgtttgaaaagcaaacaaacaaaaatccatctcctttttaaaaatttgtcactcagagaagcctccattgcaatatcaatatttctacataagtcacaatgcccgctttcattttgttgcaccctaaacttttaccttaaaatgtatctaaaggcctatgtctcaaataaatgatatagtaatttattattatttattgaaatagaaataaaacgtacatagtaaaattaaatataaatataataatgtattattacacattaaattcaaatttataatgaatgattttaaatgttggtgcctttgtagttaaccaatgtttattatttttatacttatacattacttagtatgtattagtatattagtatgagaaatatttttttaatttaatttaatttaattttttaactttacaatattggatttggttttgccatatatcaaaatgaatccactacaggtatacatgtgttcccatcctgaatat
